United States Patent Application Publication US 2023/0212319 A1 - sequence listing, part 3

SEQ ID NO: 3345 - DNA, 2706 bp, Artificial Sequence
  Synthetic Polynucloetide
atggccttaccagtgaccgccttgctcctgccgctggccttgctgctccacgccgccaggccggaagtgcagctggttgaatctggcggaggactggttcagcctggcggatctctgagactgtcttgtgccgccagcggcttcagcttcagcgacttttggatgagctgggtccgacaggcccctggcaaaggacttgaatgggtcgccacaatcagccaggccggcagcgagaaggactacgtggactctgtgaagggcagattcaccatcagccgggacaacgccaagaagtccctgtacctccagatgaacagcctgagagccgaggacaccgccgtgtactattgtgcctctggcgtgtacagcttcgactacagaggccagggcaccctggtcacagtctcttctggtaccggcggaggcggatctggcggcggaggtagcggtggcggaggatctgaattcgacatcgtgatgacccagagccccgatagcctggccgtgtctctgggagagagagccaccatcaactgcaagagcagccagagcatcctgtacagcagcaaccagaagaactacctggcctggtatcagcagaagcccggccagagccctaagctgctgatctactgggccagcaccagagaaagcggcgtgcccgatagattcagcggcagcggctctggcaccgacttcaccctgaccatcagttctcttcaggccgaggacgtggccgtgtactactgccaccagtacatcagctcctacaccttcggccagggcaccaagctggaaatcaagctcgagggacagcctaaggccaatcctaccgtgacactgttccctccaagcagcgaagaactccaggccaacaaggccacacttgtgtgcctgatctccgacttctaccctggggctgtgacagtggcttggaaggccgatggatctcctgtgaaagccggcgtggaaaccaccaagccatccaagcagagcaacaacaaatacgccgccagctcctacctgagcctgacacctgagcagtggaagtcccacagatcctacagctgccaagtgacccacgaaggcagcaccgtggaaaagacagtggcccctacagagtgcagcggcagagccgattgcggctttaccagcgagagctaccagcagggcgtgctgagcgccaccatcctgtacgagatcctgctgggcaaggccaccctgtacgccgtgctggtgtctgccctggtgctgatggctatggtcaagcggaaggacagccggggacgcgccaagagaagcggatctggcgtgaagcagaccctgaatttcgacctgctgaagctggctggcgacgtggaatccaacccaggccctactagtatggactggatttggcgcatccttttccttgtcggcgctgctaccggcgcgcattccgggccccagctccagctgcaagagtctggacctggcctggtcaagcctagcgagacactgagcctgacctgtaccgtgtccggcgatagcatcagcagcggcgattactactggggctggatcagacagcctcctggcaaaggactggaatggatcggccacatctactacagcggcgtgacctactacaaccccagcctgaagtccagagtgaccatcagcgtggacaccagccggaaccagttctccctgaagctgtctagcgtgacagccgccgataccgccgtgtactactgcaccagagaggacagcagcaactggcggagtagaggccagggaacactggtcacagttagctctggatccggcggaggcggaagtggaggcggaggatctggcggcggaggctctttcgaacaggtgcagctggtgcagtctggcgctgaagtgaagaaacctggggccagcgtgaaggtgtcctgcaaggccagcggctacacctttgccagccagtggatgcactggatgagacaggcccctggacagggcctggaatggatcggctggatcaaccccggcaacgtgaacaccaagtacaacgagaagttcaagggcagagccaccctgacagtggacaccagcaccaacaccgcctacatggaactgagcagcctgcggagcgaggacaccgccgtgtattattgcgccagaagcacctggtacagacccctggattattggggccagggaacccttgtgaccgtgtcctctacgcgtgcctctacaaagggaccctccgtgtttcctctggctcccagcagcaagtctacaagcggaggaacagccgctctgggctgcctggtcaaggattactttcccgagcctgtgaccgtgtcctggaatagcggagcactgacaagcggcgtgcacacctttccagccgtgctgcaaagcagcggcctgtactctctgagcagcgtggtcacagtgcctagctctagcctgggcacccagacctacatctgcaatgtgaaccacaagcctagcaacaccaaggtggacaagagagtggaacccaagagctgtatccccgaggacacattcttcccaagccccgagagcagctgcgacgtgaagctggtggaaaagagcttcgagacagacaccaacctgaacttccagaacctgagcgtgatcggcttcagaatcctgctgctgaaagtggccggctttaacctgctgatgaccctgcggctgtggtccagc

SEQ ID NO: 3346 - DNA, 2706 bp, Artificial Sequence
  Synthetic Polynucloetide
atggccttaccagtgaccgccttgctcctgccgctggccttgctgctccacgccgccaggccggaagtgcagctggttgaatctggcggaggactggttcagcctggcggatctctgagactgtcttgtgccgccagcggcttcagcttcagcgacttttggatgagctgggtccgacaggcccctggcaaaggacttgaatgggtcgccacaatcagccaggccggcagcgagaaggactacgtggactctgtgaagggcagattcaccatcagccgggacaacgccaagaagtccctgtacctccagatgaacagcctgagagccgaggacaccgccgtgtactattgtgcctctggcgtgtacagcttcgactacagaggccagggcaccctggtcacagtctcttctggtaccggcggaggcggatctggcggcggaggtagcggtggcggaggatctgaattcgaccacatcgtgctgacccagagccctagcagcctgtctgccagcctgggcgacagagtgaccatcagctgtagagccagccaggacatcagcacctacctgaactggtatcagcagaaacccgacggcaccgtgaagctgctgatcttctacaccagcagactgcacgccggggtgcccagcagattttctggcagcggctctggcacccaccacagcctgaccatctccaacctggaacaggaagatattgctacctacttctgtcagcaaggcaacagcctgcccttcaccttcggcagcggcaccaagctggaaatcaagagactcgagggacagcctaaggccaatcctaccgtgacactgttccctccaagcagcgaagaactccaggccaacaaggccacacttgtgtgcctgatctccgacttctaccctggggctgtgacagtggcttggaaggccgatggatctcctgtgaaagccggcgtggaaaccaccaagccatccaagcagagcaacaacaaatacgccgccagctcctacctgagcctgacacctgagcagtggaagtcccacagatcctacagctgccaagtgacccacgaaggcagcaccgtggaaaagacagtggcccctacagagtgcagcggcagagccgattgcggctttaccagcgagagctaccagcagggcgtgctgagcgccaccatcctgtacgagatcctgctgggcaaggccaccctgtacgccgtgctggtgtctgccctggtgctgatggctatggtcaagcggaaggacagccggggacgcgccaagagaagcggatctggcgtgaagcagaccctgaatttcgacctgctgaagctggctggcgacgtggaatccaacccaggccctactagtatggactggatttggcgcatccttttccttgtcggcgctgctaccggcgcgcattccgggccccagctccagctgcaagagtctggacctggcctggtcaagcctagcgagacactgagcctgacctgtaccgtgtccggcgatagcatcagcagcggcgattactactggggctggatcagacagcctcctggcaaaggactggaatggatcggccacatctactacagcggcgtgacctactacaaccccagcctgaagtccagagtgaccatcagcgtggacaccagccggaaccagttctccctgaagctgtctagcgtgacagccgccgataccgccgtgtactactgcaccagagaggacagcagcaactggcggagtagaggccagggaacactggtcacagttagctctggatccggcggaggcggaagtggaggcggaggatctggcggcggaggctctttcgaacaggtgcagctgaaagagagcggccctgagctggaaaagcctggggccagcgtgaagattagctgcaaggccagcggctacagcttcaccgcctacagcatgaactgggtcaagcagaacaacggcatgagcctggaatggatcggcagcatcgacccctactacggcgacaccaaatacgcccagaagttcaagggcaaggccaccctgaccgtggataaggccagcagcaccgcctacctccagctgaagtctctgaccagcgaggacagcgccgtgtactactgcgccagacggatgattaccaccggcgactggtacttcgacgtgtggggagccggaaccaccgtgacagtgtctagcacgcgtgcctctacaaagggaccctccgtgtttcctctggctcccagcagcaagtctacaagcggaggaacagccgctctgggctgcctggtcaaggattactttcccgagcctgtgaccgtgtcctggaatagcggagcactgacaagcggcgtgcacacctttccagccgtgctgcaaagcagcggcctgtactctctgagcagcgtggtcacagtgcctagctctagcctgggcacccagacctacatctgcaatgtgaaccacaagcctagcaacaccaaggtggacaagagagtggaacccaagagctgtatccccgaggacacattcttcccaagccccgagagcagctgcgacgtgaagctggtggaaaagagcttcgagacagacaccaacctgaacttccagaacctgagcgtgatcggcttcagaatcctgctgctgaaagtggccggctttaacctgctgatgaccctgcggctgtggtccagc

SEQ ID NO: 3347 - DNA, 2706 bp, Artificial Sequence; identical to SEQ ID NO: 3346
  Synthetic Polynucloetide

SEQ ID NO: 3348 - DNA, 2706 bp, Artificial Sequence
  Synthetic Polynucloetide
atggccttaccagtgaccgccttgctcctgccgctggccttgctgctccacgccgccaggccggaagtgcagctggttgaatctggcggaggactggttcagcctggcggatctctgagactgtcttgtgccgccagcggcttcagcttcagcgacttttggatgagctgggtccgacaggcccctggcaaaggacttgaatgggtcgccacaatcagccaggccggcagcgagaaggactacgtggactctgtgaagggcagattcaccatcagccgggacaacgccaagaagtccctgtacctccagatgaacagcctgagagccgaggacaccgccgtgtactattgtgcctctggcgtgtacagcttcgactacagaggccagggcaccctggtcacagtctcttctggtaccggcggaggcggatctggcggcggaggtagcggtggcggaggatctgaattcgacgagatcgtgctgacacagagccctgccaccctgtctctgagccctggcgaaagagccaccctgagctgtagagccagccagagcgtgtccagctacctggcctggtatcagcagaagcccggccaggctccccggctgctgatctacgatgccagcaatagagccaccggcatccccgccagattttccggctctggcagcggcaccgacttcaccctgaccatcagctccctggaacccgaggacttcgccgtgtactactgccagcagcggagcaactggcccatcacattcggccagggcacccggctggaaatcaaactcgagggacagcctaaggccaatcctaccgtgacactgttccctccaagcagcgaagaactccaggccaacaaggccacacttgtgtgcctgatctccgacttctaccctggggctgtgacagtggcttggaaggccgatggatctcctgtgaaagccggcgtggaaaccaccaagccatccaagcagagcaacaacaaatacgccgccagctcctacctgagcctgacacctgagcagtggaagtcccacagatcctacagctgccaagtgacccacgaaggcagcaccgtggaaaagacagtggcccctacagagtgcagcggcagagccgattgcggctttaccagcgagagctaccagcagggcgtgctgagcgccaccatcctgtacgagatcctgctgggcaaggccaccctgtacgccgtgctggtgtctgccctggtgctgatggctatggtcaagcggaaggacagccggggacgcgccaagagaagcggatctggcgtgaagcagaccctgaatttcgacctgctgaagctggctggcgacgtggaatccaacccaggccctactagtatggactggatttggcgcatccttttccttgtcggcgctgctaccggcgcgcattccgggccccagctccagctgcaagagtctggacctggcctggtcaagcctagcgagacactgagcctgacctgtaccgtgtccggcgatagcatcagcagcggcgattactactggggctggatcagacagcctcctggcaaaggactggaatggatcggccacatctactacagcggcgtgacctactacaaccccagcctgaagtccagagtgaccatcagcgtggacaccagccggaaccagttctccctgaagctgtctagcgtgacagccgccgataccgccgtgtactactgcaccagagaggacagcagcaactggcggagtagaggccagggaacactggtcacagttagctctggatccggcggaggcggaagtggaggcggaggatctggcggcggaggctctttcgaagaagtgcagctggtggaatcaggcggcggactggtgcagcctggcagaagcctgagactgagctgtgccgccagcggcttcaccttcaacgactacgccatgcactgggtgcgccaggcccctggaaaaggactggaatgggtgtccacaatcagctggaacagcggcagcatcggctacgccgatagcgtgaagggccggttcaccatcagccgggacaacgccaagaagtccctgtacctccagatgaacagcctgcgggccgaggacacagccctgtactattgcgccaaggacatccagtacggcaactactactacggcatggacgtgtggggccagggaaccaccgtgaccgtgtcatctacgcgtgcctctacaaagggaccctccgtgtttcctctggctcccagcagcaagtctacaagcggaggaacagccgctctgggctgcctggtcaaggattactttcccgagcctgtgaccgtgtcctggaatagcggagcactgacaagcggcgtgcacacctttccagccgtgctgcaaagcagcggcctgtactctctgagcagcgtggtcacagtgcctagctctagcctgggcacccagacctacatctgcaatgtgaaccacaagcctagcaacaccaaggtggacaagagagtggaacccaagagctgtatccccgaggacacattcttcccaagccccgagagcagctgcgacgtgaagctggtggaaaagagcttcgagacagacaccaacctgaacttccagaacctgagcgtgatcggcttcagaatcctgctgctgaaagtggccggctttaacctgctgatgaccctgcggctgtggtccagc

SEQ ID NO: 3349 - DNA, 2712 bp, Artificial Sequence
  Synthetic Polynucloetide
atggccttaccagtgaccgccttgctcctgccgctggccttgctgctccacgccgccaggccggaagtgcagctggttgaatctggcggaggactggttcagcctggcggatctctgagactgtcttgtgccgccagcggcttcagcttcagcgacttttggatgagctgggtccgacaggcccctggcaaaggacttgaatgggtcgccacaatcagccaggccggcagcgagaaggactacgtggactctgtgaagggcagattcaccatcagccgggacaacgccaagaagtccctgtacctccagatgaacagcctgagagccgaggacaccgccgtgtactattgtgcctctggcgtgtacagcttcgactacagaggccagggcaccctggtcacagtctcttctggtaccggcggaggcggatctggcggcggaggtagcggtggcggaggatctgaattcgacatcgtgatgacccagacccccctgagcctgcctgtgacacctggcgagcctgccagcatctcctgcagaagcagcaagagcctgctgcacagcaacggcatcacctacctgtactggtatctgcagaaacccggccagagcccccaactgctgatctaccagatgagcaacctggtgtccggcgtgcccgacagattttctggcagcggctccggcaccgacttcaccctgaagatcagccgggtggaagccgaggacgtgggcgtgtactactgcgcccagaacctggaactgccctacacctttggcggcggaacaaaggtggaaatcaagcggctcgagggacagcctaaggccaatcctaccgtgacactgttccctccaagcagcgaagaactccaggccaacaaggccacacttgtgtgcctgatctccgacttctaccctggggctgtgacagtggcttggaaggccgatggatctcctgtgaaagccggcgtggaaaccaccaagccatccaagcagagcaacaacaaatacgccgccagctcctacctgagcctgacacctgagcagtggaagtcccacagatcctacagctgccaagtgacccacgaaggcagcaccgtggaaaagacagtggcccctacagagtgcagcggcagagccgattgcggctttaccagcgagagctaccagcagggcgtgctgagcgccaccatcctgtacgagatcctgctgggcaaggccaccctgtacgccgtgctggtgtctgccctggtgctgatggctatggtcaagcggaaggacagccggggacgcgccaagagaagcggatctggcgtgaagcagaccctgaatttcgacctgctgaagctggctggcgacgtggaatccaacccaggccctactagtatggactggatttggcgcatccttttccttgtcggcgctgctaccggcgcgcattccgggccccagctccagctgcaagagtctggacctggcctggtcaagcctagcgagacactgagcctgacctgtaccgtgtccggcgatagcatcagcagcggcgattactactggggctggatcagacagcctcctggcaaaggactggaatggatcggccacatctactacagcggcgtgacctactacaaccccagcctgaagtccagagtgaccatcagcgtggacaccagccggaaccagttctccctgaagctgtctagcgtgacagccgccgataccgccgtgtactactgcaccagagaggacagcagcaactggcggagtagaggccagggaacactggtcacagttagctctggatccggcggaggcggaagtggaggcggaggatctggcggcggaggctctttcgaacaggtgcaactggtgcagagcggagccgaagtgaaaaagcccggcagcagcgtgaaggtgtcctgcaaggccagcggctacgccttcagctactcctggatcaactgggtgcgccaggcccctggacagggcctggaatggatgggcagaatcttccccggcgacggcgacaccgactacaacggcaagttcaagggcagagtgaccatcaccgccgacaagagcaccagcaccgcctacatggaactgagcagcctgcggagcgaggataccgccgtgtactattgtgccagaaacgtgttcgacggctactggctggtgtactggggccagggaacacttgtgaccgtgtccagcacgcgtgcctctacaaagggaccctccgtgtttcctctggctcccagcagcaagtctacaagcggaggaacagccgctctgggctgcctggtcaaggattactttcccgagcctgtgaccgtgtcctggaatagcggagcactgacaagcggcgtgcacacctttccagccgtgctgcaaagcagcggcctgtactctctgagcagcgtggtcacagtgcctagctctagcctgggcacccagacctacatctgcaatgtgaaccacaagcctagcaacaccaaggtggacaagagagtggaacccaagagctgtatccccgaggacacattcttcccaagccccgagagcagctgcgacgtgaagctggtggaaaagagcttcgagacagacaccaacctgaacttccagaacctgagcgtgatcggcttcagaatcctgctgctgaaagtggccggctttaacctgctgatgaccctgcggctgtggtccagc

SEQ ID NO: 3350 - DNA, 2715 bp, Artificial Sequence
  Synthetic Polynucloetide
atggccttaccagtgaccgccttgctcctgccgctggccttgctgctccacgccgccaggccggaagtgcagctggttgaatctggcggaggactggttcagcctggcggatctctgagactgtcttgtgccgccagcggcttcagcttcagcgacttttggatgagctgggtccgacaggcccctggcaaaggacttgaatgggtcgccacaatcagccaggccggcagcgagaaggactacgtggactctgtgaagggcagattcaccatcagccgggacaacgccaagaagtccctgtacctccagatgaacagcctgagagccgaggacaccgccgtgtactattgtgcctctggcgtgtacagcttcgactacagaggccagggcaccctggtcacagtctcttctggtaccggcggaggcggatctggcggcggaggtagcggtggcggaggatctgaattcgacatccagatgacccagagccccagcagcctgtctgccagcgtgggcgacagagtgaccatcacctgtcggagcagccagagcatcgtgcactccgtgggcaacaccttcctggaatggtatcagcagaagcccggcaaggcccccaagctgctgatctacaaggtgtccaacagattcagcggcgtgcccagcaggtttagcggctctggcagcggcaccgacttcaccctgaccatctctagcctccagcccgaggacttcgccacctactactgttttcaaggcagccagttcccctacaccttcggccagggaacaaaggtggaaatcaagcggctcgagggacagcctaaggccaatcctaccgtgacactgttccctccaagcagcgaagaactccaggccaacaaggccacacttgtgtgcctgatctccgacttctaccctggggctgtgacagtggcttggaaggccgatggatctcctgtgaaagccggcgtggaaaccaccaagccatccaagcagagcaacaacaaatacgccgccagctcctacctgagcctgacacctgagcagtggaagtcccacagatcctacagctgccaagtgacccacgaaggcagcaccgtggaaaagacagtggcccctacagagtgcagcggcagagccgattgcggctttaccagcgagagctaccagcagggcgtgctgagcgccaccatcctgtacgagatcctgctgggcaaggccaccctgtacgccgtgctggtgtctgccctggtgctgatggctatggtcaagcggaaggacagccggggacgcgccaagagaagcggatctggcgtgaagcagaccctgaatttcgacctgctgaagctggctggcgacgtggaatccaacccaggccctactagtatggactggatttggcgcatccttttccttgtcggcgctgctaccggcgcgcattccgggccccagctccagctgcaagagtctggacctggcctggtcaagcctagcgagacactgagcctgacctgtaccgtgtccggcgatagcatcagcagcggcgattactactggggctggatcagacagcctcctggcaaaggactggaatggatcggccacatctactacagcggcgtgacctactacaaccccagcctgaagtccagagtgaccatcagcgtggacaccagccggaaccagttctccctgaagctgtctagcgtgacagccgccgataccgccgtgtactactgcaccagagaggacagcagcaactggcggagtagaggccagggaacactggtcacagttagctctggatccggcggaggcggaagtggaggcggaggatctggcggcggaggctctttcgaagaagtgcaactggtggaaagcggaggcggcctggtgcagcctggcggatctctgagactgagctgtgccgccagcggctacgagttcagccggtcctggatgaactgggtgcgccaggcccctggcaagggactggaatgggtgggaagaatctaccccggcgacggcgacaccaactacagcggcaagttcaagggccggttcaccatcagcgccgacaccagcaagaacaccgcctacctccagatgaacagcctgcgggccgaggataccgccgtgtactactgtgccagagatggcagctcctgggactggtacttcgacgtgtggggacagggaacccttgtgaccgtgtccagcacgcgtgcctctacaaagggaccctccgtgtttcctctggctcccagcagcaagtctacaagcggaggaacagccgctctgggctgcctggtcaaggattactttcccgagcctgtgaccgtgtcctggaatagcggagcactgacaagcggcgtgcacacctttccagccgtgctgcaaagcagcggcctgtactctctgagcagcgtggtcacagtgcctagctctagcctgggcacccagacctacatctgcaatgtgaaccacaagcctagcaacaccaaggtggacaagagagtggaacccaagagctgtatccccgaggacacattcttcccaagccccgagagcagctgcgacgtgaagctggtggaaaagagcttcgagacagacaccaacctgaacttccagaacctgagcgtgatcggcttcagaatcctgctgctgaaagtggccggctttaacctgctgatgaccctgcggctgtggtccagc

SEQ ID NO: 3351 - DNA, 2709 bp, Artificial Sequence
  Synthetic Polynucloetide
atggccttaccagtgaccgccttgctcctgccgctggccttgctgctccacgccgccaggccggaagtgcagctggttgaatctggcggaggactggttcagcctggcggatctctgagactgtcttgtgccgccagcggcttcagcttcagcgacttttggatgagctgggtccgacaggcccctggcaaaggacttgaatgggtcgccacaatcagccaggccggcagcgagaaggactacgtggactctgtgaagggcagattcaccatcagccgggacaacgccaagaagtccctgtacctccagatgaacagcctgagagccgaggacaccgccgtgtactattgtgcctctggcgtgtacagcttcgactacagaggccagggcaccctggtcacagtctcttctggtaccggcggaggcggatctggcggcggaggtagcggtggcggaggatctgaattcgacatccagatgacccagagccccagcagcctgtctgccagcgtgggcgacagagtgaccatcacctgtagagccagccagaccatctggtcctacctgaactggtatcagcagaggcccggcaaggcccccaacctgctgatctatgccgccagctctctccagagcggcgtgcccagcagattttccggcagaggcagcggcaccgacttcaccctgaccatcagttccttgcaggccgaggacttcgccacctactactgccagcagagctacagcatcccccagattttcggccagggcaccaagctggaaatcaagctcgagggacagcctaaggccaatcctaccgtgacactgttccctccaagcagcgaagaactccaggccaacaaggccacacttgtgtgcctgatctccgacttctaccctggggctgtgacagtggcttggaaggccgatggatctcctgtgaaagccggcgtggaaaccaccaagccatccaagcagagcaacaacaaatacgccgccagctcctacctgagcctgacacctgagcagtggaagtcccacagatcctacagctgccaagtgacccacgaaggcagcaccgtggaaaagacagtggcccctacagagtgcagcggcagagccgattgcggctttaccagcgagagctaccagcagggcgtgctgagcgccaccatcctgtacgagatcctgctgggcaaggccaccctgtacgccgtgctggtgtctgccctggtgctgatggctatggtcaagcggaaggacagccggggacgcgccaagagaagcggatctggcgtgaagcagaccctgaatttcgacctgctgaagctggctggcgacgtggaatccaacccaggccctactagtatggactggatttggcgcatccttttccttgtcggcgctgctaccggcgcgcattccgggccccagctccagctgcaagagtctggacctggcctggtcaagcctagcgagacactgagcctgacctgtaccgtgtccggcgatagcatcagcagcggcgattactactggggctggatcagacagcctcctggcaaaggactggaatggatcggccacatctactacagcggcgtgacctactacaaccccagcctgaagtccagagtgaccatcagcgtggacaccagccggaaccagttctccctgaagctgtctagcgtgacagccgccgataccgccgtgtactactgcaccagagaggacagcagcaactggcggagtagaggccagggaacactggtcacagttagctctggatccggcggaggcggaagtggaggcggaggatctggcggcggaggctctttcgaacaggtgcagctccagcagtctggacccggcctcgtgaagcctagccagacactgagcctgacctgcgccatcagcggcgatagcgtgtccagcaatagcgccgcctggaactggatcagacagtccccctctcggggcctggaatggctgggccggacctactaccgcagcaagtggtacaacgactacgccgtgtccgtgaagtcccggatcaccatcaaccccgacaccagcaagaaccagttctccttgcaactgaacagcgtgacccccgaggacaccgccgtgtactactgcgccagagaagtgaccggcgacctggaagatgccttcgacatctggggccagggaacaatggtcacagtgtccagcacgcgtgcctctacaaagggaccctccgtgtttcctctggctcccagcagcaagtctacaagcggaggaacagccgctctgggctgcctggtcaaggattactttcccgagcctgtgaccgtgtcctggaatagcggagcactgacaagcggcgtgcacacctttccagccgtgctgcaaagcagcggcctgtactctctgagcagcgtggtcacagtgcctagctctagcctgggcacccagacctacatctgcaatgtgaaccacaagcctagcaacaccaaggtggacaagagagtggaacccaagagctgtatccccgaggacacattcttcccaagccccgagagcagctgcgacgtgaagctggtggaaaagagcttcgagacagacaccaacctgaacttccagaacctgagcgtgatcggcttcagaatcctgctgctgaaagtggccggctttaacctgctgatgaccctgcggctgtggtccagc

SEQ ID NO: 3352 - DNA, 2688 bp, Artificial Sequence
  Synthetic Polynucloetide
atggccttaccagtgaccgccttgctcctgccgctggccttgctgctccacgccgccaggccggaagtgcagctggttgaatctggcggaggactggttcagcctggcggatctctgagactgtcttgtgccgccagcggcttcagcttcagcgacttttggatgagctgggtccgacaggcccctggcaaaggacttgaatgggtcgccacaatcagccaggccggcagcgagaaggactacgtggactctgtgaagggcagattcaccatcagccgggacaacgccaagaagtccctgtacctccagatgaacagcctgagagccgaggacaccgccgtgtactattgtgcctctggcgtgtacagcttcgactacagaggccagggcaccctggtcacagtctcttctggtaccggcggaggcggatctggcggcggaggtagcggtggcggaggatctgaattcgacatccagatgacccagagccccgccaccatcgagaacacaagcctgtctgccagcgtgggcgacagagtgaccatcacctgtagagccagccagggcatcagctcttggctgacctggtatcagcagaagcccgagaaggcccccaagagcctgatctacgccgccagctctctgcagtctggcgtgcccagcagattttccggcagcggctctggcaccgacttcaccctgacaatcagcagcctgcagcccgaggacttcgccacctactactgccagcagtacgacagctaccccatcaccttcggccagggcacccggctggaaatcaagctcgagggacagcctaaggccaatcctaccgtgacactgttccctccaagcagcgaagaactccaggccaacaaggccacacttgtgtgcctgatctccgacttctaccctggggctgtgacagtggcttggaaggccgatggatctcctgtgaaagccggcgtggaaaccaccaagccatccaagcagagcaacaacaaatacgccgccagctcctacctgagcctgacacctgagcagtggaagtcccacagatcctacagctgccaagtgacccacgaaggcagcaccgtggaaaagacagtggcccctacagagtgcagcggcagagccgattgcggctttaccagcgagagctaccagcagggcgtgctgagcgccaccatcctgtacgagatcctgctgggcaaggccaccctgtacgccgtgctggtgtctgccctggtgctgatggctatggtcaagcggaaggacagccggggacgcgccaagagaagcggatctggcgtgaagcagaccctgaatttcgacctgctgaagctggctggcgacgtggaatccaacccaggccctactagtatggactggatttggcgcatccttttccttgtcggcgctgctaccggcgcgcattccgggccccagctccagctgcaagagtctggacctggcctggtcaagcctagcgagacactgagcctgacctgtaccgtgtccggcgatagcatcagcagcggcgattactactggggctggatcagacagcctcctggcaaaggactggaatggatcggccacatctactacagcggcgtgacctactacaaccccagcctgaagtccagagtgaccatcagcgtggacaccagccggaaccagttctccctgaagctgtctagcgtgacagccgccgataccgccgtgtactactgcaccagagaggacagcagcaactggcggagtagaggccagggaacactggtcacagttagctctggatccggcggaggcggaagtggaggcggaggatctggcggcggaggctctttcgaacaggtgcaactgcagcagtggggagccggactgctgaagcctagcgagacactgagcctgacctgcgccgtgtacggcggcagcttcagcgcctactattggagctggatcagacagccccctggcaagggcctggaatggatcggcgacatcaatcacggcggaggcaccaactacaaccccagcctgaagtcccgcgtgaccatctccgtggacaccagcaagaaccagttctccctgaagctgaacagcgtgacagccgccgacacagccgtgtactactgtgccagcctgaccgcctattggggccagggatctcttgtgaccgtgtccagcacgcgtgcctctacaaagggaccctccgtgtttcctctggctcccagcagcaagtctacaagcggaggaacagccgctctgggctgcctggtcaaggattactttcccgagcctgtgaccgtgtcctggaatagcggagcactgacaagcggcgtgcacacctttccagccgtgctgcaaagcagcggcctgtactctctgagcagcgtggtcacagtgcctagctctagcctgggcacccagacctacatctgcaatgtgaaccacaagcctagcaacaccaaggtggacaagagagtggaacccaagagctgtatccccgaggacacattcttcccaagccccgagagcagctgcgacgtgaagctggtggaaaagagcttcgagacagacaccaacctgaacttccagaacctgagcgtgatcggcttcagaatcctgctgctgaaagtggccggctttaacctgctgatgaccctgcggctgtggtccagc

SEQ ID NO: 3353 - DNA, 2703 bp, Artificial Sequence
  Synthetic Polynucloetide
atggccttaccagtgaccgccttgctcctgccgctggccttgctgctccacgccgccaggccggaagtgcagctggttgaatctggcggaggactggttcagcctggcggatctctgagactgtcttgtgccgccagcggcttcagcttcagcgacttttggatgagctgggtccgacaggcccctggcaaaggacttgaatgggtcgccacaatcagccaggccggcagcgagaaggactacgtggactctgtgaagggcagattcaccatcagccgggacaacgccaagaagtccctgtacctccagatgaacagcctgagagccgaggacaccgccgtgtactattgtgcctctggcgtgtacagcttcgactacagaggccagggcaccctggtcacagtctcttctggtaccggcggaggcggatctggcggcggaggtagcggtggcggaggatctgaattcgacgagatcgtgctgacccagagccctgatagcctggccgtgtctctgggcgagagagccaccatcaactgcaaggccagccagagcgtggacttcgacggcgacagctacctgaactggtatcagcagaagcccggccagccccccaaggtgctgatctatgccgccagcacactgcagagcggcgtgcccagcagattttctggcagcggctccggcaccgacttcaccctgaccatcaacagcctggaagccgaggacgccgccacctactactgccagcagagcaacgaggacccctggacctttggcggcggaacaaaggtggaaatcaagctcgagggacagcctaaggccaatcctaccgtgacactgttccctccaagcagcgaagaactccaggccaacaaggccacacttgtgtgcctgatctccgacttctaccctggggctgtgacagtggcttggaaggccgatggatctcctgtgaaagccggcgtggaaaccaccaagccatccaagcagagcaacaacaaatacgccgccagctcctacctgagcctgacacctgagcagtggaagtcccacagatcctacagctgccaagtgacccacgaaggcagcaccgtggaaaagacagtggcccctacagagtgcagcggcagagccgattgcggctttaccagcgagagctaccagcagggcgtgctgagcgccaccatcctgtacgagatcctgctgggcaaggccaccctgtacgccgtgctggtgtctgccctggtgctgatggctatggtcaagcggaaggacagccggggacgcgccaagagaagcggatctggcgtgaagcagaccctgaatttcgacctgctgaagctggctggcgacgtggaatccaacccaggccctactagtatggactggatttggcgcatccttttccttgtcggcgctgctaccggcgcgcattccgggccccagctccagctgcaagagtctggacctggcctggtcaagcctagcgagacactgagcctgacctgtaccgtgtccggcgatagcatcagcagcggcgattactactggggctggatcagacagcctcctggcaaaggactggaatggatcggccacatctactacagcggcgtgacctactacaaccccagcctgaagtccagagtgaccatcagcgtggacaccagccggaaccagttctccctgaagctgtctagcgtgacagccgccgataccgccgtgtactactgcaccagagaggacagcagcaactggcggagtagaggccagggaacactggtcacagttagctctggatccggcggaggcggaagtggaggcggaggatctggcggcggaggctctttcgaacaggtgcaactggtgcagtccggcgctgaagtgaagaaacctggggccagcgtgaaggtgtcctgcaaggtgtccggctacacctttaccgactactacattacctgggtgcgccaggcccctggacaggccctggaatggatgggctggatctaccccggcagcggcaacaccaagtacagccagaagttccagggcagattcgtgttcagcgtggacaccagcgccagcaccgcctacctgcaactgtctagcctgaaggccgaagataccgccgtgtactactgcgccaactacggcaactattggttcgcctattggggccagggaacccttgtgaccgtgtcctctacgcgtgcctctacaaagggaccctccgtgtttcctctggctcccagcagcaagtctacaagcggaggaacagccgctctgggctgcctggtcaaggattactttcccgagcctgtgaccgtgtcctggaatagcggagcactgacaagcggcgtgcacacctttccagccgtgctgcaaagcagcggcctgtactctctgagcagcgtggtcacagtgcctagctctagcctgggcacccagacctacatctgcaatgtgaaccacaagcctagcaacaccaaggtggacaagagagtggaacccaagagctgtatccccgaggacacattcttcccaagccccgagagcagctgcgacgtgaagctggtggaaaagagcttcgagacagacaccaacctgaacttccagaacctgagcgtgatcggcttcagaatcctgctgctgaaagtggccggctttaacctgctgatgaccctgcggctgtggtccagc

SEQ ID NO: 3354 - DNA, 2694 bp, Artificial Sequence
  Synthetic Polynucloetide
atggccttaccagtgaccgccttgctcctgccgctggccttgctgctccacgccgccaggccggaagtgcagctggttgaatctggcggaggactggttcagcctggcggatctctgagactgtcttgtgccgccagcggcttcagcttcagcgacttttggatgagctgggtccgacaggcccctggcaaaggacttgaatgggtcgccacaatcagccaggccggcagcgagaaggactacgtggactctgtgaagggcagattcaccatcagccgggacaacgccaagaagtccctgtacctccagatgaacagcctgagagccgaggacaccgccgtgtactattgtgcctctggcgtgtacagcttcgactacagaggccagggcaccctggtcacagtctcttctggtaccggcggaggcggatctggcggcggaggtagcggtggcggaggatctgaattcgacatccagatgacccagagccccagcagcctgtctgccagcgtgggcgacagagtgaccatcacctgtagagccagccagggcatcagctcttggctggcctggtatcagcagaagcccgagaaggcccccaagagcctgatctacgccgcctctagtctccagagcggcgtgcccagcagattttctggcagcggctccggcaccgacttcaccctgacaatcagctccctccagcccgaggacttcgccacctactactgccagcagtacaacagctaccctcccacctttggcggaggcaccaaggtggaaatcaagctcgagggacagcctaaggccaatcctaccgtgacactgttccctccaagcagcgaagaactccaggccaacaaggccacacttgtgtgcctgatctccgacttctaccctggggctgtgacagtggcttggaaggccgatggatctcctgtgaaagccggcgtggaaaccaccaagccatccaagcagagcaacaacaaatacgccgccagctcctacctgagcctgacacctgagcagtggaagtcccacagatcctacagctgccaagtgacccacgaaggcagcaccgtggaaaagacagtggcccctacagagtgcagcggcagagccgattgcggctttaccagcgagagctaccagcagggcgtgctgagcgccaccatcctgtacgagatcctgctgggcaaggccaccctgtacgccgtgctggtgtctgccctggtgctgatggctatggtcaagcggaaggacagccggggacgcgccaagagaagcggatctggcgtgaagcagaccctgaatttcgacctgctgaagctggctggcgacgtggaatccaacccaggccctactagtatggactggatttggcgcatccttttccttgtcggcgctgctaccggcgcgcattccgggccccagctccagctgcaagagtctggacctggcctggtcaagcctagcgagacactgagcctgacctgtaccgtgtccggcgatagcatcagcagcggcgattactactggggctggatcagacagcctcctggcaaaggactggaatggatcggccacatctactacagcggcgtgacctactacaaccccagcctgaagtccagagtgaccatcagcgtggacaccagccggaaccagttctccctgaagctgtctagcgtgacagccgccgataccgccgtgtactactgcaccagagaggacagcagcaactggcggagtagaggccagggaacactggtcacagttagctctggatccggcggaggcggaagtggaggcggaggatctggcggcggaggctctttcgaagaagtgcaactggtgcagtctggcggagggctggtgcatcctgggggaagcctgagactgagctgtgccggctctggcttcgccttcagcagcagcaccatgcactggatcagacaggcccctggcaagggcctggaatggatcagcctgatcggaagcggagggggcatctactacggcgacagcgtgaagggccggttcaccatcagccgggacaacgccaagaacagcctgtacctccagatgaactccctgcgggccgaggacatggccgtgtactattgtgtgcggggctacttcgactgggtggactacttcgattactggggccagggcaccctcgtgaccgtgtcatctacgcgtgcctctacaaagggaccctccgtgtttcctctggctcccagcagcaagtctacaagcggaggaacagccgctctgggctgcctggtcaaggattactttcccgagcctgtgaccgtgtcctggaatagcggagcactgacaagcggcgtgcacacctttccagccgtgctgcaaagcagcggcctgtactctctgagcagcgtggtcacagtgcctagctctagcctgggcacccagacctacatctgcaatgtgaaccacaagcctagcaacaccaaggtggacaagagagtggaacccaagagctgtatccccgaggacacattcttcccaagccccgagagcagctgcgacgtgaagctggtggaaaagagcttcgagacagacaccaacctgaacttccagaacctgagcgtgatcggcttcagaatcctgctgctgaaagtggccggctttaacctgctgatgaccctgcggctgtggtccagc

SEQ ID NO: 3355 - DNA, 2724 bp, Artificial Sequence
  Synthetic Polynucloetide
atggccttaccagtgaccgccttgctcctgccgctggccttgctgctccacgccgccaggccggaagtgcagctggttgaatctggcggaggactggttcagcctggcggatctctgagactgtcttgtgccgccagcggcttcagcttcagcgacttttggatgagctgggtccgacaggcccctggcaaaggacttgaatgggtcgccacaatcagccaggccggcagcgagaaggactacgtggactctgtgaagggcagattcaccatcagccgggacaacgccaagaagtccctgtacctccagatgaacagcctgagagccgaggacaccgccgtgtactattgtgcctctggcgtgtacagcttcgactacagaggccagggcaccctggtcacagtctcttctggtaccggcggaggcggatctggcggcggaggtagcggtggcggaggatctgaattcgacgacatcgtgatgacacagtcaccagatagcctcaccgtctccctgggggagcggaccaccattaattgtaaatccagccaaagcgtgctggactcaagcaagaacaagaatagcctcgcctggtatcagcagaagcccggtcagcctccaaagctgctgctttcttgggcctccaccagagagtccgggattcctgataggtttagtggttcaggctccggcacagattttactctgaccattgattctctccagccagaggattctgcaacttattactgccagcaaagcgcccactttcctataacttttggccagggaacccgacttgaaatcaagctcgagggacagcctaaggccaatcctaccgtgacactgttccctccaagcagcgaagaactccaggccaacaaggccacacttgtgtgcctgatctccgacttctaccctggggctgtgacagtggcttggaaggccgatggatctcctgtgaaagccggcgtggaaaccaccaagccatccaagcagagcaacaacaaatacgccgccagctcctacctgagcctgacacctgagcagtggaagtcccacagatcctacagctgccaagtgacccacgaaggcagcaccgtggaaaagacagtggcccctacagagtgcagcggcagagccgattgcggctttaccagcgagagctaccagcagggcgtgctgagcgccaccatcctgtacgagatcctgctgggcaaggccaccctgtacgccgtgctggtgtctgccctggtgctgatggctatggtcaagcggaaggacagccggggacgcgccaagagaagcggatctggcgtgaagcagaccctgaatttcgacctgctgaagctggctggcgacgtggaatccaacccaggccctactagtatggactggatttggcgcatccttttccttgtcggcgctgctaccggcgcgcattccgggccccagctccagctgcaagagtctggacctggcctggtcaagcctagcgagacactgagcctgacctgtaccgtgtccggcgatagcatcagcagcggcgattactactggggctggatcagacagcctcctggcaaaggactggaatggatcggccacatctactacagcggcgtgacctactacaaccccagcctgaagtccagagtgaccatcagcgtggacaccagccggaaccagttctccctgaagctgtctagcgtgacagccgccgataccgccgtgtactactgcaccagagaggacagcagcaactggcggagtagaggccagggaacactggtcacagttagctctggatccggcggaggcggaagtggaggcggaggatctggcggcggaggctctttcgaacaggtgcagctggtgcagagcggtgccgaagtgaagaaaccaggtgcatccgttaaagtttcatgtaaggctagtggatataccttcaccaattacggaatgaactgggtgaaacaggcccctggccagggactgaagtggatggggtggattaacacctacaccggggagccgacttatgcagacgactttaaggggcgggtcacgatgacctccgacacctccaccagtaccgcctacctggagctgcacaaccttaggtcagacgataccgccgtgtattactgtgcccgatggtcttggtccgacggatactatgtctacttcgactattggggccaggggaccacagttaccgtgtcctctacgcgtgcctctacaaagggaccctccgtgtttcctctggctcccagcagcaagtctacaagcggaggaacagccgctctgggctgcctggtcaaggattactttcccgagcctgtgaccgtgtcctggaatagcggagcactgacaagcggcgtgcacacctttccagccgtgctgcaaagcagcggcctgtactctctgagcagcgtggtcacagtgcctagctctagcctgggcacccagacctacatctgcaatgtgaaccacaagcctagcaacaccaaggtggacaagagagtggaacccaagagctgtatccccgaggacacattcttcccaagccccgagagcagctgcgacgtgaagctggtggaaaagagcttcgagacagacaccaacctgaacttccagaacctgagcgtgatcggcttcagaatcctgctgctgaaagtggccggctttaacctgctgatgaccctgcggctgtggtccagc

SEQ ID NO: 3356 - DNA, 2712 bp, Artificial Sequence
  Synthetic Polynucloetide
atggccttaccagtgaccgccttgctcctgccgctggccttgctgctccacgccgccaggccggaagtgcagctggttgaatctggcggaggactggttcagcctggcggatctctgagactgtcttgtgccgccagcggcttcagcttcagcgacttttggatgagctgggtccgacaggcccctggcaaaggacttgaatgggtcgccacaatcagccaggccggcagcgagaaggactacgtggactctgtgaagggcagattcaccatcagccgggacaacgccaagaagtccctgtacctccagatgaacagcctgagagccgaggacaccgccgtgtactattgtgcctctggcgtgtacagcttcgactacagaggccagggcaccctggtcacagtctcttctggtaccggcggaggcggatctggcggcggaggtagcggtggcggaggatctgaattcgacgagatcgtgctgacacagagccctggaagcctggccgtgtctcctggcgagcgcgtgacaatgagctgcaagagcagccagagcgtgttcttcagcagctcccagaagaactacctggcctggtatcagcagatccccggccagagccccagactgctgatctactgggccagcaccagagaaagcggcgtgcccgatagattcaccggcagcggctctggcaccgacttcaccctgacaatcagcagcgtgcagcccgaggacctggctatctactactgccaccagtacctgagcagccggaccttcggccagggcaccaagctggaaatcaagagactcgagggacagcctaaggccaatcctaccgtgacactgttccctccaagcagcgaagaactccaggccaacaaggccacacttgtgtgcctgatctccgacttctaccctggggctgtgacagtggcttggaaggccgatggatctcctgtgaaagccggcgtggaaaccaccaagccatccaagcagagcaacaacaaatacgccgccagctcctacctgagcctgacacctgagcagtggaagtcccacagatcctacagctgccaagtgacccacgaaggcagcaccgtggaaaagacagtggcccctacagagtgcagcggcagagccgattgcggctttaccagcgagagctaccagcagggcgtgctgagcgccaccatcctgtacgagatcctgctgggcaaggccaccctgtacgccgtgctggtgtctgccctggtgctgatggctatggtcaagcggaaggacagccggggacgcgccaagagaagcggatctggcgtgaagcagaccctgaatttcgacctgctgaagctggctggcgacgtggaatccaacccaggccctactagtatggactggatttggcgcatccttttccttgtcggcgctgctaccggcgcgcattccgggccccagctccagctgcaagagtctggacctggcctggtcaagcctagcgagacactgagcctgacctgtaccgtgtccggcgatagcatcagcagcggcgattactactggggctggatcagacagcctcctggcaaaggactggaatggatcggccacatctactacagcggcgtgacctactacaaccccagcctgaagtccagagtgaccatcagcgtggacaccagccggaaccagttctccctgaagctgtctagcgtgacagccgccgataccgccgtgtactactgcaccagagaggacagcagcaactggcggagtagaggccagggaacactggtcacagttagctctggatccggcggaggcggaagtggaggcggaggatctggcggcggaggctctttcgaacaggtgcaactgcagcagcctggcgctgaggtcgtgaagccaggcgcttccgtgaagatgtcctgcaaggccagcggctacaccttcaccagctactacatccactggatcaagcagacccctggacagggcctggaatgggtgggagtgatctaccccggcaacgacgacatcagctacaaccagaagttccagggcaaggccaccctgaccgccgacaagtctagcaccaccgcctacatgcaactgtccagcctgaccagcgaggacagcgccgtgtactactgcgccagagaagtgcggctgcggtacttcgatgtgtggggccagggaaccaccgtgaccgtgtcatctacgcgtgcctctacaaagggaccctccgtgtttcctctggctcccagcagcaagtctacaagcggaggaacagccgctctgggctgcctggtcaaggattactttcccgagcctgtgaccgtgtcctggaatagcggagcactgacaagcggcgtgcacacctttccagccgtgctgcaaagcagcggcctgtactctctgagcagcgtggtcacagtgcctagctctagcctgggcacccagacctacatctgcaatgtgaaccacaagcctagcaacaccaaggtggacaagagagtggaacccaagagctgtatccccgaggacacattcttcccaagccccgagagcagctgcgacgtgaagctggtggaaaagagcttcgagacagacaccaacctgaacttccagaacctgagcgtgatcggcttcagaatcctgctgctgaaagtggccggctttaacctgctgatgaccctgcggctgtggtccagc

SEQ ID NO: 3357 - DNA, 2724 bp, Artificial Sequence
  Synthetic Polynucloetide
atggccttaccagtgaccgccttgctcctgccgctggccttgctgctccacgccgccaggccggaagtgcagctggttgaatctggcggaggactggttcagcctggcggatctctgagactgtcttgtgccgccagcggcttcagcttcagcgacttttggatgagctgggtccgacaggcccctggcaaaggacttgaatgggtcgccacaatcagccaggccggcagcgagaaggactacgtggactctgtgaagggcagattcaccatcagccgggacaacgccaagaagtccctgtacctccagatgaacagcctgagagccgaggacaccgccgtgtactattgtgcctctggcgtgtacagcttcgactacagaggccagggcaccctggtcacagtctcttctggtaccggcggaggcggatctggcggcggaggtagcggtggcggaggatctgaattcgatgtgctgctgacccagagccctctgagcctgcctgtgacactgggacagcctgccagcatctcctgtcggagcagccagaccatcgtgcacagcaacggcaacacctacctggaatggttccagcagcggccaggccagagccccagactgctgatctaccaggtgtccaacagattcagcggcgtgcccgacagattctccggcagcggctctggcaccgacttcaccctgaagatcagccgggtggaagccgaggacgtgggcgtgtactactgttttcaaggcagccacgtgccccggacctttggcggaggaacaaaggtggaaatcaagagagccctcgagggacagcctaaggccaatcctaccgtgacactgttccctccaagcagcgaagaactccaggccaacaaggccacacttgtgtgcctgatctccgacttctaccctggggctgtgacagtggcttggaaggccgatggatctcctgtgaaagccggcgtggaaaccaccaagccatccaagcagagcaacaacaaatacgccgccagctcctacctgagcctgacacctgagcagtggaagtcccacagatcctacagctgccaagtgacccacgaaggcagcaccgtggaaaagacagtggcccctacagagtgcagcggcagagccgattgcggctttaccagcgagagctaccagcagggcgtgctgagcgccaccatcctgtacgagatcctgctgggcaaggccaccctgtacgccgtgctggtgtctgccctggtgctgatggctatggtcaagcggaaggacagccggggacgcgccaagagaagcggatctggcgtgaagcagaccctgaatttcgacctgctgaagctggctggcgacgtggaatccaacccaggccctactagtatggactggatttggcgcatccttttccttgtcggcgctgctaccggcgcgcattccgggccccagctccagctgcaagagtctggacctggcctggtcaagcctagcgagacactgagcctgacctgtaccgtgtccggcgatagcatcagcagcggcgattactactggggctggatcagacagcctcctggcaaaggactggaatggatcggccacatctactacagcggcgtgacctactacaaccccagcctgaagtccagagtgaccatcagcgtggacaccagccggaaccagttctccctgaagctgtctagcgtgacagccgccgataccgccgtgtactactgcaccagagaggacagcagcaactggcggagtagaggccagggaacactggtcacagttagctctggatccggcggaggcggaagtggaggcggaggatctggcggcggaggctctttcgaacagatccaactggtgcagagcggcagcgagctgaagaaacctggggccagcgtgaaggtgtcctgcaaggccagcggctacacctttaccaactacggcatgaactgggtgcgccaggcccctggacagggcctgaaatggatgggctggatcaacaccaacaccggcgagcctaagtacgccgaagagttcaagggcagattcgccctgagcctggacaccagcgtgtccacagcctacctccagatcaacagcctgaaggccgaggataccgccgtgtacttctgcgccagaggctacggcaactacgccagaggggcttggctggcctattggggccagggaacactcgtgaccgtgtcctctacgcgtgcctctacaaagggaccctccgtgtttcctctggctcccagcagcaagtctacaagcggaggaacagccgctctgggctgcctggtcaaggattactttcccgagcctgtgaccgtgtcctggaatagcggagcactgacaagcggcgtgcacacctttccagccgtgctgcaaagcagcggcctgtactctctgagcagcgtggtcacagtgcctagctctagcctgggcacccagacctacatctgcaatgtgaaccacaagcctagcaacaccaaggtggacaagagagtggaacccaagagctgtatccccgaggacacattcttcccaagccccgagagcagctgcgacgtgaagctggtggaaaagagcttcgagacagacaccaacctgaacttccagaacctgagcgtgatcggcttcagaatcctgctgctgaaagtggccggctttaacctgctgatgaccctgcggctgtggtccagc

SEQ ID NO: 3358 - DNA, 2679 bp, Artificial Sequence
  Synthetic Polynucloetide
atggccttaccagtgaccgccttgctcctgccgctggccttgctgctccacgccgccaggccggaagtgcagctggttgaatctggcggaggactggttcagcctggcggatctctgagactgtcttgtgccgccagcggcttcagcttcagcgacttttggatgagctgggtccgacaggcccctggcaaaggacttgaatgggtcgccacaatcagccaggccggcagcgagaaggactacgtggactctgtgaagggcagattcaccatcagccgggacaacgccaagaagtccctgtacctccagatgaacagcctgagagccgaggacaccgccgtgtactattgtgcctctggcgtgtacagcttcgactacagaggccagggcaccctggtcacagtctcttctggtaccggcggaggcggatctggcggcggaggtagcggtggcggaggatctgaattcgacgagatcgtgctgacacagagccctgccacactctctctgagccctggcgaaagagccaccctgagctgtagcgccagcagcagcatcaactacatctactggctccagcagaagcccggccaggcccccagaatcctgatctacctgaccagcaacctggcctccggcgtgccagccagattttctggcagcggctccggcaccgacttcaccctgacaatcagcagcctggaacccgaggacttcgccgtgtactactgcctccagtggtccagcaaccccctgacctttggcggaggcaccaaggtggaaatcaagctcgagggacagcctaaggccaatcctaccgtgacactgttccctccaagcagcgaagaactccaggccaacaaggccacacttgtgtgcctgatctccgacttctaccctggggctgtgacagtggcttggaaggccgatggatctcctgtgaaagccggcgtggaaaccaccaagccatccaagcagagcaacaacaaatacgccgccagctcctacctgagcctgacacctgagcagtggaagtcccacagatcctacagctgccaagtgacccacgaaggcagcaccgtggaaaagacagtggcccctacagagtgcagcggcagagccgattgcggctttaccagcgagagctaccagcagggcgtgctgagcgccaccatcctgtacgagatcctgctgggcaaggccaccctgtacgccgtgctggtgtctgccctggtgctgatggctatggtcaagcggaaggacagccggggacgcgccaagagaagcggatctggcgtgaagcagaccctgaatttcgacctgctgaagctggctggcgacgtggaatccaacccaggccctactagtatggactggatttggcgcatccttttccttgtcggcgctgctaccggcgcgcattccgggccccagctccagctgcaagagtctggacctggcctggtcaagcctagcgagacactgagcctgacctgtaccgtgtccggcgatagcatcagcagcggcgattactactggggctggatcagacagcctcctggcaaaggactggaatggatcggccacatctactacagcggcgtgacctactacaaccccagcctgaagtccagagtgaccatcagcgtggacaccagccggaaccagttctccctgaagctgtctagcgtgacagccgccgataccgccgtgtactactgcaccagagaggacagcagcaactggcggagtagaggccagggaacactggtcacagttagctctggatccggcggaggcggaagtggaggcggaggatctggcggcggaggctctttcgaagaagtgcaactggtggaaagcgggggaggacttgtgaagcctggcggctctctgagactgagctgtgccgcctctggcttcaccttcagcagctacgacatgagctgggtgcgccaggctcctggcaagggactggaatgggtgtccaccatcagcagcggcggcagctacacctactacctggacagcatcaagggccggttcaccatctccagagacaacgccaagaacagcctgtacctccagatgaactccctgcgggccgaggacacagccgtgtattattgcgccagacagggcctggattactggggcagaggcacccttgtgaccgtgtcctctacgcgtgcctctacaaagggaccctccgtgtttcctctggctcccagcagcaagtctacaagcggaggaacagccgctctgggctgcctggtcaaggattactttcccgagcctgtgaccgtgtcctggaatagcggagcactgacaagcggcgtgcacacctttccagccgtgctgcaaagcagcggcctgtactctctgagcagcgtggtcacagtgcctagctctagcctgggcacccagacctacatctgcaatgtgaaccacaagcctagcaacaccaaggtggacaagagagtggaacccaagagctgtatccccgaggacacattcttcccaagccccgagagcagctgcgacgtgaagctggtggaaaagagcttcgagacagacaccaacctgaacttccagaacctgagcgtgatcggcttcagaatcctgctgctgaaagtggccggctttaacctgctgatgaccctgcggctgtggtccagc

SEQ ID NO: 3359 - DNA, 2706 bp, Artificial Sequence
  Synthetic Polynucloetide
atggccttaccagtgaccgccttgctcctgccgctggccttgctgctccacgccgccaggccggaagtgcagctggttgaatctggcggaggactggttcagcctggcggatctctgagactgtcttgtgccgccagcggcttcagcttcagcgacttttggatgagctgggtccgacaggcccctggcaaaggacttgaatgggtcgccacaatcagccaggccggcagcgagaaggactacgtggactctgtgaagggcagattcaccatcagccgggacaacgccaagaagtccctgtacctccagatgaacagcctgagagccgaggacaccgccgtgtactattgtgcctctggcgtgtacagcttcgactacagaggccagggcaccctggtcacagtctcttctggtaccggcggaggcggatctggcggcggaggtagcggtggcggaggatctgaattcgacatcgtgatgacccagagccccgatagcctggccgtgtctctgggagagagagccaccatcaactgccgggccagcaagagcgtgtccaccagcggctacagcttcatgcactggtatcagcagaagcccggccagccccccaagctgctgatctacctggcctccaacctggaaagcggcgtgcccgatagattcagcggcagcggctctggcaccgacttcaccctgaccatcagttctcttcaggccgaggacgtggccgtgtactactgccagcacagcagagaggtgccctggacattcggccagggcacaaaggtggaaatcaagcggctcgagggacagcctaaggccaatcctaccgtgacactgttccctccaagcagcgaagaactccaggccaacaaggccacacttgtgtgcctgatctccgacttctaccctggggctgtgacagtggcttggaaggccgatggatctcctgtgaaagccggcgtggaaaccaccaagccatccaagcagagcaacaacaaatacgccgccagctcctacctgagcctgacacctgagcagtggaagtcccacagatcctacagctgccaagtgacccacgaaggcagcaccgtggaaaagacagtggcccctacagagtgcagcggcagagccgattgcggctttaccagcgagagctaccagcagggcgtgctgagcgccaccatcctgtacgagatcctgctgggcaaggccaccctgtacgccgtgctggtgtctgccctggtgctgatggctatggtcaagcggaaggacagccggggacgcgccaagagaagcggatctggcgtgaagcagaccctgaatttcgacctgctgaagctggctggcgacgtggaatccaacccaggccctactagtatggactggatttggcgcatccttttccttgtcggcgctgctaccggcgcgcattccgggccccagctccagctgcaagagtctggacctggcctggtcaagcctagcgagacactgagcctgacctgtaccgtgtccggcgatagcatcagcagcggcgattactactggggctggatcagacagcctcctggcaaaggactggaatggatcggccacatctactacagcggcgtgacctactacaaccccagcctgaagtccagagtgaccatcagcgtggacaccagccggaaccagttctccctgaagctgtctagcgtgacagccgccgataccgccgtgtactactgcaccagagaggacagcagcaactggcggagtagaggccagggaacactggtcacagttagctctggatccggcggaggcggaagtggaggcggaggatctggcggcggaggctctttcgaacaggtgcagctggtgcagtctggggccgaagtgaagaaacctggggccagcgtgaaggtgtcctgcaaggccagcggatacacctttaccaactacggcatgaactgggtgcgccaggcccctggacagggcctggaatggatgggctggatcaacacctacaccggcgagcccacatacgccgacgccttcaagggcagattcgccttcagcctggacaccagcacctccaccgcctacctccagatcaacagcctgcggagcgacgacaccgccgtgtattattgcgccagagattacggcgactacgggatggactattggggccagggaaccaccgtgaccgtgtcctctacgcgtgcctctacaaagggaccctccgtgtttcctctggctcccagcagcaagtctacaagcggaggaacagccgctctgggctgcctggtcaaggattactttcccgagcctgtgaccgtgtcctggaatagcggagcactgacaagcggcgtgcacacctttccagccgtgctgcaaagcagcggcctgtactctctgagcagcgtggtcacagtgcctagctctagcctgggcacccagacctacatctgcaatgtgaaccacaagcctagcaacaccaaggtggacaagagagtggaacccaagagctgtatccccgaggacacattcttcccaagccccgagagcagctgcgacgtgaagctggtggaaaagagcttcgagacagacaccaacctgaacttccagaacctgagcgtgatcggcttcagaatcctgctgctgaaagtggccggctttaacctgctgatgaccctgcggctgtggtccagc

SEQ ID NO: 3360 - DNA, 2694 bp, Artificial Sequence
  Synthetic Polynucloetide
atggccttaccagtgaccgccttgctcctgccgctggccttgctgctccacgccgccaggccggaagtgcagctggttgaatctggcggaggactggttcagcctggcggatctctgagactgtcttgtgccgccagcggcttcagcttcagcgacttttggatgagctgggtccgacaggcccctggcaaaggacttgaatgggtcgccacaatcagccaggccggcagcgagaaggactacgtggactctgtgaagggcagattcaccatcagccgggacaacgccaagaagtccctgtacctccagatgaacagcctgagagccgaggacaccgccgtgtactattgtgcctctggcgtgtacagcttcgactacagaggccagggcaccctggtcacagtctcttctggtaccggcggaggcggatctggcggcggaggtagcggtggcggaggatctgaattcgacatcgtgatgacccagacccccctgaccctgagcgtgacaatcggacagcctgccagcatctcctgcaagagcagccagagcctgctggacagcgacggcaagacctacctgaactggctgctgcagaggccaggccagagccccgagagactgatctacctggtgtccaagctggactccggcgtgcccgatagattcacaggcagcggctccggcaccgacttcaccctgaagatcagccgggtggaagccgaggacctgggcgtgtactgttgttggcagggcacccacttcccttacaccttcggcggagggaccaaggtggaaatcaagggcctcgagggacagcctaaggccaatcctaccgtgacactgttccctccaagcagcgaagaactccaggccaacaaggccacacttgtgtgcctgatctccgacttctaccctggggctgtgacagtggcttggaaggccgatggatctcctgtgaaagccggcgtggaaaccaccaagccatccaagcagagcaacaacaaatacgccgccagctcctacctgagcctgacacctgagcagtggaagtcccacagatcctacagctgccaagtgacccacgaaggcagcaccgtggaaaagacagtggcccctacagagtgcagcggcagagccgattgcggctttaccagcgagagctaccagcagggcgtgctgagcgccaccatcctgtacgagatcctgctgggcaaggccaccctgtacgccgtgctggtgtctgccctggtgctgatggctatggtcaagcggaaggacagccggggacgcgccaagagaagcggatctggcgtgaagcagaccctgaatttcgacctgctgaagctggctggcgacgtggaatccaacccaggccctactagtatggactggatttggcgcatccttttccttgtcggcgctgctaccggcgcgcattccgggccccagctccagctgcaagagtctggacctggcctggtcaagcctagcgagacactgagcctgacctgtaccgtgtccggcgatagcatcagcagcggcgattactactggggctggatcagacagcctcctggcaaaggactggaatggatcggccacatctactacagcggcgtgacctactacaaccccagcctgaagtccagagtgaccatcagcgtggacaccagccggaaccagttctccctgaagctgtctagcgtgacagccgccgataccgccgtgtactactgcaccagagaggacagcagcaactggcggagtagaggccagggaacactggtcacagttagctctggatccggcggaggcggaagtggaggcggaggatctggcggcggaggctctttcgaacaggtgcaactgcagcagcctggcgctgaacttgtgcggccaggcgcctctgtgaagctgagctgtaaagccagcggctacaccttcaccagctactggatgaactgggtcaagcagcgcccaggccagggcctggaatggatcggaatgatcgaccccagcgacagcgagacacactacaaccacatcttcaaggacaaggccaccctgaccgtggacaagtccagcagcacagcctacctgcaactgtccagcctgaccagcgaggacagcgccgtgtactactgcgcccggaacctgtatctgtggggccagggaacaagcgtgaccgtgtctagcacgcgtgcctctacaaagggaccctccgtgtttcctctggctcccagcagcaagtctacaagcggaggaacagccgctctgggctgcctggtcaaggattactttcccgagcctgtgaccgtgtcctggaatagcggagcactgacaagcggcgtgcacacctttccagccgtgctgcaaagcagcggcctgtactctctgagcagcgtggtcacagtgcctagctctagcctgggcacccagacctacatctgcaatgtgaaccacaagcctagcaacaccaaggtggacaagagagtggaacccaagagctgtatccccgaggacacattcttcccaagccccgagagcagctgcgacgtgaagctggtggaaaagagcttcgagacagacaccaacctgaacttccagaacctgagcgtgatcggcttcagaatcctgctgctgaaagtggccggctttaacctgctgatgaccctgcggctgtggtccagc

SEQ ID NO: 3361 - DNA, 2718 bp, Artificial Sequence
  Synthetic Polynucloetide
atggccttaccagtgaccgccttgctcctgccgctggccttgctgctccacgccgccaggccggaagtgcagctggttgaatctggcggaggactggttcagcctggcggatctctgagactgtcttgtgccgccagcggcttcagcttcagcgacttttggatgagctgggtccgacaggcccctggcaaaggacttgaatgggtcgccacaatcagccaggccggcagcgagaaggactacgtggactctgtgaagggcagattcaccatcagccgggacaacgccaagaagtccctgtacctccagatgaacagcctgagagccgaggacaccgccgtgtactattgtgcctctggcgtgtacagcttcgactacagaggccagggcaccctggtcacagtctcttctggtaccggcggaggcggatctggcggcggaggtagcggtggcggaggatctgaattcgacatcgtgatgacccagagccccgatagcctggccgtgtctctgggagagagagccaccatcaactgcgagagcagccagagcctgctgaacagcggcaaccagaagaactacctgacctggtatcagcagaagcccggccagccccccaagcccctgatctattgggccagcaccagagaaagcggcgtgcccgatagattcagcggcagcggaagcggcaccgacttcaccctgaccatcagttctcttcaggccgaggacgtggccgtgtactactgccagaacgactacagctacccctacaccttcggccagggcaccaagctggaaatcaagagactcgagggacagcctaaggccaatcctaccgtgacactgttccctccaagcagcgaagaactccaggccaacaaggccacacttgtgtgcctgatctccgacttctaccctggggctgtgacagtggcttggaaggccgatggatctcctgtgaaagccggcgtggaaaccaccaagccatccaagcagagcaacaacaaatacgccgccagctcctacctgagcctgacacctgagcagtggaagtcccacagatcctacagctgccaagtgacccacgaaggcagcaccgtggaaaagacagtggcccctacagagtgcagcggcagagccgattgcggctttaccagcgagagctaccagcagggcgtgctgagcgccaccatcctgtacgagatcctgctgggcaaggccaccctgtacgccgtgctggtgtctgccctggtgctgatggctatggtcaagcggaaggacagccggggacgcgccaagagaagcggatctggcgtgaagcagaccctgaatttcgacctgctgaagctggctggcgacgtggaatccaacccaggccctactagtatggactggatttggcgcatccttttccttgtcggcgctgctaccggcgcgcattccgggccccagctccagctgcaagagtctggacctggcctggtcaagcctagcgagacactgagcctgacctgtaccgtgtccggcgatagcatcagcagcggcgattactactggggctggatcagacagcctcctggcaaaggactggaatggatcggccacatctactacagcggcgtgacctactacaaccccagcctgaagtccagagtgaccatcagcgtggacaccagccggaaccagttctccctgaagctgtctagcgtgacagccgccgataccgccgtgtactactgcaccagagaggacagcagcaactggcggagtagaggccagggaacactggtcacagttagctctggatccggcggaggcggaagtggaggcggaggatctggcggcggaggctctttcgaagaagtgcagctggtgcagtctggggccgaagtgaagaagcctggcgagagcctgaagatcagctgcaagggcagcggctacagcttcaccgactactacatgaagtgggccagacagatgcccggcaagggcctggaatggatgggcgacatcatccccagcaacggggccaccttctacaaccagaaattcaagggccaagtgaccatctccgccgacaagagcatcagcaccacctacctccagtggtccagcctgaaggccagcgacaccgccatgtactattgcgccagaagccatctgctgcgggccagttggttcgcctattggggccagggaacaatggtcacagtgtccagcacgcgtgcctctacaaagggaccctccgtgtttcctctggctcccagcagcaagtctacaagcggaggaacagccgctctgggctgcctggtcaaggattactttcccgagcctgtgaccgtgtcctggaatagcggagcactgacaagcggcgtgcacacctttccagccgtgctgcaaagcagcggcctgtactctctgagcagcgtggtcacagtgcctagctctagcctgggcacccagacctacatctgcaatgtgaaccacaagcctagcaacaccaaggtggacaagagagtggaacccaagagctgtatccccgaggacacattcttcccaagccccgagagcagctgcgacgtgaagctggtggaaaagagcttcgagacagacaccaacctgaacttccagaacctgagcgtgatcggcttcagaatcctgctgctgaaagtggccggctttaacctgctgatgaccctgcggctgtggtccagc

SEQ ID NO: 3362 - DNA, 2703 bp, Artificial Sequence
  Synthetic Polynucloetide
atggccttaccagtgaccgccttgctcctgccgctggccttgctgctccacgccgccaggccggaagtgcagctggttgaatctggcggaggactggttcagcctggcggatctctgagactgtcttgtgccgccagcggcttcagcttcagcgacttttggatgagctgggtccgacaggcccctggcaaaggacttgaatgggtcgccacaatcagccaggccggcagcgagaaggactacgtggactctgtgaagggcagattcaccatcagccgggacaacgccaagaagtccctgtacctccagatgaacagcctgagagccgaggacaccgccgtgtactattgtgcctctggcgtgtacagcttcgactacagaggccagggcaccctggtcacagtctcttctggtaccggcggaggcggatctggcggcggaggtagcggtggcggaggatctgaattcgacatccagatgacccagtctaccagttccctgagtgcatccctcggagacagggtgacgatcagttgcagcgcaagccaagggatcaataactatctgaactggtatcagcagaaaccggacggaacagtcgaactcctgatttattacaccagcacccttcagagtggcgtcccttcccggttcagtggctccggaagcgggaccgattactccctgaccatttctaatctggagccagaggacataggaacgtattattgccagcagtatagtaaactgccacgaacttttggaggggggacgaaactggagatcaaactcgagggacagcctaaggccaatcctaccgtgacactgttccctccaagcagcgaagaactccaggccaacaaggccacacttgtgtgcctgatctccgacttctaccctggggctgtgacagtggcttggaaggccgatggatctcctgtgaaagccggcgtggaaaccaccaagccatccaagcagagcaacaacaaatacgccgccagctcctacctgagcctgacacctgagcagtggaagtcccacagatcctacagctgccaagtgacccacgaaggcagcaccgtggaaaagacagtggcccctacagagtgcagcggcagagccgattgcggctttaccagcgagagctaccagcagggcgtgctgagcgccaccatcctgtacgagatcctgctgggcaaggccaccctgtacgccgtgctggtgtctgccctggtgctgatggctatggtcaagcggaaggacagccggggacgcgccaagagaagcggatctggcgtgaagcagaccctgaatttcgacctgctgaagctggctggcgacgtggaatccaacccaggccctactagtatggactggatttggcgcatccttttccttgtcggcgctgctaccggcgcgcattccgggccccagctccagctgcaagagtctggacctggcctggtcaagcctagcgagacactgagcctgacctgtaccgtgtccggcgatagcatcagcagcggcgattactactggggctggatcagacagcctcctggcaaaggactggaatggatcggccacatctactacagcggcgtgacctactacaaccccagcctgaagtccagagtgaccatcagcgtggacaccagccggaaccagttctccctgaagctgtctagcgtgacagccgccgataccgccgtgtactactgcaccagagaggacagcagcaactggcggagtagaggccagggaacactggtcacagttagctctggatccggcggaggcggaagtggaggcggaggatctggcggcggaggctctttcgaacaggtgcaactccagcagtccggaagcgagcttatgatgccaggggcatcagtgaagatcagctgcaaggctactggctacaccttctctaattactggatagagtgggttaaacaaaggccagggcacggcctggaatggatcggcgagatcctgcctgggacaggccgaaccatttataacgagaagttcaaaggcaaggctactttcaccgcagatataagctctaatacagtgcaaatgcagctctcttccctgacaagtgaggatagtgccgtgtattattgcgcacgaagagattactatggaaatttttattacgctatggattattggggtcaaggaacaagtgtgaccgttagcagcacgcgtgcctctacaaagggaccctccgtgtttcctctggctcccagcagcaagtctacaagcggaggaacagccgctctgggctgcctggtcaaggattactttcccgagcctgtgaccgtgtcctggaatagcggagcactgacaagcggcgtgcacacctttccagccgtgctgcaaagcagcggcctgtactctctgagcagcgtggtcacagtgcctagctctagcctgggcacccagacctacatctgcaatgtgaaccacaagcctagcaacaccaaggtggacaagagagtggaacccaagagctgtatccccgaggacacattcttcccaagccccgagagcagctgcgacgtgaagctggtggaaaagagcttcgagacagacaccaacctgaacttccagaacctgagcgtgatcggcttcagaatcctgctgctgaaagtggccggctttaacctgctgatgaccctgcggctgtggtccagc

SEQ ID NO: 3363 - DNA, 2688 bp, Artificial Sequence
  Synthetic Polynucloetide
atggccttaccagtgaccgccttgctcctgccgctggccttgctgctccacgccgccaggccggaagtgcagctggttgaatctggcggaggactggttcagcctggcggatctctgagactgtcttgtgccgccagcggcttcagcttcagcgacttttggatgagctgggtccgacaggcccctggcaaaggacttgaatgggtcgccacaatcagccaggccggcagcgagaaggactacgtggactctgtgaagggcagattcaccatcagccgggacaacgccaagaagtccctgtacctccagatgaacagcctgagagccgaggacaccgccgtgtactattgtgcctctggcgtgtacagcttcgactacagaggccagggcaccctggtcacagtctcttctggtaccggcggaggcggatctggcggcggaggtagcggtggcggaggatctgaattcgacatccagatgacccagagccctgccagcctgtccgtgtctgtgggcgagacagtgaccatcacctgtcgggccagcgagaacatctacagcaacctggcctggtatcagcagaagcagggcaagagcccccaactgctggtgtacgccgccaccaatctggccgatggcgtgcccagcagattttccggctctggcagcggcacccagtacagcctgaagatcaacagcctccagagcgaggacttcggcagctactactgccagcacttctggggcacctggacctttggaggaggcaccaccctggaaatcaagctcgagggacagcctaaggccaatcctaccgtgacactgttccctccaagcagcgaagaactccaggccaacaaggccacacttgtgtgcctgatctccgacttctaccctggggctgtgacagtggcttggaaggccgatggatctcctgtgaaagccggcgtggaaaccaccaagccatccaagcagagcaacaacaaatacgccgccagctcctacctgagcctgacacctgagcagtggaagtcccacagatcctacagctgccaagtgacccacgaaggcagcaccgtggaaaagacagtggcccctacagagtgcagcggcagagccgattgcggctttaccagcgagagctaccagcagggcgtgctgagcgccaccatcctgtacgagatcctgctgggcaaggccaccctgtacgccgtgctggtgtctgccctggtgctgatggctatggtcaagcggaaggacagccggggacgcgccaagagaagcggatctggcgtgaagcagaccctgaatttcgacctgctgaagctggctggcgacgtggaatccaacccaggccctactagtatggactggatttggcgcatccttttccttgtcggcgctgctaccggcgcgcattccgggccccagctccagctgcaagagtctggacctggcctggtcaagcctagcgagacactgagcctgacctgtaccgtgtccggcgatagcatcagcagcggcgattactactggggctggatcagacagcctcctggcaaaggactggaatggatcggccacatctactacagcggcgtgacctactacaaccccagcctgaagtccagagtgaccatcagcgtggacaccagccggaaccagttctccctgaagctgtctagcgtgacagccgccgataccgccgtgtactactgcaccagagaggacagcagcaactggcggagtagaggccagggaacactggtcacagttagctctggatccggcggaggcggaagtggaggcggaggatctggcggcggaggctctttcgaagaagtgcaactccagcagagcggccctgagcttgtgaagcctggcgcttccgtgaagatgagctgcaaggccagcggctacaccttcaccgactactacatgaagtggatgaagcagagccacggcaagtccctggaatggatcggcgacatcaaccccaacaacggcggcaccacctacaaccagaagttcaagggcaaggccaccctgaccgtggacaagagcagcagcaccgcctacatgcaactgaacagcctgaccagcgaggacagcgccgtgtactactgcgccagagactacggctacggctatttcgactactggggccagggcacaaccctgacagtgtcctctacgcgtgcctctacaaagggaccctccgtgtttcctctggctcccagcagcaagtctacaagcggaggaacagccgctctgggctgcctggtcaaggattactttcccgagcctgtgaccgtgtcctggaatagcggagcactgacaagcggcgtgcacacctttccagccgtgctgcaaagcagcggcctgtactctctgagcagcgtggtcacagtgcctagctctagcctgggcacccagacctacatctgcaatgtgaaccacaagcctagcaacaccaaggtggacaagagagtggaacccaagagctgtatccccgaggacacattcttcccaagccccgagagcagctgcgacgtgaagctggtggaaaagagcttcgagacagacaccaacctgaacttccagaacctgagcgtgatcggcttcagaatcctgctgctgaaagtggccggctttaacctgctgatgaccctgcggctgtggtccagc

SEQ ID NO: 3364 - DNA, 2697 bp, Artificial Sequence
  Synthetic Polynucloetide
atggccttaccagtgaccgccttgctcctgccgctggccttgctgctccacgccgccaggccggaagtgcagctggttgaatctggcggaggactggttcagcctggcggatctctgagactgtcttgtgccgccagcggcttcagcttcagcgacttttggatgagctgggtccgacaggcccctggcaaaggacttgaatgggtcgccacaatcagccaggccggcagcgagaaggactacgtggactctgtgaagggcagattcaccatcagccgggacaacgccaagaagtccctgtacctccagatgaacagcctgagagccgaggacaccgccgtgtactattgtgcctctggcgtgtacagcttcgactacagaggccagggcaccctggtcacagtctcttctggtaccggcggaggcggatctggcggcggaggtagcggtggcggaggatctgaattcgagatcgtgctgacacagagccctggcaccctgagcctgtctccaggcgaaagagccacactgagctgtcgggcctctcagagcgtgggaggctacctggcttggtatcagcagaagccaggccaggcccccagactgctgatctacgacgccagcaatcgggccacaggcatccccgccagattttctggcagcggctccggcaccgacttcaccctgacaatcagcagcctggaacccgaggacttcgccgtgtactactgccagcagcggaacaactggccccccatgtacacattcggccagggcaccaagctggaaatcaagagactcgagggacagcctaaggccaatcctaccgtgacactgttccctccaagcagcgaagaactccaggccaacaaggccacacttgtgtgcctgatctccgacttctaccctggggctgtgacagtggcttggaaggccgatggatctcctgtgaaagccggcgtggaaaccaccaagccatccaagcagagcaacaacaaatacgccgccagctcctacctgagcctgacacctgagcagtggaagtcccacagatcctacagctgccaagtgacccacgaaggcagcaccgtggaaaagacagtggcccctacagagtgcagcggcagagccgattgcggctttaccagcgagagctaccagcagggcgtgctgagcgccaccatcctgtacgagatcctgctgggcaaggccaccctgtacgccgtgctggtgtctgccctggtgctgatggctatggtcaagcggaaggacagccggggacgcgccaagagaagcggatctggcgtgaagcagaccctgaatttcgacctgctgaagctggctggcgacgtggaatccaacccaggccctactagtatggactggatttggcgcatccttttccttgtcggcgctgctaccggcgcgcattccgggccccagctccagctgcaagagtctggacctggcctggtcaagcctagcgagacactgagcctgacctgtaccgtgtccggcgatagcatcagcagcggcgattactactggggctggatcagacagcctcctggcaaaggactggaatggatcggccacatctactacagcggcgtgacctactacaaccccagcctgaagtccagagtgaccatcagcgtggacaccagccggaaccagttctccctgaagctgtctagcgtgacagccgccgataccgccgtgtactactgcaccagagaggacagcagcaactggcggagtagaggccagggaacactggtcacagttagctctggatccggcggaggcggaagtggaggcggaggatctggcggcggaggctctttcgaacaggtgcaactggtgcagagcggagccgaagtgaagaaacccggcagcagcgtgaaggtgtcctgcaaggcttccggcggcaccttcagcagctacgccatttcttgggtgcgccaggctcctggacagggcctggaatggatgggcggcatcatccctatcctgggcaccgccaactacgcccagaaattccagggcagagtgaccatcaccgccgacgagagcaccagcaccgcctacatggaactgagcagcctgcggagcgaggacacagccgtgtattattgcgccagatggggcggaggggccttcgacatttggggccagggaacaatggtcaccgtgtccagcacgcgtgcctctacaaagggaccctccgtgtttcctctggctcccagcagcaagtctacaagcggaggaacagccgctctgggctgcctggtcaaggattactttcccgagcctgtgaccgtgtcctggaatagcggagcactgacaagcggcgtgcacacctttccagccgtgctgcaaagcagcggcctgtactctctgagcagcgtggtcacagtgcctagctctagcctgggcacccagacctacatctgcaatgtgaaccacaagcctagcaacaccaaggtggacaagagagtggaacccaagagctgtatccccgaggacacattcttcccaagccccgagagcagctgcgacgtgaagctggtggaaaagagcttcgagacagacaccaacctgaacttccagaacctgagcgtgatcggcttcagaatcctgctgctgaaagtggccggctttaacctgctgatgaccctgcggctgtggtccagc

SEQ ID NO: 3365 - DNA, 2682 bp, Artificial Sequence
  Synthetic Polynucloetide
atggccttaccagtgaccgccttgctcctgccgctggccttgctgctccacgccgccaggccggaagtgcagctggttgaatctggcggaggactggttcagcctggcggatctctgagactgtcttgtgccgccagcggcttcagcttcagcgacttttggatgagctgggtccgacaggcccctggcaaaggacttgaatgggtcgccacaatcagccaggccggcagcgagaaggactacgtggactctgtgaagggcagattcaccatcagccgggacaacgccaagaagtccctgtacctccagatgaacagcctgagagccgaggacaccgccgtgtactattgtgcctctggcgtgtacagcttcgactacagaggccagggcaccctggtcacagtctcttctggtaccggcggaggcggatctggcggcggaggtagcggtggcggaggatctgaattccagatcgtgctgacacagagccctgccctgatgagcgccagccctggcgagaaagtgaccatgacctgtagcgccagcagcagcgtgcgctacatgtactggtatcagcagaagcccagaagcagccccaagccctggattcacctgaccagcaatctggcctctggcgtgcccgctagattttccggctctggcagcggcaccagctacagcctgaccatcagcagcatggaagccgaggacgccgccacctactactgccagcagtggtccagccaccccttcacatttggctccggcaccaagctggaaatcaagctcgagggacagcctaaggccaatcctaccgtgacactgttccctccaagcagcgaagaactccaggccaacaaggccacacttgtgtgcctgatctccgacttctaccctggggctgtgacagtggcttggaaggccgatggatctcctgtgaaagccggcgtggaaaccaccaagccatccaagcagagcaacaacaaatacgccgccagctcctacctgagcctgacacctgagcagtggaagtcccacagatcctacagctgccaagtgacccacgaaggcagcaccgtggaaaagacagtggcccctacagagtgcagcggcagagccgattgcggctttaccagcgagagctaccagcagggcgtgctgagcgccaccatcctgtacgagatcctgctgggcaaggccaccctgtacgccgtgctggtgtctgccctggtgctgatggctatggtcaagcggaaggacagccggggacgcgccaagagaagcggatctggcgtgaagcagaccctgaatttcgacctgctgaagctggctggcgacgtggaatccaacccaggccctactagtatggactggatttggcgcatccttttccttgtcggcgctgctaccggcgcgcattccgggccccagctccagctgcaagagtctggacctggcctggtcaagcctagcgagacactgagcctgacctgtaccgtgtccggcgatagcatcagcagcggcgattactactggggctggatcagacagcctcctggcaaaggactggaatggatcggccacatctactacagcggcgtgacctactacaaccccagcctgaagtccagagtgaccatcagcgtggacaccagccggaaccagttctccctgaagctgtctagcgtgacagccgccgataccgccgtgtactactgcaccagagaggacagcagcaactggcggagtagaggccagggaacactggtcacagttagctctggatccggcggaggcggaagtggaggcggaggatctggcggcggaggctctttcgaagatgtgcaactccaggaaagcggccctggccttgtgaagcctagccagagcctgtccctgacctgtaccgtgaccggcttcagcatcaccagcgactactcttggaactggatcagacagttccctggcaacaaactggaatggatgggctacatcagctactccggccacacctcctacaaccccagcctggaaagccggatctccatcaccagagacaccagcaagaaccagttcttcttgcaactgaacagcgtgaccaccgaggataccgccacatattactgtaccagaggcaactgggacgtggtgtactggggccagggcacacttgtgaccgtgtctgctacgcgtgcctctacaaagggaccctccgtgtttcctctggctcccagcagcaagtctacaagcggaggaacagccgctctgggctgcctggtcaaggattactttcccgagcctgtgaccgtgtcctggaatagcggagcactgacaagcggcgtgcacacctttccagccgtgctgcaaagcagcggcctgtactctctgagcagcgtggtcacagtgcctagctctagcctgggcacccagacctacatctgcaatgtgaaccacaagcctagcaacaccaaggtggacaagagagtggaacccaagagctgtatccccgaggacacattcttcccaagccccgagagcagctgcgacgtgaagctggtggaaaagagcttcgagacagacaccaacctgaacttccagaacctgagcgtgatcggcttcagaatcctgctgctgaaagtggccggctttaacctgctgatgaccctgcggctgtggtccagc

SEQ ID NO: 3366 - DNA, 2712 bp, Artificial Sequence
  Synthetic Polynucloetide
atggccttaccagtgaccgccttgctcctgccgctggccttgctgctccacgccgccaggccggaagtgcagctggttgaatctggcggaggactggttcagcctggcggatctctgagactgtcttgtgccgccagcggcttcagcttcagcgacttttggatgagctgggtccgacaggcccctggcaaaggacttgaatgggtcgccacaatcagccaggccggcagcgagaaggactacgtggactctgtgaagggcagattcaccatcagccgggacaacgccaagaagtccctgtacctccagatgaacagcctgagagccgaggacaccgccgtgtactattgtgcctctggcgtgtacagcttcgactacagaggccagggcaccctggtcacagtctcttctggtaccggcggaggcggatctggcggcggaggtagcggtggcggaggatctgaattcgacgtcgtgatgacccagagccctctgagcctgcctgtgacactgggacagcctgccagcatctcctgtcggagcagccagagcatcgtgcacagcgacggcaacacctacctggaatggtatcagcagcggccaggccagagccccagacggctgatctacaaggtgtccaacagattcagcggcgtgcccgacagattctccggcagcggctctggcaccgacttcaccctgaagatcagcagagtggaagccgaggacgtgggcgtgtactactgttttcaaggcagccacgccccctggacctttggcggaggaacaaaggtggaaatcaagctcgagggacagcctaaggccaatcctaccgtgacactgttccctccaagcagcgaagaactccaggccaacaaggccacacttgtgtgcctgatctccgacttctaccctggggctgtgacagtggcttggaaggccgatggatctcctgtgaaagccggcgtggaaaccaccaagccatccaagcagagcaacaacaaatacgccgccagctcctacctgagcctgacacctgagcagtggaagtcccacagatcctacagctgccaagtgacccacgaaggcagcaccgtggaaaagacagtggcccctacagagtgcagcggcagagccgattgcggctttaccagcgagagctaccagcagggcgtgctgagcgccaccatcctgtacgagatcctgctgggcaaggccaccctgtacgccgtgctggtgtctgccctggtgctgatggctatggtcaagcggaaggacagccggggacgcgccaagagaagcggatctggcgtgaagcagaccctgaatttcgacctgctgaagctggctggcgacgtggaatccaacccaggccctactagtatggactggatttggcgcatccttttccttgtcggcgctgctaccggcgcgcattccgggccccagctccagctgcaagagtctggacctggcctggtcaagcctagcgagacactgagcctgacctgtaccgtgtccggcgatagcatcagcagcggcgattactactggggctggatcagacagcctcctggcaaaggactggaatggatcggccacatctactacagcggcgtgacctactacaaccccagcctgaagtccagagtgaccatcagcgtggacaccagccggaaccagttctccctgaagctgtctagcgtgacagccgccgataccgccgtgtactactgcaccagagaggacagcagcaactggcggagtagaggccagggaacactggtcacagttagctctggatccggcggaggcggaagtggaggcggaggatctggcggcggaggctctttcgaagaagtgcaactggtggaatcaggcggcggactggtgcagcctggcggatctctgagactgagctgtgccgccagcggcttcaccttcagcagctacggaatgcactgggtgcgccaggcccctggcaaaggactggaatgggtggcctacatcaccaccagaagcagcaccatctactacgccgacagcgtgaagggccggttcaccatctccagagacaacgccaagaacagcctgtacctccagatgaactccctgcgggccgaggacaccgccgtgtactattgcaccagagagcccctgaccggctactacgctatggactattggggccagggcaccagcgtgaccgtgtctagtacgcgtgcctctacaaagggaccctccgtgtttcctctggctcccagcagcaagtctacaagcggaggaacagccgctctgggctgcctggtcaaggattactttcccgagcctgtgaccgtgtcctggaatagcggagcactgacaagcggcgtgcacacctttccagccgtgctgcaaagcagcggcctgtactctctgagcagcgtggtcacagtgcctagctctagcctgggcacccagacctacatctgcaatgtgaaccacaagcctagcaacaccaaggtggacaagagagtggaacccaagagctgtatccccgaggacacattcttcccaagccccgagagcagctgcgacgtgaagctggtggaaaagagcttcgagacagacaccaacctgaacttccagaacctgagcgtgatcggcttcagaatcctgctgctgaaagtggccggctttaacctgctgatgaccctgcggctgtggtccagc

SEQ ID NO: 3367 - DNA, 2688 bp, Artificial Sequence
  Synthetic Polynucloetide
atggccttaccagtgaccgccttgctcctgccgctggccttgctgctccacgccgccaggccggaagtgcagctggttgaatctggcggaggactggttcagcctggcggatctctgagactgtcttgtgccgccagcggcttcagcttcagcgacttttggatgagctgggtccgacaggcccctggcaaaggacttgaatgggtcgccacaatcagccaggccggcagcgagaaggactacgtggactctgtgaagggcagattcaccatcagccgggacaacgccaagaagtccctgtacctccagatgaacagcctgagagccgaggacaccgccgtgtactattgtgcctctggcgtgtacagcttcgactacagaggccagggcaccctggtcacagtctcttctggtaccggcggaggcggatctggcggcggaggtagcggtggcggaggatctgaattcgacatccagatgacccagagccccagcagcctgtctgccagcgtgggcgacagagtgaccatcacctgtagagccagccagagcatcagcctgtggctgaactggtatcagcagaagcccggcaaggcccccaagctgctgatctacgccgccagcacactccagagcggcgtgccaagcagattttccggcagcggctccggcaccgacttcaccctgacaatcagctccctccagcccgaggacttcgccacctactactgccagcagtactacaccagcccctacaccttcggccagggcaccaaggtggaaatcaagagactcgagggacagcctaaggccaatcctaccgtgacactgttccctccaagcagcgaagaactccaggccaacaaggccacacttgtgtgcctgatctccgacttctaccctggggctgtgacagtggcttggaaggccgatggatctcctgtgaaagccggcgtggaaaccaccaagccatccaagcagagcaacaacaaatacgccgccagctcctacctgagcctgacacctgagcagtggaagtcccacagatcctacagctgccaagtgacccacgaaggcagcaccgtggaaaagacagtggcccctacagagtgcagcggcagagccgattgcggctttaccagcgagagctaccagcagggcgtgctgagcgccaccatcctgtacgagatcctgctgggcaaggccaccctgtacgccgtgctggtgtctgccctggtgctgatggctatggtcaagcggaaggacagccggggacgcgccaagagaagcggatctggcgtgaagcagaccctgaatttcgacctgctgaagctggctggcgacgtggaatccaacccaggccctactagtatggactggatttggcgcatccttttccttgtcggcgctgctaccggcgcgcattccgggccccagctccagctgcaagagtctggacctggcctggtcaagcctagcgagacactgagcctgacctgtaccgtgtccggcgatagcatcagcagcggcgattactactggggctggatcagacagcctcctggcaaaggactggaatggatcggccacatctactacagcggcgtgacctactacaaccccagcctgaagtccagagtgaccatcagcgtggacaccagccggaaccagttctccctgaagctgtctagcgtgacagccgccgataccgccgtgtactactgcaccagagaggacagcagcaactggcggagtagaggccagggaacactggtcacagttagctctggatccggcggaggcggaagtggaggcggaggatctggcggcggaggctctttcgaacaggtgcaactgctggaatctggcggcggactggtgcagcctggcggatctctgagactgagctgtgccgccagcggcttcaccttcagcagctacgccatgagctgggtgcgccaggcccctggaaaaggactggaatgggtgtccgtgatccggtccagcggcagcagcacctattacgccgatagcgtgaagggccggttcaccatcagccgggacaacagcaagaacaccctgtacctccagatgaacagcctgcgggccgaggacaccgccgtgtactattgtgctaggggaggcggctacttcgactactggggccagggaacactcgtgaccgtgtcctctacgcgtgcctctacaaagggaccctccgtgtttcctctggctcccagcagcaagtctacaagcggaggaacagccgctctgggctgcctggtcaaggattactttcccgagcctgtgaccgtgtcctggaatagcggagcactgacaagcggcgtgcacacctttccagccgtgctgcaaagcagcggcctgtactctctgagcagcgtggtcacagtgcctagctctagcctgggcacccagacctacatctgcaatgtgaaccacaagcctagcaacaccaaggtggacaagagagtggaacccaagagctgtatccccgaggacacattcttcccaagccccgagagcagctgcgacgtgaagctggtggaaaagagcttcgagacagacaccaacctgaacttccagaacctgagcgtgatcggcttcagaatcctgctgctgaaagtggccggctttaacctgctgatgaccctgcggctgtggtccagc

SEQ ID NO: 3368 - DNA, 2697 bp, Artificial Sequence
  Synthetic Polynucloetide
atggccttaccagtgaccgccttgctcctgccgctggccttgctgctccacgccgccaggccggaagtgcagctggttgaatctggcggaggactggttcagcctggcggatctctgagactgtcttgtgccgccagcggcttcagcttcagcgacttttggatgagctgggtccgacaggcccctggcaaaggacttgaatgggtcgccacaatcagccaggccggcagcgagaaggactacgtggactctgtgaagggcagattcaccatcagccgggacaacgccaagaagtccctgtacctccagatgaacagcctgagagccgaggacaccgccgtgtactattgtgcctctggcgtgtacagcttcgactacagaggccagggcaccctggtcacagtctcttctggtaccggcggaggcggatctggcggcggaggtagcggtggcggaggatctgaattcgacatccagatgacccagagccccagcagcctgtctgccagcgtgggcgacagagtgaccatcacctgtagagccagccagagcatcagcagctacctgaactggtatcagcagaagcccggcaaggcccccaaactgctgatctacgccgtgtccacactccagagcggcgtgcccagcagattttctggcagcggctccggcaccgacttcaccctgacaatcagctccctccagcccgaggacttcgccacctactactgtcagcagagcggcaccttccctcccaccacatttggacagggcaccaaggtggaaatcaagagactcgagggacagcctaaggccaatcctaccgtgacactgttccctccaagcagcgaagaactccaggccaacaaggccacacttgtgtgcctgatctccgacttctaccctggggctgtgacagtggcttggaaggccgatggatctcctgtgaaagccggcgtggaaaccaccaagccatccaagcagagcaacaacaaatacgccgccagctcctacctgagcctgacacctgagcagtggaagtcccacagatcctacagctgccaagtgacccacgaaggcagcaccgtggaaaagacagtggcccctacagagtgcagcggcagagccgattgcggctttaccagcgagagctaccagcagggcgtgctgagcgccaccatcctgtacgagatcctgctgggcaaggccaccctgtacgccgtgctggtgtctgccctggtgctgatggctatggtcaagcggaaggacagccggggacgcgccaagagaagcggatctggcgtgaagcagaccctgaatttcgacctgctgaagctggctggcgacgtggaatccaacccaggccctactagtatggactggatttggcgcatccttttccttgtcggcgctgctaccggcgcgcattccgggccccagctccagctgcaagagtctggacctggcctggtcaagcctagcgagacactgagcctgacctgtaccgtgtccggcgatagcatcagcagcggcgattactactggggctggatcagacagcctcctggcaaaggactggaatggatcggccacatctactacagcggcgtgacctactacaaccccagcctgaagtccagagtgaccatcagcgtggacaccagccggaaccagttctccctgaagctgtctagcgtgacagccgccgataccgccgtgtactactgcaccagagaggacagcagcaactggcggagtagaggccagggaacactggtcacagttagctctggatccggcggaggcggaagtggaggcggaggatctggcggcggaggctctttcgaacaggtgcaactgctggaatctggcggcggactggtgcagcctggcggatctctgagactgagctgtgccgccagcggcttcaccttcagcagccacggaatgcactgggtgcgccaggcccctggaaagggactggaatgggtgtccgtgatctccggcagcggcagcaataccggctacgccgatagcgtgaagggccggttcaccatcagccgggacaacagcaagaacaccctgtacctccagatgaacagcctgcgggccgaggacaccgccgtgtactattgtgccagacagtggggcagctacgccttcgattcttggggccagggcaccctcgtgaccgtgtcatctacgcgtgcctctacaaagggaccctccgtgtttcctctggctcccagcagcaagtctacaagcggaggaacagccgctctgggctgcctggtcaaggattactttcccgagcctgtgaccgtgtcctggaatagcggagcactgacaagcggcgtgcacacctttccagccgtgctgcaaagcagcggcctgtactctctgagcagcgtggtcacagtgcctagctctagcctgggcacccagacctacatctgcaatgtgaaccacaagcctagcaacaccaaggtggacaagagagtggaacccaagagctgtatccccgaggacacattcttcccaagccccgagagcagctgcgacgtgaagctggtggaaaagagcttcgagacagacaccaacctgaacttccagaacctgagcgtgatcggcttcagaatcctgctgctgaaagtggccggctttaacctgctgatgaccctgcggctgtggtccagc

SEQ ID NO: 3369 - DNA, 2727 bp, Artificial Sequence
  Synthetic Polynucloetide
atggccttaccagtgaccgccttgctcctgccgctggccttgctgctccacgccgccaggccggaagtgcagctggttgaatctggcggaggactggttcagcctggcggatctctgagactgtcttgtgccgccagcggcttcagcttcagcgacttttggatgagctgggtccgacaggcccctggcaaaggacttgaatgggtcgccacaatcagccaggccggcagcgagaaggactacgtggactctgtgaagggcagattcaccatcagccgggacaacgccaagaagtccctgtacctccagatgaacagcctgagagccgaggacaccgccgtgtactattgtgcctctggcgtgtacagcttcgactacagaggccagggcaccctggtcacagtctcttctggtaccggcggaggcggatctggcggcggaggtagcggtggcggaggatctgaattcgacatcgtgatgagccagagccctagcagcctggccgtgtccgtgggcgagaaagtgaccatgagctgcaagagcagccagtccctgctgcacagcagcaaccagaagaactacctggcctggtatcagcagaagcccggccagtcccccaaggtgctgatctactgggccagcaccagagaaagcggcgtgcccgatagattcaccggcagcggctctggcaccgacttcaccctgaccatcaccagcgtgaagtccgaggacctggctgtgtactactgccagcagtattacagctacccctggaccttcggcggaggcacccggctggaaatcaaaagactcgagggacagcctaaggccaatcctaccgtgacactgttccctccaagcagcgaagaactccaggccaacaaggccacacttgtgtgcctgatctccgacttctaccctggggctgtgacagtggcttggaaggccgatggatctcctgtgaaagccggcgtggaaaccaccaagccatccaagcagagcaacaacaaatacgccgccagctcctacctgagcctgacacctgagcagtggaagtcccacagatcctacagctgccaagtgacccacgaaggcagcaccgtggaaaagacagtggcccctacagagtgcagcggcagagccgattgcggctttaccagcgagagctaccagcagggcgtgctgagcgccaccatcctgtacgagatcctgctgggcaaggccaccctgtacgccgtgctggtgtctgccctggtgctgatggctatggtcaagcggaaggacagccggggacgcgccaagagaagcggatctggcgtgaagcagaccctgaatttcgacctgctgaagctggctggcgacgtggaatccaacccaggccctactagtatggactggatttggcgcatccttttccttgtcggcgctgctaccggcgcgcattccgggccccagctccagctgcaagagtctggacctggcctggtcaagcctagcgagacactgagcctgacctgtaccgtgtccggcgatagcatcagcagcggcgattactactggggctggatcagacagcctcctggcaaaggactggaatggatcggccacatctactacagcggcgtgacctactacaaccccagcctgaagtccagagtgaccatcagcgtggacaccagccggaaccagttctccctgaagctgtctagcgtgacagccgccgataccgccgtgtactactgcaccagagaggacagcagcaactggcggagtagaggccagggaacactggtcacagttagctctggatccggcggaggcggaagtggaggcggaggatctggcggcggaggctctttcgaagaagtgcaactccagcagagcgtggccgagcttgtgaagcctggcgcttccgtgaagatgtcctgcaaggtgtccggctacaccctgacagaccacaccatccactggatgaagcagcggcctgagcagggcctggaatggatcggctacatctaccccagggacggcatcaccggctacaacgagaagttcaagggcaaggccacactgaccgccgacaccagcagcagcacagcctacatgcaactgaacagcctgaccagcgaggacagcgccgtgtacttctgtgccagatggggctacagctacagaaactacgcctactactacgactactggggccagggcacaaccctgaccgtgtctagtacgcgtgcctctacaaagggaccctccgtgtttcctctggctcccagcagcaagtctacaagcggaggaacagccgctctgggctgcctggtcaaggattactttcccgagcctgtgaccgtgtcctggaatagcggagcactgacaagcggcgtgcacacctttccagccgtgctgcaaagcagcggcctgtactctctgagcagcgtggtcacagtgcctagctctagcctgggcacccagacctacatctgcaatgtgaaccacaagcctagcaacaccaaggtggacaagagagtggaacccaagagctgtatccccgaggacacattcttcccaagccccgagagcagctgcgacgtgaagctggtggaaaagagcttcgagacagacaccaacctgaacttccagaacctgagcgtgatcggcttcagaatcctgctgctgaaagtggccggctttaacctgctgatgaccctgcggctgtggtccagc

SEQ ID NO: 3370 - DNA, 2718 bp, Artificial Sequence
  Synthetic Polynucloetide
atggccttaccagtgaccgccttgctcctgccgctggccttgctgctccacgccgccaggccggaagtgcagctggttgaatctggcggaggactggttcagcctggcggatctctgagactgtcttgtgccgccagcggcttcagcttcagcgacttttggatgagctgggtccgacaggcccctggcaaaggacttgaatgggtcgccacaatcagccaggccggcagcgagaaggactacgtggactctgtgaagggcagattcaccatcagccgggacaacgccaagaagtccctgtacctccagatgaacagcctgagagccgaggacaccgccgtgtactattgtgcctctggcgtgtacagcttcgactacagaggccagggcaccctggtcacagtctcttctggtaccggcggaggcggatctggcggcggaggtagcggtggcggaggatctgaattcgagatcgtgctgacacagagccctggcaccctgagcctgtctccaggcgaaagagccacactgagctgtcgggccagccagagcgtgtccagctcttacctggcctggtatcagcagaagcccggccaggctccccggctgctgatctacggaacaagcagcagagccaccggcatccccgacagattttctggcagcggctccggcaccgacttcaccctgacaatcagcagactggaacccgaggacttcgccgtgtactactgccagcagtacggcagcagccccttcacctttggcggaggcaccaaggtggaaatcaagagactcgagggacagcctaaggccaatcctaccgtgacactgttccctccaagcagcgaagaactccaggccaacaaggccacacttgtgtgcctgatctccgacttctaccctggggctgtgacagtggcttggaaggccgatggatctcctgtgaaagccggcgtggaaaccaccaagccatccaagcagagcaacaacaaatacgccgccagctcctacctgagcctgacacctgagcagtggaagtcccacagatcctacagctgccaagtgacccacgaaggcagcaccgtggaaaagacagtggcccctacagagtgcagcggcagagccgattgcggctttaccagcgagagctaccagcagggcgtgctgagcgccaccatcctgtacgagatcctgctgggcaaggccaccctgtacgccgtgctggtgtctgccctggtgctgatggctatggtcaagcggaaggacagccggggacgcgccaagagaagcggatctggcgtgaagcagaccctgaatttcgacctgctgaagctggctggcgacgtggaatccaacccaggccctactagtatggactggatttggcgcatccttttccttgtcggcgctgctaccggcgcgcattccgggccccagctccagctgcaagagtctggacctggcctggtcaagcctagcgagacactgagcctgacctgtaccgtgtccggcgatagcatcagcagcggcgattactactggggctggatcagacagcctcctggcaaaggactggaatggatcggccacatctactacagcggcgtgacctactacaaccccagcctgaagtccagagtgaccatcagcgtggacaccagccggaaccagttctccctgaagctgtctagcgtgacagccgccgataccgccgtgtactactgcaccagagaggacagcagcaactggcggagtagaggccagggaacactggtcacagttagctctggatccggcggaggcggaagtggaggcggaggatctggcggcggaggctctttcgaacaggtgcaactccaggaatctggccccggactggctaagcccagcgagacactgagcctgacctgtaccgtgtccggcgacagcatcaccagctactactggtcctggatcagacagccccctggcaagggcctggaatggatcggctacatctactacagcggcagcaccaactacaaccccagcctgaagtccagagtgaccatcagcgtggacaccagcaagaaccagttctccctgaagctgagcagcgtgacagccgccgacaccgccgtgtattattgcgccagagatcagcggagaatcgccgctgccggcacccacttttacggcatggatgtgtggggccagggcaccaccgtgaccgtgtcatctacgcgtgcctctacaaagggaccctccgtgtttcctctggctcccagcagcaagtctacaagcggaggaacagccgctctgggctgcctggtcaaggattactttcccgagcctgtgaccgtgtcctggaatagcggagcactgacaagcggcgtgcacacctttccagccgtgctgcaaagcagcggcctgtactctctgagcagcgtggtcacagtgcctagctctagcctgggcacccagacctacatctgcaatgtgaaccacaagcctagcaacaccaaggtggacaagagagtggaacccaagagctgtatccccgaggacacattcttcccaagccccgagagcagctgcgacgtgaagctggtggaaaagagcttcgagacagacaccaacctgaacttccagaacctgagcgtgatcggcttcagaatcctgctgctgaaagtggccggctttaacctgctgatgaccctgcggctgtggtccagc

SEQ ID NO: 3371 - DNA, 2694 bp, Artificial Sequence
  Synthetic Polynucloetide
atggccttaccagtgaccgccttgctcctgccgctggccttgctgctccacgccgccaggccggaagtgcagctggttgaatctggcggaggactggttcagcctggcggatctctgagactgtcttgtgccgccagcggcttcagcttcagcgacttttggatgagctgggtccgacaggcccctggcaaaggacttgaatgggtcgccacaatcagccaggccggcagcgagaaggactacgtggactctgtgaagggcagattcaccatcagccgggacaacgccaagaagtccctgtacctccagatgaacagcctgagagccgaggacaccgccgtgtactattgtgcctctggcgtgtacagcttcgactacagaggccagggcaccctggtcacagtctcttctggtaccggcggaggcggatctggcggcggaggtagcggtggcggaggatctgaattcgacatcctgctgacccagagccccgtgatcctgtccgtgtctcctggcgagagagtgtccttcagctgtcgggccagccagagcatcggcaccaacatccactggtatcagcagcggaccaacggcagccccagactgctgattaagtacgccagcgagtccatcagcggcatccccagcagattttccggcagcggctccggcaccgacttcaccctgagcatcaacagcgtggaaagcgaggacattgccgactactactgccagcagaacaacaactggcccaccaccttcggagccggcaccaagctggaactgaagctcgagggacagcctaaggccaatcctaccgtgacactgttccctccaagcagcgaagaactccaggccaacaaggccacacttgtgtgcctgatctccgacttctaccctggggctgtgacagtggcttggaaggccgatggatctcctgtgaaagccggcgtggaaaccaccaagccatccaagcagagcaacaacaaatacgccgccagctcctacctgagcctgacacctgagcagtggaagtcccacagatcctacagctgccaagtgacccacgaaggcagcaccgtggaaaagacagtggcccctacagagtgcagcggcagagccgattgcggctttaccagcgagagctaccagcagggcgtgctgagcgccaccatcctgtacgagatcctgctgggcaaggccaccctgtacgccgtgctggtgtctgccctggtgctgatggctatggtcaagcggaaggacagccggggacgcgccaagagaagcggatctggcgtgaagcagaccctgaatttcgacctgctgaagctggctggcgacgtggaatccaacccaggccctactagtatggactggatttggcgcatccttttccttgtcggcgctgctaccggcgcgcattccgggccccagctccagctgcaagagtctggacctggcctggtcaagcctagcgagacactgagcctgacctgtaccgtgtccggcgatagcatcagcagcggcgattactactggggctggatcagacagcctcctggcaaaggactggaatggatcggccacatctactacagcggcgtgacctactacaaccccagcctgaagtccagagtgaccatcagcgtggacaccagccggaaccagttctccctgaagctgtctagcgtgacagccgccgataccgccgtgtactactgcaccagagaggacagcagcaactggcggagtagaggccagggaacactggtcacagttagctctggatccggcggaggcggaagtggaggcggaggatctggcggcggaggctctttcgaacaggtgcagctgaagcagagcggacctggcctggtgcagcctagccagagcctgtccatcacctgtaccgtgtccggcttcagcctgaccaactacggcgtgcactgggtgcgccagagccctggaaaaggactggaatggctgggagtgatttggagcggcggcaacaccgactacaacacccccttcaccagcagactgtctatcaacaaggacaacagcaagagccaggtgttcttcaagatgaacagcctccagagcaacgacaccgccatctactactgtgctagagccctgacctactatgactacgagttcgcctactggggccagggcacactcgtgacagtgtctgctacgcgtgcctctacaaagggaccctccgtgtttcctctggctcccagcagcaagtctacaagcggaggaacagccgctctgggctgcctggtcaaggattactttcccgagcctgtgaccgtgtcctggaatagcggagcactgacaagcggcgtgcacacctttccagccgtgctgcaaagcagcggcctgtactctctgagcagcgtggtcacagtgcctagctctagcctgggcacccagacctacatctgcaatgtgaaccacaagcctagcaacaccaaggtggacaagagagtggaacccaagagctgtatccccgaggacacattcttcccaagccccgagagcagctgcgacgtgaagctggtggaaaagagcttcgagacagacaccaacctgaacttccagaacctgagcgtgatcggcttcagaatcctgctgctgaaagtggccggctttaacctgctgatgaccctgcggctgtggtccagc

SEQ ID NO: 3372 - DNA, 2673 bp, Artificial Sequence
  Synthetic Polynucloetide
atggccttaccagtgaccgccttgctcctgccgctggccttgctgctccacgccgccaggccggaagtgcagctggttgaatctggcggaggactggttcagcctggcggatctctgagactgtcttgtgccgccagcggcttcagcttcagcgacttttggatgagctgggtccgacaggcccctggcaaaggacttgaatgggtcgccacaatcagccaggccggcagcgagaaggactacgtggactctgtgaagggcagattcaccatcagccgggacaacgccaagaagtccctgtacctccagatgaacagcctgagagccgaggacaccgccgtgtactattgtgcctctggcgtgtacagcttcgactacagaggccagggcaccctggtcacagtctcttctggtaccggcggaggcggatctggcggcggaggtagcggtggcggaggatctgaattcatgacccagagccccaagttcctgctggtgtctgccggcgacagagtgaccctgacatgcaaggccagccagagcgtgaacaacgacgtgtactggtatcagcaggaacccggccagtcccccaagctgctgatctactgggccagcaccagagaaagcggcgtgcccgatagattcaccggcagcggctctggcaccgacttcaccctgacaatcagcagcgtgcaggccgaggacctggccgtgtactactgcaagcagagctacaacctgtacaccttcggcggaggcaccaagctggaaatcaagagactcgagggacagcctaaggccaatcctaccgtgacactgttccctccaagcagcgaagaactccaggccaacaaggccacacttgtgtgcctgatctccgacttctaccctggggctgtgacagtggcttggaaggccgatggatctcctgtgaaagccggcgtggaaaccaccaagccatccaagcagagcaacaacaaatacgccgccagctcctacctgagcctgacacctgagcagtggaagtcccacagatcctacagctgccaagtgacccacgaaggcagcaccgtggaaaagacagtggcccctacagagtgcagcggcagagccgattgcggctttaccagcgagagctaccagcagggcgtgctgagcgccaccatcctgtacgagatcctgctgggcaaggccaccctgtacgccgtgctggtgtctgccctggtgctgatggctatggtcaagcggaaggacagccggggacgcgccaagagaagcggatctggcgtgaagcagaccctgaatttcgacctgctgaagctggctggcgacgtggaatccaacccaggccctactagtatggactggatttggcgcatccttttccttgtcggcgctgctaccggcgcgcattccgggccccagctccagctgcaagagtctggacctggcctggtcaagcctagcgagacactgagcctgacctgtaccgtgtccggcgatagcatcagcagcggcgattactactggggctggatcagacagcctcctggcaaaggactggaatggatcggccacatctactacagcggcgtgacctactacaaccccagcctgaagtccagagtgaccatcagcgtggacaccagccggaaccagttctccctgaagctgtctagcgtgacagccgccgataccgccgtgtactactgcaccagagaggacagcagcaactggcggagtagaggccagggaacactggtcacagttagctctggatccggcggaggcggaagtggaggcggaggatctggcggcggaggctctttcgaagaatctggaagaggactggtgcagcctggcggcagcagaaagctgtcttgtgccgccagcggcttcaccttcagcaccagcggaatgcactgggtgcgccaggcccctgagaagggactggaatgggtggcctacatcagctccggcagcaccaccatctaccacgccgataccgtgaagggccggttcaccatcagccgggacaaccccaagaataccctgttcctccagatgaccagcctgcggagcgaggacaccgccatgtactattgctgcgccagaagcggccagttcggcaactacttcgactactggggccagggcaccaccctgaccgtgtcatctacgcgtgcctctacaaagggaccctccgtgtttcctctggctcccagcagcaagtctacaagcggaggaacagccgctctgggctgcctggtcaaggattactttcccgagcctgtgaccgtgtcctggaatagcggagcactgacaagcggcgtgcacacctttccagccgtgctgcaaagcagcggcctgtactctctgagcagcgtggtcacagtgcctagctctagcctgggcacccagacctacatctgcaatgtgaaccacaagcctagcaacaccaaggtggacaagagagtggaacccaagagctgtatccccgaggacacattcttcccaagccccgagagcagctgcgacgtgaagctggtggaaaagagcttcgagacagacaccaacctgaacttccagaacctgagcgtgatcggcttcagaatcctgctgctgaaagtggccggctttaacctgctgatgaccctgcggctgtggtccagc

SEQ ID NO: 3373 - DNA, 2688 bp, Artificial Sequence
  Synthetic Polynucloetide
atggccttaccagtgaccgccttgctcctgccgctggccttgctgctccacgccgccaggccggaagtgcagctggttgaatctggcggaggactggttcagcctggcggatctctgagactgtcttgtgccgccagcggcttcagcttcagcgacttttggatgagctgggtccgacaggcccctggcaaaggacttgaatgggtcgccacaatcagccaggccggcagcgagaaggactacgtggactctgtgaagggcagattcaccatcagccgggacaacgccaagaagtccctgtacctccagatgaacagcctgagagccgaggacaccgccgtgtactattgtgcctctggcgtgtacagcttcgactacagaggccagggcaccctggtcacagtctcttctggtaccggcggaggcggatctggcggcggaggtagcggtggcggaggatctgaattccagagcccatctagcctggctgtgtctgccggcgagaaagtgaccatgagctgcaagagcagccagagcctgctgaacagccggacccggaagaactacctggcctggtatcagcagaagcccggccagagccccaagctgctgatctactgggccagcaccagagaaagcggcgtgcccgatagattcaccggctctggcagcggcaccgacttcaccctgacaatcagcagcgtgcaggccgaggacctggccgtgtactactgcaagcagagcaacctgtacaccttcggcggaggcaccaagctggaaatcaagctcgagggacagcctaaggccaatcctaccgtgacactgttccctccaagcagcgaagaactccaggccaacaaggccacacttgtgtgcctgatctccgacttctaccctggggctgtgacagtggcttggaaggccgatggatctcctgtgaaagccggcgtggaaaccaccaagccatccaagcagagcaacaacaaatacgccgccagctcctacctgagcctgacacctgagcagtggaagtcccacagatcctacagctgccaagtgacccacgaaggcagcaccgtggaaaagacagtggcccctacagagtgcagcggcagagccgattgcggctttaccagcgagagctaccagcagggcgtgctgagcgccaccatcctgtacgagatcctgctgggcaaggccaccctgtacgccgtgctggtgtctgccctggtgctgatggctatggtcaagcggaaggacagccggggacgcgccaagagaagcggatctggcgtgaagcagaccctgaatttcgacctgctgaagctggctggcgacgtggaatccaacccaggccctactagtatggactggatttggcgcatccttttccttgtcggcgctgctaccggcgcgcattccgggccccagctccagctgcaagagtctggacctggcctggtcaagcctagcgagacactgagcctgacctgtaccgtgtccggcgatagcatcagcagcggcgattactactggggctggatcagacagcctcctggcaaaggactggaatggatcggccacatctactacagcggcgtgacctactacaaccccagcctgaagtccagagtgaccatcagcgtggacaccagccggaaccagttctccctgaagctgtctagcgtgacagccgccgataccgccgtgtactactgcaccagagaggacagcagcaactggcggagtagaggccagggaacactggtcacagttagctctggatccggcggaggcggaagtggaggcggaggatctggcggcggaggctctttcgaacaggtgcagctggaagagtctggacccgagcttgtgaagcctggggccagcgtgaagctgtcctgtaaagccagcggctacaccttcaccgagtacatcatccactgggtcaagcagcggagcggccagggcctggaatggatcggctggttttaccctggctccggcagcatcaagtacaacgagaagttcaaggacaaggccaccctgaccgccgacaagtccagcagcaccgtgtacatggaactgagcggcctgaccagcgaggacagcgccgtgtatttctgcgccagacacgacggctacagctacttcgactattggggccagggcaccacactgaccgtgtcctctacgcgtgcctctacaaagggaccctccgtgtttcctctggctcccagcagcaagtctacaagcggaggaacagccgctctgggctgcctggtcaaggattactttcccgagcctgtgaccgtgtcctggaatagcggagcactgacaagcggcgtgcacacctttccagccgtgctgcaaagcagcggcctgtactctctgagcagcgtggtcacagtgcctagctctagcctgggcacccagacctacatctgcaatgtgaaccacaagcctagcaacaccaaggtggacaagagagtggaacccaagagctgtatccccgaggacacattcttcccaagccccgagagcagctgcgacgtgaagctggtggaaaagagcttcgagacagacaccaacctgaacttccagaacctgagcgtgatcggcttcagaatcctgctgctgaaagtggccggctttaacctgctgatgaccctgcggctgtggtccagc

SEQ ID NO: 3374 - DNA, 2697 bp, Artificial Sequence
  Synthetic Polynucloetide
atggccttaccagtgaccgccttgctcctgccgctggccttgctgctccacgccgccaggccggaagtgcagctggttgaatctggcggaggactggttcagcctggcggatctctgagactgtcttgtgccgccagcggcttcagcttcagcgacttttggatgagctgggtccgacaggcccctggcaaaggacttgaatgggtcgccacaatcagccaggccggcagcgagaaggactacgtggactctgtgaagggcagattcaccatcagccgggacaacgccaagaagtccctgtacctccagatgaacagcctgagagccgaggacaccgccgtgtactattgtgcctctggcgtgtacagcttcgactacagaggccagggcaccctggtcacagtctcttctggtaccggcggaggcggatctggcggcggaggtagcggtggcggaggatctgaattcgacatccagatgacccagagccccagcagcctgtctgcctctctgggcgagagagtgtccctgacctgtcgggccacacaggaactgagcggctacctgtcttggctgcagcagaagcccgacggcaccatcaagcggctgatctacgccgccagcaccctggatagcggcgtgcccaagagattcagcggcaacagaagcggcagcgactacagcctgaccatcagctccctggaaagcgaggacttcgccgactactactgcctgcagtacgccatctacccctacaccttcggcggaggcaccaagctggaaatcaagctcgagggacagcctaaggccaatcctaccgtgacactgttccctccaagcagcgaagaactccaggccaacaaggccacacttgtgtgcctgatctccgacttctaccctggggctgtgacagtggcttggaaggccgatggatctcctgtgaaagccggcgtggaaaccaccaagccatccaagcagagcaacaacaaatacgccgccagctcctacctgagcctgacacctgagcagtggaagtcccacagatcctacagctgccaagtgacccacgaaggcagcaccgtggaaaagacagtggcccctacagagtgcagcggcagagccgattgcggctttaccagcgagagctaccagcagggcgtgctgagcgccaccatcctgtacgagatcctgctgggcaaggccaccctgtacgccgtgctggtgtctgccctggtgctgatggctatggtcaagcggaaggacagccggggacgcgccaagagaagcggatctggcgtgaagcagaccctgaatttcgacctgctgaagctggctggcgacgtggaatccaacccaggccctactagtatggactggatttggcgcatccttttccttgtcggcgctgctaccggcgcgcattccgggccccagctccagctgcaagagtctggacctggcctggtcaagcctagcgagacactgagcctgacctgtaccgtgtccggcgatagcatcagcagcggcgattactactggggctggatcagacagcctcctggcaaaggactggaatggatcggccacatctactacagcggcgtgacctactacaaccccagcctgaagtccagagtgaccatcagcgtggacaccagccggaaccagttctccctgaagctgtctagcgtgacagccgccgataccgccgtgtactactgcaccagagaggacagcagcaactggcggagtagaggccagggaacactggtcacagttagctctggatccggcggaggcggaagtggaggcggaggatctggcggcggaggctctttcgaagaggtgcaactgcagcagtctggccccgagcttgtgaagcctggcgcctccgtgaagatgagctgcaaggccagcggctacacctttaccagctacttcatccactgggtcaagcagaaacccggccagggcctggaatggatcggcttcatcaacccttacaacgacggcagcaagtacaacgagaagttcaagggcaaggccaccctgaccagcgacaagagcagcagcaccgcctacatggaactgtccagcctgacatccgaggacagcgccgtgtactactgcaccagggacgacggctactacggctacgccatggactactggggccagggaacaagcgtcaccgtgtcctctacgcgtgcctctacaaagggaccctccgtgtttcctctggctcccagcagcaagtctacaagcggaggaacagccgctctgggctgcctggtcaaggattactttcccgagcctgtgaccgtgtcctggaatagcggagcactgacaagcggcgtgcacacctttccagccgtgctgcaaagcagcggcctgtactctctgagcagcgtggtcacagtgcctagctctagcctgggcacccagacctacatctgcaatgtgaaccacaagcctagcaacaccaaggtggacaagagagtggaacccaagagctgtatccccgaggacacattcttcccaagccccgagagcagctgcgacgtgaagctggtggaaaagagcttcgagacagacaccaacctgaacttccagaacctgagcgtgatcggcttcagaatcctgctgctgaaagtggccggctttaacctgctgatgaccctgcggctgtggtccagc

SEQ ID NO: 3375 - DNA, 2712 bp, Artificial Sequence
  Synthetic Polynucloetide
atggccttaccagtgaccgccttgctcctgccgctggccttgctgctccacgccgccaggccggaagtgcagctggttgaatctggcggaggactggttcagcctggcggatctctgagactgtcttgtgccgccagcggcttcagcttcagcgacttttggatgagctgggtccgacaggcccctggcaaaggacttgaatgggtcgccacaatcagccaggccggcagcgagaaggactacgtggactctgtgaagggcagattcaccatcagccgggacaacgccaagaagtccctgtacctccagatgaacagcctgagagccgaggacaccgccgtgtactattgtgcctctggcgtgtacagcttcgactacagaggccagggcaccctggtcacagtctcttctggtaccggcggaggcggatctggcggcggaggtagcggtggcggaggatctgaattcgacaccatcgtgctgacacagagccctgcttccctggccgtgtccctgggacagagagccaccatctcttgcagagccagcgagagcgtggacagctacggcaacagcttcatgcactggtatcagcagaagcccggccagccccccaagctgctgatctacctggcctccaacctggaaagcggcgtgcccgccagattttctggcagcggcagcagaaccgacttcaccctgaccatcgaccccgtggaagccgatgatgccgccacctactactgccagcagaacaactacgacccctggaccttcggcggaggcaccaagctggaaatcaagctcgagggacagcctaaggccaatcctaccgtgacactgttccctccaagcagcgaagaactccaggccaacaaggccacacttgtgtgcctgatctccgacttctaccctggggctgtgacagtggcttggaaggccgatggatctcctgtgaaagccggcgtggaaaccaccaagccatccaagcagagcaacaacaaatacgccgccagctcctacctgagcctgacacctgagcagtggaagtcccacagatcctacagctgccaagtgacccacgaaggcagcaccgtggaaaagacagtggcccctacagagtgcagcggcagagccgattgcggctttaccagcgagagctaccagcagggcgtgctgagcgccaccatcctgtacgagatcctgctgggcaaggccaccctgtacgccgtgctggtgtctgccctggtgctgatggctatggtcaagcggaaggacagccggggacgcgccaagagaagcggatctggcgtgaagcagaccctgaatttcgacctgctgaagctggctggcgacgtggaatccaacccaggccctactagtatggactggatttggcgcatccttttccttgtcggcgctgctaccggcgcgcattccgggccccagctccagctgcaagagtctggacctggcctggtcaagcctagcgagacactgagcctgacctgtaccgtgtccggcgatagcatcagcagcggcgattactactggggctggatcagacagcctcctggcaaaggactggaatggatcggccacatctactacagcggcgtgacctactacaaccccagcctgaagtccagagtgaccatcagcgtggacaccagccggaaccagttctccctgaagctgtctagcgtgacagccgccgataccgccgtgtactactgcaccagagaggacagcagcaactggcggagtagaggccagggaacactggtcacagttagctctggatccggcggaggcggaagtggaggcggaggatctggcggcggaggctctttcgaagaagtgcaactccagcagagcggccctgagcttgtgaagcctggcgcttccgtgaagatgagctgcaaggccagcggctacaccttcaccagctacgtgatgcactgggtcaagcagaaacctggacagggcctggaatggatcggctacatcaacccctacaacgacggcaccaagtacaacgagaagttcaagggcaaggccaccctgacaagcgacaccagcagcagcaccgcctacatggaactgaacagcctgaccagcgaggacagcgccgtgtacttctgcgccagacccatctacttcgacaacgactacttcgattactggggccagggcaccaccctgaaggtgtcctctacgcgtgcctctacaaagggaccctccgtgtttcctctggctcccagcagcaagtctacaagcggaggaacagccgctctgggctgcctggtcaaggattactttcccgagcctgtgaccgtgtcctggaatagcggagcactgacaagcggcgtgcacacctttccagccgtgctgcaaagcagcggcctgtactctctgagcagcgtggtcacagtgcctagctctagcctgggcacccagacctacatctgcaatgtgaaccacaagcctagcaacaccaaggtggacaagagagtggaacccaagagctgtatccccgaggacacattcttcccaagccccgagagcagctgcgacgtgaagctggtggaaaagagcttcgagacagacaccaacctgaacttccagaacctgagcgtgatcggcttcagaatcctgctgctgaaagtggccggctttaacctgctgatgaccctgcggctgtggtccagc

SEQ ID NO: 3376 - DNA, 2697 bp, Artificial Sequence
  Synthetic Polynucloetide
atggccttaccagtgaccgccttgctcctgccgctggccttgctgctccacgccgccaggccggaagtgcagctggttgaatctggcggaggactggttcagcctggcggatctctgagactgtcttgtgccgccagcggcttcagcttcagcgacttttggatgagctgggtccgacaggcccctggcaaaggacttgaatgggtcgccacaatcagccaggccggcagcgagaaggactacgtggactctgtgaagggcagattcaccatcagccgggacaacgccaagaagtccctgtacctccagatgaacagcctgagagccgaggacaccgccgtgtactattgtgcctctggcgtgtacagcttcgactacagaggccagggcaccctggtcacagtctcttctggtaccggcggaggcggatctggcggcggaggtagcggtggcggaggatctgaattcgacatccagatgacccagagccccagcagcctgtctgccagcgtgggcgacagagtgaccatcacatgcaaggccagccaggacgtgggaatcgccgtggcctggtatcagcagaaacccggcaaggtgcccaagctgctgatctactgggccagcaccagacacaccggcgtgcccgatagattttccggcagcggctccggcaccgacttcaccctgacaatcagctccctccagcccgaggacgtggcaacctactactgccagcagtacagcagctacccctacaccttcggccagggcaccaaggtggaaatcaagagactcgagggacagcctaaggccaatcctaccgtgacactgttccctccaagcagcgaagaactccaggccaacaaggccacacttgtgtgcctgatctccgacttctaccctggggctgtgacagtggcttggaaggccgatggatctcctgtgaaagccggcgtggaaaccaccaagccatccaagcagagcaacaacaaatacgccgccagctcctacctgagcctgacacctgagcagtggaagtcccacagatcctacagctgccaagtgacccacgaaggcagcaccgtggaaaagacagtggcccctacagagtgcagcggcagagccgattgcggctttaccagcgagagctaccagcagggcgtgctgagcgccaccatcctgtacgagatcctgctgggcaaggccaccctgtacgccgtgctggtgtctgccctggtgctgatggctatggtcaagcggaaggacagccggggacgcgccaagagaagcggatctggcgtgaagcagaccctgaatttcgacctgctgaagctggctggcgacgtggaatccaacccaggccctactagtatggactggatttggcgcatccttttccttgtcggcgctgctaccggcgcgcattccgggccccagctccagctgcaagagtctggacctggcctggtcaagcctagcgagacactgagcctgacctgtaccgtgtccggcgatagcatcagcagcggcgattactactggggctggatcagacagcctcctggcaaaggactggaatggatcggccacatctactacagcggcgtgacctactacaaccccagcctgaagtccagagtgaccatcagcgtggacaccagccggaaccagttctccctgaagctgtctagcgtgacagccgccgataccgccgtgtactactgcaccagagaggacagcagcaactggcggagtagaggccagggaacactggtcacagttagctctggatccggcggaggcggaagtggaggcggaggatctggcggcggaggctctttcgaagaagtgcaactggtggaatcaggcggcggactggtgcagcctggcggatctctgagactgagctgtgccgccagcggcttcgacttcagccggtactggatgagctgggtgcgccaggcccctggcaaaggactggaatggatcggcgagatcaaccccgacagcagcaccatcaactacgcccccagcctgaaggacaagttcatcatcagccgggacaacgccaagaacagcctgtacctccagatgaactccctgcgggccgaggacaccgccgtgtactattgcgccagacccgacggcaactactggtacttcgacgtgtggggccagggaaccctcgtgaccgtgtcatctacgcgtgcctctacaaagggaccctccgtgtttcctctggctcccagcagcaagtctacaagcggaggaacagccgctctgggctgcctggtcaaggattactttcccgagcctgtgaccgtgtcctggaatagcggagcactgacaagcggcgtgcacacctttccagccgtgctgcaaagcagcggcctgtactctctgagcagcgtggtcacagtgcctagctctagcctgggcacccagacctacatctgcaatgtgaaccacaagcctagcaacaccaaggtggacaagagagtggaacccaagagctgtatccccgaggacacattcttcccaagccccgagagcagctgcgacgtgaagctggtggaaaagagcttcgagacagacaccaacctgaacttccagaacctgagcgtgatcggcttcagaatcctgctgctgaaagtggccggctttaacctgctgatgaccctgcggctgtggtccagc

SEQ ID NO: 3377 - DNA, 2697 bp, Artificial Sequence
  Synthetic Polynucloetide
atggccttaccagtgaccgccttgctcctgccgctggccttgctgctccacgccgccaggccggaagtgcagctggttgaatctggcggaggactggttcagcctggcggatctctgagactgtcttgtgccgccagcggcttcagcttcagcgacttttggatgagctgggtccgacaggcccctggcaaaggacttgaatgggtcgccacaatcagccaggccggcagcgagaaggactacgtggactctgtgaagggcagattcaccatcagccgggacaacgccaagaagtccctgtacctccagatgaacagcctgagagccgaggacaccgccgtgtactattgtgcctctggcgtgtacagcttcgactacagaggccagggcaccctggtcacagtctcttctggtaccggcggaggcggatctggcggcggaggtagcggtggcggaggatctgaattcgacatcgtgatgacccagagccagaagagcatgagcaccagcgtgggcgacagagtgagcatcacctgcaaggccagccaggacgtgatcaccggcgtggcctggtaccagcagaagcccggccagagccccaagctgctgatctacagcgccagctacagatacaccggcgtgcccgacagattcaccggcagcggcagcggcaccgacttcaccttcaccatcagcaacgtgcaggccgaggacctggccgtgtactactgccagcagcactacagcacccccctgaccttcggcgccggcaccaagctggagctgaagctcgagggacagcctaaggccaatcctaccgtgacactgttccctccaagcagcgaagaactccaggccaacaaggccacacttgtgtgcctgatctccgacttctaccctggggctgtgacagtggcttggaaggccgatggatctcctgtgaaagccggcgtggaaaccaccaagccatccaagcagagcaacaacaaatacgccgccagctcctacctgagcctgacacctgagcagtggaagtcccacagatcctacagctgccaagtgacccacgaaggcagcaccgtggaaaagacagtggcccctacagagtgcagcggcagagccgattgcggctttaccagcgagagctaccagcagggcgtgctgagcgccaccatcctgtacgagatcctgctgggcaaggccaccctgtacgccgtgctggtgtctgccctggtgctgatggctatggtcaagcggaaggacagccggggacgcgccaagagaagcggatctggcgtgaagcagaccctgaatttcgacctgctgaagctggctggcgacgtggaatccaacccaggccctactagtatggactggatttggcgcatccttttccttgtcggcgctgctaccggcgcgcattccgggccccagctccagctgcaagagtctggacctggcctggtcaagcctagcgagacactgagcctgacctgtaccgtgtccggcgatagcatcagcagcggcgattactactggggctggatcagacagcctcctggcaaaggactggaatggatcggccacatctactacagcggcgtgacctactacaaccccagcctgaagtccagagtgaccatcagcgtggacaccagccggaaccagttctccctgaagctgtctagcgtgacagccgccgataccgccgtgtactactgcaccagagaggacagcagcaactggcggagtagaggccagggaacactggtcacagttagctctggatccggcggaggcggaagtggaggcggaggatctggcggcggaggctctttcgaacaggtgcagctgcagcagcccggcgccgagctggtgagacccggcgccagcgtgaagctgagctgcaaggccagcggctacagcttcaccacctactggatgaactgggtgaagcagagacccggccagggcctggagtggatcggcatgatccaccccagcgacagcgagaccagactgaaccagaagttcaaggacaaggccaccctgaccgtggacaagagcagcagcaccgcctacatgcagctgagcagccccaccagcgaggacagcgccgtgtactactgcgccagaagcaccatgatcgccaccagagccatggactactggggccagggcaccagcgtgaccgtgagcagcacgcgtgcctctacaaagggaccctccgtgtttcctctggctcccagcagcaagtctacaagcggaggaacagccgctctgggctgcctggtcaaggattactttcccgagcctgtgaccgtgtcctggaatagcggagcactgacaagcggcgtgcacacctttccagccgtgctgcaaagcagcggcctgtactctctgagcagcgtggtcacagtgcctagctctagcctgggcacccagacctacatctgcaatgtgaaccacaagcctagcaacaccaaggtggacaagagagtggaacccaagagctgtatccccgaggacacattcttcccaagccccgagagcagctgcgacgtgaagctggtggaaaagagcttcgagacagacaccaacctgaacttccagaacctgagcgtgatcggcttcagaatcctgctgctgaaagtggccggctttaacctgctgatgaccctgcggctgtggtccagc

SEQ ID NO: 3378 - DNA, 2715 bp, Artificial Sequence
  Synthetic Polynucloetide
atggccttaccagtgaccgccttgctcctgccgctggccttgctgctccacgccgccaggccggaagtgcagctggttgaatctggcggaggactggttcagcctggcggatctctgagactgtcttgtgccgccagcggcttcagcttcagcgacttttggatgagctgggtccgacaggcccctggcaaaggacttgaatgggtcgccacaatcagccaggccggcagcgagaaggactacgtggactctgtgaagggcagattcaccatcagccgggacaacgccaagaagtccctgtacctccagatgaacagcctgagagccgaggacaccgccgtgtactattgtgcctctggcgtgtacagcttcgactacagaggccagggcaccctggtcacagtctcttctggtaccggcggaggcggatctggcggcggaggtagcggtggcggaggatctgaattccagagcgtgctgacacagcctccatccgtgtctggcgctccaggccagagagtgaccatctcctgtaccggcagcggcagcaacatcggagccccctacgacgtgtcctggtatcagcaactgcctggcaccgcccccaagctgctgatctaccacaacaacaagcggcccagcggcgtgcccgatagattcagcggctctaagagcggcaccagcgccagcctggctatcactggactccaggccgaggacgaggccgactactactgtgccacagtggaagccggcctgagcggctctgtgtttggcggcggaacaaagctgaccgtgctgggagctctcgagggacagcctaaggccaatcctaccgtgacactgttccctccaagcagcgaagaactccaggccaacaaggccacacttgtgtgcctgatctccgacttctaccctggggctgtgacagtggcttggaaggccgatggatctcctgtgaaagccggcgtggaaaccaccaagccatccaagcagagcaacaacaaatacgccgccagctcctacctgagcctgacacctgagcagtggaagtcccacagatcctacagctgccaagtgacccacgaaggcagcaccgtggaaaagacagtggcccctacagagtgcagcggcagagccgattgcggctttaccagcgagagctaccagcagggcgtgctgagcgccaccatcctgtacgagatcctgctgggcaaggccaccctgtacgccgtgctggtgtctgccctggtgctgatggctatggtcaagcggaaggacagccggggacgcgccaagagaagcggatctggcgtgaagcagaccctgaatttcgacctgctgaagctggctggcgacgtggaatccaacccaggccctactagtatggactggatttggcgcatccttttccttgtcggcgctgctaccggcgcgcattccgggccccagctccagctgcaagagtctggacctggcctggtcaagcctagcgagacactgagcctgacctgtaccgtgtccggcgatagcatcagcagcggcgattactactggggctggatcagacagcctcctggcaaaggactggaatggatcggccacatctactacagcggcgtgacctactacaaccccagcctgaagtccagagtgaccatcagcgtggacaccagccggaaccagttctccctgaagctgtctagcgtgacagccgccgataccgccgtgtactactgcaccagagaggacagcagcaactggcggagtagaggccagggaacactggtcacagttagctctggatccggcggaggcggaagtggaggcggaggatctggcggcggaggctctttcgaacaggtgcaactggtgcagagcggagccgaagtgaagaaacctggggccagcgtgaaggtgtcctgcaaggtgtccggctacaccctgaccgagctgagcattcactgggtgcgccaggcccctggcaagggactggaatggatgggcggcttcgaccccgaagagaacgagatcgtgtacgcccagcggttccagggcagagtgacaatgaccgaggacaccagcaccgacaccgcctacatggaactgagcagcctgcggagcgaggataccgccgtgtactactgcgccatcgtgggcagcttcagccctctgacactgggcctgtggggccagggaactatggtcaccgtgtccagcacgcgtgcctctacaaagggaccctccgtgtttcctctggctcccagcagcaagtctacaagcggaggaacagccgctctgggctgcctggtcaaggattactttcccgagcctgtgaccgtgtcctggaatagcggagcactgacaagcggcgtgcacacctttccagccgtgctgcaaagcagcggcctgtactctctgagcagcgtggtcacagtgcctagctctagcctgggcacccagacctacatctgcaatgtgaaccacaagcctagcaacaccaaggtggacaagagagtggaacccaagagctgtatccccgaggacacattcttcccaagccccgagagcagctgcgacgtgaagctggtggaaaagagcttcgagacagacaccaacctgaacttccagaacctgagcgtgatcggcttcagaatcctgctgctgaaagtggccggctttaacctgctgatgaccctgcggctgtggtccagc

SEQ ID NO: 3379 - DNA, 2715 bp, Artificial Sequence
  Synthetic Polynucloetide
atggccttaccagtgaccgccttgctcctgccgctggccttgctgctccacgccgccaggccggaagtgcagctggttgaatctggcggaggactggttcagcctggcggatctctgagactgtcttgtgccgccagcggcttcagcttcagcgacttttggatgagctgggtccgacaggcccctggcaaaggacttgaatgggtcgccacaatcagccaggccggcagcgagaaggactacgtggactctgtgaagggcagattcaccatcagccgggacaacgccaagaagtccctgtacctccagatgaacagcctgagagccgaggacaccgccgtgtactattgtgcctctggcgtgtacagcttcgactacagaggccagggcaccctggtcacagtctcttctggtaccggcggaggcggatctggcggcggaggtagcggtggcggaggatctgaattccagagcgtgctgacacagcctccatccgtgtctggcgctccaggccagagagtgaccatctcctgtaccggcagcggcagcaacatcggagccccctacgacgtgtcctggtatcagcaactgcctggcaccgcccccaagctgctgatctaccacaacaacaagcggcccagcggcgtgcccgatagattcagcggctctaagagcggcaccagcgccagcctggctatcactggactccaggccgaggacgaggccgactactactgccagagctacgacagcagcagcatcagcaccatcttcggcggaggcaccaagctgacagtgctgggagctctcgagggacagcctaaggccaatcctaccgtgacactgttccctccaagcagcgaagaactccaggccaacaaggccacacttgtgtgcctgatctccgacttctaccctggggctgtgacagtggcttggaaggccgatggatctcctgtgaaagccggcgtggaaaccaccaagccatccaagcagagcaacaacaaatacgccgccagctcctacctgagcctgacacctgagcagtggaagtcccacagatcctacagctgccaagtgacccacgaaggcagcaccgtggaaaagacagtggcccctacagagtgcagcggcagagccgattgcggctttaccagcgagagctaccagcagggcgtgctgagcgccaccatcctgtacgagatcctgctgggcaaggccaccctgtacgccgtgctggtgtctgccctggtgctgatggctatggtcaagcggaaggacagccggggacgcgccaagagaagcggatctggcgtgaagcagaccctgaatttcgacctgctgaagctggctggcgacgtggaatccaacccaggccctactagtatggactggatttggcgcatccttttccttgtcggcgctgctaccggcgcgcattccgggccccagctccagctgcaagagtctggacctggcctggtcaagcctagcgagacactgagcctgacctgtaccgtgtccggcgatagcatcagcagcggcgattactactggggctggatcagacagcctcctggcaaaggactggaatggatcggccacatctactacagcggcgtgacctactacaaccccagcctgaagtccagagtgaccatcagcgtggacaccagccggaaccagttctccctgaagctgtctagcgtgacagccgccgataccgccgtgtactactgcaccagagaggacagcagcaactggcggagtagaggccagggaacactggtcacagttagctctggatccggcggaggcggaagtggaggcggaggatctggcggcggaggctctttcgaacaggtgcaactggtgcagagcggagccgaagtgaagaaacctggggccagcgtgaaggtgtcctgcaaggtgtccggctacaccctgaccgagctgagcattcactgggtgcgccaggcccctggcaagggactggaatggatgggcggcttcgaccccgaagagaacgagatcgtgtacgcccagcggttccagggcagagtgacaatgaccgaggacaccagcaccgacaccgcctacatggaactgagcagcctgcggagcgaggataccgccgtgtactactgtgccatcgtgggcagcttcagcggaatcgcctacagaccttggggccagggcacaatggtcaccgtgtctagcacgcgtgcctctacaaagggaccctccgtgtttcctctggctcccagcagcaagtctacaagcggaggaacagccgctctgggctgcctggtcaaggattactttcccgagcctgtgaccgtgtcctggaatagcggagcactgacaagcggcgtgcacacctttccagccgtgctgcaaagcagcggcctgtactctctgagcagcgtggtcacagtgcctagctctagcctgggcacccagacctacatctgcaatgtgaaccacaagcctagcaacaccaaggtggacaagagagtggaacccaagagctgtatccccgaggacacattcttcccaagccccgagagcagctgcgacgtgaagctggtggaaaagagcttcgagacagacaccaacctgaacttccagaacctgagcgtgatcggcttcagaatcctgctgctgaaagtggccggctttaacctgctgatgaccctgcggctgtggtccagc

SEQ ID NO: 3380 - DNA, 2679 bp, Artificial Sequence
  Synthetic Polynucloetide
atggccttaccagtgaccgccttgctcctgccgctggccttgctgctccacgccgccaggccggaagtgcagctggttgaatctggcggaggactggttcagcctggcggatctctgagactgtcttgtgccgccagcggcttcagcttcagcgacttttggatgagctgggtccgacaggcccctggcaaaggacttgaatgggtcgccacaatcagccaggccggcagcgagaaggactacgtggactctgtgaagggcagattcaccatcagccgggacaacgccaagaagtccctgtacctccagatgaacagcctgagagccgaggacaccgccgtgtactattgtgcctctggcgtgtacagcttcgactacagaggccagggcaccctggtcacagtctcttctggtaccggcggaggcggatctggcggcggaggtagcggtggcggaggatctgaattcgacatccagatgacccagagccccagcagcctgtctgccagcgtgggcgacagagtgaccatcacctgtagagccagccagggcatcagaaacaacctggcctggtatcagcagaagcccggcaaggcccccaagcggctgatctacgccgccagcaatctccagagcggcgtgcccagcagattcacaggctctggcagcggcaccgagttcaccctgatcgtgtctagcctccagcccgaggacttcgccacctactactgcctccagcaccacagctaccccctgacatctggcggaggcaccaaggtggaactcgagggacagcctaaggccaatcctaccgtgacactgttccctccaagcagcgaagaactccaggccaacaaggccacacttgtgtgcctgatctccgacttctaccctggggctgtgacagtggcttggaaggccgatggatctcctgtgaaagccggcgtggaaaccaccaagccatccaagcagagcaacaacaaatacgccgccagctcctacctgagcctgacacctgagcagtggaagtcccacagatcctacagctgccaagtgacccacgaaggcagcaccgtggaaaagacagtggcccctacagagtgcagcggcagagccgattgcggctttaccagcgagagctaccagcagggcgtgctgagcgccaccatcctgtacgagatcctgctgggcaaggccaccctgtacgccgtgctggtgtctgccctggtgctgatggctatggtcaagcggaaggacagccggggacgcgccaagagaagcggatctggcgtgaagcagaccctgaatttcgacctgctgaagctggctggcgacgtggaatccaacccaggccctactagtatggactggatttggcgcatccttttccttgtcggcgctgctaccggcgcgcattccgggccccagctccagctgcaagagtctggacctggcctggtcaagcctagcgagacactgagcctgacctgtaccgtgtccggcgatagcatcagcagcggcgattactactggggctggatcagacagcctcctggcaaaggactggaatggatcggccacatctactacagcggcgtgacctactacaaccccagcctgaagtccagagtgaccatcagcgtggacaccagccggaaccagttctccctgaagctgtctagcgtgacagccgccgataccgccgtgtactactgcaccagagaggacagcagcaactggcggagtagaggccagggaacactggtcacagttagctctggatccggcggaggcggaagtggaggcggaggatctggcggcggaggctctttcgaagaggtgcaggtgctggaaagtggcggaggactggtgcagcctggcggctctctgagactgtcttgtgccgccagcggcttcaccttcagcagctacgccatgagctgggtgcgccaggcccctggaaaaggactggaatgggtgtccgccatcagcggctctggcgggtctaccaactacgccgatagcgtgaagggccggttcaccatcagccgggacaacagcaagaacaccctgtacctccagatgaacagcctgcgggccgaggacaccgccgtgtattattgtgccggcagcagcgggtggagcgagtattggggacagggcaccctcgtgaccgtgtcctctacgcgtgcctctacaaagggaccctccgtgtttcctctggctcccagcagcaagtctacaagcggaggaacagccgctctgggctgcctggtcaaggattactttcccgagcctgtgaccgtgtcctggaatagcggagcactgacaagcggcgtgcacacctttccagccgtgctgcaaagcagcggcctgtactctctgagcagcgtggtcacagtgcctagctctagcctgggcacccagacctacatctgcaatgtgaaccacaagcctagcaacaccaaggtggacaagagagtggaacccaagagctgtatccccgaggacacattcttcccaagccccgagagcagctgcgacgtgaagctggtggaaaagagcttcgagacagacaccaacctgaacttccagaacctgagcgtgatcggcttcagaatcctgctgctgaaagtggccggctttaacctgctgatgaccctgcggctgtggtccagc

SEQ ID NO: 3381 - DNA, 2697 bp, Artificial Sequence
  Synthetic Polynucloetide
atggccttaccagtgaccgccttgctcctgccgctggccttgctgctccacgccgccaggccggaagtgcagctggttgaatctggcggaggactggttcagcctggcggatctctgagactgtcttgtgccgccagcggcttcagcttcagcgacttttggatgagctgggtccgacaggcccctggcaaaggacttgaatgggtcgccacaatcagccaggccggcagcgagaaggactacgtggactctgtgaagggcagattcaccatcagccgggacaacgccaagaagtccctgtacctccagatgaacagcctgagagccgaggacaccgccgtgtactattgtgcctctggcgtgtacagcttcgactacagaggccagggcaccctggtcacagtctcttctggtaccggcggaggcggatctggcggcggaggtagcggtggcggaggatctgaattcgacgagatccagctggtgcagagcggagccgaagtgaagaagcctggcgagagcctgcggatcagctgcaagggcagcggcttcaacatcgaggactactacatccactgggtgcgccagatgcccggcaagggcctggaatggatgggcagaatcgaccccgagaacgacgagactaagtacggccccatcttccagggccacgtgaccatcagcgccgacaccagcatcaacaccgtgtacctccagtggtccagcctgaaggccagcgacaccgccatgtactactgcgcctttagaggcggcgtgtactggggccagggcaccacagtgacagtgtctagcctcgagggacagcctaaggccaatcctaccgtgacactgttccctccaagcagcgaagaactccaggccaacaaggccacacttgtgtgcctgatctccgacttctaccctggggctgtgacagtggcttggaaggccgatggatctcctgtgaaagccggcgtggaaaccaccaagccatccaagcagagcaacaacaaatacgccgccagctcctacctgagcctgacacctgagcagtggaagtcccacagatcctacagctgccaagtgacccacgaaggcagcaccgtggaaaagacagtggcccctacagagtgcagcggcagagccgattgcggctttaccagcgagagctaccagcagggcgtgctgagcgccaccatcctgtacgagatcctgctgggcaaggccaccctgtacgccgtgctggtgtctgccctggtgctgatggctatggtcaagcggaaggacagccggggacgcgccaagagaagcggatctggcgtgaagcagaccctgaatttcgacctgctgaagctggctggcgacgtggaatccaacccaggccctactagtatggactggatttggcgcatccttttccttgtcggcgctgctaccggcgcgcattccgggccccagctccagctgcaagagtctggacctggcctggtcaagcctagcgagacactgagcctgacctgtaccgtgtccggcgatagcatcagcagcggcgattactactggggctggatcagacagcctcctggcaaaggactggaatggatcggccacatctactacagcggcgtgacctactacaaccccagcctgaagtccagagtgaccatcagcgtggacaccagccggaaccagttctccctgaagctgtctagcgtgacagccgccgataccgccgtgtactactgcaccagagaggacagcagcaactggcggagtagaggccagggaacactggtcacagttagctctggatccggcggaggcggaagtggaggcggaggatctggcggcggaggctctttcgaagatgtcgtgatgacccagagccccgacagcctggctgtgtctctgggagagagagccaccatcaactgcaagtccagccagtccctgctggacagcgacggcaagacctacctgaactggctccagcagaagcccggccagccccccaagagactgatctccctggtgtccaagctggactccggcgtgcccgatagattttccggctctggcagcggcaccgacttcaccctgacaatcagctcccttcaggccgaggacgtggccgtgtactattgctggcagggcacacacttccccggcacctttggcggaggcaccaaggtggaaatcaagacgcgtgcctctacaaagggaccctccgtgtttcctctggctcccagcagcaagtctacaagcggaggaacagccgctctgggctgcctggtcaaggattactttcccgagcctgtgaccgtgtcctggaatagcggagcactgacaagcggcgtgcacacctttccagccgtgctgcaaagcagcggcctgtactctctgagcagcgtggtcacagtgcctagctctagcctgggcacccagacctacatctgcaatgtgaaccacaagcctagcaacaccaaggtggacaagagagtggaacccaagagctgtatccccgaggacacattcttcccaagccccgagagcagctgcgacgtgaagctggtggaaaagagcttcgagacagacaccaacctgaacttccagaacctgagcgtgatcggcttcagaatcctgctgctgaaagtggccggctttaacctgctgatgaccctgcggctgtggtccagc

SEQ ID NO: 3382 - DNA, 2718 bp, Artificial Sequence
  Synthetic Polynucloetide
atggccttaccagtgaccgccttgctcctgccgctggccttgctgctccacgccgccaggccggaagtgcagctggttgaatctggcggaggactggttcagcctggcggatctctgagactgtcttgtgccgccagcggcttcagcttcagcgacttttggatgagctgggtccgacaggcccctggcaaaggacttgaatgggtcgccacaatcagccaggccggcagcgagaaggactacgtggactctgtgaagggcagattcaccatcagccgggacaacgccaagaagtccctgtacctccagatgaacagcctgagagccgaggacaccgccgtgtactattgtgcctctggcgtgtacagcttcgactacagaggccagggcaccctggtcacagtctcttctggtaccggcggaggcggatctggcggcggaggtagcggtggcggaggatctgaattcgacgagcttgtgatgacccagagccccagcagcctgacagtgacagccggcgagaaagtgaccatgagctgcaagagcagccagagcctgctgaacagcggcaaccagaagaactacctgacctggtatcagcagaagcccggccagccccccaagctgctgatctactgggccagcaccagagaaagcggcgtgcccgatagattcaccggctctggcagcggcaccgacttcaccctgacaatcagcagcgtgcaggccgaggacctggccgtgtactactgccagaacgactacagctaccccctgaccttcggagccggcaccaagctggaaatcaagctcgagggacagcctaaggccaatcctaccgtgacactgttccctccaagcagcgaagaactccaggccaacaaggccacacttgtgtgcctgatctccgacttctaccctggggctgtgacagtggcttggaaggccgatggatctcctgtgaaagccggcgtggaaaccaccaagccatccaagcagagcaacaacaaatacgccgccagctcctacctgagcctgacacctgagcagtggaagtcccacagatcctacagctgccaagtgacccacgaaggcagcaccgtggaaaagacagtggcccctacagagtgcagcggcagagccgattgcggctttaccagcgagagctaccagcagggcgtgctgagcgccaccatcctgtacgagatcctgctgggcaaggccaccctgtacgccgtgctggtgtctgccctggtgctgatggctatggtcaagcggaaggacagccggggacgcgccaagagaagcggatctggcgtgaagcagaccctgaatttcgacctgctgaagctggctggcgacgtggaatccaacccaggccctactagtatggactggatttggcgcatccttttccttgtcggcgctgctaccggcgcgcattccgggccccagctccagctgcaagagtctggacctggcctggtcaagcctagcgagacactgagcctgacctgtaccgtgtccggcgatagcatcagcagcggcgattactactggggctggatcagacagcctcctggcaaaggactggaatggatcggccacatctactacagcggcgtgacctactacaaccccagcctgaagtccagagtgaccatcagcgtggacaccagccggaaccagttctccctgaagctgtctagcgtgacagccgccgataccgccgtgtactactgcaccagagaggacagcagcaactggcggagtagaggccagggaacactggtcacagttagctctggatccggcggaggcggaagtggaggcggaggatctggcggcggaggctctttcgaagaagtgcagctgctggaacagtctggcgccgaacttgtgcggcctggcaccagcgtgaagatcagctgtaaagccagcggctacgccttcaccaactactggctgggctgggtcaagcagaggcctggacacggcctggaatggatcggcgacatctttcccggctccggcaacatccactacaacgagaagttcaagggcaaggccaccctgaccgccgacaagtctagcagcaccgcctacatgcagctgtccagcctgacctttgaggacagcgccgtgtatttctgtgcccggctgcggaactgggacgagcccatggattattggggccagggcaccaccgtgaccgtgtctagtacgcgtgcctctacaaagggaccctccgtgtttcctctggctcccagcagcaagtctacaagcggaggaacagccgctctgggctgcctggtcaaggattactttcccgagcctgtgaccgtgtcctggaatagcggagcactgacaagcggcgtgcacacctttccagccgtgctgcaaagcagcggcctgtactctctgagcagcgtggtcacagtgcctagctctagcctgggcacccagacctacatctgcaatgtgaaccacaagcctagcaacaccaaggtggacaagagagtggaacccaagagctgtatccccgaggacacattcttcccaagccccgagagcagctgcgacgtgaagctggtggaaaagagcttcgagacagacaccaacctgaacttccagaacctgagcgtgatcggcttcagaatcctgctgctgaaagtggccggctttaacctgctgatgaccctgcggctgtggtccagc

SEQ ID NO: 3383 - DNA, 2721 bp, Artificial Sequence
  Synthetic Polynucloetide
atggccttaccagtgaccgccttgctcctgccgctggccttgctgctccacgccgccaggccggaagtgcagctggttgaatctggcggaggactggttcagcctggcggatctctgagactgtcttgtgccgccagcggcttcagcttcagcgacttttggatgagctgggtccgacaggcccctggcaaaggacttgaatgggtcgccacaatcagccaggccggcagcgagaaggactacgtggactctgtgaagggcagattcaccatcagccgggacaacgccaagaagtccctgtacctccagatgaacagcctgagagccgaggacaccgccgtgtactattgtgcctctggcgtgtacagcttcgactacagaggccagggcaccctggtcacagtctcttctggtaccggcggaggcggatctggcggcggaggtagcggtggcggaggatctgaattcgacgagctgcagatgacccagagccctagcagcctgtctgccagcgtgggcgacagagtgaccatcacctgtagagccagccagagcatcagcagctacctgaactggtatcagcagaagcccggccagccccccaaactgctgatctactgggccagcaccagagaaagcggcgtgcccgatagattcagcggcagcgagagcggcaccaactacaccctgaccatcagctccctgcagcccgaggacttcgccacctacttttgccagcagagcgacagcctgcccatcacctttggacagggcacccggctggacattcagctcgagggacagcctaaggccaatcctaccgtgacactgttccctccaagcagcgaagaactccaggccaacaaggccacacttgtgtgcctgatctccgacttctaccctggggctgtgacagtggcttggaaggccgatggatctcctgtgaaagccggcgtggaaaccaccaagccatccaagcagagcaacaacaaatacgccgccagctcctacctgagcctgacacctgagcagtggaagtcccacagatcctacagctgccaagtgacccacgaaggcagcaccgtggaaaagacagtggcccctacagagtgcagcggcagagccgattgcggctttaccagcgagagctaccagcagggcgtgctgagcgccaccatcctgtacgagatcctgctgggcaaggccaccctgtacgccgtgctggtgtctgccctggtgctgatggctatggtcaagcggaaggacagccggggacgcgccaagagaagcggatctggcgtgaagcagaccctgaatttcgacctgctgaagctggctggcgacgtggaatccaacccaggccctactagtatggactggatttggcgcatccttttccttgtcggcgctgctaccggcgcgcattccgggccccagctccagctgcaagagtctggacctggcctggtcaagcctagcgagacactgagcctgacctgtaccgtgtccggcgatagcatcagcagcggcgattactactggggctggatcagacagcctcctggcaaaggactggaatggatcggccacatctactacagcggcgtgacctactacaaccccagcctgaagtccagagtgaccatcagcgtggacaccagccggaaccagttctccctgaagctgtctagcgtgacagccgccgataccgccgtgtactactgcaccagagaggacagcagcaactggcggagtagaggccagggaacactggtcacagttagctctggatccggcggaggcggaagtggaggcggaggatctggcggcggaggctctttcgaagaggtgcaactgctggaatctgggggcggagtggtgcagcctggcagaagcctgagactgagctgtgccgccagcggcttcaccttcagctcctacggaatgcactgggtgcgccaggcccctggcaaaggactggaatgggtggccgtgatctcctacgacggcagcaacaagtactacgccgacagcgtgaagggccggttcaccatcagccgggacaacagcaagaacaccctgtacctgcagatgaacagcctgcgggccgaggacaccgccgtgtactactgcgccaaggatatgggctggggcagcggctggcggccttactactactacggcatggacgtgtggggccagggcaccaccgtgacagtgtcatctacgcgtgcctctacaaagggaccctccgtgtttcctctggctcccagcagcaagtctacaagcggaggaacagccgctctgggctgcctggtcaaggattactttcccgagcctgtgaccgtgtcctggaatagcggagcactgacaagcggcgtgcacacctttccagccgtgctgcaaagcagcggcctgtactctctgagcagcgtggtcacagtgcctagctctagcctgggcacccagacctacatctgcaatgtgaaccacaagcctagcaacaccaaggtggacaagagagtggaacccaagagctgtatccccgaggacacattcttcccaagccccgagagcagctgcgacgtgaagctggtggaaaagagcttcgagacagacaccaacctgaacttccagaacctgagcgtgatcggcttcagaatcctgctgctgaaagtggccggctttaacctgctgatgaccctgcggctgtggtccagc

SEQ ID NO: 3384 - DNA, 2712 bp, Artificial Sequence
  Synthetic Polynucloetide
atggccttaccagtgaccgccttgctcctgccgctggccttgctgctccacgccgccaggccggaagtgcagctggttgaatctggcggaggactggttcagcctggcggatctctgagactgtcttgtgccgccagcggcttcagcttcagcgacttttggatgagctgggtccgacaggcccctggcaaaggacttgaatgggtcgccacaatcagccaggccggcagcgagaaggactacgtggactctgtgaagggcagattcaccatcagccgggacaacgccaagaagtccctgtacctccagatgaacagcctgagagccgaggacaccgccgtgtactattgtgcctctggcgtgtacagcttcgactacagaggccagggcaccctggtcacagtctcttctggtaccggcggaggcggatctggcggcggaggtagcggtggcggaggatctgaattcgacgacatccaaatgacacagagtccttctagtttgagtgcgagcgtgggggacagggtgaccattacctgcagggccagccagagcataagctcataccttaattggtaccagcaaaaaccaggtaaggcccctaagctcctgatctacgcggcctcttcacttcaatctggggtcccttcccgcttcagtggctccggcagcggcaccgacttcacgctcactatatcaagtctgcagcctgaggatctcgccacctattactgtcaacaaagttattccacccctttcacctttggaccgggcacgaaagtggatattaagctcgagggacagcctaaggccaatcctaccgtgacactgttccctccaagcagcgaagaactccaggccaacaaggccacacttgtgtgcctgatctccgacttctaccctggggctgtgacagtggcttggaaggccgatggatctcctgtgaaagccggcgtggaaaccaccaagccatccaagcagagcaacaacaaatacgccgccagctcctacctgagcctgacacctgagcagtggaagtcccacagatcctacagctgccaagtgacccacgaaggcagcaccgtggaaaagacagtggcccctacagagtgcagcggcagagccgattgcggctttaccagcgagagctaccagcagggcgtgctgagcgccaccatcctgtacgagatcctgctgggcaaggccaccctgtacgccgtgctggtgtctgccctggtgctgatggctatggtcaagcggaaggacagccggggacgcgccaagagaagcggatctggcgtgaagcagaccctgaatttcgacctgctgaagctggctggcgacgtggaatccaacccaggccctactagtatggactggatttggcgcatccttttccttgtcggcgctgctaccggcgcgcattccgggccccagctccagctgcaagagtctggacctggcctggtcaagcctagcgagacactgagcctgacctgtaccgtgtccggcgatagcatcagcagcggcgattactactggggctggatcagacagcctcctggcaaaggactggaatggatcggccacatctactacagcggcgtgacctactacaaccccagcctgaagtccagagtgaccatcagcgtggacaccagccggaaccagttctccctgaagctgtctagcgtgacagccgccgataccgccgtgtactactgcaccagagaggacagcagcaactggcggagtagaggccagggaacactggtcacagttagctctggatccggcggaggcggaagtggaggcggaggatctggcggcggaggctctttcgaagtgcacgaggtccagcttgtgcagtccggggcagaggtcaagaagcctggttctagcgtaaaagtgagttgcaaagcctcaggtgggacattttcatcctacgcgatcagttgggttagacaggctcctggtcaagggctggaatggatgggcggaattattccaatcttcggaacagcgaattacgcgcagaagttccagggtagagtaaccatcactgctgacaagtccacctccaccgcatacatggaattgtctagtctccggagcgaggatacggcggtgtattattgtgctacgttcgccctgtttggcttccgcgaacaggctttcgacatctgggggcagggcacgacagtcacggttagtagtacgcgtgcctctacaaagggaccctccgtgtttcctctggctcccagcagcaagtctacaagcggaggaacagccgctctgggctgcctggtcaaggattactttcccgagcctgtgaccgtgtcctggaatagcggagcactgacaagcggcgtgcacacctttccagccgtgctgcaaagcagcggcctgtactctctgagcagcgtggtcacagtgcctagctctagcctgggcacccagacctacatctgcaatgtgaaccacaagcctagcaacaccaaggtggacaagagagtggaacccaagagctgtatccccgaggacacattcttcccaagccccgagagcagctgcgacgtgaagctggtggaaaagagcttcgagacagacaccaacctgaacttccagaacctgagcgtgatcggcttcagaatcctgctgctgaaagtggccggctttaacctgctgatgaccctgcggctgtggtccagc

SEQ ID NO: 3385 - DNA, 2706 bp, Artificial Sequence
  Synthetic Polynucloetide
atggccttaccagtgaccgccttgctcctgccgctggccttgctgctccacgccgccaggccggaagtgcagctggttgaatctggcggaggactggttcagcctggcggatctctgagactgtcttgtgccgccagcggcttcagcttcagcgacttttggatgagctgggtccgacaggcccctggcaaaggacttgaatgggtcgccacaatcagccaggccggcagcgagaaggactacgtggactctgtgaagggcagattcaccatcagccgggacaacgccaagaagtccctgtacctccagatgaacagcctgagagccgaggacaccgccgtgtactattgtgcctctggcgtgtacagcttcgactacagaggccagggcaccctggtcacagtctcttctggtaccggcggaggcggatctggcggcggaggtagcggtggcggaggatctgaattcgacatcgtgctgacccagagccctctgagcctggccgtgtctctgggacagcctgccatcatcagctgcaaggccagccagagcgtgtcctttgccggcacctctctgatgcactggtatcaccagaagcccggccagcagcccagactgctgatctacagagccagcaacctggaagccggcgtgcccgatagattttccggcagcggcagcaagaccgacttcaccctgaccatcagccccgtggaagccgaagatgccgccacctactactgccagcagagcagagagtacccctacaccttcggcggaggcaccaagctggaaatcaagaggctcgagggacagcctaaggccaatcctaccgtgacactgttccctccaagcagcgaagaactccaggccaacaaggccacacttgtgtgcctgatctccgacttctaccctggggctgtgacagtggcttggaaggccgatggatctcctgtgaaagccggcgtggaaaccaccaagccatccaagcagagcaacaacaaatacgccgccagctcctacctgagcctgacacctgagcagtggaagtcccacagatcctacagctgccaagtgacccacgaaggcagcaccgtggaaaagacagtggcccctacagagtgcagcggcagagccgattgcggctttaccagcgagagctaccagcagggcgtgctgagcgccaccatcctgtacgagatcctgctgggcaaggccaccctgtacgccgtgctggtgtctgccctggtgctgatggctatggtcaagcggaaggacagccggggacgcgccaagagaagcggatctggcgtgaagcagaccctgaatttcgacctgctgaagctggctggcgacgtggaatccaacccaggccctactagtatggactggatttggcgcatccttttccttgtcggcgctgctaccggcgcgcattccgggccccagctccagctgcaagagtctggacctggcctggtcaagcctagcgagacactgagcctgacctgtaccgtgtccggcgatagcatcagcagcggcgattactactggggctggatcagacagcctcctggcaaaggactggaatggatcggccacatctactacagcggcgtgacctactacaaccccagcctgaagtccagagtgaccatcagcgtggacaccagccggaaccagttctccctgaagctgtctagcgtgacagccgccgataccgccgtgtactactgcaccagagaggacagcagcaactggcggagtagaggccagggaacactggtcacagttagctctggatccggcggaggcggaagtggaggcggaggatctggcggcggaggctctttcgaacaggtccaactggtgcagagcggagccgaggtcgtgaagcctggcgcttccgtgaagattagctgcaaagccagcggctacacctttaccggctactttatgaactgggtcaagcagagccctggccagagcctggaatggatcggcagaatccacccctacgacggcgacaccttctacaaccagaagttccagggcaaggccaccctgacagtggacaagagcagcaacaccgcccacatggaactgctgagcctgaccagcgaggacttcgccgtgtactactgcaccagatacgacggcagccgggctatggactattggggccagggcaccaccgtgaccgtgtctagtacgcgtgcctctacaaagggaccctccgtgtttcctctggctcccagcagcaagtctacaagcggaggaacagccgctctgggctgcctggtcaaggattactttcccgagcctgtgaccgtgtcctggaatagcggagcactgacaagcggcgtgcacacctttccagccgtgctgcaaagcagcggcctgtactctctgagcagcgtggtcacagtgcctagctctagcctgggcacccagacctacatctgcaatgtgaaccacaagcctagcaacaccaaggtggacaagagagtggaacccaagagctgtatccccgaggacacattcttcccaagccccgagagcagctgcgacgtgaagctggtggaaaagagcttcgagacagacaccaacctgaacttccagaacctgagcgtgatcggcttcagaatcctgctgctgaaagtggccggctttaacctgctgatgaccctgcggctgtggtccagc

SEQ ID NO: 3386 - DNA, 2697 bp, Artificial Sequence
  Synthetic Polynucloetide
atggccttaccagtgaccgccttgctcctgccgctggccttgctgctccacgccgccaggccggaagtgcagctggttgaatctggcggaggactggttcagcctggcggatctctgagactgtcttgtgccgccagcggcttcagcttcagcgacttttggatgagctgggtccgacaggcccctggcaaaggacttgaatgggtcgccacaatcagccaggccggcagcgagaaggactacgtggactctgtgaagggcagattcaccatcagccgggacaacgccaagaagtccctgtacctccagatgaacagcctgagagccgaggacaccgccgtgtactattgtgcctctggcgtgtacagcttcgactacagaggccagggcaccctggtcacagtctcttctggtaccggcggaggcggatctggcggcggaggtagcggtggcggaggatctgaattcgacgacgttgtgatgacccagacccccctgagcctgcctgtgacacctggcgaacctgccagcatcagctgtcggagcagccagagcctggtgcacagaaacggcaacacctacctgcactggtatctccagaagcccggccagagccccaagctgctgatccacaaggtgtccaacagattcagcggcgtgcccgacagattctccggcagcggctctggcaccgacttcaccctgaagatcagccgggtggaagccgaggacctgggcgtgtacttctgtagccagagcacccatgtgccccccctgacatttggagccggcaccaagctggaactgaagctcgagggacagcctaaggccaatcctaccgtgacactgttccctccaagcagcgaagaactccaggccaacaaggccacacttgtgtgcctgatctccgacttctaccctggggctgtgacagtggcttggaaggccgatggatctcctgtgaaagccggcgtggaaaccaccaagccatccaagcagagcaacaacaaatacgccgccagctcctacctgagcctgacacctgagcagtggaagtcccacagatcctacagctgccaagtgacccacgaaggcagcaccgtggaaaagacagtggcccctacagagtgcagcggcagagccgattgcggctttaccagcgagagctaccagcagggcgtgctgagcgccaccatcctgtacgagatcctgctgggcaaggccaccctgtacgccgtgctggtgtctgccctggtgctgatggctatggtcaagcggaaggacagccggggacgcgccaagagaagcggatctggcgtgaagcagaccctgaatttcgacctgctgaagctggctggcgacgtggaatccaacccaggccctactagtatggactggatttggcgcatccttttccttgtcggcgctgctaccggcgcgcattccgggccccagctccagctgcaagagtctggacctggcctggtcaagcctagcgagacactgagcctgacctgtaccgtgtccggcgatagcatcagcagcggcgattactactggggctggatcagacagcctcctggcaaaggactggaatggatcggccacatctactacagcggcgtgacctactacaaccccagcctgaagtccagagtgaccatcagcgtggacaccagccggaaccagttctccctgaagctgtctagcgtgacagccgccgataccgccgtgtactactgcaccagagaggacagcagcaactggcggagtagaggccagggaacactggtcacagttagctctggatccggcggaggcggaagtggaggcggaggatctggcggcggaggctctttcgaagaagtgcagctggtgcagtctggcgctgaggtggaaaagcctggggccagcgtgaagattagctgcaaggccagcggcagcagcttcaccggctacaacatgaactgggtgcgccagaacatcggcaagagcctggaatggatcggagccatcgacccctactacggcggcaccagctacaaccagaagttcaagggcagagccaccctgaccgtggacaagagcaccagcaccgcctacatgcacctgaagtccctgcggagcgaggacaccgccgtgtactactgtgtgtccggcatggaatattggggccagggcaccagcgtgaccgtgtctagtacgcgtgcctctacaaagggaccctccgtgtttcctctggctcccagcagcaagtctacaagcggaggaacagccgctctgggctgcctggtcaaggattactttcccgagcctgtgaccgtgtcctggaatagcggagcactgacaagcggcgtgcacacctttccagccgtgctgcaaagcagcggcctgtactctctgagcagcgtggtcacagtgcctagctctagcctgggcacccagacctacatctgcaatgtgaaccacaagcctagcaacaccaaggtggacaagagagtggaacccaagagctgtatccccgaggacacattcttcccaagccccgagagcagctgcgacgtgaagctggtggaaaagagcttcgagacagacaccaacctgaacttccagaacctgagcgtgatcggcttcagaatcctgctgctgaaagtggccggctttaacctgctgatgaccctgcggctgtggtccagc

SEQ ID NO: 3387 - DNA, 2691 bp, Artificial Sequence
  Synthetic Polynucloetide
atggccttaccagtgaccgccttgctcctgccgctggccttgctgctccacgccgccaggccggaagtgcagctggttgaatctggcggaggactggttcagcctggcggatctctgagactgtcttgtgccgccagcggcttcagcttcagcgacttttggatgagctgggtccgacaggcccctggcaaaggacttgaatgggtcgccacaatcagccaggccggcagcgagaaggactacgtggactctgtgaagggcagattcaccatcagccgggacaacgccaagaagtccctgtacctccagatgaacagcctgagagccgaggacaccgccgtgtactattgtgcctctggcgtgtacagcttcgactacagaggccagggcaccctggtcacagtctcttctggtaccggcggaggcggatctggcggcggaggtagcggtggcggaggatctgaattcgacgagatcgtgatgacccagacccctgccaccctgtctgtgtctgccggcgagagagtgaccattacctgcaaggccagccagagcgtgtccaacgacgtgacctggtatcagcagaagcccggccaggcccccagactgctgatctacagcgccagcaacagatacagcggcgtgcccgccagattttccggcagcggctacggcaccgagttcaccttcaccatcagcagcgtgcagagcgaggacttcgccgtgtacttctgtcagcaagactacagcagcttcggccagggcaccaagctggaaatcaagaggctcgagggacagcctaaggccaatcctaccgtgacactgttccctccaagcagcgaagaactccaggccaacaaggccacacttgtgtgcctgatctccgacttctaccctggggctgtgacagtggcttggaaggccgatggatctcctgtgaaagccggcgtggaaaccaccaagccatccaagcagagcaacaacaaatacgccgccagctcctacctgagcctgacacctgagcagtggaagtcccacagatcctacagctgccaagtgacccacgaaggcagcaccgtggaaaagacagtggcccctacagagtgcagcggcagagccgattgcggctttaccagcgagagctaccagcagggcgtgctgagcgccaccatcctgtacgagatcctgctgggcaaggccaccctgtacgccgtgctggtgtctgccctggtgctgatggctatggtcaagcggaaggacagccggggacgcgccaagagaagcggatctggcgtgaagcagaccctgaatttcgacctgctgaagctggctggcgacgtggaatccaacccaggccctactagtatggactggatttggcgcatccttttccttgtcggcgctgctaccggcgcgcattccgggccccagctccagctgcaagagtctggacctggcctggtcaagcctagcgagacactgagcctgacctgtaccgtgtccggcgatagcatcagcagcggcgattactactggggctggatcagacagcctcctggcaaaggactggaatggatcggccacatctactacagcggcgtgacctactacaaccccagcctgaagtccagagtgaccatcagcgtggacaccagccggaaccagttctccctgaagctgtctagcgtgacagccgccgataccgccgtgtactactgcaccagagaggacagcagcaactggcggagtagaggccagggaacactggtcacagttagctctggatccggcggaggcggaagtggaggcggaggatctggcggcggaggctctttcgaacaggtgcagctggtggaatctggacctggcgtggtgcagcctggcagaagcctgagaatcagctgtgccgtgtccggcttcagcgtgaccaactacggcgtgcactgggtgcgccagccacctggaaaaggactggaatggctgggcgtgatctgggctggcggcatcaccaactacaacagcgccttcatgtcccggctgaccatctccaaggacaacagcaagaacaccgtgtacctccagatgaacagcctgcgggccgaggacaccgccatgtactactgtgcttccagaggcggccactacggctacgccctggattattggggccagggaaccctcgtgaccgtgtcctctacgcgtgcctctacaaagggaccctccgtgtttcctctggctcccagcagcaagtctacaagcggaggaacagccgctctgggctgcctggtcaaggattactttcccgagcctgtgaccgtgtcctggaatagcggagcactgacaagcggcgtgcacacctttccagccgtgctgcaaagcagcggcctgtactctctgagcagcgtggtcacagtgcctagctctagcctgggcacccagacctacatctgcaatgtgaaccacaagcctagcaacaccaaggtggacaagagagtggaacccaagagctgtatccccgaggacacattcttcccaagccccgagagcagctgcgacgtgaagctggtggaaaagagcttcgagacagacaccaacctgaacttccagaacctgagcgtgatcggcttcagaatcctgctgctgaaagtggccggctttaacctgctgatgaccctgcggctgtggtccagc

SEQ ID NO: 3388 - DNA, 2697 bp, Artificial Sequence
  Synthetic Polynucloetide
atggccttaccagtgaccgccttgctcctgccgctggccttgctgctccacgccgccaggccggaagtgcagctggttgaatctggcggaggactggttcagcctggcggatctctgagactgtcttgtgccgccagcggcttcagcttcagcgacttttggatgagctgggtccgacaggcccctggcaaaggacttgaatgggtcgccacaatcagccaggccggcagcgagaaggactacgtggactctgtgaagggcagattcaccatcagccgggacaacgccaagaagtccctgtacctccagatgaacagcctgagagccgaggacaccgccgtgtactattgtgcctctggcgtgtacagcttcgactacagaggccagggcaccctggtcacagtctcttctggtaccggcggaggcggatctggcggcggaggtagcggtggcggaggatctgaattcgacatccagatgacccagaccgccagcagcctgcctgcctctctgggcgacagagtgaccatctcctgtagcgccagccaggacatcagcaactacctgaactggtatcagcagaaacccgacggcaccgtgaagctgctgatcttctacagcagcaacctgcacagcggcgtgcccagcagattttctggcggcggaagcggcaccgactacagcctgaccatcagcaatctggaacccgaggacattgccacctacttttgccaccagtacagcaagctgccctggacctttggcggaggcaccaagctggaaatcaagagactcgagggacagcctaaggccaatcctaccgtgacactgttccctccaagcagcgaagaactccaggccaacaaggccacacttgtgtgcctgatctccgacttctaccctggggctgtgacagtggcttggaaggccgatggatctcctgtgaaagccggcgtggaaaccaccaagccatccaagcagagcaacaacaaatacgccgccagctcctacctgagcctgacacctgagcagtggaagtcccacagatcctacagctgccaagtgacccacgaaggcagcaccgtggaaaagacagtggcccctacagagtgcagcggcagagccgattgcggctttaccagcgagagctaccagcagggcgtgctgagcgccaccatcctgtacgagatcctgctgggcaaggccaccctgtacgccgtgctggtgtctgccctggtgctgatggctatggtcaagcggaaggacagccggggacgcgccaagagaagcggatctggcgtgaagcagaccctgaatttcgacctgctgaagctggctggcgacgtggaatccaacccaggccctactagtatggactggatttggcgcatccttttccttgtcggcgctgctaccggcgcgcattccgggccccagctccagctgcaagagtctggacctggcctggtcaagcctagcgagacactgagcctgacctgtaccgtgtccggcgatagcatcagcagcggcgattactactggggctggatcagacagcctcctggcaaaggactggaatggatcggccacatctactacagcggcgtgacctactacaaccccagcctgaagtccagagtgaccatcagcgtggacaccagccggaaccagttctccctgaagctgtctagcgtgacagccgccgataccgccgtgtactactgcaccagagaggacagcagcaactggcggagtagaggccagggaacactggtcacagttagctctggatccggcggaggcggaagtggaggcggaggatctggcggcggaggctctttcgaagaagtgaccctggtggaaagcggcggagacttcgtgaagcctggcggctctctgaaggtgtcctgtgccgccagcggcttcgcctttagccactacgccatgagctgggtgcgccagacccctgccaagagactggaatgggtggcctacatcagcagcggcggctccggcacctactactccgatagcgtgaagggccggttcaccatcagccgggacaacgccaagaacaccctgtacctccagatgcggagcctgcggagcgaggacagcgccatgtatttctgcaccagagtgaagctgggcacctattacttcgactcttggggccagggcaccaccctgaccgtgtcatctacgcgtgcctctacaaagggaccctccgtgtttcctctggctcccagcagcaagtctacaagcggaggaacagccgctctgggctgcctggtcaaggattactttcccgagcctgtgaccgtgtcctggaatagcggagcactgacaagcggcgtgcacacctttccagccgtgctgcaaagcagcggcctgtactctctgagcagcgtggtcacagtgcctagctctagcctgggcacccagacctacatctgcaatgtgaaccacaagcctagcaacaccaaggtggacaagagagtggaacccaagagctgtatccccgaggacacattcttcccaagccccgagagcagctgcgacgtgaagctggtggaaaagagcttcgagacagacaccaacctgaacttccagaacctgagcgtgatcggcttcagaatcctgctgctgaaagtggccggctttaacctgctgatgaccctgcggctgtggtccagc

SEQ ID NO: 3389 - DNA, 2703 bp, Artificial Sequence
  Synthetic Polynucloetide
atggccttaccagtgaccgccttgctcctgccgctggccttgctgctccacgccgccaggccggaagtgcagctggttgaatctggcggaggactggttcagcctggcggatctctgagactgtcttgtgccgccagcggcttcagcttcagcgacttttggatgagctgggtccgacaggcccctggcaaaggacttgaatgggtcgccacaatcagccaggccggcagcgagaaggactacgtggactctgtgaagggcagattcaccatcagccgggacaacgccaagaagtccctgtacctccagatgaacagcctgagagccgaggacaccgccgtgtactattgtgcctctggcgtgtacagcttcgactacagaggccagggcaccctggtcacagtctcttctggtaccggcggaggcggatctggcggcggaggtagcggtggcggaggatctgaattccagttcgtgctgacccagagcccttctgcctctgctgccctgggagcctctgccaagctgacctgtacactgagcagcgcccacaagacctacaccatcgactggtatcagcagcagaagggaaaggcccccagatacctgatccaagtgaagtccgacggcacctacacaaaggccaccggcgtgcccgatagattcagcggcagtagcagcggagccgatagatacctgattatccccagcgtgcaggccgacgacgaggccgattactactgcggcaccgattacaccggcggctacgtgttcggcggaggcacacaactgaccgtgacactcgagggacagcctaaggccaatcctaccgtgacactgttccctccaagcagcgaagaactccaggccaacaaggccacacttgtgtgcctgatctccgacttctaccctggggctgtgacagtggcttggaaggccgatggatctcctgtgaaagccggcgtggaaaccaccaagccatccaagcagagcaacaacaaatacgccgccagctcctacctgagcctgacacctgagcagtggaagtcccacagatcctacagctgccaagtgacccacgaaggcagcaccgtggaaaagacagtggcccctacagagtgcagcggcagagccgattgcggctttaccagcgagagctaccagcagggcgtgctgagcgccaccatcctgtacgagatcctgctgggcaaggccaccctgtacgccgtgctggtgtctgccctggtgctgatggctatggtcaagcggaaggacagccggggacgcgccaagagaagcggatctggcgtgaagcagaccctgaatttcgacctgctgaagctggctggcgacgtggaatccaacccaggccctactagtatggactggatttggcgcatccttttccttgtcggcgctgctaccggcgcgcattccgggccccagctccagctgcaagagtctggacctggcctggtcaagcctagcgagacactgagcctgacctgtaccgtgtccggcgatagcatcagcagcggcgattactactggggctggatcagacagcctcctggcaaaggactggaatggatcggccacatctactacagcggcgtgacctactacaaccccagcctgaagtccagagtgaccatcagcgtggacaccagccggaaccagttctccctgaagctgtctagcgtgacagccgccgataccgccgtgtactactgcaccagagaggacagcagcaactggcggagtagaggccagggaacactggtcacagttagctctggatccggcggaggcggaagtggaggcggaggatctggcggcggaggctctttcgaagagcaactgaaagagtctggcggcggactgttcaagcccaccgataccctgaccctgacctgcaccgtgtccggcttcagcctgagctactacggcgtgaactgggtgcgccaggcccctggcaatggcctggaatggatcggcacaatcggcggcagcggcgacacctactatgcctcttgggccaagtccagaagcaccatcatcagaaacaccaacgagaacaccgtgaccctgaagatgaccagcctgacagccgccgacaccgccacctacttttgcgtcagatacgccaacatcggctacgagtatttcaacgtgtggggacccggcaccctcgtgaccgtgtcatctacgcgtgcctctacaaagggaccctccgtgtttcctctggctcccagcagcaagtctacaagcggaggaacagccgctctgggctgcctggtcaaggattactttcccgagcctgtgaccgtgtcctggaatagcggagcactgacaagcggcgtgcacacctttccagccgtgctgcaaagcagcggcctgtactctctgagcagcgtggtcacagtgcctagctctagcctgggcacccagacctacatctgcaatgtgaaccacaagcctagcaacaccaaggtggacaagagagtggaacccaagagctgtatccccgaggacacattcttcccaagccccgagagcagctgcgacgtgaagctggtggaaaagagcttcgagacagacaccaacctgaacttccagaacctgagcgtgatcggcttcagaatcctgctgctgaaagtggccggctttaacctgctgatgaccctgcggctgtggtccagc

SEQ ID NO: 3390 - DNA, 2718 bp, Artificial Sequence
  Synthetic Polynucloetide
atggccttaccagtgaccgccttgctcctgccgctggccttgctgctccacgccgccaggccggaagtgcagctggttgaatctggcggaggactggttcagcctggcggatctctgagactgtcttgtgccgccagcggcttcagcttcagcgacttttggatgagctgggtccgacaggcccctggcaaaggacttgaatgggtcgccacaatcagccaggccggcagcgagaaggactacgtggactctgtgaagggcagattcaccatcagccgggacaacgccaagaagtccctgtacctccagatgaacagcctgagagccgaggacaccgccgtgtactattgtgcctctggcgtgtacagcttcgactacagaggccagggcaccctggtcacagtctcttctggtaccggcggaggcggatctggcggcggaggtagcggtggcggaggatctgaattccagttcgtgctgacccagagcccttctgtgtctgccgccctgggagcctctgccaagctgacctgtacactgagcagcgcccacaagacctacaccatcgactggtatcagcagcagcagggcgaggcccccagatacctgatgcaagtgaagtccgacggcagctacaccaagggcaccggcgtgcccgatagattcagcggcagtagcagcggagccgatagatacctgattatccccagcgtgcaggccgacgacgaggccggatatgtgtgcggcgctgacgacaatggcggctacgtgttcggcggaggcacccaactgacagtgacactcgagggacagcctaaggccaatcctaccgtgacactgttccctccaagcagcgaagaactccaggccaacaaggccacacttgtgtgcctgatctccgacttctaccctggggctgtgacagtggcttggaaggccgatggatctcctgtgaaagccggcgtggaaaccaccaagccatccaagcagagcaacaacaaatacgccgccagctcctacctgagcctgacacctgagcagtggaagtcccacagatcctacagctgccaagtgacccacgaaggcagcaccgtggaaaagacagtggcccctacagagtgcagcggcagagccgattgcggctttaccagcgagagctaccagcagggcgtgctgagcgccaccatcctgtacgagatcctgctgggcaaggccaccctgtacgccgtgctggtgtctgccctggtgctgatggctatggtcaagcggaaggacagccggggacgcgccaagagaagcggatctggcgtgaagcagaccctgaatttcgacctgctgaagctggctggcgacgtggaatccaacccaggccctactagtatggactggatttggcgcatccttttccttgtcggcgctgctaccggcgcgcattccgggccccagctccagctgcaagagtctggacctggcctggtcaagcctagcgagacactgagcctgacctgtaccgtgtccggcgatagcatcagcagcggcgattactactggggctggatcagacagcctcctggcaaaggactggaatggatcggccacatctactacagcggcgtgacctactacaaccccagcctgaagtccagagtgaccatcagcgtggacaccagccggaaccagttctccctgaagctgtctagcgtgacagccgccgataccgccgtgtactactgcaccagagaggacagcagcaactggcggagtagaggccagggaacactggtcacagttagctctggatccggcggaggcggaagtggaggcggaggatctggcggcggaggctctttcgaacagagcgtgaaagagtctgagggcggcctgttcaagcccaccgataccctgaccctgacctgcaccgtgtccggcttcagcctgagcagacacgccctgacatgggtgcgccaggcccctggaaatggcctggaatggatcggagccatcgacaacgccggcaccacctactatgcctcttgggccaagtccagaagcaccatcacccggaacaccgacctgcacaccgtgaccctgaagatgaccagcctgaccgccagcgacaccgccacctacttttgcgccagagtgttctacgacatcaacagcggctactacctggacggcatggacctgtggggacctggcacacttgtgaccgtgtccagcacgcgtgcctctacaaagggaccctccgtgtttcctctggctcccagcagcaagtctacaagcggaggaacagccgctctgggctgcctggtcaaggattactttcccgagcctgtgaccgtgtcctggaatagcggagcactgacaagcggcgtgcacacctttccagccgtgctgcaaagcagcggcctgtactctctgagcagcgtggtcacagtgcctagctctagcctgggcacccagacctacatctgcaatgtgaaccacaagcctagcaacaccaaggtggacaagagagtggaacccaagagctgtatccccgaggacacattcttcccaagccccgagagcagctgcgacgtgaagctggtggaaaagagcttcgagacagacaccaacctgaacttccagaacctgagcgtgatcggcttcagaatcctgctgctgaaagtggccggctttaacctgctgatgaccctgcggctgtggtccagc

SEQ ID NO: 3391 - DNA, 2700 bp, Artificial Sequence
  Synthetic Polynucloetide
atggccttaccagtgaccgccttgctcctgccgctggccttgctgctccacgccgccaggccggaagtgcagctggttgaatctggcggaggactggttcagcctggcggatctctgagactgtcttgtgccgccagcggcttcagcttcagcgacttttggatgagctgggtccgacaggcccctggcaaaggacttgaatgggtcgccacaatcagccaggccggcagcgagaaggactacgtggactctgtgaagggcagattcaccatcagccgggacaacgccaagaagtccctgtacctccagatgaacagcctgagagccgaggacaccgccgtgtactattgtgcctctggcgtgtacagcttcgactacagaggccagggcaccctggtcacagtctcttctggtaccggcggaggcggatctggcggcggaggtagcggtggcggaggatctgaattcgacatccagatgacccagagccccagcagcctgtctgccagcgtgggcgacagagtgaccatcacctgtagagccagccagggcatcagctcttggctggcctggtatcagcagaagcccgagaaggcccccaagagcctgatctacgccgcctctagtctccagagcggcgtgcccagcagattttctggcagcggctccggcaccgacttcaccctgacaatcagctccctccagcccgaggacttcgccacctactactgccagcagtacaacagctacccccccacctttggcggaggcaccaaggtggaaatcaagctcgagggacagcctaaggccaatcctaccgtgacactgttccctccaagcagcgaagaactccaggccaacaaggccacacttgtgtgcctgatctccgacttctaccctggggctgtgacagtggcttggaaggccgatggatctcctgtgaaagccggcgtggaaaccaccaagccatccaagcagagcaacaacaaatacgccgccagctcctacctgagcctgacacctgagcagtggaagtcccacagatcctacagctgccaagtgacccacgaaggcagcaccgtggaaaagacagtggcccctacagagtgcagcggcagagccgattgcggctttaccagcgagagctaccagcagggcgtgctgagcgccaccatcctgtacgagatcctgctgggcaaggccaccctgtacgccgtgctggtgtctgccctggtgctgatggctatggtcaagcggaaggacagccggggacgcgccaagagaagcggatctggcgtgaagcagaccctgaatttcgacctgctgaagctggctggcgacgtggaatccaacccaggccctactagtatggactggatttggcgcatccttttccttgtcggcgctgctaccggcgcgcattccgggccccagctccagctgcaagagtctggacctggcctggtcaagcctagcgagacactgagcctgacctgtaccgtgtccggcgatagcatcagcagcggcgattactactggggctggatcagacagcctcctggcaaaggactggaatggatcggccacatctactacagcggcgtgacctactacaaccccagcctgaagtccagagtgaccatcagcgtggacaccagccggaaccagttctccctgaagctgtctagcgtgacagccgccgataccgccgtgtactactgcaccagagaggacagcagcaactggcggagtagaggccagggaacactggtcacagttagctctggatccggcggaggcggaagtggaggcggaggatctggcggcggaggctctttcgaagaagtgcaactggtggaatcaggcggcggactggtgcagcctggcgagtctctgagactgagctgtgtggcctccggcttcaccttcagccggtacaagatgaactgggtgcgccaggcccctggcaagggactggaatgggtgtcctacatcagccgcagcggcagagacatctactacgccgacagcgtgaagggccggttcaccatcagcagagacaacgccaagaacagcctgtacctccagatgaactccctgcgggacgaggacaccgccgtgtactactgtgccggaaccgtgaccacctattactacttcggcatggacgtgtggggccacggcaccaccgtgacagtgtcatctacgcgtgcctctacaaagggaccctccgtgtttcctctggctcccagcagcaagtctacaagcggaggaacagccgctctgggctgcctggtcaaggattactttcccgagcctgtgaccgtgtcctggaatagcggagcactgacaagcggcgtgcacacctttccagccgtgctgcaaagcagcggcctgtactctctgagcagcgtggtcacagtgcctagctctagcctgggcacccagacctacatctgcaatgtgaaccacaagcctagcaacaccaaggtggacaagagagtggaacccaagagctgtatccccgaggacacattcttcccaagccccgagagcagctgcgacgtgaagctggtggaaaagagcttcgagacagacaccaacctgaacttccagaacctgagcgtgatcggcttcagaatcctgctgctgaaagtggccggctttaacctgctgatgaccctgcggctgtggtccagc

SEQ ID NO: 3392 - DNA, 2703 bp, Artificial Sequence
  Synthetic Polynucloetide
atggccttaccagtgaccgccttgctcctgccgctggccttgctgctccacgccgccaggccggaagtgcagctggttgaatctggcggaggactggttcagcctggcggatctctgagactgtcttgtgccgccagcggcttcagcttcagcgacttttggatgagctgggtccgacaggcccctggcaaaggacttgaatgggtcgccacaatcagccaggccggcagcgagaaggactacgtggactctgtgaagggcagattcaccatcagccgggacaacgccaagaagtccctgtacctccagatgaacagcctgagagccgaggacaccgccgtgtactattgtgcctctggcgtgtacagcttcgactacagaggccagggcaccctggtcacagtctcttctggtaccggcggaggcggatctggcggcggaggtagcggtggcggaggatctgaattcgacatccagatgacccagagccccagcagcctgtctgccagcgtgggcgacagagtgaccatcacctgtagagccagccagggcatcagctcttggctggcctggtatcagcagaagcccgagaaggcccccaagagcctgatctacgccgcctctagtctccagagcggcgtgcccagcagattttctggcagcggctccggcaccgacttcaccctgacaatcagctccctccagcccgaggacttcgccacctactactgccagcagtacaacagctaccctcccacctttggcggaggcaccaaggtggaaatcaagctcgagggacagcctaaggccaatcctaccgtgacactgttccctccaagcagcgaagaactccaggccaacaaggccacacttgtgtgcctgatctccgacttctaccctggggctgtgacagtggcttggaaggccgatggatctcctgtgaaagccggcgtggaaaccaccaagccatccaagcagagcaacaacaaatacgccgccagctcctacctgagcctgacacctgagcagtggaagtcccacagatcctacagctgccaagtgacccacgaaggcagcaccgtggaaaagacagtggcccctacagagtgcagcggcagagccgattgcggctttaccagcgagagctaccagcagggcgtgctgagcgccaccatcctgtacgagatcctgctgggcaaggccaccctgtacgccgtgctggtgtctgccctggtgctgatggctatggtcaagcggaaggacagccggggacgcgccaagagaagcggatctggcgtgaagcagaccctgaatttcgacctgctgaagctggctggcgacgtggaatccaacccaggccctactagtatggactggatttggcgcatccttttccttgtcggcgctgctaccggcgcgcattccgggccccagctccagctgcaagagtctggacctggcctggtcaagcctagcgagacactgagcctgacctgtaccgtgtccggcgatagcatcagcagcggcgattactactggggctggatcagacagcctcctggcaaaggactggaatggatcggccacatctactacagcggcgtgacctactacaaccccagcctgaagtccagagtgaccatcagcgtggacaccagccggaaccagttctccctgaagctgtctagcgtgacagccgccgataccgccgtgtactactgcaccagagaggacagcagcaactggcggagtagaggccagggaacactggtcacagttagctctggatccggcggaggcggaagtggaggcggaggatctggcggcggaggctctttcgaagaagtgcaactggtggaatccgggggaggctctgtgcagcctggcgagtctctgagactgagctgtgtggcctccggcttcaccttcagccggtacaagatgaactgggtgcgccaggcccctggcaagggactggaatgggtgtcctacatcagccgcagcggcagagacatctactacgccgacagcgtgaagggccggttcaccatcagcagagacaacgccaagaacagcctgtacctccagatgaactccctgcgggacgaggacaccgccgtgtactactgtgccggaaccgtgaccacctattactacgacttcggcatggacgtgtggggccagggcacaaccgtgacagtgtctagcacgcgtgcctctacaaagggaccctccgtgtttcctctggctcccagcagcaagtctacaagcggaggaacagccgctctgggctgcctggtcaaggattactttcccgagcctgtgaccgtgtcctggaatagcggagcactgacaagcggcgtgcacacctttccagccgtgctgcaaagcagcggcctgtactctctgagcagcgtggtcacagtgcctagctctagcctgggcacccagacctacatctgcaatgtgaaccacaagcctagcaacaccaaggtggacaagagagtggaacccaagagctgtatccccgaggacacattcttcccaagccccgagagcagctgcgacgtgaagctggtggaaaagagcttcgagacagacaccaacctgaacttccagaacctgagcgtgatcggcttcagaatcctgctgctgaaagtggccggctttaacctgctgatgaccctgcggctgtggtccagc

SEQ ID NO: 3393 - DNA, 2697 bp, Artificial Sequence
  Synthetic Polynucloetide
atggccttaccagtgaccgccttgctcctgccgctggccttgctgctccacgccgccaggccggaagtgcagctggttgaatctggcggaggactggttcagcctggcggatctctgagactgtcttgtgccgccagcggcttcagcttcagcgacttttggatgagctgggtccgacaggcccctggcaaaggacttgaatgggtcgccacaatcagccaggccggcagcgagaaggactacgtggactctgtgaagggcagattcaccatcagccgggacaacgccaagaagtccctgtacctccagatgaacagcctgagagccgaggacaccgccgtgtactattgtgcctctggcgtgtacagcttcgactacagaggccagggcaccctggtcacagtctcttctggtaccggcggaggcggatctggcggcggaggtagcggtggcggaggatctgaattccagtctgtgctgacacagcctccatctgcctctggcacacctggacagagagtgaccatcagctgtagcggcagcagaagcaacgtcggcggcaactacgtgttctggtatcagcaggtcccaggcgctacccctaagctgctgatctacagaagcaatcagcggcctagcggcgtgcccgatagatttgccggaagcaagagcggcagctctgccagccttgccatctctggactgagaagcgaggacgaggccgactactactgtgccacctgggatgatagcctgagcggcttcgtgtttggcaccggcaccaaagtgacagtgcttggtctcgagggacagcctaaggccaatcctaccgtgacactgttccctccaagcagcgaagaactccaggccaacaaggccacacttgtgtgcctgatctccgacttctaccctggggctgtgacagtggcttggaaggccgatggatctcctgtgaaagccggcgtggaaaccaccaagccatccaagcagagcaacaacaaatacgccgccagctcctacctgagcctgacacctgagcagtggaagtcccacagatcctacagctgccaagtgacccacgaaggcagcaccgtggaaaagacagtggcccctacagagtgcagcggcagagccgattgcggctttaccagcgagagctaccagcagggcgtgctgagcgccaccatcctgtacgagatcctgctgggcaaggccaccctgtacgccgtgctggtgtctgccctggtgctgatggctatggtcaagcggaaggacagccggggacgcgccaagagaagcggatctggcgtgaagcagaccctgaatttcgacctgctgaagctggctggcgacgtggaatccaacccaggccctactagtatggactggatttggcgcatccttttccttgtcggcgctgctaccggcgcgcattccgggccccagctccagctgcaagagtctggacctggcctggtcaagcctagcgagacactgagcctgacctgtaccgtgtccggcgatagcatcagcagcggcgattactactggggctggatcagacagcctcctggcaaaggactggaatggatcggccacatctactacagcggcgtgacctactacaaccccagcctgaagtccagagtgaccatcagcgtggacaccagccggaaccagttctccctgaagctgtctagcgtgacagccgccgataccgccgtgtactactgcaccagagaggacagcagcaactggcggagtagaggccagggaacactggtcacagttagctctggatccggcggaggcggaagtggaggcggaggatctggcggcggaggctctttcgaagttcagctggttgaatctggcggcggactggttaagcctggcggatctctgagactgtcttgtgccgccagcggcttcaccttcagcgattactacatgagctggatcagacaggcccctggcaaaggactggaatgggtgtcctacatcagcagcagcggctccaccatctactacgccgatagcgtgaagggcagattcaccatcagccgggacaacgccaagaacagcctgtacctccagatgaactccctgagagccgaggacaccgccgtgtactattgcgccagaggctacggcaaagcctacgatcaatggggccagggcacactggtcaccgtttcttctacgcgtgcctctacaaagggaccctccgtgtttcctctggctcccagcagcaagtctacaagcggaggaacagccgctctgggctgcctggtcaaggattactttcccgagcctgtgaccgtgtcctggaatagcggagcactgacaagcggcgtgcacacctttccagccgtgctgcaaagcagcggcctgtactctctgagcagcgtggtcacagtgcctagctctagcctgggcacccagacctacatctgcaatgtgaaccacaagcctagcaacaccaaggtggacaagagagtggaacccaagagctgtatccccgaggacacattcttcccaagccccgagagcagctgcgacgtgaagctggtggaaaagagcttcgagacagacaccaacctgaacttccagaacctgagcgtgatcggcttcagaatcctgctgctgaaagtggccggctttaacctgctgatgaccctgcggctgtggtccagc

SEQ ID NO: 3394 - DNA, 2694 bp, Artificial Sequence
  Synthetic Polynucloetide
atggccttaccagtgaccgccttgctcctgccgctggccttgctgctccacgccgccaggccggaagtgcagctggttgaatctggcggaggactggttcagcctggcggatctctgagactgtcttgtgccgccagcggcttcagcttcagcgacttttggatgagctgggtccgacaggcccctggcaaaggacttgaatgggtcgccacaatcagccaggccggcagcgagaaggactacgtggactctgtgaagggcagattcaccatcagccgggacaacgccaagaagtccctgtacctccagatgaacagcctgagagccgaggacaccgccgtgtactattgtgcctctggcgtgtacagcttcgactacagaggccagggcaccctggtcacagtctcttctggtaccggcggaggcggatctggcggcggaggtagcggtggcggaggatctgaattccagtctgtggtcacacagccacctagcatgtctgccgctccaggccagcaagtgaccatctcttgtagcggcggcaacagcaacatcgagcggaactacgtgtcctggtatctgcaactgcctggcacagcccctaagctggtcatcttcgacaacgacagacggcccagcggcatccccgatagattttctggcagcaagagcggcaccagcgccacactgggaattaccggacttcagacaggcgacgaggccgactactactgtggcacatgggactctagcctgagaggctgggttttcggcggaggcacaaagctgacagtgcttggtctcgagggacagcctaaggccaatcctaccgtgacactgttccctccaagcagcgaagaactccaggccaacaaggccacacttgtgtgcctgatctccgacttctaccctggggctgtgacagtggcttggaaggccgatggatctcctgtgaaagccggcgtggaaaccaccaagccatccaagcagagcaacaacaaatacgccgccagctcctacctgagcctgacacctgagcagtggaagtcccacagatcctacagctgccaagtgacccacgaaggcagcaccgtggaaaagacagtggcccctacagagtgcagcggcagagccgattgcggctttaccagcgagagctaccagcagggcgtgctgagcgccaccatcctgtacgagatcctgctgggcaaggccaccctgtacgccgtgctggtgtctgccctggtgctgatggctatggtcaagcggaaggacagccggggacgcgccaagagaagcggatctggcgtgaagcagaccctgaatttcgacctgctgaagctggctggcgacgtggaatccaacccaggccctactagtatggactggatttggcgcatccttttccttgtcggcgctgctaccggcgcgcattccgggccccagctccagctgcaagagtctggacctggcctggtcaagcctagcgagacactgagcctgacctgtaccgtgtccggcgatagcatcagcagcggcgattactactggggctggatcagacagcctcctggcaaaggactggaatggatcggccacatctactacagcggcgtgacctactacaaccccagcctgaagtccagagtgaccatcagcgtggacaccagccggaaccagttctccctgaagctgtctagcgtgacagccgccgataccgccgtgtactactgcaccagagaggacagcagcaactggcggagtagaggccagggaacactggtcacagttagctctggatccggcggaggcggaagtggaggcggaggatctggcggcggaggctctttcgaagtgcagctcgttgagtctggcggcggactgattcaacctggcggaagcctgagactgagctgtgccgcttccggcttcaccttcagcaactacgccatgaactgggttcgacaggcccctggcaaaggactggaatgggtgtccaccatcaacggcagaggcagcagcaccatctacgccgattctgtgaagggcagattcaccatcagccgggacaacagcaagaacaccctgtacctccagatgaactccctgagagccgaggacaccgccacctattactgtgcccggtacatcagcagaggactgggcgattcttggggccagggcacactggttacagtgacgcgtgcctctacaaagggaccctccgtgtttcctctggctcccagcagcaagtctacaagcggaggaacagccgctctgggctgcctggtcaaggattactttcccgagcctgtgaccgtgtcctggaatagcggagcactgacaagcggcgtgcacacctttccagccgtgctgcaaagcagcggcctgtactctctgagcagcgtggtcacagtgcctagctctagcctgggcacccagacctacatctgcaatgtgaaccacaagcctagcaacaccaaggtggacaagagagtggaacccaagagctgtatccccgaggacacattcttcccaagccccgagagcagctgcgacgtgaagctggtggaaaagagcttcgagacagacaccaacctgaacttccagaacctgagcgtgatcggcttcagaatcctgctgctgaaagtggccggctttaacctgctgatgaccctgcggctgtggtccagc

SEQ ID NO: 3395 - DNA, 2697 bp, Artificial Sequence
  Synthetic Polynucloetide
atggccttaccagtgaccgccttgctcctgccgctggccttgctgctccacgccgccaggccggaagtgcagctggttgaatctggcggaggactggttcagcctggcggatctctgagactgtcttgtgccgccagcggcttcagcttcagcgacttttggatgagctgggtccgacaggcccctggcaaaggacttgaatgggtcgccacaatcagccaggccggcagcgagaaggactacgtggactctgtgaagggcagattcaccatcagccgggacaacgccaagaagtccctgtacctccagatgaacagcctgagagccgaggacaccgccgtgtactattgtgcctctggcgtgtacagcttcgactacagaggccagggcaccctggtcacagtctcttctggtaccggcggaggcggatctggcggcggaggtagcggtggcggaggatctgaattcgacgtcgtgatgacccagacccctctgagcctgcctgtgtccctgggcgatcaggccagcatcagctgtagaagcagccagagcctggtgcacagcaacggcaacacctacctgcactggtatctccagaagcccggccagagccccaagctgctgatctacaaggtgtccaacagattcagcggcgtgcccgacagattctccggcagcggctctggcaccgacttcaccctgaagatcagccgggtggaagccgaggacctgggcgtgtacttctgtagccagaacacccccgtgccccccaagtttggcagcggcaccaagctggaaatcaagctcgagggacagcctaaggccaatcctaccgtgacactgttccctccaagcagcgaagaactccaggccaacaaggccacacttgtgtgcctgatctccgacttctaccctggggctgtgacagtggcttggaaggccgatggatctcctgtgaaagccggcgtggaaaccaccaagccatccaagcagagcaacaacaaatacgccgccagctcctacctgagcctgacacctgagcagtggaagtcccacagatcctacagctgccaagtgacccacgaaggcagcaccgtggaaaagacagtggcccctacagagtgcagcggcagagccgattgcggctttaccagcgagagctaccagcagggcgtgctgagcgccaccatcctgtacgagatcctgctgggcaaggccaccctgtacgccgtgctggtgtctgccctggtgctgatggctatggtcaagcggaaggacagccggggacgcgccaagagaagcggatctggcgtgaagcagaccctgaatttcgacctgctgaagctggctggcgacgtggaatccaacccaggccctactagtatggactggatttggcgcatccttttccttgtcggcgctgctaccggcgcgcattccgggccccagctccagctgcaagagtctggacctggcctggtcaagcctagcgagacactgagcctgacctgtaccgtgtccggcgatagcatcagcagcggcgattactactggggctggatcagacagcctcctggcaaaggactggaatggatcggccacatctactacagcggcgtgacctactacaaccccagcctgaagtccagagtgaccatcagcgtggacaccagccggaaccagttctccctgaagctgtctagcgtgacagccgccgataccgccgtgtactactgcaccagagaggacagcagcaactggcggagtagaggccagggaacactggtcacagttagctctggatccggcggaggcggaagtggaggcggaggatctggcggcggaggctctttcgaacaggtgcagctccagcagtctggcgctgaactcgtgcggcctggcgcttctgtgaagctgtcttgcaaggccagcggctacaccttcaacgactacgagatgcactgggtcaagcagacccctgtgcacggcctgaagtggatcggagccctggaacccaagaccggcgataccgcctacagccagaagttcaagggcaaggccaccctgaccgccgacaagagcagcagcacagcctacatggaactgcggagcctgaccagcgaggacagcgccgtgtactactgcaccagctgctactactacacctacagcggccagggcaccctcgtgacagtgtctgctacgcgtgcctctacaaagggaccctccgtgtttcctctggctcccagcagcaagtctacaagcggaggaacagccgctctgggctgcctggtcaaggattactttcccgagcctgtgaccgtgtcctggaatagcggagcactgacaagcggcgtgcacacctttccagccgtgctgcaaagcagcggcctgtactctctgagcagcgtggtcacagtgcctagctctagcctgggcacccagacctacatctgcaatgtgaaccacaagcctagcaacaccaaggtggacaagagagtggaacccaagagctgtatccccgaggacacattcttcccaagccccgagagcagctgcgacgtgaagctggtggaaaagagcttcgagacagacaccaacctgaacttccagaacctgagcgtgatcggcttcagaatcctgctgctgaaagtggccggctttaacctgctgatgaccctgcggctgtggtccagc

SEQ ID NO: 3396 - DNA, 2694 bp, Artificial Sequence
  Synthetic Polynucloetide
atggccttaccagtgaccgccttgctcctgccgctggccttgctgctccacgccgccaggccggaagtgcagctggttgaatctggcggaggactggttcagcctggcggatctctgagactgtcttgtgccgccagcggcttcagcttcagcgacttttggatgagctgggtccgacaggcccctggcaaaggacttgaatgggtcgccacaatcagccaggccggcagcgagaaggactacgtggactctgtgaagggcagattcaccatcagccgggacaacgccaagaagtccctgtacctccagatgaacagcctgagagccgaggacaccgccgtgtactattgtgcctctggcgtgtacagcttcgactacagaggccagggcaccctggtcacagtctcttctggtaccggcggaggcggatctggcggcggaggtagcggtggcggaggatctgaattcgacatccaactgacccagagccccagcagcctgtctgcctctgtgggcgacagagtgaccatcacctgtagagccagccagggcatcagaaacgacctgggctggtatcagcagaagcccggcaaggcccccaagcggctgatctatgctgccagctccctccagaatggcgtgcccagcagattttccggcagcggctctggcaccgagttcaccctgaccatcagctccctccagcccgaggacttcgccacctactactgcctccagcacaacacctaccccgccttcggccagggcaccaaggtggaaatcaagagactcgagggacagcctaaggccaatcctaccgtgacactgttccctccaagcagcgaagaactccaggccaacaaggccacacttgtgtgcctgatctccgacttctaccctggggctgtgacagtggcttggaaggccgatggatctcctgtgaaagccggcgtggaaaccaccaagccatccaagcagagcaacaacaaatacgccgccagctcctacctgagcctgacacctgagcagtggaagtcccacagatcctacagctgccaagtgacccacgaaggcagcaccgtggaaaagacagtggcccctacagagtgcagcggcagagccgattgcggctttaccagcgagagctaccagcagggcgtgctgagcgccaccatcctgtacgagatcctgctgggcaaggccaccctgtacgccgtgctggtgtctgccctggtgctgatggctatggtcaagcggaaggacagccggggacgcgccaagagaagcggatctggcgtgaagcagaccctgaatttcgacctgctgaagctggctggcgacgtggaatccaacccaggccctactagtatggactggatttggcgcatccttttccttgtcggcgctgctaccggcgcgcattccgggccccagctccagctgcaagagtctggacctggcctggtcaagcctagcgagacactgagcctgacctgtaccgtgtccggcgatagcatcagcagcggcgattactactggggctggatcagacagcctcctggcaaaggactggaatggatcggccacatctactacagcggcgtgacctactacaaccccagcctgaagtccagagtgaccatcagcgtggacaccagccggaaccagttctccctgaagctgtctagcgtgacagccgccgataccgccgtgtactactgcaccagagaggacagcagcaactggcggagtagaggccagggaacactggtcacagttagctctggatccggcggaggcggaagtggaggcggaggatctggcggcggaggctctttcgaacaggtgcaactccaggaatctggccctggcctcgtgaagcctagccagaccctgagcctgacctgtaccgtgtctggcggcagcatcagcagcttcaactactactggtcctggatcagacaccaccctggcaagggcctggaatggatcggctacatctactacagcggcagcacctacagcaaccccagcctgaagtcccgcgtgaccatctccgtggacaccagcaagaaccagtttagcctgaccctgtccagcgtgacagccgccgataccgccgtgtactactgcgccagaggctacaactggaactacttcgactactggggccagggaaccctcgtgaccgtgtctagtacgcgtgcctctacaaagggaccctccgtgtttcctctggctcccagcagcaagtctacaagcggaggaacagccgctctgggctgcctggtcaaggattactttcccgagcctgtgaccgtgtcctggaatagcggagcactgacaagcggcgtgcacacctttccagccgtgctgcaaagcagcggcctgtactctctgagcagcgtggtcacagtgcctagctctagcctgggcacccagacctacatctgcaatgtgaaccacaagcctagcaacaccaaggtggacaagagagtggaacccaagagctgtatccccgaggacacattcttcccaagccccgagagcagctgcgacgtgaagctggtggaaaagagcttcgagacagacaccaacctgaacttccagaacctgagcgtgatcggcttcagaatcctgctgctgaaagtggccggctttaacctgctgatgaccctgcggctgtggtccagc

SEQ ID NO: 3397 - DNA, 2700 bp, Artificial Sequence
  Synthetic Polynucloetide
atggccttaccagtgaccgccttgctcctgccgctggccttgctgctccacgccgccaggccggaagtgcagctggttgaatctggcggaggactggttcagcctggcggatctctgagactgtcttgtgccgccagcggcttcagcttcagcgacttttggatgagctgggtccgacaggcccctggcaaaggacttgaatgggtcgccacaatcagccaggccggcagcgagaaggactacgtggactctgtgaagggcagattcaccatcagccgggacaacgccaagaagtccctgtacctccagatgaacagcctgagagccgaggacaccgccgtgtactattgtgcctctggcgtgtacagcttcgactacagaggccagggcaccctggtcacagtctcttctggtaccggcggaggcggatctggcggcggaggtagcggtggcggaggatctgaattcgacgacatcgtgctgacccagagccccgccagcctggccgtgagcctgggccagagcgtgaccatcagctgcagagccagcgagagcgtggagtactacggcaccagcctgatgcagtggtaccagcagaagcccggccagccccccaagctgctgatctacgccaccagcaacgtggagagcggcgtgcccgccagattcagcggcagcggcagcggcaccgacttcagcctgaacatccaccccgtggaggaggacgacatcgccatgtacttctgccagcagagcagaaagctgcccagcaccttcggcggcggcaccaagctggagatcaagctcgagggacagcctaaggccaatcctaccgtgacactgttccctccaagcagcgaagaactccaggccaacaaggccacacttgtgtgcctgatctccgacttctaccctggggctgtgacagtggcttggaaggccgatggatctcctgtgaaagccggcgtggaaaccaccaagccatccaagcagagcaacaacaaatacgccgccagctcctacctgagcctgacacctgagcagtggaagtcccacagatcctacagctgccaagtgacccacgaaggcagcaccgtggaaaagacagtggcccctacagagtgcagcggcagagccgattgcggctttaccagcgagagctaccagcagggcgtgctgagcgccaccatcctgtacgagatcctgctgggcaaggccaccctgtacgccgtgctggtgtctgccctggtgctgatggctatggtcaagcggaaggacagccggggacgcgccaagagaagcggatctggcgtgaagcagaccctgaatttcgacctgctgaagctggctggcgacgtggaatccaacccaggccctactagtatggactggatttggcgcatccttttccttgtcggcgctgctaccggcgcgcattccgggccccagctccagctgcaagagtctggacctggcctggtcaagcctagcgagacactgagcctgacctgtaccgtgtccggcgatagcatcagcagcggcgattactactggggctggatcagacagcctcctggcaaaggactggaatggatcggccacatctactacagcggcgtgacctactacaaccccagcctgaagtccagagtgaccatcagcgtggacaccagccggaaccagttctccctgaagctgtctagcgtgacagccgccgataccgccgtgtactactgcaccagagaggacagcagcaactggcggagtagaggccagggaacactggtcacagttagctctggatccggcggaggcggaagtggaggcggaggatctggcggcggaggctctttcgaagacgtgagactgcaggagagcggccccggccaggtgaagcccagccagaccgtgagcctgacctgcagcgtgaccggctacagcatcaccaacggcaaccactggtggaactggatcagacaggtgagcggcagcaagctggagtggatcggctacatcagcagcagcggcagcaccgacagcaaccccagcctgaagagcagaatcagcatcaccagagacaccagcaagaaccagctgttcctgcagctgaacagcgtgaccaccgaggacatcgccacctactactgcgccagaggctactacttcgactactggggccagggcaccaccctgaccgtgagcagcacgcgtgcctctacaaagggaccctccgtgtttcctctggctcccagcagcaagtctacaagcggaggaacagccgctctgggctgcctggtcaaggattactttcccgagcctgtgaccgtgtcctggaatagcggagcactgacaagcggcgtgcacacctttccagccgtgctgcaaagcagcggcctgtactctctgagcagcgtggtcacagtgcctagctctagcctgggcacccagacctacatctgcaatgtgaaccacaagcctagcaacaccaaggtggacaagagagtggaacccaagagctgtatccccgaggacacattcttcccaagccccgagagcagctgcgacgtgaagctggtggaaaagagcttcgagacagacaccaacctgaacttccagaacctgagcgtgatcggcttcagaatcctgctgctgaaagtggccggctttaacctgctgatgaccctgcggctgtggtccagc

SEQ ID NO: 3398 - DNA, 2697 bp, Artificial Sequence
  Synthetic Polynucloetide
atggccttaccagtgaccgccttgctcctgccgctggccttgctgctccacgccgccaggccggaagtgcagctggttgaatctggcggaggactggttcagcctggcggatctctgagactgtcttgtgccgccagcggcttcagcttcagcgacttttggatgagctgggtccgacaggcccctggcaaaggacttgaatgggtcgccacaatcagccaggccggcagcgagaaggactacgtggactctgtgaagggcagattcaccatcagccgggacaacgccaagaagtccctgtacctccagatgaacagcctgagagccgaggacaccgccgtgtactattgtgcctctggcgtgtacagcttcgactacagaggccagggcaccctggtcacagtctcttctggtaccggcggaggcggatctggcggcggaggtagcggtggcggaggatctgaattcgacatccagatgacccagagccccagcagcctgtctgccagcgtgggcgacagagtgaccatcacctgtagagccagccaggacgtgaacaccgccgtggcctggtatcagcagaagcctggcaaggcccccaagctgctgatctacagcgccagcttcctggaaagcggcgtgcccagcagattcagcggaagcagaagcggcaccgacttcaccctgaccatcagctccctccagcccgaggacttcgccacctactactgccagcagcactacaccacccctcccaccttcggccagaccaaggtggaaatcaagagactcgagggacagcctaaggccaatcctaccgtgacactgttccctccaagcagcgaagaactccaggccaacaaggccacacttgtgtgcctgatctccgacttctaccctggggctgtgacagtggcttggaaggccgatggatctcctgtgaaagccggcgtggaaaccaccaagccatccaagcagagcaacaacaaatacgccgccagctcctacctgagcctgacacctgagcagtggaagtcccacagatcctacagctgccaagtgacccacgaaggcagcaccgtggaaaagacagtggcccctacagagtgcagcggcagagccgattgcggctttaccagcgagagctaccagcagggcgtgctgagcgccaccatcctgtacgagatcctgctgggcaaggccaccctgtacgccgtgctggtgtctgccctggtgctgatggctatggtcaagcggaaggacagccggggacgcgccaagagaagcggatctggcgtgaagcagaccctgaatttcgacctgctgaagctggctggcgacgtggaatccaacccaggccctactagtatggactggatttggcgcatccttttccttgtcggcgctgctaccggcgcgcattccgggccccagctccagctgcaagagtctggacctggcctggtcaagcctagcgagacactgagcctgacctgtaccgtgtccggcgatagcatcagcagcggcgattactactggggctggatcagacagcctcctggcaaaggactggaatggatcggccacatctactacagcggcgtgacctactacaaccccagcctgaagtccagagtgaccatcagcgtggacaccagccggaaccagttctccctgaagctgtctagcgtgacagccgccgataccgccgtgtactactgcaccagagaggacagcagcaactggcggagtagaggccagggaacactggtcacagttagctctggatccggcggaggcggaagtggaggcggaggatctggcggcggaggctctttcgaagaagtgcaactggtggaatctggcggcggactggtgcagcctggcggatctctgagactgagctgtgccgccagcggcttcaacatcaaggacacctacatccactgggtgcgccaggcccctggaaagggactggaatgggtggcccggatctaccccaccaacggctacaccagatacgccgacagcgtgaagggccggttcaccatcagcgccgacaccagcaagaataccgcctacctccagatgaacagcctgcgggccgaggataccgccgtgtactactgctcaagatggggaggcgacggcttctacgctatggacgtgtggggccagggcacccttgtgaccgtgtcatctacgcgtgcctctacaaagggaccctccgtgtttcctctggctcccagcagcaagtctacaagcggaggaacagccgctctgggctgcctggtcaaggattactttcccgagcctgtgaccgtgtcctggaatagcggagcactgacaagcggcgtgcacacctttccagccgtgctgcaaagcagcggcctgtactctctgagcagcgtggtcacagtgcctagctctagcctgggcacccagacctacatctgcaatgtgaaccacaagcctagcaacaccaaggtggacaagagagtggaacccaagagctgtatccccgaggacacattcttcccaagccccgagagcagctgcgacgtgaagctggtggaaaagagcttcgagacagacaccaacctgaacttccagaacctgagcgtgatcggcttcagaatcctgctgctgaaagtggccggctttaacctgctgatgaccctgcggctgtggtccagc

SEQ ID NO: 3399 - DNA, 2694 bp, Artificial Sequence
  Synthetic Polynucloetide
atggccttaccagtgaccgccttgctcctgccgctggccttgctgctccacgccgccaggccggaagtgcagctggttgaatctggcggaggactggttcagcctggcggatctctgagactgtcttgtgccgccagcggcttcagcttcagcgacttttggatgagctgggtccgacaggcccctggcaaaggacttgaatgggtcgccacaatcagccaggccggcagcgagaaggactacgtggactctgtgaagggcagattcaccatcagccgggacaacgccaagaagtccctgtacctccagatgaacagcctgagagccgaggacaccgccgtgtactattgtgcctctggcgtgtacagcttcgactacagaggccagggcaccctggtcacagtctcttctggtaccggcggaggcggatctggcggcggaggtagcggtggcggaggatctgaattcgaccagagcgtgctgacacagcctcctagcgtgtcagtggcccctggcaagaccgccagaatcccctgcgagggcaactacatcggcagcagcaacgtgcactggtatcagcagaagcccggccaggctcccgtgctcgtgatccacttcgacagcgacagacccagcggcatccccgacagattcagcggcagcaacagcggcaacatggctaccctgaccatcagcagagtggaagccggggacgaggccgactactactgtcaagtgtgggagaaccacggctgggtgttcggcggaggcaccaagctgacagtgctgtctctcgagggacagcctaaggccaatcctaccgtgacactgttccctccaagcagcgaagaactccaggccaacaaggccacacttgtgtgcctgatctccgacttctaccctggggctgtgacagtggcttggaaggccgatggatctcctgtgaaagccggcgtggaaaccaccaagccatccaagcagagcaacaacaaatacgccgccagctcctacctgagcctgacacctgagcagtggaagtcccacagatcctacagctgccaagtgacccacgaaggcagcaccgtggaaaagacagtggcccctacagagtgcagcggcagagccgattgcggctttaccagcgagagctaccagcagggcgtgctgagcgccaccatcctgtacgagatcctgctgggcaaggccaccctgtacgccgtgctggtgtctgccctggtgctgatggctatggtcaagcggaaggacagccggggacgcgccaagagaagcggatctggcgtgaagcagaccctgaatttcgacctgctgaagctggctggcgacgtggaatccaacccaggccctactagtatggactggatttggcgcatccttttccttgtcggcgctgctaccggcgcgcattccgggccccagctccagctgcaagagtctggacctggcctggtcaagcctagcgagacactgagcctgacctgtaccgtgtccggcgatagcatcagcagcggcgattactactggggctggatcagacagcctcctggcaaaggactggaatggatcggccacatctactacagcggcgtgacctactacaaccccagcctgaagtccagagtgaccatcagcgtggacaccagccggaaccagttctccctgaagctgtctagcgtgacagccgccgataccgccgtgtactactgcaccagagaggacagcagcaactggcggagtagaggccagggaacactggtcacagttagctctggatccggcggaggcggaagtggaggcggaggatctggcggcggaggctctttcgaagaggtgcaactggtggaaacaggcggcggactggtgcagcctggcgagtctctgagactgagctgtgccgccagcggcttcaccttcagcgactacgagatgaactgggtgcgccaggcccctggaaagggcctggaatgggtgtcctacatcagcagctccggcagcaccatctactacgccgacagcgtgaagggccggtttaccatctaccgggacaacgccaagaacagcctgtacctccagatgaactccctgcgggccgaggacaccgccctgtactattgtgccagagcctggggcgtgggaccccctgattattggggacagggcaccctcgtgaccgtgtcctctacgcgtgcctctacaaagggaccctccgtgtttcctctggctcccagcagcaagtctacaagcggaggaacagccgctctgggctgcctggtcaaggattactttcccgagcctgtgaccgtgtcctggaatagcggagcactgacaagcggcgtgcacacctttccagccgtgctgcaaagcagcggcctgtactctctgagcagcgtggtcacagtgcctagctctagcctgggcacccagacctacatctgcaatgtgaaccacaagcctagcaacaccaaggtggacaagagagtggaacccaagagctgtatccccgaggacacattcttcccaagccccgagagcagctgcgacgtgaagctggtggaaaagagcttcgagacagacaccaacctgaacttccagaacctgagcgtgatcggcttcagaatcctgctgctgaaagtggccggctttaacctgctgatgaccctgcggctgtggtccagc

SEQ ID NO: 3400 - DNA, 2718 bp, Artificial Sequence
  Synthetic Polynucloetide
atggccttaccagtgaccgccttgctcctgccgctggccttgctgctccacgccgccaggccggaagtgcagctggttgaatctggcggaggactggttcagcctggcggatctctgagactgtcttgtgccgccagcggcttcagcttcagcgacttttggatgagctgggtccgacaggcccctggcaaaggacttgaatgggtcgccacaatcagccaggccggcagcgagaaggactacgtggactctgtgaagggcagattcaccatcagccgggacaacgccaagaagtccctgtacctccagatgaacagcctgagagccgaggacaccgccgtgtactattgtgcctctggcgtgtacagcttcgactacagaggccagggcaccctggtcacagtctcttctggtaccggcggaggcggatctggcggcggaggtagcggtggcggaggatctgaattcgacatccagatgacccagagccccagcagcctgtctgccagcgtgggcgataccgtgaccatcacctgtcaggccaacggctacctgaactggtatcagcagcggagaggcaaggcccccaagctgctgatctacgacggcagcaagctggaaagaggcgtgcccagcagattcagcggcagaagatggggccaggagtacaacctgaccatcaacaacctccagcccgaggatattgccacatacttttgccaggtgtacgagttcgtggtgcccggcacacggctggacctgaagagaacagtggctgctcctctcgagggacagcctaaggccaatcctaccgtgacactgttccctccaagcagcgaagaactccaggccaacaaggccacacttgtgtgcctgatctccgacttctaccctggggctgtgacagtggcttggaaggccgatggatctcctgtgaaagccggcgtggaaaccaccaagccatccaagcagagcaacaacaaatacgccgccagctcctacctgagcctgacacctgagcagtggaagtcccacagatcctacagctgccaagtgacccacgaaggcagcaccgtggaaaagacagtggcccctacagagtgcagcggcagagccgattgcggctttaccagcgagagctaccagcagggcgtgctgagcgccaccatcctgtacgagatcctgctgggcaaggccaccctgtacgccgtgctggtgtctgccctggtgctgatggctatggtcaagcggaaggacagccggggacgcgccaagagaagcggatctggcgtgaagcagaccctgaatttcgacctgctgaagctggctggcgacgtggaatccaacccaggccctactagtatggactggatttggcgcatccttttccttgtcggcgctgctaccggcgcgcattccgggccccagctccagctgcaagagtctggacctggcctggtcaagcctagcgagacactgagcctgacctgtaccgtgtccggcgatagcatcagcagcggcgattactactggggctggatcagacagcctcctggcaaaggactggaatggatcggccacatctactacagcggcgtgacctactacaaccccagcctgaagtccagagtgaccatcagcgtggacaccagccggaaccagttctccctgaagctgtctagcgtgacagccgccgataccgccgtgtactactgcaccagagaggacagcagcaactggcggagtagaggccagggaacactggtcacagttagctctggatccggcggaggcggaagtggaggcggaggatctggcggcggaggctctttcgaacaggtgcagctgctccagtctggcgctgccgtgacaaagcctggcgcttctgtgcgggtgtcctgtgaagccagcggctacaacatccgggactacttcatccactggtggcggcaggctccaggccagggactccagtgggtgggatggatcaaccccaagaccggccagcccaacaaccccagacagttccagggcagagtgtccctgaccagacacgccagctgggacttcgacaccttcagcttctacatggatctgaaggccctgcggagcgacgataccgccgtgtacttctgcgccagacagagaagcgactactgggatttcgacgtgtggggcagcggcacccaagtgacagtgtctagcgccagcaccaagggacccacgcgtgcctctacaaagggaccctccgtgtttcctctggctcccagcagcaagtctacaagcggaggaacagccgctctgggctgcctggtcaaggattactttcccgagcctgtgaccgtgtcctggaatagcggagcactgacaagcggcgtgcacacctttccagccgtgctgcaaagcagcggcctgtactctctgagcagcgtggtcacagtgcctagctctagcctgggcacccagacctacatctgcaatgtgaaccacaagcctagcaacaccaaggtggacaagagagtggaacccaagagctgtatccccgaggacacattcttcccaagccccgagagcagctgcgacgtgaagctggtggaaaagagcttcgagacagacaccaacctgaacttccagaacctgagcgtgatcggcttcagaatcctgctgctgaaagtggccggctttaacctgctgatgaccctgcggctgtggtccagc

SEQ ID NO: 3401 - DNA, 2736 bp, Artificial Sequence
  Synthetic Polynucloetide
atggccttaccagtgaccgccttgctcctgccgctggccttgctgctccacgccgccaggccggaagtgcagctggttgaatctggcggaggactggttcagcctggcggatctctgagactgtcttgtgccgccagcggcttcagcttcagcgacttttggatgagctgggtccgacaggcccctggcaaaggacttgaatgggtcgccacaatcagccaggccggcagcgagaaggactacgtggactctgtgaagggcagattcaccatcagccgggacaacgccaagaagtccctgtacctccagatgaacagcctgagagccgaggacaccgccgtgtactattgtgcctctggcgtgtacagcttcgactacagaggccagggcaccctggtcacagtctcttctggtaccggcggaggcggatctggcggcggaggtagcggtggcggaggatctgaattccagtctgccctgacacagcctcctagcgcctctggctctcccggccagagcatcaccatcagctgtaccggcaccagcaacaacttcgtgtcctggtatcagcagcacgccggcaaggcccccaagctcgtgatctacgacgtgaacaagcggcccagcggcgtgcccgatagattcagcggcagcaagagcggcaacaccgccagcctgacagtgtctggcctccagaccgatgacgaggccgtgtactactgcggcagcctcgtgggcaactgggacgtgatctttggcggaggcaccaagctgaccgtgctgctcgagggacagcctaaggccaatcctaccgtgacactgttccctccaagcagcgaagaactccaggccaacaaggccacacttgtgtgcctgatctccgacttctaccctggggctgtgacagtggcttggaaggccgatggatctcctgtgaaagccggcgtggaaaccaccaagccatccaagcagagcaacaacaaatacgccgccagctcctacctgagcctgacacctgagcagtggaagtcccacagatcctacagctgccaagtgacccacgaaggcagcaccgtggaaaagacagtggcccctacagagtgcagcggcagagccgattgcggctttaccagcgagagctaccagcagggcgtgctgagcgccaccatcctgtacgagatcctgctgggcaaggccaccctgtacgccgtgctggtgtctgccctggtgctgatggctatggtcaagcggaaggacagccggggacgcgccaagagaagcggatctggcgtgaagcagaccctgaatttcgacctgctgaagctggctggcgacgtggaatccaacccaggccctactagtatggactggatttggcgcatccttttccttgtcggcgctgctaccggcgcgcattccgggccccagctccagctgcaagagtctggacctggcctggtcaagcctagcgagacactgagcctgacctgtaccgtgtccggcgatagcatcagcagcggcgattactactggggctggatcagacagcctcctggcaaaggactggaatggatcggccacatctactacagcggcgtgacctactacaaccccagcctgaagtccagagtgaccatcagcgtggacaccagccggaaccagttctccctgaagctgtctagcgtgacagccgccgataccgccgtgtactactgcaccagagaggacagcagcaactggcggagtagaggccagggaacactggtcacagttagctctggatccggcggaggcggaagtggaggcggaggatctggcggcggaggctctttcgaacagccccagctccaggaatctggccccacactggtggaagccagcgagacactgagcctgacctgtgccgtgtccggcgattctaccgccgcctgcaatagcttctggggctgggtgcgccagcctcctggaaagggactggaatgggtgggaagcctgagccactgcgccagctattggaaccggggctggacctaccacaaccccagcctgaagtccagactgaccctggccctggacacccccaagaacctggtgttcctgaagctgaacagcgtgacagccgccgacaccgccacctactactgtgccagatttggcggcgaggtgctgcggtacaccgactggcctaaacctgcctgggtggacctgtggggcagaggaacactcgtgaccgtgtccagcacgcgtgcctctacaaagggaccctccgtgtttcctctggctcccagcagcaagtctacaagcggaggaacagccgctctgggctgcctggtcaaggattactttcccgagcctgtgaccgtgtcctggaatagcggagcactgacaagcggcgtgcacacctttccagccgtgctgcaaagcagcggcctgtactctctgagcagcgtggtcacagtgcctagctctagcctgggcacccagacctacatctgcaatgtgaaccacaagcctagcaacaccaaggtggacaagagagtggaacccaagagctgtatccccgaggacacattcttcccaagccccgagagcagctgcgacgtgaagctggtggaaaagagcttcgagacagacaccaacctgaacttccagaacctgagcgtgatcggcttcagaatcctgctgctgaaagtggccggctttaacctgctgatgaccctgcggctgtggtccagc

SEQ ID NO: 3402 - DNA, 2691 bp, Artificial Sequence
  Synthetic Polynucloetide
atggccttaccagtgaccgccttgctcctgccgctggccttgctgctccacgccgccaggccggaagtgcagctggttgaatctggcggaggactggttcagcctggcggatctctgagactgtcttgtgccgccagcggcttcagcttcagcgacttttggatgagctgggtccgacaggcccctggcaaaggacttgaatgggtcgccacaatcagccaggccggcagcgagaaggactacgtggactctgtgaagggcagattcaccatcagccgggacaacgccaagaagtccctgtacctccagatgaacagcctgagagccgaggacaccgccgtgtactattgtgcctctggcgtgtacagcttcgactacagaggccagggcaccctggtcacagtctcttctggtaccggcggaggcggatctggcggcggaggtagcggtggcggaggatctgaattcgagatcgtgctgacacagagccctggcaccctgagcctgtctccaggcgagacagccatcatcagctgccggacaagccagtacggcagcctggcctggtatcagcagaggccaggacaggcccccagactcgtgatctacagcggcagcacaagagccgccggaatccccgatagattcagcggctccagatggggacccgactacaacctgaccatcagcaacctggaaagcggcgacttcggcgtgtactactgccagcagtacgagttcttcggccagggcaccaaggtgcaggtggacatcaaaagactcgagggacagcctaaggccaatcctaccgtgacactgttccctccaagcagcgaagaactccaggccaacaaggccacacttgtgtgcctgatctccgacttctaccctggggctgtgacagtggcttggaaggccgatggatctcctgtgaaagccggcgtggaaaccaccaagccatccaagcagagcaacaacaaatacgccgccagctcctacctgagcctgacacctgagcagtggaagtcccacagatcctacagctgccaagtgacccacgaaggcagcaccgtggaaaagacagtggcccctacagagtgcagcggcagagccgattgcggctttaccagcgagagctaccagcagggcgtgctgagcgccaccatcctgtacgagatcctgctgggcaaggccaccctgtacgccgtgctggtgtctgccctggtgctgatggctatggtcaagcggaaggacagccggggacgcgccaagagaagcggatctggcgtgaagcagaccctgaatttcgacctgctgaagctggctggcgacgtggaatccaacccaggccctactagtatggactggatttggcgcatccttttccttgtcggcgctgctaccggcgcgcattccgggccccagctccagctgcaagagtctggacctggcctggtcaagcctagcgagacactgagcctgacctgtaccgtgtccggcgatagcatcagcagcggcgattactactggggctggatcagacagcctcctggcaaaggactggaatggatcggccacatctactacagcggcgtgacctactacaaccccagcctgaagtccagagtgaccatcagcgtggacaccagccggaaccagttctccctgaagctgtctagcgtgacagccgccgataccgccgtgtactactgcaccagagaggacagcagcaactggcggagtagaggccagggaacactggtcacagttagctctggatccggcggaggcggaagtggaggcggaggatctggcggcggaggctctttcgaacaggtgcagctggtgcagtctggcggccagatgaagaaacccggcgagagcatgagaatcagctgtcgggcctccggctacgagttcatcgactgcaccctgaactggatcagactggcccctggcaagcggcctgagtggatgggatggctgaagcctagaggcggagccgtgaactacgccagacctctccagggcagagtgaccatgaccagggacgtgtacagcgataccgccttcctggaactgcggagcctgaccgtggatgataccgccgtgtacttctgcaccagaggcaagaactgcgattacaactgggacttcgagcactggggcagaggcacccctgtgatcgtgtctagcacgcgtgcctctacaaagggaccctccgtgtttcctctggctcccagcagcaagtctacaagcggaggaacagccgctctgggctgcctggtcaaggattactttcccgagcctgtgaccgtgtcctggaatagcggagcactgacaagcggcgtgcacacctttccagccgtgctgcaaagcagcggcctgtactctctgagcagcgtggtcacagtgcctagctctagcctgggcacccagacctacatctgcaatgtgaaccacaagcctagcaacaccaaggtggacaagagagtggaacccaagagctgtatccccgaggacacattcttcccaagccccgagagcagctgcgacgtgaagctggtggaaaagagcttcgagacagacaccaacctgaacttccagaacctgagcgtgatcggcttcagaatcctgctgctgaaagtggccggctttaacctgctgatgaccctgcggctgtggtccagc

SEQ ID NO: 3403 - DNA, 2721 bp, Artificial Sequence
  Synthetic Polynucloetide
atggccttaccagtgaccgccttgctcctgccgctggccttgctgctccacgccgccaggccggaagtgcagctggttgaatctggcggaggactggttcagcctggcggatctctgagactgtcttgtgccgccagcggcttcagcttcagcgacttttggatgagctgggtccgacaggcccctggcaaaggacttgaatgggtcgccacaatcagccaggccggcagcgagaaggactacgtggactctgtgaagggcagattcaccatcagccgggacaacgccaagaagtccctgtacctccagatgaacagcctgagagccgaggacaccgccgtgtactattgtgcctctggcgtgtacagcttcgactacagaggccagggcaccctggtcacagtctcttctggtaccggcggaggcggatctggcggcggaggtagcggtggcggaggatctgaattcgagctggtgctgacacagagccctggcaccctgtctctgtctgccggcgaaagagccaccctgagctgtagagccagccagagcgtgtcctctggcagcctggcttggtatcagcagaagccaggccaggcccccagactgctgatctacggcgcttctaccagagccaccggcatccccgatagattcagcggctctggctccggcaccgacttcaccctgacaatcggcagactggaacccgaggacctggccgtgtactactgccagcagtacggcaccagcccctacacattcggccagggcaccaagctggaaatcctcgagggacagcctaaggccaatcctaccgtgacactgttccctccaagcagcgaagaactccaggccaacaaggccacacttgtgtgcctgatctccgacttctaccctggggctgtgacagtggcttggaaggccgatggatctcctgtgaaagccggcgtggaaaccaccaagccatccaagcagagcaacaacaaatacgccgccagctcctacctgagcctgacacctgagcagtggaagtcccacagatcctacagctgccaagtgacccacgaaggcagcaccgtggaaaagacagtggcccctacagagtgcagcggcagagccgattgcggctttaccagcgagagctaccagcagggcgtgctgagcgccaccatcctgtacgagatcctgctgggcaaggccaccctgtacgccgtgctggtgtctgccctggtgctgatggctatggtcaagcggaaggacagccggggacgcgccaagagaagcggatctggcgtgaagcagaccctgaatttcgacctgctgaagctggctggcgacgtggaatccaacccaggccctactagtatggactggatttggcgcatccttttccttgtcggcgctgctaccggcgcgcattccgggccccagctccagctgcaagagtctggacctggcctggtcaagcctagcgagacactgagcctgacctgtaccgtgtccggcgatagcatcagcagcggcgattactactggggctggatcagacagcctcctggcaaaggactggaatggatcggccacatctactacagcggcgtgacctactacaaccccagcctgaagtccagagtgaccatcagcgtggacaccagccggaaccagttctccctgaagctgtctagcgtgacagccgccgataccgccgtgtactactgcaccagagaggacagcagcaactggcggagtagaggccagggaacactggtcacagttagctctggatccggcggaggcggaagtggaggcggaggatctggcggcggaggctctttcgaactggaacagagcggagccgaagtgaagaaacccggcagcagcgtgcaggtgtcctgcaaagcaagcggcggcaccttctctatgtacggcttcaactgggtgcgccaggctcctggacacggcctggaatggatgggcggcatcatccccatcttcggcacctccaactacgcccagaaattccggggcagagtgaccttcaccgccgaccaggccacaagcaccgcctacatggaactgaccaacctgcggagcgacgacaccgccgtgtattattgcgccagagacttcggccccgactgggaggatggcgacagctacgatggcagcggcagaggcttcttcgacttctggggccagggaacccttgtgaccgtgtcctcaacgcgtgcctctacaaagggaccctccgtgtttcctctggctcccagcagcaagtctacaagcggaggaacagccgctctgggctgcctggtcaaggattactttcccgagcctgtgaccgtgtcctggaatagcggagcactgacaagcggcgtgcacacctttccagccgtgctgcaaagcagcggcctgtactctctgagcagcgtggtcacagtgcctagctctagcctgggcacccagacctacatctgcaatgtgaaccacaagcctagcaacaccaaggtggacaagagagtggaacccaagagctgtatccccgaggacacattcttcccaagccccgagagcagctgcgacgtgaagctggtggaaaagagcttcgagacagacaccaacctgaacttccagaacctgagcgtgatcggcttcagaatcctgctgctgaaagtggccggctttaacctgctgatgaccctgcggctgtggtccagc

SEQ ID NO: 3404 - DNA, 2661 bp, Artificial Sequence
  Synthetic Polynucloetide
atggccttaccagtgaccgccttgctcctgccgctggccttgctgctccacgccgccaggccggaagtgcagctggttgaatctggcggaggactggttcagcctggcggatctctgagactgtcttgtgccgccagcggcttcagcttcagcgacttttggatgagctgggtccgacaggcccctggcaaaggacttgaatgggtcgccacaatcagccaggccggcagcgagaaggactacgtggactctgtgaagggcagattcaccatcagccgggacaacgccaagaagtccctgtacctccagatgaacagcctgagagccgaggacaccgccgtgtactattgtgcctctggcgtgtacagcttcgactacagaggccagggcaccctggtcacagtctcttctggtaccggcggaggcggatctggcggcggaggtagcggtggcggaggatctgaattcgacatccagatgacccagagccccagcagcctgtctgccagcgtgggcgacagagtgaccatcacctgtcaggccagccaggacatcaacaactacctgaactggtatcagcagaagcccggcaaggcccccaagctgctgatctacgacgccagcaatctgcagaccggcgtgcccagcagattttccggctctggcagcggcaccgacttcaccttcaccatcgaggacattgccacctactactgccagcagtacaccttcggccctggcaccaaggtggacatcaaactcgagggacagcctaaggccaatcctaccgtgacactgttccctccaagcagcgaagaactccaggccaacaaggccacacttgtgtgcctgatctccgacttctaccctggggctgtgacagtggcttggaaggccgatggatctcctgtgaaagccggcgtggaaaccaccaagccatccaagcagagcaacaacaaatacgccgccagctcctacctgagcctgacacctgagcagtggaagtcccacagatcctacagctgccaagtgacccacgaaggcagcaccgtggaaaagacagtggcccctacagagtgcagcggcagagccgattgcggctttaccagcgagagctaccagcagggcgtgctgagcgccaccatcctgtacgagatcctgctgggcaaggccaccctgtacgccgtgctggtgtctgccctggtgctgatggctatggtcaagcggaaggacagccggggacgcgccaagagaagcggatctggcgtgaagcagaccctgaatttcgacctgctgaagctggctggcgacgtggaatccaacccaggccctactagtatggactggatttggcgcatccttttccttgtcggcgctgctaccggcgcgcattccgggccccagctccagctgcaagagtctggacctggcctggtcaagcctagcgagacactgagcctgacctgtaccgtgtccggcgatagcatcagcagcggcgattactactggggctggatcagacagcctcctggcaaaggactggaatggatcggccacatctactacagcggcgtgacctactacaaccccagcctgaagtccagagtgaccatcagcgtggacaccagccggaaccagttctccctgaagctgtctagcgtgacagccgccgataccgccgtgtactactgcaccagagaggacagcagcaactggcggagtagaggccagggaacactggtcacagttagctctggatccggcggaggcggaagtggaggcggaggatctggcggcggaggctctttcgaagaagtgcaactgctggaatctggcggcggactggtgcagcctggcggatctctgagactgagctgtgccgccagcggcttcacctttagctggtacagcatgacctgggtgcgccaggcccctggcaaaggactggaatgggtgtccagcatcgtgccctggggcgatttcacccagtacgccgatagcgtgaagggccggttcaccatcagccgggacaacagcaagaacaccctgtacctgcagatgaacagcctgcgggccgaggacaccgccgtgtactattgtgccaagggacctggctggggcagcttcgatctgtggggcagaggaacccttgtgaccgtgtccagcacgcgtgcctctacaaagggaccctccgtgtttcctctggctcccagcagcaagtctacaagcggaggaacagccgctctgggctgcctggtcaaggattactttcccgagcctgtgaccgtgtcctggaatagcggagcactgacaagcggcgtgcacacctttccagccgtgctgcaaagcagcggcctgtactctctgagcagcgtggtcacagtgcctagctctagcctgggcacccagacctacatctgcaatgtgaaccacaagcctagcaacaccaaggtggacaagagagtggaacccaagagctgtatccccgaggacacattcttcccaagccccgagagcagctgcgacgtgaagctggtggaaaagagcttcgagacagacaccaacctgaacttccagaacctgagcgtgatcggcttcagaatcctgctgctgaaagtggccggctttaacctgctgatgaccctgcggctgtggtccagc

SEQ ID NO: 3405 - DNA, 2691 bp, Artificial Sequence
  Synthetic Polynucloetide
atggccttaccagtgaccgccttgctcctgccgctggccttgctgctccacgccgccaggccggaagtgcagctggttgaatctggcggaggactggttcagcctggcggatctctgagactgtcttgtgccgccagcggcttcagcttcagcgacttttggatgagctgggtccgacaggcccctggcaaaggacttgaatgggtcgccacaatcagccaggccggcagcgagaaggactacgtggactctgtgaagggcagattcaccatcagccgggacaacgccaagaagtccctgtacctccagatgaacagcctgagagccgaggacaccgccgtgtactattgtgcctctggcgtgtacagcttcgactacagaggccagggcaccctggtcacagtctcttctggtaccggcggaggcggatctggcggcggaggtagcggtggcggaggatctgaattcgacatccagatgacccagagccccagcagcctgtctgccagcgtgggcgacagagtgaccatcacctgtaccgccagcctgagcgtgtccagcacctacctgcactggtatcagcagaagcccggcagcagccccaagctgtggatctacagcaccagcaacctggcctccggcgtgcccagcagattttctggcagcggctctggcaccagctacaccctgaccatcagctccctccagcccgaggacttcgccacctactactgccaccagtaccacagaagccccctgacctttggcggaggcaccaaggtggaaatcaagagactcgagggacagcctaaggccaatcctaccgtgacactgttccctccaagcagcgaagaactccaggccaacaaggccacacttgtgtgcctgatctccgacttctaccctggggctgtgacagtggcttggaaggccgatggatctcctgtgaaagccggcgtggaaaccaccaagccatccaagcagagcaacaacaaatacgccgccagctcctacctgagcctgacacctgagcagtggaagtcccacagatcctacagctgccaagtgacccacgaaggcagcaccgtggaaaagacagtggcccctacagagtgcagcggcagagccgattgcggctttaccagcgagagctaccagcagggcgtgctgagcgccaccatcctgtacgagatcctgctgggcaaggccaccctgtacgccgtgctggtgtctgccctggtgctgatggctatggtcaagcggaaggacagccggggacgcgccaagagaagcggatctggcgtgaagcagaccctgaatttcgacctgctgaagctggctggcgacgtggaatccaacccaggccctactagtatggactggatttggcgcatccttttccttgtcggcgctgctaccggcgcgcattccgggccccagctccagctgcaagagtctggacctggcctggtcaagcctagcgagacactgagcctgacctgtaccgtgtccggcgatagcatcagcagcggcgattactactggggctggatcagacagcctcctggcaaaggactggaatggatcggccacatctactacagcggcgtgacctactacaaccccagcctgaagtccagagtgaccatcagcgtggacaccagccggaaccagttctccctgaagctgtctagcgtgacagccgccgataccgccgtgtactactgcaccagagaggacagcagcaactggcggagtagaggccagggaacactggtcacagttagctctggatccggcggaggcggaagtggaggcggaggatctggcggcggaggctctttcgaagaagtgcaactggtggaatctggcggcggactggtgcagcctggcggatctctgagactgagctgtgccgccagcggcttcagcctgaccaaatacggcgtgcactgggtgcgccaggcccctggaaaaggactggaatgggtgggagtgaagtgggctggcggctccaccgactacaacagcgccctgatgagccggttcaccatcagcaaggacaacgccaagaacagcctgtacctccagatgaactccctgcgggccgaggacaccgccgtgtactactgtgccagagatcaccgggacgctatggactactggggccagggaacactcgtgaccgtgtcctctacgcgtgcctctacaaagggaccctccgtgtttcctctggctcccagcagcaagtctacaagcggaggaacagccgctctgggctgcctggtcaaggattactttcccgagcctgtgaccgtgtcctggaatagcggagcactgacaagcggcgtgcacacctttccagccgtgctgcaaagcagcggcctgtactctctgagcagcgtggtcacagtgcctagctctagcctgggcacccagacctacatctgcaatgtgaaccacaagcctagcaacaccaaggtggacaagagagtggaacccaagagctgtatccccgaggacacattcttcccaagccccgagagcagctgcgacgtgaagctggtggaaaagagcttcgagacagacaccaacctgaacttccagaacctgagcgtgatcggcttcagaatcctgctgctgaaagtggccggctttaacctgctgatgaccctgcggctgtggtccagc

SEQ ID NO: 3406 - DNA, 2703 bp, Artificial Sequence
  Synthetic Polynucloetide
atggccttaccagtgaccgccttgctcctgccgctggccttgctgctccacgccgccaggccggaagtgcagctggttgaatctggcggaggactggttcagcctggcggatctctgagactgtcttgtgccgccagcggcttcagcttcagcgacttttggatgagctgggtccgacaggcccctggcaaaggacttgaatgggtcgccacaatcagccaggccggcagcgagaaggactacgtggactctgtgaagggcagattcaccatcagccgggacaacgccaagaagtccctgtacctccagatgaacagcctgagagccgaggacaccgccgtgtactattgtgcctctggcgtgtacagcttcgactacagaggccagggcaccctggtcacagtctcttctggtaccggcggaggcggatctggcggcggaggtagcggtggcggaggatctgaattcgacatccagatgacccagagccccagcagcctgtctgccagcgtgggcgacagagtgaccatcacatgcaaggccagccaggacgtgggaacagccgtggcctggtatcagcagaagcctggcaaggcccccaagctgctgatctacagcgccagctacagatccaccggcgtgcccagcagattttccggctctggcagcggcaccgacttcaccctgaccatctctagcctccagcccgaggacttcgccacctactactgccagcaccactactccgccccctggacatttggcggaggcaccaaggtggaaatcaagctcgagggacagcctaaggccaatcctaccgtgacactgttccctccaagcagcgaagaactccaggccaacaaggccacacttgtgtgcctgatctccgacttctaccctggggctgtgacagtggcttggaaggccgatggatctcctgtgaaagccggcgtggaaaccaccaagccatccaagcagagcaacaacaaatacgccgccagctcctacctgagcctgacacctgagcagtggaagtcccacagatcctacagctgccaagtgacccacgaaggcagcaccgtggaaaagacagtggcccctacagagtgcagcggcagagccgattgcggctttaccagcgagagctaccagcagggcgtgctgagcgccaccatcctgtacgagatcctgctgggcaaggccaccctgtacgccgtgctggtgtctgccctggtgctgatggctatggtcaagcggaaggacagccggggacgcgccaagagaagcggatctggcgtgaagcagaccctgaatttcgacctgctgaagctggctggcgacgtggaatccaacccaggccctactagtatggactggatttggcgcatccttttccttgtcggcgctgctaccggcgcgcattccgggccccagctccagctgcaagagtctggacctggcctggtcaagcctagcgagacactgagcctgacctgtaccgtgtccggcgatagcatcagcagcggcgattactactggggctggatcagacagcctcctggcaaaggactggaatggatcggccacatctactacagcggcgtgacctactacaaccccagcctgaagtccagagtgaccatcagcgtggacaccagccggaaccagttctccctgaagctgtctagcgtgacagccgccgataccgccgtgtactactgcaccagagaggacagcagcaactggcggagtagaggccagggaacactggtcacagttagctctggatccggcggaggcggaagtggaggcggaggatctggcggcggaggctctttcgaagaagtgcaactggtggaatcaggcggcggactggtgcagcctggcggatctctgagactgagctgtgccgccagcggcttcaccttcagcagaaacggcatgagctgggtgcgccaggcccctggaaaaggactggaatgggtggcaaccgtgtccagcggcggcagctacatctactacgccgacagcgtgaagggccggttcaccatctccagagacaacgccaagaacagcctgtacctccagatgaactccctgcgggccgaggacaccgccgtgtactattgtgccagacagggcaccaccgccctggctaccagattcttcgatgtgtggggccagggcaccctcgtgaccgtgtcatctacgcgtgcctctacaaagggaccctccgtgtttcctctggctcccagcagcaagtctacaagcggaggaacagccgctctgggctgcctggtcaaggattactttcccgagcctgtgaccgtgtcctggaatagcggagcactgacaagcggcgtgcacacctttccagccgtgctgcaaagcagcggcctgtactctctgagcagcgtggtcacagtgcctagctctagcctgggcacccagacctacatctgcaatgtgaaccacaagcctagcaacaccaaggtggacaagagagtggaacccaagagctgtatccccgaggacacattcttcccaagccccgagagcagctgcgacgtgaagctggtggaaaagagcttcgagacagacaccaacctgaacttccagaacctgagcgtgatcggcttcagaatcctgctgctgaaagtggccggctttaacctgctgatgaccctgcggctgtggtccagc

SEQ ID NO: 3407 - DNA, 2691 bp, Artificial Sequence
  Synthetic Polynucloetide
atggccttaccagtgaccgccttgctcctgccgctggccttgctgctccacgccgccaggccggaagtgcagctggttgaatctggcggaggactggttcagcctggcggatctctgagactgtcttgtgccgccagcggcttcagcttcagcgacttttggatgagctgggtccgacaggcccctggcaaaggacttgaatgggtcgccacaatcagccaggccggcagcgagaaggactacgtggactctgtgaagggcagattcaccatcagccgggacaacgccaagaagtccctgtacctccagatgaacagcctgagagccgaggacaccgccgtgtactattgtgcctctggcgtgtacagcttcgactacagaggccagggcaccctggtcacagtctcttctggtaccggcggaggcggatctggcggcggaggtagcggtggcggaggatctgaattcgacatccagatgacccagagcccccctagcctgtctgcctctgtgggcggcaaagtgaccatcacatgcaaggccagccaggacatcgaccgctacatggcctggtatcaggacaagcccggcaagggacccaagctgctgatccacgataccagcaccctccagcccggcatccccagcagattttctggcagcggctccggcagagactacagcttcagcatcagcaacctggaacccgaggacattgccacctactactgcctccagtacgacaacctgtggaccttcggcggaggcaccaagctggaaatcaagagactcgagggacagcctaaggccaatcctaccgtgacactgttccctccaagcagcgaagaactccaggccaacaaggccacacttgtgtgcctgatctccgacttctaccctggggctgtgacagtggcttggaaggccgatggatctcctgtgaaagccggcgtggaaaccaccaagccatccaagcagagcaacaacaaatacgccgccagctcctacctgagcctgacacctgagcagtggaagtcccacagatcctacagctgccaagtgacccacgaaggcagcaccgtggaaaagacagtggcccctacagagtgcagcggcagagccgattgcggctttaccagcgagagctaccagcagggcgtgctgagcgccaccatcctgtacgagatcctgctgggcaaggccaccctgtacgccgtgctggtgtctgccctggtgctgatggctatggtcaagcggaaggacagccggggacgcgccaagagaagcggatctggcgtgaagcagaccctgaatttcgacctgctgaagctggctggcgacgtggaatccaacccaggccctactagtatggactggatttggcgcatccttttccttgtcggcgctgctaccggcgcgcattccgggccccagctccagctgcaagagtctggacctggcctggtcaagcctagcgagacactgagcctgacctgtaccgtgtccggcgatagcatcagcagcggcgattactactggggctggatcagacagcctcctggcaaaggactggaatggatcggccacatctactacagcggcgtgacctactacaaccccagcctgaagtccagagtgaccatcagcgtggacaccagccggaaccagttctccctgaagctgtctagcgtgacagccgccgataccgccgtgtactactgcaccagagaggacagcagcaactggcggagtagaggccagggaacactggtcacagttagctctggatccggcggaggcggaagtggaggcggaggatctggcggcggaggctctttcgaacaggtgcaactggtgcagagcggagccgagcttgtgaagcctggcgcttccgtgaagatgagctgcaaagccagcggctacatcttcaccaactacaacatccactgggtcaagaagtccccaggccagggcctggaatggatcggagccatctaccccggaaacggcgacgccccttacagccagaagttccaggacagagccaccctgaccgccgacaccagcagcagcaccacctacatggaactgagcagcctgaccagcgaggacagcgccgtgtactattgcgtgcgggccaactgggatgtggccttcgcctattggggccagggcacactggtgtccgtgtcctctacgcgtgcctctacaaagggaccctccgtgtttcctctggctcccagcagcaagtctacaagcggaggaacagccgctctgggctgcctggtcaaggattactttcccgagcctgtgaccgtgtcctggaatagcggagcactgacaagcggcgtgcacacctttccagccgtgctgcaaagcagcggcctgtactctctgagcagcgtggtcacagtgcctagctctagcctgggcacccagacctacatctgcaatgtgaaccacaagcctagcaacaccaaggtggacaagagagtggaacccaagagctgtatccccgaggacacattcttcccaagccccgagagcagctgcgacgtgaagctggtggaaaagagcttcgagacagacaccaacctgaacttccagaacctgagcgtgatcggcttcagaatcctgctgctgaaagtggccggctttaacctgctgatgaccctgcggctgtggtccagc

SEQ ID NO: 3408 - DNA, 2694 bp, Artificial Sequence
  Synthetic Polynucloetide
atggccttaccagtgaccgccttgctcctgccgctggccttgctgctccacgccgccaggccggaagtgcagctggttgaatctggcggaggactggttcagcctggcggatctctgagactgtcttgtgccgccagcggcttcagcttcagcgacttttggatgagctgggtccgacaggcccctggcaaaggacttgaatgggtcgccacaatcagccaggccggcagcgagaaggactacgtggactctgtgaagggcagattcaccatcagccgggacaacgccaagaagtccctgtacctccagatgaacagcctgagagccgaggacaccgccgtgtactattgtgcctctggcgtgtacagcttcgactacagaggccagggcaccctggtcacagtctcttctggtaccggcggaggcggatctggcggcggaggtagcggtggcggaggatctgaattcgacatccagatgacccagagccctgccagcctgtctgcctctgtgggcgagacagtgaccatcacctgtcgggtgtccggcaacatccacaactacctggcctggtatcagcagaagcagggcaagagcccccaactgctggtgtacaacgccaagaccctggccgatggcgtgcccagcagattttctggctctggcagcggcacccagtacagcctgaagatcaacagcctccagcccgaggacttcggcagctactactgccagcacttctggtccaacccctacaccttcggcggaggcaccaagctggaaatcaagctcgagggacagcctaaggccaatcctaccgtgacactgttccctccaagcagcgaagaactccaggccaacaaggccacacttgtgtgcctgatctccgacttctaccctggggctgtgacagtggcttggaaggccgatggatctcctgtgaaagccggcgtggaaaccaccaagccatccaagcagagcaacaacaaatacgccgccagctcctacctgagcctgacacctgagcagtggaagtcccacagatcctacagctgccaagtgacccacgaaggcagcaccgtggaaaagacagtggcccctacagagtgcagcggcagagccgattgcggctttaccagcgagagctaccagcagggcgtgctgagcgccaccatcctgtacgagatcctgctgggcaaggccaccctgtacgccgtgctggtgtctgccctggtgctgatggctatggtcaagcggaaggacagccggggacgcgccaagagaagcggatctggcgtgaagcagaccctgaatttcgacctgctgaagctggctggcgacgtggaatccaacccaggccctactagtatggactggatttggcgcatccttttccttgtcggcgctgctaccggcgcgcattccgggccccagctccagctgcaagagtctggacctggcctggtcaagcctagcgagacactgagcctgacctgtaccgtgtccggcgatagcatcagcagcggcgattactactggggctggatcagacagcctcctggcaaaggactggaatggatcggccacatctactacagcggcgtgacctactacaaccccagcctgaagtccagagtgaccatcagcgtggacaccagccggaaccagttctccctgaagctgtctagcgtgacagccgccgataccgccgtgtactactgcaccagagaggacagcagcaactggcggagtagaggccagggaacactggtcacagttagctctggatccggcggaggcggaagtggaggcggaggatctggcggcggaggctctttcgaacaggtgcaactccagcagtctggcgcttccgtgaaggtgtcctgcaaggccagcgaactcgtgcggcctggcacaggctacgccttcaccaattacctgatcgagtgggtcaagcagaggcccggacagggcctggaatggatcggagtgattaacccaggcagcggcggcaccaactacaacgagaagttcaagggcaaggccaccctgaccgccgacaagagcagcagcacagcctacatgcaactgagcagcctgaccagcgacgacagcgccgtgtacttctgcgcccggtacagaagctacgactggtacttcgacgtgtggggagccggcaccaccgtgacagtgtcatctacgcgtgcctctacaaagggaccctccgtgtttcctctggctcccagcagcaagtctacaagcggaggaacagccgctctgggctgcctggtcaaggattactttcccgagcctgtgaccgtgtcctggaatagcggagcactgacaagcggcgtgcacacctttccagccgtgctgcaaagcagcggcctgtactctctgagcagcgtggtcacagtgcctagctctagcctgggcacccagacctacatctgcaatgtgaaccacaagcctagcaacaccaaggtggacaagagagtggaacccaagagctgtatccccgaggacacattcttcccaagccccgagagcagctgcgacgtgaagctggtggaaaagagcttcgagacagacaccaacctgaacttccagaacctgagcgtgatcggcttcagaatcctgctgctgaaagtggccggctttaacctgctgatgaccctgcggctgtggtccagc

SEQ ID NO: 3409 - DNA, 2691 bp, Artificial Sequence
  Synthetic Polynucloetide
atggccttaccagtgaccgccttgctcctgccgctggccttgctgctccacgccgccaggccggaagtgcagctggttgaatctggcggaggactggttcagcctggcggatctctgagactgtcttgtgccgccagcggcttcagcttcagcgacttttggatgagctgggtccgacaggcccctggcaaaggacttgaatgggtcgccacaatcagccaggccggcagcgagaaggactacgtggactctgtgaagggcagattcaccatcagccgggacaacgccaagaagtccctgtacctccagatgaacagcctgagagccgaggacaccgccgtgtactattgtgcctctggcgtgtacagcttcgactacagaggccagggcaccctggtcacagtctcttctggtaccggcggaggcggatctggcggcggaggtagcggtggcggaggatctgaattcgacatccagatgacccagagcttcagcagcctgagcgccagcgtgggcgacagagtgaccatcacctgtagagccagccaggacatcagcaactacctgaactggtatcagcagaagcccggcaaggcccccaagctgctgatctactacaccagcagactgcacagcggcgtgcccagcagattttctggcagcggctccggcaccgactacaccctgacaatcagctccctgcagcccgaggacttcgctacctacttctgtcagcaaggcaacaccctgccctggacctttggcggaggcaccaagctggaaatcaagagactcgagggacagcctaaggccaatcctaccgtgacactgttccctccaagcagcgaagaactccaggccaacaaggccacacttgtgtgcctgatctccgacttctaccctggggctgtgacagtggcttggaaggccgatggatctcctgtgaaagccggcgtggaaaccaccaagccatccaagcagagcaacaacaaatacgccgccagctcctacctgagcctgacacctgagcagtggaagtcccacagatcctacagctgccaagtgacccacgaaggcagcaccgtggaaaagacagtggcccctacagagtgcagcggcagagccgattgcggctttaccagcgagagctaccagcagggcgtgctgagcgccaccatcctgtacgagatcctgctgggcaaggccaccctgtacgccgtgctggtgtctgccctggtgctgatggctatggtcaagcggaaggacagccggggacgcgccaagagaagcggatctggcgtgaagcagaccctgaatttcgacctgctgaagctggctggcgacgtggaatccaacccaggccctactagtatggactggatttggcgcatccttttccttgtcggcgctgctaccggcgcgcattccgggccccagctccagctgcaagagtctggacctggcctggtcaagcctagcgagacactgagcctgacctgtaccgtgtccggcgatagcatcagcagcggcgattactactggggctggatcagacagcctcctggcaaaggactggaatggatcggccacatctactacagcggcgtgacctactacaaccccagcctgaagtccagagtgaccatcagcgtggacaccagccggaaccagttctccctgaagctgtctagcgtgacagccgccgataccgccgtgtactactgcaccagagaggacagcagcaactggcggagtagaggccagggaacactggtcacagttagctctggatccggcggaggcggaagtggaggcggaggatctggcggcggaggctctttcgaagaagtgcaactggtgcagtccggcggagggctggtgcagagcggaggatctctgagactgagctgcagagccagcggctacaccttcacccggtactggatgctgtgggtgcgccagaggccaggcaagggactggaatgggtggccgagatcaacccccggaacgaccggaccaactacaacgagaagttcaagacccggttcaccatcagcgtggacagaagcaagaacaccctgtacctgcagatggacagcctgcgggccgaggataccgccgtgtacttttgtgctctgggaggcggctacgctatggactactggggccagggaacccttgtgaccgtgtcctctacgcgtgcctctacaaagggaccctccgtgtttcctctggctcccagcagcaagtctacaagcggaggaacagccgctctgggctgcctggtcaaggattactttcccgagcctgtgaccgtgtcctggaatagcggagcactgacaagcggcgtgcacacctttccagccgtgctgcaaagcagcggcctgtactctctgagcagcgtggtcacagtgcctagctctagcctgggcacccagacctacatctgcaatgtgaaccacaagcctagcaacaccaaggtggacaagagagtggaacccaagagctgtatccccgaggacacattcttcccaagccccgagagcagctgcgacgtgaagctggtggaaaagagcttcgagacagacaccaacctgaacttccagaacctgagcgtgatcggcttcagaatcctgctgctgaaagtggccggctttaacctgctgatgaccctgcggctgtggtccagc

SEQ ID NO: 3410 - DNA, 2694 bp, Artificial Sequence
  Synthetic Polynucloetide
atggccttaccagtgaccgccttgctcctgccgctggccttgctgctccacgccgccaggccggaagtgcagctggttgaatctggcggaggactggttcagcctggcggatctctgagactgtcttgtgccgccagcggcttcagcttcagcgacttttggatgagctgggtccgacaggcccctggcaaaggacttgaatgggtcgccacaatcagccaggccggcagcgagaaggactacgtggactctgtgaagggcagattcaccatcagccgggacaacgccaagaagtccctgtacctccagatgaacagcctgagagccgaggacaccgccgtgtactattgtgcctctggcgtgtacagcttcgactacagaggccagggcaccctggtcacagtctcttctggtaccggcggaggcggatctggcggcggaggtagcggtggcggaggatctgaattcgacatccagatgacacagtctccggcgtcactgtccgcctccgtgggggagactgtgactattatttgtagggcatcagttaacatctactcttatttggcctggtaccagcagaagcaaggcaagagtcctcagctgctggtgtataatgcgaagatcctggcagagggcgtgccgagccggttctccggcagcggctcaggtacccaattttccctcaagatcaattcactgcagccagaggactttggcagttactattgtcaacaccactacggcacattcactttcgggtccggtacaaaattggagattaagcgactcgagggacagcctaaggccaatcctaccgtgacactgttccctccaagcagcgaagaactccaggccaacaaggccacacttgtgtgcctgatctccgacttctaccctggggctgtgacagtggcttggaaggccgatggatctcctgtgaaagccggcgtggaaaccaccaagccatccaagcagagcaacaacaaatacgccgccagctcctacctgagcctgacacctgagcagtggaagtcccacagatcctacagctgccaagtgacccacgaaggcagcaccgtggaaaagacagtggcccctacagagtgcagcggcagagccgattgcggctttaccagcgagagctaccagcagggcgtgctgagcgccaccatcctgtacgagatcctgctgggcaaggccaccctgtacgccgtgctggtgtctgccctggtgctgatggctatggtcaagcggaaggacagccggggacgcgccaagagaagcggatctggcgtgaagcagaccctgaatttcgacctgctgaagctggctggcgacgtggaatccaacccaggccctactagtatggactggatttggcgcatccttttccttgtcggcgctgctaccggcgcgcattccgggccccagctccagctgcaagagtctggacctggcctggtcaagcctagcgagacactgagcctgacctgtaccgtgtccggcgatagcatcagcagcggcgattactactggggctggatcagacagcctcctggcaaaggactggaatggatcggccacatctactacagcggcgtgacctactacaaccccagcctgaagtccagagtgaccatcagcgtggacaccagccggaaccagttctccctgaagctgtctagcgtgacagccgccgataccgccgtgtactactgcaccagagaggacagcagcaactggcggagtagaggccagggaacactggtcacagttagctctggatccggcggaggcggaagtggaggcggaggatctggcggcggaggctctttcgaacaggtacagttgaaagaaagcgggcctggactggtagcgccttcccaatctctctccatcacgtgcaccatctctggcttctccctgacttcctatggagttcactgggtgaggcagccccccggcaagggactggaatggctggtcgtcatctggtccgacgggtccacaacctacaactccgctctgaaaagtcggctctctatttctaaagataatagcaagagccaggtgtttctgaaaatgaactctctgcagaccgatgatacggccatttactactgcgcttcacactatggctcaaccttggcattcgcttcctggggccacggaacactggtgaccgtttccgcagccacgcgtgcctctacaaagggaccctccgtgtttcctctggctcccagcagcaagtctacaagcggaggaacagccgctctgggctgcctggtcaaggattactttcccgagcctgtgaccgtgtcctggaatagcggagcactgacaagcggcgtgcacacctttccagccgtgctgcaaagcagcggcctgtactctctgagcagcgtggtcacagtgcctagctctagcctgggcacccagacctacatctgcaatgtgaaccacaagcctagcaacaccaaggtggacaagagagtggaacccaagagctgtatccccgaggacacattcttcccaagccccgagagcagctgcgacgtgaagctggtggaaaagagcttcgagacagacaccaacctgaacttccagaacctgagcgtgatcggcttcagaatcctgctgctgaaagtggccggctttaacctgctgatgaccctgcggctgtggtccagc

SEQ ID NO: 3411 - DNA, 2718 bp, Artificial Sequence
  Synthetic Polynucloetide
atggccttaccagtgaccgccttgctcctgccgctggccttgctgctccacgccgccaggccggaagtgcagctggttgaatctggcggaggactggttcagcctggcggatctctgagactgtcttgtgccgccagcggcttcagcttcagcgacttttggatgagctgggtccgacaggcccctggcaaaggacttgaatgggtcgccacaatcagccaggccggcagcgagaaggactacgtggactctgtgaagggcagattcaccatcagccgggacaacgccaagaagtccctgtacctccagatgaacagcctgagagccgaggacaccgccgtgtactattgtgcctctggcgtgtacagcttcgactacagaggccagggcaccctggtcacagtctcttctggtaccggcggaggcggatctggcggcggaggtagcggtggcggaggatctgaattcgacattgtgatgacccagtctcacaaattcatgtccacatcagtaggagacagggtcagcgtcacctgcaaggccagtcagaatgtgggtaataatgtagcctggtatcaacagaaaccagggcaatctcctaaagtactgatttactcggcatcctaccggtacagtggagtccctgatcgcttcacaggcagtggatctgggacagatttcactctcaccatcagtaatgtgcagtctgaagacttggcagagtatttctgtcagcaatataacacctatccattcacgttcggctcggggacaaagttggaaataaaactcgagggacagcctaaggccaatcctaccgtgacactgttccctccaagcagcgaagaactccaggccaacaaggccacacttgtgtgcctgatctccgacttctaccctggggctgtgacagtggcttggaaggccgatggatctcctgtgaaagccggcgtggaaaccaccaagccatccaagcagagcaacaacaaatacgccgccagctcctacctgagcctgacacctgagcagtggaagtcccacagatcctacagctgccaagtgacccacgaaggcagcaccgtggaaaagacagtggcccctacagagtgcagcggcagagccgattgcggctttaccagcgagagctaccagcagggcgtgctgagcgccaccatcctgtacgagatcctgctgggcaaggccaccctgtacgccgtgctggtgtctgccctggtgctgatggctatggtcaagcggaaggacagccggggacgcgccaagagaagcggatctggcgtgaagcagaccctgaatttcgacctgctgaagctggctggcgacgtggaatccaacccaggccctactagtatggactggatttggcgcatccttttccttgtcggcgctgctaccggcgcgcattccgggccccagctccagctgcaagagtctggacctggcctggtcaagcctagcgagacactgagcctgacctgtaccgtgtccggcgatagcatcagcagcggcgattactactggggctggatcagacagcctcctggcaaaggactggaatggatcggccacatctactacagcggcgtgacctactacaaccccagcctgaagtccagagtgaccatcagcgtggacaccagccggaaccagttctccctgaagctgtctagcgtgacagccgccgataccgccgtgtactactgcaccagagaggacagcagcaactggcggagtagaggccagggaacactggtcacagttagctctggatccggcggaggcggaagtggaggcggaggatctggcggcggaggctctttcgaagaggtacagctggaggaaagcggtggaggactggtgcaacctggagggtctatgaagctctcttgcgtagcttctgggttcacgttctccaattactggatgaactgggtgcggcagtcccccgagaaaggcctggaatgggtagcagaaattcggttcaagtcccataactatgctacacactttgccgagtctgtcaaaggccggttcactattagtcgagacgacagcaagtcttcagtctacctgcagatgaataacttgcgggcagaggacacaggtatctactactgcaccaggagaatcggcaactccgactatgactggtggtactttgacgtctggggagcaggcaccagcgtgacggtgagttcagcctcaacgcgtgcctctacaaagggaccctccgtgtttcctctggctcccagcagcaagtctacaagcggaggaacagccgctctgggctgcctggtcaaggattactttcccgagcctgtgaccgtgtcctggaatagcggagcactgacaagcggcgtgcacacctttccagccgtgctgcaaagcagcggcctgtactctctgagcagcgtggtcacagtgcctagctctagcctgggcacccagacctacatctgcaatgtgaaccacaagcctagcaacaccaaggtggacaagagagtggaacccaagagctgtatccccgaggacacattcttcccaagccccgagagcagctgcgacgtgaagctggtggaaaagagcttcgagacagacaccaacctgaacttccagaacctgagcgtgatcggcttcagaatcctgctgctgaaagtggccggctttaacctgctgatgaccctgcggctgtggtccagc

SEQ ID NO: 3412 - DNA, 2697 bp, Artificial Sequence
  Synthetic Polynucloetide
atggccttaccagtgaccgccttgctcctgccgctggccttgctgctccacgccgccaggccggaagtgcagctggttgaatctggcggaggactggttcagcctggcggatctctgagactgtcttgtgccgccagcggcttcagcttcagcgacttttggatgagctgggtccgacaggcccctggcaaaggacttgaatgggtcgccacaatcagccaggccggcagcgagaaggactacgtggactctgtgaagggcagattcaccatcagccgggacaacgccaagaagtccctgtacctccagatgaacagcctgagagccgaggacaccgccgtgtactattgtgcctctggcgtgtacagcttcgactacagaggccagggcaccctggtcacagtctcttctggtaccggcggaggcggatctggcggcggaggtagcggtggcggaggatctgaattcgaccagatcgtgctgacccagtcccccgctattatgtccgcatcaccgggcgaaaaagtgacgatctcctgtagcgcttcatctagcgtctcctacatgtattggtatcaacagaaacctgggtctagcccaaagccgtggatctacagaaccagtaaccttgccagtggggtgccagcccgcttcagcggtagtggcagtggaacttcctatagcctcacaataagcaacatggaggctgaagatgccgctgcctattactgccagcagtaccacagttacccaaccacgttcggcgggggaactaagctcgaagtaaaactcgagggacagcctaaggccaatcctaccgtgacactgttccctccaagcagcgaagaactccaggccaacaaggccacacttgtgtgcctgatctccgacttctaccctggggctgtgacagtggcttggaaggccgatggatctcctgtgaaagccggcgtggaaaccaccaagccatccaagcagagcaacaacaaatacgccgccagctcctacctgagcctgacacctgagcagtggaagtcccacagatcctacagctgccaagtgacccacgaaggcagcaccgtggaaaagacagtggcccctacagagtgcagcggcagagccgattgcggctttaccagcgagagctaccagcagggcgtgctgagcgccaccatcctgtacgagatcctgctgggcaaggccaccctgtacgccgtgctggtgtctgccctggtgctgatggctatggtcaagcggaaggacagccggggacgcgccaagagaagcggatctggcgtgaagcagaccctgaatttcgacctgctgaagctggctggcgacgtggaatccaacccaggccctactagtatggactggatttggcgcatccttttccttgtcggcgctgctaccggcgcgcattccgggccccagctccagctgcaagagtctggacctggcctggtcaagcctagcgagacactgagcctgacctgtaccgtgtccggcgatagcatcagcagcggcgattactactggggctggatcagacagcctcctggcaaaggactggaatggatcggccacatctactacagcggcgtgacctactacaaccccagcctgaagtccagagtgaccatcagcgtggacaccagccggaaccagttctccctgaagctgtctagcgtgacagccgccgataccgccgtgtactactgcaccagagaggacagcagcaactggcggagtagaggccagggaacactggtcacagttagctctggatccggcggaggcggaagtggaggcggaggatctggcggcggaggctctttcgaagaggtgcagctggtggaatctgggggcggcctggtccaacctaagggatcactcaagctctcttgtgcggccagcggattctctttcaatacctatgctatgaattgggtgagacaggcgcccggaaagggcctcgaatggatagcccatatccggtcaaaatcaaacaatttcgcaacctactatgcggactccgtgaaggaccgattttccatctcccgagatgcctccgagaatattctgttcctgcagatgaataacctcaagacagaggacaccgccatgtactactgtgtgcgccagggcggtgactttcccatggattactgggggcaggggaccagcgtgaccgtgagctctacgcgtgcctctacaaagggaccctccgtgtttcctctggctcccagcagcaagtctacaagcggaggaacagccgctctgggctgcctggtcaaggattactttcccgagcctgtgaccgtgtcctggaatagcggagcactgacaagcggcgtgcacacctttccagccgtgctgcaaagcagcggcctgtactctctgagcagcgtggtcacagtgcctagctctagcctgggcacccagacctacatctgcaatgtgaaccacaagcctagcaacaccaaggtggacaagagagtggaacccaagagctgtatccccgaggacacattcttcccaagccccgagagcagctgcgacgtgaagctggtggaaaagagcttcgagacagacaccaacctgaacttccagaacctgagcgtgatcggcttcagaatcctgctgctgaaagtggccggctttaacctgctgatgaccctgcggctgtggtccagc

SEQ ID NO: 3413 - DNA, 2694 bp, Artificial Sequence
  Synthetic Polynucloetide
atggccttaccagtgaccgccttgctcctgccgctggccttgctgctccacgccgccaggccggaagtgcagctggttgaatctggcggaggactggttcagcctggcggatctctgagactgtcttgtgccgccagcggcttcagcttcagcgacttttggatgagctgggtccgacaggcccctggcaaaggacttgaatgggtcgccacaatcagccaggccggcagcgagaaggactacgtggactctgtgaagggcagattcaccatcagccgggacaacgccaagaagtccctgtacctccagatgaacagcctgagagccgaggacaccgccgtgtactattgtgcctctggcgtgtacagcttcgactacagaggccagggcaccctggtcacagtctcttctggtaccggcggaggcggatctggcggcggaggtagcggtggcggaggatctgaattcgacgacatccagatgacccagagcagcagcagcttcagcgtgagcctgggcgacagagtgaccatcacctgcatggccagcgaggacatctacatcagactggcctggtaccagcagaagcccggcaacgcccccagactgctgatcagcgccgccaccagcctggagaccggcgtgcccagcagattcagcggcagcggcagcggcaaggactacaccctgagcatcaccagcctgcagaccgaggacgtgggcacctactactgccagcagtactggagcagcccctggaccttcggcggcggcaccaagctggagatcaacctcgagggacagcctaaggccaatcctaccgtgacactgttccctccaagcagcgaagaactccaggccaacaaggccacacttgtgtgcctgatctccgacttctaccctggggctgtgacagtggcttggaaggccgatggatctcctgtgaaagccggcgtggaaaccaccaagccatccaagcagagcaacaacaaatacgccgccagctcctacctgagcctgacacctgagcagtggaagtcccacagatcctacagctgccaagtgacccacgaaggcagcaccgtggaaaagacagtggcccctacagagtgcagcggcagagccgattgcggctttaccagcgagagctaccagcagggcgtgctgagcgccaccatcctgtacgagatcctgctgggcaaggccaccctgtacgccgtgctggtgtctgccctggtgctgatggctatggtcaagcggaaggacagccggggacgcgccaagagaagcggatctggcgtgaagcagaccctgaatttcgacctgctgaagctggctggcgacgtggaatccaacccaggccctactagtatggactggatttggcgcatccttttccttgtcggcgctgctaccggcgcgcattccgggccccagctccagctgcaagagtctggacctggcctggtcaagcctagcgagacactgagcctgacctgtaccgtgtccggcgatagcatcagcagcggcgattactactggggctggatcagacagcctcctggcaaaggactggaatggatcggccacatctactacagcggcgtgacctactacaaccccagcctgaagtccagagtgaccatcagcgtggacaccagccggaaccagttctccctgaagctgtctagcgtgacagccgccgataccgccgtgtactactgcaccagagaggacagcagcaactggcggagtagaggccagggaacactggtcacagttagctctggatccggcggaggcggaagtggaggcggaggatctggcggcggaggctctttcgaagacgtgcagctgcaggagagcggccccggcctggtgaagcccagccagagcctgagcctgacctgcaccgtgaccggctacagcatcaccagcgactacacctggaactggatcagacagttccccggcaacaagctggagtggatgggctacatcacctacagcggcagcaccagctacaaccccagcctgaagagcagaaacagcatcaccagagacaccagcaagaaccagttcttcctgcagctgaacagcgtgaccaccgaggacaccgccacctactactgcgccagactgggcagaagatacacaatggactactggggccagggcaccagcgtgaccgtgagcagcacgcgtgcctctacaaagggaccctccgtgtttcctctggctcccagcagcaagtctacaagcggaggaacagccgctctgggctgcctggtcaaggattactttcccgagcctgtgaccgtgtcctggaatagcggagcactgacaagcggcgtgcacacctttccagccgtgctgcaaagcagcggcctgtactctctgagcagcgtggtcacagtgcctagctctagcctgggcacccagacctacatctgcaatgtgaaccacaagcctagcaacaccaaggtggacaagagagtggaacccaagagctgtatccccgaggacacattcttcccaagccccgagagcagctgcgacgtgaagctggtggaaaagagcttcgagacagacaccaacctgaacttccagaacctgagcgtgatcggcttcagaatcctgctgctgaaagtggccggctttaacctgctgatgaccctgcggctgtggtccagc

SEQ ID NO: 3414 - DNA, 2703 bp, Artificial Sequence
  Synthetic Polynucloetide
atggccttaccagtgaccgccttgctcctgccgctggccttgctgctccacgccgccaggccggaagtgcagctggttgaatctggcggaggactggttcagcctggcggatctctgagactgtcttgtgccgccagcggcttcagcttcagcgacttttggatgagctgggtccgacaggcccctggcaaaggacttgaatgggtcgccacaatcagccaggccggcagcgagaaggactacgtggactctgtgaagggcagattcaccatcagccgggacaacgccaagaagtccctgtacctccagatgaacagcctgagagccgaggacaccgccgtgtactattgtgcctctggcgtgtacagcttcgactacagaggccagggcaccctggtcacagtctcttctggtaccggcggaggcggatctggcggcggaggtagcggtggcggaggatctgaattcgacgacatccagatgacccagagccccagcagcctgtctgccagcgtgggcgacagagtgaccatcacctgtagagccagccagagcatcagcagctacctgaactggtatcagcagaagcccggcaaggcccccaaactgctgatctacgacgccagcaacctggaaaccggcgtgcccagcagattttccggcagcggctctggcaccgacttcaccttcaccatcagctccctccagcccgaggacattgccacctactactgccagcagtacgacaacctgcccctgacctttggcggaggcaccaaggtggacatcaagagactcgagggacagcctaaggccaatcctaccgtgacactgttccctccaagcagcgaagaactccaggccaacaaggccacacttgtgtgcctgatctccgacttctaccctggggctgtgacagtggcttggaaggccgatggatctcctgtgaaagccggcgtggaaaccaccaagccatccaagcagagcaacaacaaatacgccgccagctcctacctgagcctgacacctgagcagtggaagtcccacagatcctacagctgccaagtgacccacgaaggcagcaccgtggaaaagacagtggcccctacagagtgcagcggcagagccgattgcggctttaccagcgagagctaccagcagggcgtgctgagcgccaccatcctgtacgagatcctgctgggcaaggccaccctgtacgccgtgctggtgtctgccctggtgctgatggctatggtcaagcggaaggacagccggggacgcgccaagagaagcggatctggcgtgaagcagaccctgaatttcgacctgctgaagctggctggcgacgtggaatccaacccaggccctactagtatggactggatttggcgcatccttttccttgtcggcgctgctaccggcgcgcattccgggccccagctccagctgcaagagtctggacctggcctggtcaagcctagcgagacactgagcctgacctgtaccgtgtccggcgatagcatcagcagcggcgattactactggggctggatcagacagcctcctggcaaaggactggaatggatcggccacatctactacagcggcgtgacctactacaaccccagcctgaagtccagagtgaccatcagcgtggacaccagccggaaccagttctccctgaagctgtctagcgtgacagccgccgataccgccgtgtactactgcaccagagaggacagcagcaactggcggagtagaggccagggaacactggtcacagttagctctggatccggcggaggcggaagtggaggcggaggatctggcggcggaggctctttcgaacaggtgcaactggtggaatctggcggcggagtggtgcagcctggcagaagcctgagactgagctgtgccgccagcggcttcacctttagcagctacgccatgcactgggtgcgccaggcccctggaaaaggcctggaatgggtggccgtgatctcctacgacggctccaacaagtattacgccgacagcgtgaagggccggttcaccatctccagagacaacagcaagaacaccctgtacctccagatgaacagcctgcgggccgaggacaccgccgtgtactattgtgccagggctcacaacagcagctcttggagcttcgactactggggccagggcaccctcgtgaccgtgtcatctacgcgtgcctctacaaagggaccctccgtgtttcctctggctcccagcagcaagtctacaagcggaggaacagccgctctgggctgcctggtcaaggattactttcccgagcctgtgaccgtgtcctggaatagcggagcactgacaagcggcgtgcacacctttccagccgtgctgcaaagcagcggcctgtactctctgagcagcgtggtcacagtgcctagctctagcctgggcacccagacctacatctgcaatgtgaaccacaagcctagcaacaccaaggtggacaagagagtggaacccaagagctgtatccccgaggacacattcttcccaagccccgagagcagctgcgacgtgaagctggtggaaaagagcttcgagacagacaccaacctgaacttccagaacctgagcgtgatcggcttcagaatcctgctgctgaaagtggccggctttaacctgctgatgaccctgcggctgtggtccagc

SEQ ID NO: 3415 - DNA, 2730 bp, Artificial Sequence
  Synthetic Polynucloetide
atggccttaccagtgaccgccttgctcctgccgctggccttgctgctccacgccgccaggccggaagtgcagctggttgaatctggcggaggactggttcagcctggcggatctctgagactgtcttgtgccgccagcggcttcagcttcagcgacttttggatgagctgggtccgacaggcccctggcaaaggacttgaatgggtcgccacaatcagccaggccggcagcgagaaggactacgtggactctgtgaagggcagattcaccatcagccgggacaacgccaagaagtccctgtacctccagatgaacagcctgagagccgaggacaccgccgtgtactattgtgcctctggcgtgtacagcttcgactacagaggccagggcaccctggtcacagtctcttctggtaccggcggaggcggatctggcggcggaggtagcggtggcggaggatctgaattcgacgacgtcgtgatgacccagagccctctgagcctgcctgtgtccctgggcgatcaggccagcatctcctgcagatccagccagagactggtgcacagcaacggcaacacctacctgcactggtatctgcagaagcccggccagagccccaagctgctgatctaccgggtgtccaacagattccccggcgtgcccgatagattcagcggctctggcagcggcaccgacttcaccctgaagatcagccgggtggaagccgaggacctgggcatctatttctgcagccagagcacccacgtgccctacacctttggcggaggcaccaagctggaaatcaagcggctcgagggacagcctaaggccaatcctaccgtgacactgttccctccaagcagcgaagaactccaggccaacaaggccacacttgtgtgcctgatctccgacttctaccctggggctgtgacagtggcttggaaggccgatggatctcctgtgaaagccggcgtggaaaccaccaagccatccaagcagagcaacaacaaatacgccgccagctcctacctgagcctgacacctgagcagtggaagtcccacagatcctacagctgccaagtgacccacgaaggcagcaccgtggaaaagacagtggcccctacagagtgcagcggcagagccgattgcggctttaccagcgagagctaccagcagggcgtgctgagcgccaccatcctgtacgagatcctgctgggcaaggccaccctgtacgccgtgctggtgtctgccctggtgctgatggctatggtcaagcggaaggacagccggggacgcgccaagagaagcggatctggcgtgaagcagaccctgaatttcgacctgctgaagctggctggcgacgtggaatccaacccaggccctactagtatggactggatttggcgcatccttttccttgtcggcgctgctaccggcgcgcattccgggccccagctccagctgcaagagtctggacctggcctggtcaagcctagcgagacactgagcctgacctgtaccgtgtccggcgatagcatcagcagcggcgattactactggggctggatcagacagcctcctggcaaaggactggaatggatcggccacatctactacagcggcgtgacctactacaaccccagcctgaagtccagagtgaccatcagcgtggacaccagccggaaccagttctccctgaagctgtctagcgtgacagccgccgataccgccgtgtactactgcaccagagaggacagcagcaactggcggagtagaggccagggaacactggtcacagttagctctggatccggcggaggcggaagtggaggcggaggatctggcggcggaggctctttcgaagaagtgcggctgcagcagtctggccccgacctgattaagcctggggccagcgtgaagatgagctgcaaggccagcggctacaccttcaccggctacgtgatgcactgggtcaagcagaggccaggccagggcctggaatggatcggcttcatcaacccctacaacgacgacatccagagcaacgagcggttccggggcaaggccaccctgaccagcgataagagcagcaccaccgcctacatggaactgagcagcctgacctccgaggacagcgccgtgtactactgtgctaggggagccggctacaacttcgacggggcctacagattcttcgacttttggggccagggcaccacactgaccgtgtcctctacgcgtgcctctacaaagggaccctccgtgtttcctctggctcccagcagcaagtctacaagcggaggaacagccgctctgggctgcctggtcaaggattactttcccgagcctgtgaccgtgtcctggaatagcggagcactgacaagcggcgtgcacacctttccagccgtgctgcaaagcagcggcctgtactctctgagcagcgtggtcacagtgcctagctctagcctgggcacccagacctacatctgcaatgtgaaccacaagcctagcaacaccaaggtggacaagagagtggaacccaagagctgtatccccgaggacacattcttcccaagccccgagagcagctgcgacgtgaagctggtggaaaagagcttcgagacagacaccaacctgaacttccagaacctgagcgtgatcggcttcagaatcctgctgctgaaagtggccggctttaacctgctgatgaccctgcggctgtggtccagc

SEQ ID NO: 3416 - DNA, 2703 bp, Artificial Sequence
  Synthetic Polynucloetide
atggccttaccagtgaccgccttgctcctgccgctggccttgctgctccacgccgccaggccggaagtgcagctggttgaatctggcggaggactggttcagcctggcggatctctgagactgtcttgtgccgccagcggcttcagcttcagcgacttttggatgagctgggtccgacaggcccctggcaaaggacttgaatgggtcgccacaatcagccaggccggcagcgagaaggactacgtggactctgtgaagggcagattcaccatcagccgggacaacgccaagaagtccctgtacctccagatgaacagcctgagagccgaggacaccgccgtgtactattgtgcctctggcgtgtacagcttcgactacagaggccagggcaccctggtcacagtctcttctggtaccggcggaggcggatctggcggcggaggtagcggtggcggaggatctgaattcgacagctacgagctgacccagcctcctagcgtgtccgtgtctcctggacagaccgccaccatctcttgcagcggcgatcaactgggcgggaagtacggccactggtatcagaagaagcccggccagagccccgtgctggtgctgtaccaggacagaaaacggcctgccggcatccccgagagattcagcggaagcagcagcggcaacaccatcaccctgaccatcagcggcacccaggccgtggatgaggccgactactactgccaggcttgggacaccaatctgggcggcgtgttcggcggaggcaccaaagtgacagtgctgggacagctcgagggacagcctaaggccaatcctaccgtgacactgttccctccaagcagcgaagaactccaggccaacaaggccacacttgtgtgcctgatctccgacttctaccctggggctgtgacagtggcttggaaggccgatggatctcctgtgaaagccggcgtggaaaccaccaagccatccaagcagagcaacaacaaatacgccgccagctcctacctgagcctgacacctgagcagtggaagtcccacagatcctacagctgccaagtgacccacgaaggcagcaccgtggaaaagacagtggcccctacagagtgcagcggcagagccgattgcggctttaccagcgagagctaccagcagggcgtgctgagcgccaccatcctgtacgagatcctgctgggcaaggccaccctgtacgccgtgctggtgtctgccctggtgctgatggctatggtcaagcggaaggacagccggggacgcgccaagagaagcggatctggcgtgaagcagaccctgaatttcgacctgctgaagctggctggcgacgtggaatccaacccaggccctactagtatggactggatttggcgcatccttttccttgtcggcgctgctaccggcgcgcattccgggccccagctccagctgcaagagtctggacctggcctggtcaagcctagcgagacactgagcctgacctgtaccgtgtccggcgatagcatcagcagcggcgattactactggggctggatcagacagcctcctggcaaaggactggaatggatcggccacatctactacagcggcgtgacctactacaaccccagcctgaagtccagagtgaccatcagcgtggacaccagccggaaccagttctccctgaagctgtctagcgtgacagccgccgataccgccgtgtactactgcaccagagaggacagcagcaactggcggagtagaggccagggaacactggtcacagttagctctggatccggcggaggcggaagtggaggcggaggatctggcggcggaggctctttcgaacaggtgcaactggtggaaagcggagccgaagtgaagaaacctggggccagcgtgaaggtgtcctgcaaggccagcggctacacctttaccggctactacatgcactgggtgcgccaggctccaggccagggactggaatggatgggccggatcaaccccaatagcggcggcaccaactacgcccagaaattccagggcagagtgaccatgaccagagacaccagcatcagcaccgcctacatggaactgagccggctgagaagcgacgacaccgccgtgtactactgcgccagccctagaggcagaggcagcgccttcgatatttggggccagggcacactcgtgaccgtgtcctctacgcgtgcctctacaaagggaccctccgtgtttcctctggctcccagcagcaagtctacaagcggaggaacagccgctctgggctgcctggtcaaggattactttcccgagcctgtgaccgtgtcctggaatagcggagcactgacaagcggcgtgcacacctttccagccgtgctgcaaagcagcggcctgtactctctgagcagcgtggtcacagtgcctagctctagcctgggcacccagacctacatctgcaatgtgaaccacaagcctagcaacaccaaggtggacaagagagtggaacccaagagctgtatccccgaggacacattcttcccaagccccgagagcagctgcgacgtgaagctggtggaaaagagcttcgagacagacaccaacctgaacttccagaacctgagcgtgatcggcttcagaatcctgctgctgaaagtggccggctttaacctgctgatgaccctgcggctgtggtccagc

SEQ ID NO: 3417 - DNA, 2712 bp, Artificial Sequence
  Synthetic Polynucloetide
atggccttaccagtgaccgccttgctcctgccgctggccttgctgctccacgccgccaggccggaagtgcagctggttgaatctggcggaggactggttcagcctggcggatctctgagactgtcttgtgccgccagcggcttcagcttcagcgacttttggatgagctgggtccgacaggcccctggcaaaggacttgaatgggtcgccacaatcagccaggccggcagcgagaaggactacgtggactctgtgaagggcagattcaccatcagccgggacaacgccaagaagtccctgtacctccagatgaacagcctgagagccgaggacaccgccgtgtactattgtgcctctggcgtgtacagcttcgactacagaggccagggcaccctggtcacagtctcttctggtaccggcggaggcggatctggcggcggaggtagcggtggcggaggatctgaattcgacaacttcatgctgacccagccccacagcgtgtccgagagccctggcaagaccgtgaccatctcctgcaccagaagcagcggctctatcgccagcaaatacgtgcagtggtatcagcagaggcccggcagcagccctaccaccgtgatctacgaggacaaccagaggcctagcggcgtgcccgatagattcagcggcagcatcgacaccagcagcaacagcgccagcctgaccatcagcggcctgagaacagaggacgaggccgactactactgccacagctacgacagcaacaaccactccgtgttcggcggaggcaccaaagtgacagtgctgggacagctcgagggacagcctaaggccaatcctaccgtgacactgttccctccaagcagcgaagaactccaggccaacaaggccacacttgtgtgcctgatctccgacttctaccctggggctgtgacagtggcttggaaggccgatggatctcctgtgaaagccggcgtggaaaccaccaagccatccaagcagagcaacaacaaatacgccgccagctcctacctgagcctgacacctgagcagtggaagtcccacagatcctacagctgccaagtgacccacgaaggcagcaccgtggaaaagacagtggcccctacagagtgcagcggcagagccgattgcggctttaccagcgagagctaccagcagggcgtgctgagcgccaccatcctgtacgagatcctgctgggcaaggccaccctgtacgccgtgctggtgtctgccctggtgctgatggctatggtcaagcggaaggacagccggggacgcgccaagagaagcggatctggcgtgaagcagaccctgaatttcgacctgctgaagctggctggcgacgtggaatccaacccaggccctactagtatggactggatttggcgcatccttttccttgtcggcgctgctaccggcgcgcattccgggccccagctccagctgcaagagtctggacctggcctggtcaagcctagcgagacactgagcctgacctgtaccgtgtccggcgatagcatcagcagcggcgattactactggggctggatcagacagcctcctggcaaaggactggaatggatcggccacatctactacagcggcgtgacctactacaaccccagcctgaagtccagagtgaccatcagcgtggacaccagccggaaccagttctccctgaagctgtctagcgtgacagccgccgataccgccgtgtactactgcaccagagaggacagcagcaactggcggagtagaggccagggaacactggtcacagttagctctggatccggcggaggcggaagtggaggcggaggatctggcggcggaggctctttcgaagaagtgcaactggtggaaagcgggggaggcgtggtgcagccaggcggatctctgagactgagctgtgccgccagcggcttcaccttcagcagctacgccatgagctgggtgcgccaggcccctggaaaaggcctggaatgggtgtccgccatctctggctctggcggcagcacctactacgccgatagcgtgaagggccggttcagcatcagccgggacaacagcaagaacaccctgtacctccagatgaacagcctgcgggccgaggacaccgccgtgtactactgtgccagaaccagaagctccggggccttcgacatctggggccagggaacactcgtgaccgtgtcctctacgcgtgcctctacaaagggaccctccgtgtttcctctggctcccagcagcaagtctacaagcggaggaacagccgctctgggctgcctggtcaaggattactttcccgagcctgtgaccgtgtcctggaatagcggagcactgacaagcggcgtgcacacctttccagccgtgctgcaaagcagcggcctgtactctctgagcagcgtggtcacagtgcctagctctagcctgggcacccagacctacatctgcaatgtgaaccacaagcctagcaacaccaaggtggacaagagagtggaacccaagagctgtatccccgaggacacattcttcccaagccccgagagcagctgcgacgtgaagctggtggaaaagagcttcgagacagacaccaacctgaacttccagaacctgagcgtgatcggcttcagaatcctgctgctgaaagtggccggctttaacctgctgatgaccctgcggctgtggtccagc

SEQ ID NO: 3418 - DNA, 2697 bp, Artificial Sequence
  Synthetic Polynucloetide
atggccttaccagtgaccgccttgctcctgccgctggccttgctgctccacgccgccaggccggaagtgcagctggttgaatctggcggaggactggttcagcctggcggatctctgagactgtcttgtgccgccagcggcttcagcttcagcgacttttggatgagctgggtccgacaggcccctggcaaaggacttgaatgggtcgccacaatcagccaggccggcagcgagaaggactacgtggactctgtgaagggcagattcaccatcagccgggacaacgccaagaagtccctgtacctccagatgaacagcctgagagccgaggacaccgccgtgtactattgtgcctctggcgtgtacagcttcgactacagaggccagggcaccctggtcacagtctcttctggtaccggcggaggcggatctggcggcggaggtagcggtggcggaggatctgaattcgacatccagatgaaccagagccccagcagcctgagcgccagcctgggcgataccatcaccatcacctgtcacgccagccagaacatcaacgtgtggctgagctggtatcagcagaagcccggcaacatccccaagctgctgatctacaaggccagcaacctgcacaccggcgtgcccagcagattttctggcagcggctctggcaccggcttcaccattaccatcagctccctccagcccgaggacattgccacctactactgccagcagggccagagctacccctggacatttggcggaggcaccaagctggaaatcaagagactcgagggacagcctaaggccaatcctaccgtgacactgttccctccaagcagcgaagaactccaggccaacaaggccacacttgtgtgcctgatctccgacttctaccctggggctgtgacagtggcttggaaggccgatggatctcctgtgaaagccggcgtggaaaccaccaagccatccaagcagagcaacaacaaatacgccgccagctcctacctgagcctgacacctgagcagtggaagtcccacagatcctacagctgccaagtgacccacgaaggcagcaccgtggaaaagacagtggcccctacagagtgcagcggcagagccgattgcggctttaccagcgagagctaccagcagggcgtgctgagcgccaccatcctgtacgagatcctgctgggcaaggccaccctgtacgccgtgctggtgtctgccctggtgctgatggctatggtcaagcggaaggacagccggggacgcgccaagagaagcggatctggcgtgaagcagaccctgaatttcgacctgctgaagctggctggcgacgtggaatccaacccaggccctactagtatggactggatttggcgcatccttttccttgtcggcgctgctaccggcgcgcattccgggccccagctccagctgcaagagtctggacctggcctggtcaagcctagcgagacactgagcctgacctgtaccgtgtccggcgatagcatcagcagcggcgattactactggggctggatcagacagcctcctggcaaaggactggaatggatcggccacatctactacagcggcgtgacctactacaaccccagcctgaagtccagagtgaccatcagcgtggacaccagccggaaccagttctccctgaagctgtctagcgtgacagccgccgataccgccgtgtactactgcaccagagaggacagcagcaactggcggagtagaggccagggaacactggtcacagttagctctggatccggcggaggcggaagtggaggcggaggatctggcggcggaggctctttcgaagaagtgcaactccagcagagcggcccagagcttgtgaagcctggcgcttccgtgaagattagctgcaaagccagcggctacagcttcaccggctacttcatgaactgggtcaagcagagccacggcaagagcctggagtacatcggcagattcaacccctacaacggcgagacactgtacaaccagaagttcaagggcaaggccaccctgaccgtggacaagagcagcagcaccgtgcacatggaactgctgagcgtgaccagcgaggacagcgccgtgtactactgtggcagaagcggcaacgacgacgctatggactattggggccagggcaccagcgtgaccgtgtctagtgctacgcgtgcctctacaaagggaccctccgtgtttcctctggctcccagcagcaagtctacaagcggaggaacagccgctctgggctgcctggtcaaggattactttcccgagcctgtgaccgtgtcctggaatagcggagcactgacaagcggcgtgcacacctttccagccgtgctgcaaagcagcggcctgtactctctgagcagcgtggtcacagtgcctagctctagcctgggcacccagacctacatctgcaatgtgaaccacaagcctagcaacaccaaggtggacaagagagtggaacccaagagctgtatccccgaggacacattcttcccaagccccgagagcagctgcgacgtgaagctggtggaaaagagcttcgagacagacaccaacctgaacttccagaacctgagcgtgatcggcttcagaatcctgctgctgaaagtggccggctttaacctgctgatgaccctgcggctgtggtccagc

SEQ ID NO: 3419 - DNA, 2700 bp, Artificial Sequence
  Synthetic Polynucloetide
atggccttaccagtgaccgccttgctcctgccgctggccttgctgctccacgccgccaggccggaagtgcagctggttgaatctggcggaggactggttcagcctggcggatctctgagactgtcttgtgccgccagcggcttcagcttcagcgacttttggatgagctgggtccgacaggcccctggcaaaggacttgaatgggtcgccacaatcagccaggccggcagcgagaaggactacgtggactctgtgaagggcagattcaccatcagccgggacaacgccaagaagtccctgtacctccagatgaacagcctgagagccgaggacaccgccgtgtactattgtgcctctggcgtgtacagcttcgactacagaggccagggcaccctggtcacagtctcttctggtaccggcggaggcggatctggcggcggaggtagcggtggcggaggatctgaattcgagatcgtgctgacacagagccctgccaccctgtctctgagccctggcgaaagagccaccctgagctgtagagccagccagagcgtgcggagctacctggcctggtatcagcagaagcctggacaggcccccagactgctgatctacgacgccagcaatcgggccacaggcatccccgccagattttctggctctggcagcggcaccgacttcaccctgacaatcagcagcctggaacccgaggacttcgccgtgtactactgccagcagcggagcaactggccccctacctttggacagggcaccaaggtggaaatcaagctcgagggacagcctaaggccaatcctaccgtgacactgttccctccaagcagcgaagaactccaggccaacaaggccacacttgtgtgcctgatctccgacttctaccctggggctgtgacagtggcttggaaggccgatggatctcctgtgaaagccggcgtggaaaccaccaagccatccaagcagagcaacaacaaatacgccgccagctcctacctgagcctgacacctgagcagtggaagtcccacagatcctacagctgccaagtgacccacgaaggcagcaccgtggaaaagacagtggcccctacagagtgcagcggcagagccgattgcggctttaccagcgagagctaccagcagggcgtgctgagcgccaccatcctgtacgagatcctgctgggcaaggccaccctgtacgccgtgctggtgtctgccctggtgctgatggctatggtcaagcggaaggacagccggggacgcgccaagagaagcggatctggcgtgaagcagaccctgaatttcgacctgctgaagctggctggcgacgtggaatccaacccaggccctactagtatggactggatttggcgcatccttttccttgtcggcgctgctaccggcgcgcattccgggccccagctccagctgcaagagtctggacctggcctggtcaagcctagcgagacactgagcctgacctgtaccgtgtccggcgatagcatcagcagcggcgattactactggggctggatcagacagcctcctggcaaaggactggaatggatcggccacatctactacagcggcgtgacctactacaaccccagcctgaagtccagagtgaccatcagcgtggacaccagccggaaccagttctccctgaagctgtctagcgtgacagccgccgataccgccgtgtactactgcaccagagaggacagcagcaactggcggagtagaggccagggaacactggtcacagttagctctggatccggcggaggcggaagtggaggcggaggatctggcggcggaggctctttcgaacaactccaggtgcaggaatctggccccggactcgtgaagcccagcgagacactgagcctgacctgtaccgtgtccggcggcagcatcagcaacagctacttctcctggggctggatcagacagccccctggcaagggcctggaatggatcggcagcttctactacggcgagaaaacctactacaaccccagcctgaagtccagagccaccatcagcatcgacaccagcaagagccagttctccctgaagctgagcagcgtgacagccgccgacaccgccgtgtattattgccccagaggccccaccatgatccggggcgtgatcgactcttggggccagggaacactcgtgaccgtgtcctctacgcgtgcctctacaaagggaccctccgtgtttcctctggctcccagcagcaagtctacaagcggaggaacagccgctctgggctgcctggtcaaggattactttcccgagcctgtgaccgtgtcctggaatagcggagcactgacaagcggcgtgcacacctttccagccgtgctgcaaagcagcggcctgtactctctgagcagcgtggtcacagtgcctagctctagcctgggcacccagacctacatctgcaatgtgaaccacaagcctagcaacaccaaggtggacaagagagtggaacccaagagctgtatccccgaggacacattcttcccaagccccgagagcagctgcgacgtgaagctggtggaaaagagcttcgagacagacaccaacctgaacttccagaacctgagcgtgatcggcttcagaatcctgctgctgaaagtggccggctttaacctgctgatgaccctgcggctgtggtccagc

SEQ ID NO: 3420 - DNA, 2727 bp, Artificial Sequence
  Synthetic Polynucloetide
atggccttaccagtgaccgccttgctcctgccgctggccttgctgctccacgccgccaggccggaagtgcagctggttgaatctggcggaggactggttcagcctggcggatctctgagactgtcttgtgccgccagcggcttcagcttcagcgacttttggatgagctgggtccgacaggcccctggcaaaggacttgaatgggtcgccacaatcagccaggccggcagcgagaaggactacgtggactctgtgaagggcagattcaccatcagccgggacaacgccaagaagtccctgtacctccagatgaacagcctgagagccgaggacaccgccgtgtactattgtgcctctggcgtgtacagcttcgactacagaggccagggcaccctggtcacagtctcttctggtaccggcggaggcggatctggcggcggaggtagcggtggcggaggatctgaattcgacatcgtgatgacccagacccccctgagcctgcctgtgacacctggcgagcctgccagcatctcctgcagaagcagcagaagcctgctggacagcgacgacggcaacacctacctggactggtatctgcagaaacccggccagagcccccaactgctgatctacaccctgagctacagagccagcggcgtgcccgatagattttccggctctggcagcggcaccgacttcaccctgaagatcagccgggtggaagccgaggacgtgggcgtgtactactgtatgcagcgggtggaatttcccatcaccttcggccagggcaccagactggaaatcaagagactcgagggacagcctaaggccaatcctaccgtgacactgttccctccaagcagcgaagaactccaggccaacaaggccacacttgtgtgcctgatctccgacttctaccctggggctgtgacagtggcttggaaggccgatggatctcctgtgaaagccggcgtggaaaccaccaagccatccaagcagagcaacaacaaatacgccgccagctcctacctgagcctgacacctgagcagtggaagtcccacagatcctacagctgccaagtgacccacgaaggcagcaccgtggaaaagacagtggcccctacagagtgcagcggcagagccgattgcggctttaccagcgagagctaccagcagggcgtgctgagcgccaccatcctgtacgagatcctgctgggcaaggccaccctgtacgccgtgctggtgtctgccctggtgctgatggctatggtcaagcggaaggacagccggggacgcgccaagagaagcggatctggcgtgaagcagaccctgaatttcgacctgctgaagctggctggcgacgtggaatccaacccaggccctactagtatggactggatttggcgcatccttttccttgtcggcgctgctaccggcgcgcattccgggccccagctccagctgcaagagtctggacctggcctggtcaagcctagcgagacactgagcctgacctgtaccgtgtccggcgatagcatcagcagcggcgattactactggggctggatcagacagcctcctggcaaaggactggaatggatcggccacatctactacagcggcgtgacctactacaaccccagcctgaagtccagagtgaccatcagcgtggacaccagccggaaccagttctccctgaagctgtctagcgtgacagccgccgataccgccgtgtactactgcaccagagaggacagcagcaactggcggagtagaggccagggaacactggtcacagttagctctggatccggcggaggcggaagtggaggcggaggatctggcggcggaggctctttcgaacaggtgcaactggtggaatctggcgggggagtggtgcagcctggcagatccctgagactgagctgtgccgccagcggcttcatcttcagcagatacggaatgcactgggtgcgccaggcccctggcaagggactgaaatgggtggccgtgatttggtacgacggcagcaacaagctgtacgccgacagcgtgaagggccggttcaccatcagcagagacaacagcaagaacaccctgtacctgcagatgaacagcctgcgggccgaggacaccgccgtgtactattgcgccagagactactacgacaacagccggcaccactggggcttcgactattggggccagggaacccttgtgaccgtgtcctctacgcgtgcctctacaaagggaccctccgtgtttcctctggctcccagcagcaagtctacaagcggaggaacagccgctctgggctgcctggtcaaggattactttcccgagcctgtgaccgtgtcctggaatagcggagcactgacaagcggcgtgcacacctttccagccgtgctgcaaagcagcggcctgtactctctgagcagcgtggtcacagtgcctagctctagcctgggcacccagacctacatctgcaatgtgaaccacaagcctagcaacaccaaggtggacaagagagtggaacccaagagctgtatccccgaggacacattcttcccaagccccgagagcagctgcgacgtgaagctggtggaaaagagcttcgagacagacaccaacctgaacttccagaacctgagcgtgatcggcttcagaatcctgctgctgaaagtggccggctttaacctgctgatgaccctgcggctgtggtccagc

SEQ ID NO: 3421 - DNA, 2697 bp, Artificial Sequence
  Synthetic Polynucloetide
atggccttaccagtgaccgccttgctcctgccgctggccttgctgctccacgccgccaggccggaagtgcagctggttgaatctggcggaggactggttcagcctggcggatctctgagactgtcttgtgccgccagcggcttcagcttcagcgacttttggatgagctgggtccgacaggcccctggcaaaggacttgaatgggtcgccacaatcagccaggccggcagcgagaaggactacgtggactctgtgaagggcagattcaccatcagccgggacaacgccaagaagtccctgtacctccagatgaacagcctgagagccgaggacaccgccgtgtactattgtgcctctggcgtgtacagcttcgactacagaggccagggcaccctggtcacagtctcttctggtaccggcggaggcggatctggcggcggaggtagcggtggcggaggatctgaattcgagatccagatgacccagagccccagcagcatgtctgccagcctgggcgacaccatcaccatcacatgccaggccacccaggacatcttcaagaacctgaactggtatcagcagaagcccggcaagccccccagcctgctgatctactatgccaccgaactggccgagggcgtgcccagcagattttctggcagcggcagcggctccgactacagcctgaccatcagcaacctggaaagcgaggacttcgccgcctactactgcctccagttcttcgagttcccattcaccttcggctccggcaccaagctggaaatgaagctcgagggacagcctaaggccaatcctaccgtgacactgttccctccaagcagcgaagaactccaggccaacaaggccacacttgtgtgcctgatctccgacttctaccctggggctgtgacagtggcttggaaggccgatggatctcctgtgaaagccggcgtggaaaccaccaagccatccaagcagagcaacaacaaatacgccgccagctcctacctgagcctgacacctgagcagtggaagtcccacagatcctacagctgccaagtgacccacgaaggcagcaccgtggaaaagacagtggcccctacagagtgcagcggcagagccgattgcggctttaccagcgagagctaccagcagggcgtgctgagcgccaccatcctgtacgagatcctgctgggcaaggccaccctgtacgccgtgctggtgtctgccctggtgctgatggctatggtcaagcggaaggacagccggggacgcgccaagagaagcggatctggcgtgaagcagaccctgaatttcgacctgctgaagctggctggcgacgtggaatccaacccaggccctactagtatggactggatttggcgcatccttttccttgtcggcgctgctaccggcgcgcattccgggccccagctccagctgcaagagtctggacctggcctggtcaagcctagcgagacactgagcctgacctgtaccgtgtccggcgatagcatcagcagcggcgattactactggggctggatcagacagcctcctggcaaaggactggaatggatcggccacatctactacagcggcgtgacctactacaaccccagcctgaagtccagagtgaccatcagcgtggacaccagccggaaccagttctccctgaagctgtctagcgtgacagccgccgataccgccgtgtactactgcaccagagaggacagcagcaactggcggagtagaggccagggaacactggtcacagttagctctggatccggcggaggcggaagtggaggcggaggatctggcggcggaggctctttcgaacaggtgcaactccagcagtctggcgctgagcttgtgcggcctggcacctctgtgaaggtgtcctgtaaagccagcggctacgtgttcaccaactactggatcgagtggatcaagcagcggccaggccagggcctggaatggatcggcgtgatgaatccaggcagcggcgagacaacctacaacgagaagttcaagggcaaggccaccctgaccgccgacaagagcagcagcacagcctacatgcaactgtcctccctgaccagcgtggacagcgccgtgtacttctgcgccagggaccacgaccgggactactacgctatggactactggggccagggcaccagcgtgaccgtgtcatctacgcgtgcctctacaaagggaccctccgtgtttcctctggctcccagcagcaagtctacaagcggaggaacagccgctctgggctgcctggtcaaggattactttcccgagcctgtgaccgtgtcctggaatagcggagcactgacaagcggcgtgcacacctttccagccgtgctgcaaagcagcggcctgtactctctgagcagcgtggtcacagtgcctagctctagcctgggcacccagacctacatctgcaatgtgaaccacaagcctagcaacaccaaggtggacaagagagtggaacccaagagctgtatccccgaggacacattcttcccaagccccgagagcagctgcgacgtgaagctggtggaaaagagcttcgagacagacaccaacctgaacttccagaacctgagcgtgatcggcttcagaatcctgctgctgaaagtggccggctttaacctgctgatgaccctgcggctgtggtccagc

SEQ ID NO: 3422 - DNA, 2688 bp, Artificial Sequence
  Synthetic Polynucloetide
atggccttaccagtgaccgccttgctcctgccgctggccttgctgctccacgccgccaggccggaagtgcagctggttgaatctggcggaggactggttcagcctggcggatctctgagactgtcttgtgccgccagcggcttcagcttcagcgacttttggatgagctgggtccgacaggcccctggcaaaggacttgaatgggtcgccacaatcagccaggccggcagcgagaaggactacgtggactctgtgaagggcagattcaccatcagccgggacaacgccaagaagtccctgtacctccagatgaacagcctgagagccgaggacaccgccgtgtactattgtgcctctggcgtgtacagcttcgactacagaggccagggcaccctggtcacagtctcttctggtaccggcggaggcggatctggcggcggaggtagcggtggcggaggatctgaattcgacatcctgctgacacagagccccgccatcctgtccgtgtctccaggcgagagagtgtcctttagctgccgggccagccagaacatcggcaccagcatccactggtatcagcagcggaccaacggcagccccagactgctgattaagtacgccagcgagtccgtgtccggcatccccagcagattttctggcagcggctccggcaccgacttcaccctgagcatcaacagcgtggaaagcgaggacattgccgactactactgccagcacaccaatagctggcccaccacctttggcggaggcaccaagctggaaatcaagagactcgagggacagcctaaggccaatcctaccgtgacactgttccctccaagcagcgaagaactccaggccaacaaggccacacttgtgtgcctgatctccgacttctaccctggggctgtgacagtggcttggaaggccgatggatctcctgtgaaagccggcgtggaaaccaccaagccatccaagcagagcaacaacaaatacgccgccagctcctacctgagcctgacacctgagcagtggaagtcccacagatcctacagctgccaagtgacccacgaaggcagcaccgtggaaaagacagtggcccctacagagtgcagcggcagagccgattgcggctttaccagcgagagctaccagcagggcgtgctgagcgccaccatcctgtacgagatcctgctgggcaaggccaccctgtacgccgtgctggtgtctgccctggtgctgatggctatggtcaagcggaaggacagccggggacgcgccaagagaagcggatctggcgtgaagcagaccctgaatttcgacctgctgaagctggctggcgacgtggaatccaacccaggccctactagtatggactggatttggcgcatccttttccttgtcggcgctgctaccggcgcgcattccgggccccagctccagctgcaagagtctggacctggcctggtcaagcctagcgagacactgagcctgacctgtaccgtgtccggcgatagcatcagcagcggcgattactactggggctggatcagacagcctcctggcaaaggactggaatggatcggccacatctactacagcggcgtgacctactacaaccccagcctgaagtccagagtgaccatcagcgtggacaccagccggaaccagttctccctgaagctgtctagcgtgacagccgccgataccgccgtgtactactgcaccagagaggacagcagcaactggcggagtagaggccagggaacactggtcacagttagctctggatccggcggaggcggaagtggaggcggaggatctggcggcggaggctctttcgaacaggtgcaactccagcagtccgacgccgagcttgtgaagcctggcgcttccgtgaagattagctgcaaggccagcggctacaccttcaccgaccacgccattcactgggtcaagcagaagcccgagcagggcctggaatggatcggctacttcagccccggcaacggcgacatcaagtacaacgagaagttcaagggcaaggccaccctgaccgccgacaagagcagcagcacagcctacatgcaactgaacagcctgaccagcgaggactccgccgtgtacttctgcaagcggagctacggcaactacgactactggggccagggcaccacactgaccgtgtctagtacgcgtgcctctacaaagggaccctccgtgtttcctctggctcccagcagcaagtctacaagcggaggaacagccgctctgggctgcctggtcaaggattactttcccgagcctgtgaccgtgtcctggaatagcggagcactgacaagcggcgtgcacacctttccagccgtgctgcaaagcagcggcctgtactctctgagcagcgtggtcacagtgcctagctctagcctgggcacccagacctacatctgcaatgtgaaccacaagcctagcaacaccaaggtggacaagagagtggaacccaagagctgtatccccgaggacacattcttcccaagccccgagagcagctgcgacgtgaagctggtggaaaagagcttcgagacagacaccaacctgaacttccagaacctgagcgtgatcggcttcagaatcctgctgctgaaagtggccggctttaacctgctgatgaccctgcggctgtggtccagc

SEQ ID NO: 3423 - DNA, 2703 bp, Artificial Sequence
  Synthetic Polynucloetide
atggccttaccagtgaccgccttgctcctgccgctggccttgctgctccacgccgccaggccggaagtgcagctggttgaatctggcggaggactggttcagcctggcggatctctgagactgtcttgtgccgccagcggcttcagcttcagcgacttttggatgagctgggtccgacaggcccctggcaaaggacttgaatgggtcgccacaatcagccaggccggcagcgagaaggactacgtggactctgtgaagggcagattcaccatcagccgggacaacgccaagaagtccctgtacctccagatgaacagcctgagagccgaggacaccgccgtgtactattgtgcctctggcgtgtacagcttcgactacagaggccagggcaccctggtcacagtctcttctggtaccggcggaggcggatctggcggcggaggtagcggtggcggaggatctgaattcgacatcgtgatgacccagagccccgatagcctggccgtgtctctgggagagagagccaccatcaactgcaagagcagccagagcctgctgaacagcggcgaccagaagaactacctgacctggtatcagcagaagcccggccagccccccaagctgctgatctactgggccagcaccagagaaagcggcgtgcccgatagattcagcggcagcggaagtggcaccgacttcaccctgaccatcagttctcttcaggccgaggacgtggccgtgtactactgccagaacgactacagctaccccctgaccttcggccagggcaccaaggtggaaatcaagctcgagggacagcctaaggccaatcctaccgtgacactgttccctccaagcagcgaagaactccaggccaacaaggccacacttgtgtgcctgatctccgacttctaccctggggctgtgacagtggcttggaaggccgatggatctcctgtgaaagccggcgtggaaaccaccaagccatccaagcagagcaacaacaaatacgccgccagctcctacctgagcctgacacctgagcagtggaagtcccacagatcctacagctgccaagtgacccacgaaggcagcaccgtggaaaagacagtggcccctacagagtgcagcggcagagccgattgcggctttaccagcgagagctaccagcagggcgtgctgagcgccaccatcctgtacgagatcctgctgggcaaggccaccctgtacgccgtgctggtgtctgccctggtgctgatggctatggtcaagcggaaggacagccggggacgcgccaagagaagcggatctggcgtgaagcagaccctgaatttcgacctgctgaagctggctggcgacgtggaatccaacccaggccctactagtatggactggatttggcgcatccttttccttgtcggcgctgctaccggcgcgcattccgggccccagctccagctgcaagagtctggacctggcctggtcaagcctagcgagacactgagcctgacctgtaccgtgtccggcgatagcatcagcagcggcgattactactggggctggatcagacagcctcctggcaaaggactggaatggatcggccacatctactacagcggcgtgacctactacaaccccagcctgaagtccagagtgaccatcagcgtggacaccagccggaaccagttctccctgaagctgtctagcgtgacagccgccgataccgccgtgtactactgcaccagagaggacagcagcaactggcggagtagaggccagggaacactggtcacagttagctctggatccggcggaggcggaagtggaggcggaggatctggcggcggaggctctttcgaacaggtgcagctggtgcagtctggggccgaagtgaagaaaaccggcagcagcgtgaaggtgtcctgcaaggccagcggctacacctttaccgaccacgccattcacgtgtggcggcaggctccaggacaggccctggaatggatgggccacttcagccccggcaacaccgacatcaagtacaacgacaagttcaagggcagagtgaccctgaccgtggaccgcagcatgagcaccgcctacatggaactgagcagcctgcggagcgaggacaccgccatgtactattgcaagaccagcaccttctttttcgactactggggccagggaacaatggtcaccgtgtccagcacgcgtgcctctacaaagggaccctccgtgtttcctctggctcccagcagcaagtctacaagcggaggaacagccgctctgggctgcctggtcaaggattactttcccgagcctgtgaccgtgtcctggaatagcggagcactgacaagcggcgtgcacacctttccagccgtgctgcaaagcagcggcctgtactctctgagcagcgtggtcacagtgcctagctctagcctgggcacccagacctacatctgcaatgtgaaccacaagcctagcaacaccaaggtggacaagagagtggaacccaagagctgtatccccgaggacacattcttcccaagccccgagagcagctgcgacgtgaagctggtggaaaagagcttcgagacagacaccaacctgaacttccagaacctgagcgtgatcggcttcagaatcctgctgctgaaagtggccggctttaacctgctgatgaccctgcggctgtggtccagc

SEQ ID NO: 3424 - DNA, 2700 bp, Artificial Sequence
  Synthetic Polynucloetide
atggccttaccagtgaccgccttgctcctgccgctggccttgctgctccacgccgccaggccggaagtgcagctggttgaatctggcggaggactggttcagcctggcggatctctgagactgtcttgtgccgccagcggcttcagcttcagcgacttttggatgagctgggtccgacaggcccctggcaaaggacttgaatgggtcgccacaatcagccaggccggcagcgagaaggactacgtggactctgtgaagggcagattcaccatcagccgggacaacgccaagaagtccctgtacctccagatgaacagcctgagagccgaggacaccgccgtgtactattgtgcctctggcgtgtacagcttcgactacagaggccagggcaccctggtcacagtctcttctggtaccggcggaggcggatctggcggcggaggtagcggtggcggaggatctgaattcgacatccagatgacccagagccccagcagcctgtctgccagcgtgggcgacagagtgaccatcacatgcaaggccagccaggacgtgtccattgccgtggcctggtatcagcagaagcccggcaaggcccccaaggtgctgatctacagcgccagctacagatacaccggcgtgcccgacagattcagcggctctggcagcggcaccgacttcaccttcaccatcagctccctccagcccgaggatattgccgtgtactactgccagcagcactacatcacccccctgacctttggcggaggcaccaaggtggaaatcaagctcgagggacagcctaaggccaatcctaccgtgacactgttccctccaagcagcgaagaactccaggccaacaaggccacacttgtgtgcctgatctccgacttctaccctggggctgtgacagtggcttggaaggccgatggatctcctgtgaaagccggcgtggaaaccaccaagccatccaagcagagcaacaacaaatacgccgccagctcctacctgagcctgacacctgagcagtggaagtcccacagatcctacagctgccaagtgacccacgaaggcagcaccgtggaaaagacagtggcccctacagagtgcagcggcagagccgattgcggctttaccagcgagagctaccagcagggcgtgctgagcgccaccatcctgtacgagatcctgctgggcaaggccaccctgtacgccgtgctggtgtctgccctggtgctgatggctatggtcaagcggaaggacagccggggacgcgccaagagaagcggatctggcgtgaagcagaccctgaatttcgacctgctgaagctggctggcgacgtggaatccaacccaggccctactagtatggactggatttggcgcatccttttccttgtcggcgctgctaccggcgcgcattccgggccccagctccagctgcaagagtctggacctggcctggtcaagcctagcgagacactgagcctgacctgtaccgtgtccggcgatagcatcagcagcggcgattactactggggctggatcagacagcctcctggcaaaggactggaatggatcggccacatctactacagcggcgtgacctactacaaccccagcctgaagtccagagtgaccatcagcgtggacaccagccggaaccagttctccctgaagctgtctagcgtgacagccgccgataccgccgtgtactactgcaccagagaggacagcagcaactggcggagtagaggccagggaacactggtcacagttagctctggatccggcggaggcggaagtggaggcggaggatctggcggcggaggctctttcgaacagatccaactggtgcagagcggccacgaagtgaagaaacctggggccagcgtgaaggtgtcctgcaaagccagcggctacacctttaccaactacggcatgaactgggtgcgccaggcccctggacagggcctggaatggatgggctggatcaacaccaagaccggcgagcccacctacgccgaagagttcaagggcagattcgtgttcagcctggaaaccagcgcctccaccgcctacctccagatcagctctctgaaggccgaggacaccgccatgtacttttgcggcagaggcggctacggcagcagctactggtacttcgatgtgtggggccagggcaccaccgtgaccgtgtcatctacgcgtgcctctacaaagggaccctccgtgtttcctctggctcccagcagcaagtctacaagcggaggaacagccgctctgggctgcctggtcaaggattactttcccgagcctgtgaccgtgtcctggaatagcggagcactgacaagcggcgtgcacacctttccagccgtgctgcaaagcagcggcctgtactctctgagcagcgtggtcacagtgcctagctctagcctgggcacccagacctacatctgcaatgtgaaccacaagcctagcaacaccaaggtggacaagagagtggaacccaagagctgtatccccgaggacacattcttcccaagccccgagagcagctgcgacgtgaagctggtggaaaagagcttcgagacagacaccaacctgaacttccagaacctgagcgtgatcggcttcagaatcctgctgctgaaagtggccggctttaacctgctgatgaccctgcggctgtggtccagc

SEQ ID NO: 3425 - DNA, 2706 bp, Artificial Sequence
  Synthetic Polynucloetide
atggccttaccagtgaccgccttgctcctgccgctggccttgctgctccacgccgccaggccggaagtgcagctggttgaatctggcggaggactggttcagcctggcggatctctgagactgtcttgtgccgccagcggcttcagcttcagcgacttttggatgagctgggtccgacaggcccctggcaaaggacttgaatgggtcgccacaatcagccaggccggcagcgagaaggactacgtggactctgtgaagggcagattcaccatcagccgggacaacgccaagaagtccctgtacctccagatgaacagcctgagagccgaggacaccgccgtgtactattgtgcctctggcgtgtacagcttcgactacagaggccagggcaccctggtcacagtctcttctggtaccggcggaggcggatctggcggcggaggtagcggtggcggaggatctgaattcgacatcgtgatgacccagagccccgatagcctggccgtgtctctgggagagagagccaccatcaactgccgggccagcaagagcgtgtccaccagcggctacagctacatgcactggtatcagcagaagcccggccagccccccaagctgctgatctacctggcctccaacctggaaagcggcgtgcccgatagattcagcggcagcggctctggcaccgacttcaccctgaccatcagttctcttcaggccgaggacgtggccgtgtactactgccagcacagcagagagctgccctacaccttcggccagggcaccaagctggaaatcaagctcgagggacagcctaaggccaatcctaccgtgacactgttccctccaagcagcgaagaactccaggccaacaaggccacacttgtgtgcctgatctccgacttctaccctggggctgtgacagtggcttggaaggccgatggatctcctgtgaaagccggcgtggaaaccaccaagccatccaagcagagcaacaacaaatacgccgccagctcctacctgagcctgacacctgagcagtggaagtcccacagatcctacagctgccaagtgacccacgaaggcagcaccgtggaaaagacagtggcccctacagagtgcagcggcagagccgattgcggctttaccagcgagagctaccagcagggcgtgctgagcgccaccatcctgtacgagatcctgctgggcaaggccaccctgtacgccgtgctggtgtctgccctggtgctgatggctatggtcaagcggaaggacagccggggacgcgccaagagaagcggatctggcgtgaagcagaccctgaatttcgacctgctgaagctggctggcgacgtggaatccaacccaggccctactagtatggactggatttggcgcatccttttccttgtcggcgctgctaccggcgcgcattccgggccccagctccagctgcaagagtctggacctggcctggtcaagcctagcgagacactgagcctgacctgtaccgtgtccggcgatagcatcagcagcggcgattactactggggctggatcagacagcctcctggcaaaggactggaatggatcggccacatctactacagcggcgtgacctactacaaccccagcctgaagtccagagtgaccatcagcgtggacaccagccggaaccagttctccctgaagctgtctagcgtgacagccgccgataccgccgtgtactactgcaccagagaggacagcagcaactggcggagtagaggccagggaacactggtcacagttagctctggatccggcggaggcggaagtggaggcggaggatctggcggcggaggctctttcgaacaggtgcaactccaggaatctggccctggccttgtgaagcccagcgagacactgagcctgacctgtaccgtgtccggcggcagcatcagctcttacggcgtgcactggattcggcagcctccaggcaagggcctggaatggatcggcgtgatctggacctccggcgtgaccgactacaacagcgccctgatgggcagagtgaccatctccgtggacaccagcaagaaccagttcagcctgaagctgagcagcgtgacagccgccgataccgccgtgtattattgcgccagagatggcgactacgaccgctacacaatggactactggggccagggaacccttgtgaccgtgtcctctacgcgtgcctctacaaagggaccctccgtgtttcctctggctcccagcagcaagtctacaagcggaggaacagccgctctgggctgcctggtcaaggattactttcccgagcctgtgaccgtgtcctggaatagcggagcactgacaagcggcgtgcacacctttccagccgtgctgcaaagcagcggcctgtactctctgagcagcgtggtcacagtgcctagctctagcctgggcacccagacctacatctgcaatgtgaaccacaagcctagcaacaccaaggtggacaagagagtggaacccaagagctgtatccccgaggacacattcttcccaagccccgagagcagctgcgacgtgaagctggtggaaaagagcttcgagacagacaccaacctgaacttccagaacctgagcgtgatcggcttcagaatcctgctgctgaaagtggccggctttaacctgctgatgaccctgcggctgtggtccagc

SEQ ID NO: 3426 - DNA, 2706 bp, Artificial Sequence
  Synthetic Polynucloetide
atggccttaccagtgaccgccttgctcctgccgctggccttgctgctccacgccgccaggccggaagtgcagctggttgaatctggcggaggactggttcagcctggcggatctctgagactgtcttgtgccgccagcggcttcagcttcagcgacttttggatgagctgggtccgacaggcccctggcaaaggacttgaatgggtcgccacaatcagccaggccggcagcgagaaggactacgtggactctgtgaagggcagattcaccatcagccgggacaacgccaagaagtccctgtacctccagatgaacagcctgagagccgaggacaccgccgtgtactattgtgcctctggcgtgtacagcttcgactacagaggccagggcaccctggtcacagtctcttctggtaccggcggaggcggatctggcggcggaggtagcggtggcggaggatctgaattcgacatccagatgacccagagccccagcagcctgtctgccagcgtgggcgacagagtgaccatcacctgtagagccagccagagcatcggcaccagcctgcactggtatcagcagaagcctggcaaggcccccaagctgctgattaagttcgccagcagactgcagagcggcgtgcccagcagattttctggcagcggctccggcaccgacttcaccctgacaatcagctccctgcagcccgaggacttcgccacctactactgccagcagagccccggcttccctccaacctttggacagggcaccaagctggaaatcaagcggctcgagggacagcctaaggccaatcctaccgtgacactgttccctccaagcagcgaagaactccaggccaacaaggccacacttgtgtgcctgatctccgacttctaccctggggctgtgacagtggcttggaaggccgatggatctcctgtgaaagccggcgtggaaaccaccaagccatccaagcagagcaacaacaaatacgccgccagctcctacctgagcctgacacctgagcagtggaagtcccacagatcctacagctgccaagtgacccacgaaggcagcaccgtggaaaagacagtggcccctacagagtgcagcggcagagccgattgcggctttaccagcgagagctaccagcagggcgtgctgagcgccaccatcctgtacgagatcctgctgggcaaggccaccctgtacgccgtgctggtgtctgccctggtgctgatggctatggtcaagcggaaggacagccggggacgcgccaagagaagcggatctggcgtgaagcagaccctgaatttcgacctgctgaagctggctggcgacgtggaatccaacccaggccctactagtatggactggatttggcgcatccttttccttgtcggcgctgctaccggcgcgcattccgggccccagctccagctgcaagagtctggacctggcctggtcaagcctagcgagacactgagcctgacctgtaccgtgtccggcgatagcatcagcagcggcgattactactggggctggatcagacagcctcctggcaaaggactggaatggatcggccacatctactacagcggcgtgacctactacaaccccagcctgaagtccagagtgaccatcagcgtggacaccagccggaaccagttctccctgaagctgtctagcgtgacagccgccgataccgccgtgtactactgcaccagagaggacagcagcaactggcggagtagaggccagggaacactggtcacagttagctctggatccggcggaggcggaagtggaggcggaggatctggcggcggaggctctttcgaacaggtgcaactggtggaatctggcggcggacttgtgaagccaggcggcagcctgagactgagctgtgccgccagcggcttcagcatcaccaccagcggctactactggacctggatcagacagttccccggcaagggcctggaatggatgggctacatcggctacaacagcaagacctactacaaccccgccctgaagtcccggatcaccatcagcagagacaacgccaagaacagcctgtacctgcagatgaactccctgagagccgaggataccgccgtgtactactgcgccagatccctgtacggcggctacaaggacgccttcgatagctggggccagggaacccttgtgaccgtgtctagcacgcgtgcctctacaaagggaccctccgtgtttcctctggctcccagcagcaagtctacaagcggaggaacagccgctctgggctgcctggtcaaggattactttcccgagcctgtgaccgtgtcctggaatagcggagcactgacaagcggcgtgcacacctttccagccgtgctgcaaagcagcggcctgtactctctgagcagcgtggtcacagtgcctagctctagcctgggcacccagacctacatctgcaatgtgaaccacaagcctagcaacaccaaggtggacaagagagtggaacccaagagctgtatccccgaggacacattcttcccaagccccgagagcagctgcgacgtgaagctggtggaaaagagcttcgagacagacaccaacctgaacttccagaacctgagcgtgatcggcttcagaatcctgctgctgaaagtggccggctttaacctgctgatgaccctgcggctgtggtccagc

SEQ ID NO: 3427 - DNA, 2721 bp, Artificial Sequence
  Synthetic Polynucloetide
atggccttaccagtgaccgccttgctcctgccgctggccttgctgctccacgccgccaggccggaagtgcagctggttgaatctggcggaggactggttcagcctggcggatctctgagactgtcttgtgccgccagcggcttcagcttcagcgacttttggatgagctgggtccgacaggcccctggcaaaggacttgaatgggtcgccacaatcagccaggccggcagcgagaaggactacgtggactctgtgaagggcagattcaccatcagccgggacaacgccaagaagtccctgtacctccagatgaacagcctgagagccgaggacaccgccgtgtactattgtgcctctggcgtgtacagcttcgactacagaggccagggcaccctggtcacagtctcttctggtaccggcggaggcggatctggcggcggaggtagcggtggcggaggatctgaattcgacgagatcgtgctgacccagagccctctgagcctgcctgtgacacctggcgagcctgccagcatctcctgtagaagcagccagagcctgctgcacagcatcggctacaactacctggactggtatctccagaagcccggccagagcccccaactgctgatctacctgggcagcaacagagccagcggcgtgcccgatagattttccggcagcggctccggcaccgacttcaccctgaagatcagccgggtggaagccgaggacgtgggcgtgtactactgtatgcaggccctccagacccccctgacctttggcggaggcaccaaggtggaaatcaagcggctcgagggacagcctaaggccaatcctaccgtgacactgttccctccaagcagcgaagaactccaggccaacaaggccacacttgtgtgcctgatctccgacttctaccctggggctgtgacagtggcttggaaggccgatggatctcctgtgaaagccggcgtggaaaccaccaagccatccaagcagagcaacaacaaatacgccgccagctcctacctgagcctgacacctgagcagtggaagtcccacagatcctacagctgccaagtgacccacgaaggcagcaccgtggaaaagacagtggcccctacagagtgcagcggcagagccgattgcggctttaccagcgagagctaccagcagggcgtgctgagcgccaccatcctgtacgagatcctgctgggcaaggccaccctgtacgccgtgctggtgtctgccctggtgctgatggctatggtcaagcggaaggacagccggggacgcgccaagagaagcggatctggcgtgaagcagaccctgaatttcgacctgctgaagctggctggcgacgtggaatccaacccaggccctactagtatggactggatttggcgcatccttttccttgtcggcgctgctaccggcgcgcattccgggccccagctccagctgcaagagtctggacctggcctggtcaagcctagcgagacactgagcctgacctgtaccgtgtccggcgatagcatcagcagcggcgattactactggggctggatcagacagcctcctggcaaaggactggaatggatcggccacatctactacagcggcgtgacctactacaaccccagcctgaagtccagagtgaccatcagcgtggacaccagccggaaccagttctccctgaagctgtctagcgtgacagccgccgataccgccgtgtactactgcaccagagaggacagcagcaactggcggagtagaggccagggaacactggtcacagttagctctggatccggcggaggcggaagtggaggcggaggatctggcggcggaggctctttcgaagaagtgcaactggtggaaagcggaggcggcgtggtgcagcctggaagaagcctgagactgagctgtgccgccagcggcttcaccttccggtcctacggaatgcactgggtgcgccaggcccctggcaaaggactggaatgggtggccgtgatctcctacgacggctccaacaagtactacaccgacagcgtgaacggcagattcaccatcagcagagacaacagcaagaacaccctgtacctccagatgaacagcctgcgggccgaggacaccgccgtgtactattgtgctagaggcggaggctactacgagacaagcggccctgattactggggccagggcacactcgtgaccgtgtctagtacgcgtgcctctacaaagggaccctccgtgtttcctctggctcccagcagcaagtctacaagcggaggaacagccgctctgggctgcctggtcaaggattactttcccgagcctgtgaccgtgtcctggaatagcggagcactgacaagcggcgtgcacacctttccagccgtgctgcaaagcagcggcctgtactctctgagcagcgtggtcacagtgcctagctctagcctgggcacccagacctacatctgcaatgtgaaccacaagcctagcaacaccaaggtggacaagagagtggaacccaagagctgtatccccgaggacacattcttcccaagccccgagagcagctgcgacgtgaagctggtggaaaagagcttcgagacagacaccaacctgaacttccagaacctgagcgtgatcggcttcagaatcctgctgctgaaagtggccggctttaacctgctgatgaccctgcggctgtggtccagc

SEQ ID NO: 3428 - DNA, 2715 bp, Artificial Sequence
  Synthetic Polynucloetide
atggccttaccagtgaccgccttgctcctgccgctggccttgctgctccacgccgccaggccggaagtgcagctggttgaatctggcggaggactggttcagcctggcggatctctgagactgtcttgtgccgccagcggcttcagcttcagcgacttttggatgagctgggtccgacaggcccctggcaaaggacttgaatgggtcgccacaatcagccaggccggcagcgagaaggactacgtggactctgtgaagggcagattcaccatcagccgggacaacgccaagaagtccctgtacctccagatgaacagcctgagagccgaggacaccgccgtgtactattgtgcctctggcgtgtacagcttcgactacagaggccagggcaccctggtcacagtctcttctggtaccggcggaggcggatctggcggcggaggtagcggtggcggaggatctgaattcgacgacgtcgtgatgacccagagccctctgagcctgcctgtgacacctggcgagcctgccagcatctcctgtagaagcagccagagcctgctgcacagcatcggctacaactacctgcactggtttctccagaagcccggccagagcccccaactgctgatctacctgggcagcaacagagccagcggcgtgcccgatagattttccggcagcggctccggcaccgacttcaccctgaagatcagccgggtggaagccgaggacgtgggcgtgtactactgtatgcaggccctccagacccctcccacctttggacagggcaccagactggaaatcaagcggctcgagggacagcctaaggccaatcctaccgtgacactgttccctccaagcagcgaagaactccaggccaacaaggccacacttgtgtgcctgatctccgacttctaccctggggctgtgacagtggcttggaaggccgatggatctcctgtgaaagccggcgtggaaaccaccaagccatccaagcagagcaacaacaaatacgccgccagctcctacctgagcctgacacctgagcagtggaagtcccacagatcctacagctgccaagtgacccacgaaggcagcaccgtggaaaagacagtggcccctacagagtgcagcggcagagccgattgcggctttaccagcgagagctaccagcagggcgtgctgagcgccaccatcctgtacgagatcctgctgggcaaggccaccctgtacgccgtgctggtgtctgccctggtgctgatggctatggtcaagcggaaggacagccggggacgcgccaagagaagcggatctggcgtgaagcagaccctgaatttcgacctgctgaagctggctggcgacgtggaatccaacccaggccctactagtatggactggatttggcgcatccttttccttgtcggcgctgctaccggcgcgcattccgggccccagctccagctgcaagagtctggacctggcctggtcaagcctagcgagacactgagcctgacctgtaccgtgtccggcgatagcatcagcagcggcgattactactggggctggatcagacagcctcctggcaaaggactggaatggatcggccacatctactacagcggcgtgacctactacaaccccagcctgaagtccagagtgaccatcagcgtggacaccagccggaaccagttctccctgaagctgtctagcgtgacagccgccgataccgccgtgtactactgcaccagagaggacagcagcaactggcggagtagaggccagggaacactggtcacagttagctctggatccggcggaggcggaagtggaggcggaggatctggcggcggaggctctttcgaacaactccaactccaggaaagcggccctggcctcgtgaagcctagcggcacactgagcctgacatgtgccgtgtctggcggcagcatcagcagcagcaactggtggtcttgggtgcgccagcctcctggcaagggcctggaatggatcggcgaaatctaccacagcggcagcaccaactacaaccccagcctgaagtccagagtgaccatcagcgtggacaagagcaagaaccagttctccctgaagctgagcagcgtgacagccgccgataccgccgtgtactattgcgtgggcagcccctacggcgactacgtgctggattattggggccagggcaccctcgtgaccgtgtctagtacgcgtgcctctacaaagggaccctccgtgtttcctctggctcccagcagcaagtctacaagcggaggaacagccgctctgggctgcctggtcaaggattactttcccgagcctgtgaccgtgtcctggaatagcggagcactgacaagcggcgtgcacacctttccagccgtgctgcaaagcagcggcctgtactctctgagcagcgtggtcacagtgcctagctctagcctgggcacccagacctacatctgcaatgtgaaccacaagcctagcaacaccaaggtggacaagagagtggaacccaagagctgtatccccgaggacacattcttcccaagccccgagagcagctgcgacgtgaagctggtggaaaagagcttcgagacagacaccaacctgaacttccagaacctgagcgtgatcggcttcagaatcctgctgctgaaagtggccggctttaacctgctgatgaccctgcggctgtggtccagc

SEQ ID NO: 3429 - DNA, 2709 bp, Artificial Sequence
  Synthetic Polynucloetide
atggccttaccagtgaccgccttgctcctgccgctggccttgctgctccacgccgccaggccggaagtgcagctggttgaatctggcggaggactggttcagcctggcggatctctgagactgtcttgtgccgccagcggcttcagcttcagcgacttttggatgagctgggtccgacaggcccctggcaaaggacttgaatgggtcgccacaatcagccaggccggcagcgagaaggactacgtggactctgtgaagggcagattcaccatcagccgggacaacgccaagaagtccctgtacctccagatgaacagcctgagagccgaggacaccgccgtgtactattgtgcctctggcgtgtacagcttcgactacagaggccagggcaccctggtcacagtctcttctggtaccggcggaggcggatctggcggcggaggtagcggtggcggaggatctgaattcgacgagatcgtgctgacacagagccctggcaccctgagcctgtctctgggagagagagccacactgagctgtcgggccagccagtctatcagcagcagcttcctggcctggtatcagcagaagcccggccaggcccctaagctgctgatctacgccgccagcacaagagccaccggcatccccgatagattcagcggctctggcagcggcaccgacttcaccctgaccatcagcagactggaacccgaggacttcgccgtgtactactgccagcagtacggcagaagcctgagcttcggcggaggcaccaaggtggaagtgaagctcgagggacagcctaaggccaatcctaccgtgacactgttccctccaagcagcgaagaactccaggccaacaaggccacacttgtgtgcctgatctccgacttctaccctggggctgtgacagtggcttggaaggccgatggatctcctgtgaaagccggcgtggaaaccaccaagccatccaagcagagcaacaacaaatacgccgccagctcctacctgagcctgacacctgagcagtggaagtcccacagatcctacagctgccaagtgacccacgaaggcagcaccgtggaaaagacagtggcccctacagagtgcagcggcagagccgattgcggctttaccagcgagagctaccagcagggcgtgctgagcgccaccatcctgtacgagatcctgctgggcaaggccaccctgtacgccgtgctggtgtctgccctggtgctgatggctatggtcaagcggaaggacagccggggacgcgccaagagaagcggatctggcgtgaagcagaccctgaatttcgacctgctgaagctggctggcgacgtggaatccaacccaggccctactagtatggactggatttggcgcatccttttccttgtcggcgctgctaccggcgcgcattccgggccccagctccagctgcaagagtctggacctggcctggtcaagcctagcgagacactgagcctgacctgtaccgtgtccggcgatagcatcagcagcggcgattactactggggctggatcagacagcctcctggcaaaggactggaatggatcggccacatctactacagcggcgtgacctactacaaccccagcctgaagtccagagtgaccatcagcgtggacaccagccggaaccagttctccctgaagctgtctagcgtgacagccgccgataccgccgtgtactactgcaccagagaggacagcagcaactggcggagtagaggccagggaacactggtcacagttagctctggatccggcggaggcggaagtggaggcggaggatctggcggcggaggctctttcgaacaggtgcaactccagcagtctggccccggactcgtgaagcctagccagacactgagcctgacctgcgccatcagcggcgatagcgtgtccggcaatagcgccacctggaactggatcagacagagcccatctcggggcctggaatggctgggccggacctactaccgcagcaagtggaaccacgactacgccgagagcgtgaagtcccggatcaccatcaaccccgacaccagcaagaaccagttctccttgcaactgaacagcgtgacccccgaggacacagccgtgtattattgcgccagaggcgacagcagctcttggtacgccttcgactattggggccagggcaccctcgtgaccgtgtctagtacgcgtgcctctacaaagggaccctccgtgtttcctctggctcccagcagcaagtctacaagcggaggaacagccgctctgggctgcctggtcaaggattactttcccgagcctgtgaccgtgtcctggaatagcggagcactgacaagcggcgtgcacacctttccagccgtgctgcaaagcagcggcctgtactctctgagcagcgtggtcacagtgcctagctctagcctgggcacccagacctacatctgcaatgtgaaccacaagcctagcaacaccaaggtggacaagagagtggaacccaagagctgtatccccgaggacacattcttcccaagccccgagagcagctgcgacgtgaagctggtggaaaagagcttcgagacagacaccaacctgaacttccagaacctgagcgtgatcggcttcagaatcctgctgctgaaagtggccggctttaacctgctgatgaccctgcggctgtggtccagc

SEQ ID NO: 3430 - DNA, 2706 bp, Artificial Sequence
  Synthetic Polynucloetide
atggccttaccagtgaccgccttgctcctgccgctggccttgctgctccacgccgccaggccggaagtgcagctggttgaatctggcggaggactggttcagcctggcggatctctgagactgtcttgtgccgccagcggcttcagcttcagcgacttttggatgagctgggtccgacaggcccctggcaaaggacttgaatgggtcgccacaatcagccaggccggcagcgagaaggactacgtggactctgtgaagggcagattcaccatcagccgggacaacgccaagaagtccctgtacctccagatgaacagcctgagagccgaggacaccgccgtgtactattgtgcctctggcgtgtacagcttcgactacagaggccagggcaccctggtcacagtctcttctggtaccggcggaggcggatctggcggcggaggtagcggtggcggaggatctgaattcgaccagagcgtcgtgacacagcctcctagcgtgtcagtggcccctggcaagaccgccagaatcacctgtggccggaacaacatcggcagcaagagcgtgcactggtatcagcagaagcccggccaggctcctgtgctggtggtgtacgacgacagcgacagacccagcggcatccccgagagattcagcggcagcaactccggcaataccgccaccctgaccatcagcagagtggaagccggcgacgaggccgactactactgccaagtgtgggacagcagcagcgatcacgtggtgtttggcggaggcaccaagctgacagtgctgggtctcgagggacagcctaaggccaatcctaccgtgacactgttccctccaagcagcgaagaactccaggccaacaaggccacacttgtgtgcctgatctccgacttctaccctggggctgtgacagtggcttggaaggccgatggatctcctgtgaaagccggcgtggaaaccaccaagccatccaagcagagcaacaacaaatacgccgccagctcctacctgagcctgacacctgagcagtggaagtcccacagatcctacagctgccaagtgacccacgaaggcagcaccgtggaaaagacagtggcccctacagagtgcagcggcagagccgattgcggctttaccagcgagagctaccagcagggcgtgctgagcgccaccatcctgtacgagatcctgctgggcaaggccaccctgtacgccgtgctggtgtctgccctggtgctgatggctatggtcaagcggaaggacagccggggacgcgccaagagaagcggatctggcgtgaagcagaccctgaatttcgacctgctgaagctggctggcgacgtggaatccaacccaggccctactagtatggactggatttggcgcatccttttccttgtcggcgctgctaccggcgcgcattccgggccccagctccagctgcaagagtctggacctggcctggtcaagcctagcgagacactgagcctgacctgtaccgtgtccggcgatagcatcagcagcggcgattactactggggctggatcagacagcctcctggcaaaggactggaatggatcggccacatctactacagcggcgtgacctactacaaccccagcctgaagtccagagtgaccatcagcgtggacaccagccggaaccagttctccctgaagctgtctagcgtgacagccgccgataccgccgtgtactactgcaccagagaggacagcagcaactggcggagtagaggccagggaacactggtcacagttagctctggatccggcggaggcggaagtggaggcggaggatctggcggcggaggctctttcgaagtgcaactggtgcagtctggcggaggggtcatgcggcctggcggatctctgagactgtcttgtgccgccagcggcttcaccttcgacgactacggcatgagctgggtgcgccaggcccctggaaaaggcctggaatgggtgtccggcatcaactggaatggcggcagcaccggctacgccgattctgtgcggggcagattcaccatcagccgggacaacgccaagaacagcctgtacctgcagatgaactccctgcgggccgaggacaccgccctgtactattgcgccagagagcggggctacggctaccacgaccctcacgattattggggccagggcacccttgttaccgtgtcctctacgcgtgcctctacaaagggaccctccgtgtttcctctggctcccagcagcaagtctacaagcggaggaacagccgctctgggctgcctggtcaaggattactttcccgagcctgtgaccgtgtcctggaatagcggagcactgacaagcggcgtgcacacctttccagccgtgctgcaaagcagcggcctgtactctctgagcagcgtggtcacagtgcctagctctagcctgggcacccagacctacatctgcaatgtgaaccacaagcctagcaacaccaaggtggacaagagagtggaacccaagagctgtatccccgaggacacattcttcccaagccccgagagcagctgcgacgtgaagctggtggaaaagagcttcgagacagacaccaacctgaacttccagaacctgagcgtgatcggcttcagaatcctgctgctgaaagtggccggctttaacctgctgatgaccctgcggctgtggtccagc

SEQ ID NO: 3431 - DNA, 2745 bp, Artificial Sequence
  Synthetic Polynucloetide
atggccttaccagtgaccgccttgctcctgccgctggccttgctgctccacgccgccaggccggaagtgcagctggttgaatctggcggaggactggttcagcctggcggatctctgagactgtcttgtgccgccagcggcttcagcttcagcgacttttggatgagctgggtccgacaggcccctggcaaaggacttgaatgggtcgccacaatcagccaggccggcagcgagaaggactacgtggactctgtgaagggcagattcaccatcagccgggacaacgccaagaagtccctgtacctccagatgaacagcctgagagccgaggacaccgccgtgtactattgtgcctctggcgtgtacagcttcgactacagaggccagggcaccctggtcacagtctcttctggtaccggcggaggcggatctggcggcggaggtagcggtggcggaggatctgaattcgaacagaaactcatcagtgaagaagacctggaattccaggctgtcgtgacacagcctcctagcgcctctggcacaccaggccagagagtgaccatctcctgtagcggcagcagcagcaacatcggcagcaacaccgtgaactggtatcagcaggtgcccggcaccgctcccaagctgctgatctacagcaacaaccagcggcccagcggcgtgcccgatagattttctggcagcaagagcggcaccagcgccagcctggctatctctggactccagtccgaggacgaggccgactactattgcgccgcctgggacgatagcctgaacggctgggtgttcggcggaggcaccaagctgacagtgctgctcgagggacagcctaaggccaatcctaccgtgacactgttccctccaagcagcgaagaactccaggccaacaaggccacacttgtgtgcctgatctccgacttctaccctggggctgtgacagtggcttggaaggccgatggatctcctgtgaaagccggcgtggaaaccaccaagccatccaagcagagcaacaacaaatacgccgccagctcctacctgagcctgacacctgagcagtggaagtcccacagatcctacagctgccaagtgacccacgaaggcagcaccgtggaaaagacagtggcccctacagagtgcagcggcagagccgattgcggctttaccagcgagagctaccagcagggcgtgctgagcgccaccatcctgtacgagatcctgctgggcaaggccaccctgtacgccgtgctggtgtctgccctggtgctgatggctatggtcaagcggaaggacagccggggacgcgccaagagaagcggatctggcgtgaagcagaccctgaatttcgacctgctgaagctggctggcgacgtggaatccaacccaggccctactagtatggactggatttggcgcatccttttccttgtcggcgctgctaccggcgcgcattccgggccccagctccagctgcaagagtctggacctggcctggtcaagcctagcgagacactgagcctgacctgtaccgtgtccggcgatagcatcagcagcggcgattactactggggctggatcagacagcctcctggcaaaggactggaatggatcggccacatctactacagcggcgtgacctactacaaccccagcctgaagtccagagtgaccatcagcgtggacaccagccggaaccagttctccctgaagctgtctagcgtgacagccgccgataccgccgtgtactactgcaccagagaggacagcagcaactggcggagtagaggccagggaacactggtcacagttagctctggatccggcggaggcggaagtggaggcggaggatctggcggcggaggctctttcgaacagatgcaactggtgcagagcggagccgaagtgaaagagcctggcgagagcctgcggatctcctgcaagggcagcggctacagcttcaccaatttctggatctcttgggtgcgccagatgcccggcaagggcctggaatggatgggcagagtggaccccggctactcctacagcacctacagccctagcttccagggccacgtgaccatcagcgccgacaagagcaccagcaccgcctacctccagtggaacagcctgaaggccagcgacaccgccatgtactactgcgccagagtgcagtacagcggctattacgattggttcgacccctggggccagggcacactcgtgacagtgtcaagcacgcgtgcctctacaaagggaccctccgtgtttcctctggctcccagcagcaagtctacaagcggaggaacagccgctctgggctgcctggtcaaggattactttcccgagcctgtgaccgtgtcctggaatagcggagcactgacaagcggcgtgcacacctttccagccgtgctgcaaagcagcggcctgtactctctgagcagcgtggtcacagtgcctagctctagcctgggcacccagacctacatctgcaatgtgaaccacaagcctagcaacaccaaggtggacaagagagtggaacccaagagctgtatccccgaggacacattcttcccaagccccgagagcagctgcgacgtgaagctggtggaaaagagcttcgagacagacaccaacctgaacttccagaacctgagcgtgatcggcttcagaatcctgctgctgaaagtggccggctttaacctgctgatgaccctgcggctgtggtccagc

SEQ ID NO: 3432 - DNA, 2727 bp, Artificial Sequence
  Synthetic Polynucloetide
atggccttaccagtgaccgccttgctcctgccgctggccttgctgctccacgccgccaggccggaagtgcagctggttgaatctggcggaggactggttcagcctggcggatctctgagactgtcttgtgccgccagcggcttcagcttcagcgacttttggatgagctgggtccgacaggcccctggcaaaggacttgaatgggtcgccacaatcagccaggccggcagcgagaaggactacgtggactctgtgaagggcagattcaccatcagccgggacaacgccaagaagtccctgtacctccagatgaacagcctgagagccgaggacaccgccgtgtactattgtgcctctggcgtgtacagcttcgactacagaggccagggcaccctggtcacagtctcttctggtaccggcggaggcggatctggcggcggaggtagcggtggcggaggatctgaattcgaacagaaactcatcagtgaagaagacctggaattcgacatccagatgacccagagccccagcacactgagcgccagcgtgggcgacagagtgaccatcacctgtcgggccagccagaacatcaacaagtggctggcctggtatcagcagaggcccggaaaagccccccagctgctgatctacaaggccagcagcctggaaagcggcgtgcccagcagattttctggcagcggctctggcaccgagtacaccctgaccatcagctccctccagcccgacgacttcgccacctactactgccagcagtacaacagctacgccaccttcggccagggcaccaaggtggaaatcaagagactcgagggacagcctaaggccaatcctaccgtgacactgttccctccaagcagcgaagaactccaggccaacaaggccacacttgtgtgcctgatctccgacttctaccctggggctgtgacagtggcttggaaggccgatggatctcctgtgaaagccggcgtggaaaccaccaagccatccaagcagagcaacaacaaatacgccgccagctcctacctgagcctgacacctgagcagtggaagtcccacagatcctacagctgccaagtgacccacgaaggcagcaccgtggaaaagacagtggcccctacagagtgcagcggcagagccgattgcggctttaccagcgagagctaccagcagggcgtgctgagcgccaccatcctgtacgagatcctgctgggcaaggccaccctgtacgccgtgctggtgtctgccctggtgctgatggctatggtcaagcggaaggacagccggggacgcgccaagagaagcggatctggcgtgaagcagaccctgaatttcgacctgctgaagctggctggcgacgtggaatccaacccaggccctactagtatggactggatttggcgcatccttttccttgtcggcgctgctaccggcgcgcattccgggccccagctccagctgcaagagtctggacctggcctggtcaagcctagcgagacactgagcctgacctgtaccgtgtccggcgatagcatcagcagcggcgattactactggggctggatcagacagcctcctggcaaaggactggaatggatcggccacatctactacagcggcgtgacctactacaaccccagcctgaagtccagagtgaccatcagcgtggacaccagccggaaccagttctccctgaagctgtctagcgtgacagccgccgataccgccgtgtactactgcaccagagaggacagcagcaactggcggagtagaggccagggaacactggtcacagttagctctggatccggcggaggcggaagtggaggcggaggatctggcggcggaggctctttcgaacaggtgcagctggtgcagtctggggccgaagtgaagaagcctggcgagagcctgaagatcagctgcaagggctccggctacaacttctctaacaagtggatcggctgggtgcgccagctgcctggcagaggactggaatggatcgccatcatctaccccggctacagcgacatcacctacagccccagcttccagggccgcgtgacaatcagcgccgacaccagcatcaacaccgcctacctgcactggcacagcctgaaggccagcgacaccgccatgtactactgcgtgcggcatacagccctggctggcttcgattattggggcctgggcaccctcgtgaccgtgtctagtacgcgtgcctctacaaagggaccctccgtgtttcctctggctcccagcagcaagtctacaagcggaggaacagccgctctgggctgcctggtcaaggattactttcccgagcctgtgaccgtgtcctggaatagcggagcactgacaagcggcgtgcacacctttccagccgtgctgcaaagcagcggcctgtactctctgagcagcgtggtcacagtgcctagctctagcctgggcacccagacctacatctgcaatgtgaaccacaagcctagcaacaccaaggtggacaagagagtggaacccaagagctgtatccccgaggacacattcttcccaagccccgagagcagctgcgacgtgaagctggtggaaaagagcttcgagacagacaccaacctgaacttccagaacctgagcgtgatcggcttcagaatcctgctgctgaaagtggccggctttaacctgctgatgaccctgcggctgtggtccagc

SEQ ID NO: 3433 - DNA, 2703 bp, Artificial Sequence
  Synthetic Polynucloetide
atggccttaccagtgaccgccttgctcctgccgctggccttgctgctccacgccgccaggccggaagtgcagctggttgaatctggcggaggactggttcagcctggcggatctctgagactgtcttgtgccgccagcggcttcagcttcagcgacttttggatgagctgggtccgacaggcccctggcaaaggacttgaatgggtcgccacaatcagccaggccggcagcgagaaggactacgtggactctgtgaagggcagattcaccatcagccgggacaacgccaagaagtccctgtacctccagatgaacagcctgagagccgaggacaccgccgtgtactattgtgcctctggcgtgtacagcttcgactacagaggccagggcaccctggtcacagtctcttctggtaccggcggaggcggatctggcggcggaggtagcggtggcggaggatctgaattcgacatcgtgctgacacagagccctgcttctctggccgtgtctctgggacagagagccaccatcagctgtagagccagcgagagcgtggacaactacggcaacaccttcatgcactggtatcagcagaagcccggccagcctcctaagctgctgatctacagagccagcaacctggaaagcggcatccccgccagattttctggcagcggcagcagaaccgacttcaccctgaccatcaatcccgtggaagccgacgacgtggcaacctactactgccagcagagcaacgaggaccctcctacatttggagccggcaccaagctggaactgaaactcgagggacagcctaaggccaatcctaccgtgacactgttccctccaagcagcgaagaactccaggccaacaaggccacacttgtgtgcctgatctccgacttctaccctggggctgtgacagtggcttggaaggccgatggatctcctgtgaaagccggcgtggaaaccaccaagccatccaagcagagcaacaacaaatacgccgccagctcctacctgagcctgacacctgagcagtggaagtcccacagatcctacagctgccaagtgacccacgaaggcagcaccgtggaaaagacagtggcccctacagagtgcagcggcagagccgattgcggctttaccagcgagagctaccagcagggcgtgctgagcgccaccatcctgtacgagatcctgctgggcaaggccaccctgtacgccgtgctggtgtctgccctggtgctgatggctatggtcaagcggaaggacagccggggacgcgccaagagaagcggatctggcgtgaagcagaccctgaatttcgacctgctgaagctggctggcgacgtggaatccaacccaggccctactagtatggactggatttggcgcatccttttccttgtcggcgctgctaccggcgcgcattccgggccccagctccagctgcaagagtctggacctggcctggtcaagcctagcgagacactgagcctgacctgtaccgtgtccggcgatagcatcagcagcggcgattactactggggctggatcagacagcctcctggcaaaggactggaatggatcggccacatctactacagcggcgtgacctactacaaccccagcctgaagtccagagtgaccatcagcgtggacaccagccggaaccagttctccctgaagctgtctagcgtgacagccgccgataccgccgtgtactactgcaccagagaggacagcagcaactggcggagtagaggccagggaacactggtcacagttagctctggatccggcggaggcggaagtggaggcggaggatctggcggcggaggctctttcgaacagattcagctggtgcagtctggccccgagctgaagaaacctggcgagacagtgaagatcagctgcaaggccagcggctacatcttcaccaattacggcatgaactgggtcaagcaggcccctggcaagagcttcaagtggatgggctggatcaacacctacaccggcgagagcacatacagcgccgacttcaagggcagattcgccttcagcctggaaaccagcgccagcacagcctacctgcacatcaacgacctgaagaacgaggacaccgccacctacttttgcgccagaagcggcggctacgaccctatggattattggggccagggcaccagcgtgaccgtttcttctacgcgtgcctctacaaagggaccctccgtgtttcctctggctcccagcagcaagtctacaagcggaggaacagccgctctgggctgcctggtcaaggattactttcccgagcctgtgaccgtgtcctggaatagcggagcactgacaagcggcgtgcacacctttccagccgtgctgcaaagcagcggcctgtactctctgagcagcgtggtcacagtgcctagctctagcctgggcacccagacctacatctgcaatgtgaaccacaagcctagcaacaccaaggtggacaagagagtggaacccaagagctgtatccccgaggacacattcttcccaagccccgagagcagctgcgacgtgaagctggtggaaaagagcttcgagacagacaccaacctgaacttccagaacctgagcgtgatcggcttcagaatcctgctgctgaaagtggccggctttaacctgctgatgaccctgcggctgtggtccagc

SEQ ID NO: 3434 - DNA, 2700 bp, Artificial Sequence
  Synthetic Polynucloetide
atggccttaccagtgaccgccttgctcctgccgctggccttgctgctccacgccgccaggccggaagtgcagctggttgaatctggcggaggactggttcagcctggcggatctctgagactgtcttgtgccgccagcggcttcagcttcagcgacttttggatgagctgggtccgacaggcccctggcaaaggacttgaatgggtcgccacaatcagccaggccggcagcgagaaggactacgtggactctgtgaagggcagattcaccatcagccgggacaacgccaagaagtccctgtacctccagatgaacagcctgagagccgaggacaccgccgtgtactattgtgcctctggcgtgtacagcttcgactacagaggccagggcaccctggtcacagtctcttctggtaccggcggaggcggatctggcggcggaggtagcggtggcggaggatctgaattcgacgagatcgtgctgacacagagccctggcaccctgagcctgtctccaggcgaaagagccacactgagctgtcgggccagccagagcgtgtccaatacctacctggcctggtatcaccagaggcccggacaggctccccggctgctgatctatggcgcttctagcagagccaccggcatccccgatagattcagcggctctggcagcggcaccgacttcgccctgacaatcagctccctggaacccgaggacttcgccgtgtactactgccagcagtacagcaactcctggaccttcggccagggcaccaaggtggaaatcaagagactcgagggacagcctaaggccaatcctaccgtgacactgttccctccaagcagcgaagaactccaggccaacaaggccacacttgtgtgcctgatctccgacttctaccctggggctgtgacagtggcttggaaggccgatggatctcctgtgaaagccggcgtggaaaccaccaagccatccaagcagagcaacaacaaatacgccgccagctcctacctgagcctgacacctgagcagtggaagtcccacagatcctacagctgccaagtgacccacgaaggcagcaccgtggaaaagacagtggcccctacagagtgcagcggcagagccgattgcggctttaccagcgagagctaccagcagggcgtgctgagcgccaccatcctgtacgagatcctgctgggcaaggccaccctgtacgccgtgctggtgtctgccctggtgctgatggctatggtcaagcggaaggacagccggggacgcgccaagagaagcggatctggcgtgaagcagaccctgaatttcgacctgctgaagctggctggcgacgtggaatccaacccaggccctactagtatggactggatttggcgcatccttttccttgtcggcgctgctaccggcgcgcattccgggccccagctccagctgcaagagtctggacctggcctggtcaagcctagcgagacactgagcctgacctgtaccgtgtccggcgatagcatcagcagcggcgattactactggggctggatcagacagcctcctggcaaaggactggaatggatcggccacatctactacagcggcgtgacctactacaaccccagcctgaagtccagagtgaccatcagcgtggacaccagccggaaccagttctccctgaagctgtctagcgtgacagccgccgataccgccgtgtactactgcaccagagaggacagcagcaactggcggagtagaggccagggaacactggtcacagttagctctggatccggcggaggcggaagtggaggcggaggatctggcggcggaggctctttcgaacaggtgcaactggtggaatctggcgggggagtggtgcagcctggcagaagcctgagactgtcttgtgccgccagcggcttcaccttcagcagctacgacatgcactgggtgcgccaggcccctggcaaaggactggaatgggtggccgtgatctcctacgacggcaccaacgagtattacgccgacagcgtgaagggccggttcaccatctccagagacaccagcaagaacaccctgtacctccagatgaacagcctgcgggccgaggacacagccgtgtattattgcgccagagagcggtacttcgactggtccttcgactactggggccagggaaccctggtgtccgtgtctagtacgcgtgcctctacaaagggaccctccgtgtttcctctggctcccagcagcaagtctacaagcggaggaacagccgctctgggctgcctggtcaaggattactttcccgagcctgtgaccgtgtcctggaatagcggagcactgacaagcggcgtgcacacctttccagccgtgctgcaaagcagcggcctgtactctctgagcagcgtggtcacagtgcctagctctagcctgggcacccagacctacatctgcaatgtgaaccacaagcctagcaacaccaaggtggacaagagagtggaacccaagagctgtatccccgaggacacattcttcccaagccccgagagcagctgcgacgtgaagctggtggaaaagagcttcgagacagacaccaacctgaacttccagaacctgagcgtgatcggcttcagaatcctgctgctgaaagtggccggctttaacctgctgatgaccctgcggctgtggtccagc

SEQ ID NO: 3435 - DNA, 2697 bp, Artificial Sequence
  Synthetic Polynucloetide
atggccttaccagtgaccgccttgctcctgccgctggccttgctgctccacgccgccaggccggaagtgcagctggttgaatctggcggaggactggttcagcctggcggatctctgagactgtcttgtgccgccagcggcttcagcttcagcgacttttggatgagctgggtccgacaggcccctggcaaaggacttgaatgggtcgccacaatcagccaggccggcagcgagaaggactacgtggactctgtgaagggcagattcaccatcagccgggacaacgccaagaagtccctgtacctccagatgaacagcctgagagccgaggacaccgccgtgtactattgtgcctctggcgtgtacagcttcgactacagaggccagggcaccctggtcacagtctcttctggtaccggcggaggcggatctggcggcggaggtagcggtggcggaggatctgaattcgacgagctgacacaggaccctgctgtgtctgttgccctgggccagacagtgcggattacctgtcaaggcgacagcctgagaagcaactacgccaactggtatcagcagaagcccggacaggctcccgtgctggttatctacggccagaacaacagacccagcggcatccccgatagattcagcggctctagctctggcaataccgccagcctgacaatcactggcgctcaggctgccgatgaggccgactactactgcgatagcagagtgtccaccggcaatcacgtggtgtttggcggcggaacaaagctgacagtgctcggacaactcgagggacagcctaaggccaatcctaccgtgacactgttccctccaagcagcgaagaactccaggccaacaaggccacacttgtgtgcctgatctccgacttctaccctggggctgtgacagtggcttggaaggccgatggatctcctgtgaaagccggcgtggaaaccaccaagccatccaagcagagcaacaacaaatacgccgccagctcctacctgagcctgacacctgagcagtggaagtcccacagatcctacagctgccaagtgacccacgaaggcagcaccgtggaaaagacagtggcccctacagagtgcagcggcagagccgattgcggctttaccagcgagagctaccagcagggcgtgctgagcgccaccatcctgtacgagatcctgctgggcaaggccaccctgtacgccgtgctggtgtctgccctggtgctgatggctatggtcaagcggaaggacagccggggacgcgccaagagaagcggatctggcgtgaagcagaccctgaatttcgacctgctgaagctggctggcgacgtggaatccaacccaggccctactagtatggactggatttggcgcatccttttccttgtcggcgctgctaccggcgcgcattccgggccccagctccagctgcaagagtctggacctggcctggtcaagcctagcgagacactgagcctgacctgtaccgtgtccggcgatagcatcagcagcggcgattactactggggctggatcagacagcctcctggcaaaggactggaatggatcggccacatctactacagcggcgtgacctactacaaccccagcctgaagtccagagtgaccatcagcgtggacaccagccggaaccagttctccctgaagctgtctagcgtgacagccgccgataccgccgtgtactactgcaccagagaggacagcagcaactggcggagtagaggccagggaacactggtcacagttagctctggatccggcggaggcggaagtggaggcggaggatctggcggcggaggctctttcgaagaagttcagctggtgcagagcggagccgaagtgaagaaacctggggcctctgtgaaggtgtcctgcaaggcttccggctacacctttaccagctacgccatgcactgggtccgacaggcacctggacaacggcttgaatggatgggctggatcaacgccggcaacggcaacaccaagtacagccagaaattccagggccgcgtgaccatcaccagagatacaagcgccagcaccgcctacatggaactgtctagcctgagatccgaggacaccgccgtgtactactgtgccagagacatcagctacggcagcttcgactattggggccagggcacactggtcaccgttagctctacgcgtgcctctacaaagggaccctccgtgtttcctctggctcccagcagcaagtctacaagcggaggaacagccgctctgggctgcctggtcaaggattactttcccgagcctgtgaccgtgtcctggaatagcggagcactgacaagcggcgtgcacacctttccagccgtgctgcaaagcagcggcctgtactctctgagcagcgtggtcacagtgcctagctctagcctgggcacccagacctacatctgcaatgtgaaccacaagcctagcaacaccaaggtggacaagagagtggaacccaagagctgtatccccgaggacacattcttcccaagccccgagagcagctgcgacgtgaagctggtggaaaagagcttcgagacagacaccaacctgaacttccagaacctgagcgtgatcggcttcagaatcctgctgctgaaagtggccggctttaacctgctgatgaccctgcggctgtggtccagc

SEQ ID NO: 3436 - DNA, 2703 bp, Artificial Sequence
  Synthetic Polynucloetide
atggccttaccagtgaccgccttgctcctgccgctggccttgctgctccacgccgccaggccggaagtgcagctggttgaatctggcggaggactggttcagcctggcggatctctgagactgtcttgtgccgccagcggcttcagcttcagcgacttttggatgagctgggtccgacaggcccctggcaaaggacttgaatgggtcgccacaatcagccaggccggcagcgagaaggactacgtggactctgtgaagggcagattcaccatcagccgggacaacgccaagaagtccctgtacctccagatgaacagcctgagagccgaggacaccgccgtgtactattgtgcctctggcgtgtacagcttcgactacagaggccagggcaccctggtcacagtctcttctggtaccggcggaggcggatctggcggcggaggtagcggtggcggaggatctgaattcgacgacatcgtgctgacacagacaccagccacactgagcgtgacacctggcgattctgtgtccctgagctgtagagccagccagagcatcagcaacaacctgcactggtatcagcagaagtcccacgagagccccagactgctgattaagaacgccagccagtctatcagcggcatccccagcaagtttagcggctctggcagcggcaccgacttcaccctgagaatcaacagcgtggaaaccgaggacttcgggatgtacttctgccagcagagcaatagctggccctacacatttggctccggcaccaagctggaaatcaaactcgagggacagcctaaggccaatcctaccgtgacactgttccctccaagcagcgaagaactccaggccaacaaggccacacttgtgtgcctgatctccgacttctaccctggggctgtgacagtggcttggaaggccgatggatctcctgtgaaagccggcgtggaaaccaccaagccatccaagcagagcaacaacaaatacgccgccagctcctacctgagcctgacacctgagcagtggaagtcccacagatcctacagctgccaagtgacccacgaaggcagcaccgtggaaaagacagtggcccctacagagtgcagcggcagagccgattgcggctttaccagcgagagctaccagcagggcgtgctgagcgccaccatcctgtacgagatcctgctgggcaaggccaccctgtacgccgtgctggtgtctgccctggtgctgatggctatggtcaagcggaaggacagccggggacgcgccaagagaagcggatctggcgtgaagcagaccctgaatttcgacctgctgaagctggctggcgacgtggaatccaacccaggccctactagtatggactggatttggcgcatccttttccttgtcggcgctgctaccggcgcgcattccgggccccagctccagctgcaagagtctggacctggcctggtcaagcctagcgagacactgagcctgacctgtaccgtgtccggcgatagcatcagcagcggcgattactactggggctggatcagacagcctcctggcaaaggactggaatggatcggccacatctactacagcggcgtgacctactacaaccccagcctgaagtccagagtgaccatcagcgtggacaccagccggaaccagttctccctgaagctgtctagcgtgacagccgccgataccgccgtgtactactgcaccagagaggacagcagcaactggcggagtagaggccagggaacactggtcacagttagctctggatccggcggaggcggaagtggaggcggaggatctggcggcggaggctctttcgaacaagtgaagctgcaacagagcggacccgagctggttaagccaggcgcttccgtgaagattagctgcaaggccagcggctacagcttcaccggctactacatgcactgggtcaagcagagccacggcaacatcctggactggatcggctacatctacccctacaacggcgtgtccagctacaaccagaagttcaagggcaaagccactctgaccgtggacaagagcagcagcaccgcctacatggaactgagaagcctgaccagcgaggacagcgccgtgtactattgtgccagagagcggggcctgtaccagctcagagcaatggattattggggccagggcaccagcgtgaccgtttcttctacgcgtgcctctacaaagggaccctccgtgtttcctctggctcccagcagcaagtctacaagcggaggaacagccgctctgggctgcctggtcaaggattactttcccgagcctgtgaccgtgtcctggaatagcggagcactgacaagcggcgtgcacacctttccagccgtgctgcaaagcagcggcctgtactctctgagcagcgtggtcacagtgcctagctctagcctgggcacccagacctacatctgcaatgtgaaccacaagcctagcaacaccaaggtggacaagagagtggaacccaagagctgtatccccgaggacacattcttcccaagccccgagagcagctgcgacgtgaagctggtggaaaagagcttcgagacagacaccaacctgaacttccagaacctgagcgtgatcggcttcagaatcctgctgctgaaagtggccggctttaacctgctgatgaccctgcggctgtggtccagc

SEQ ID NO: 3437 - DNA, 2676 bp, Artificial Sequence
  Synthetic Polynucloetide
atggccttaccagtgaccgccttgctcctgccgctggccttgctgctccacgccgccaggccggaagtgcagctggttgaatctggcggaggactggttcagcctggcggatctctgagactgtcttgtgccgccagcggcttcagcttcagcgacttttggatgagctgggtccgacaggcccctggcaaaggacttgaatgggtcgccacaatcagccaggccggcagcgagaaggactacgtggactctgtgaagggcagattcaccatcagccgggacaacgccaagaagtccctgtacctccagatgaacagcctgagagccgaggacaccgccgtgtactattgtgcctctggcgtgtacagcttcgactacagaggccagggcaccctggtcacagtctcttctggtaccggcggaggcggatctggcggcggaggtagcggtggcggaggatctgaattcgacgacatcgtgatgacacagacccctgccatcatgagcgcctctccaggccagaaagtgaccatcacatgtagcgccagcagcagcgtgaactacatgcactggtatcagcagaagctgggcagcagccccaagctgtggatctacgataccagcaaactggcccctggcgtgccagccagattttctggttctggcagcggcaccagctacagcctgacaatcagcagcatggaagccgaggatgccgccagctacttctgccatcagtggtctagctacccctacacctttggctccggcaccaagctggaaatcaaactcgagggacagcctaaggccaatcctaccgtgacactgttccctccaagcagcgaagaactccaggccaacaaggccacacttgtgtgcctgatctccgacttctaccctggggctgtgacagtggcttggaaggccgatggatctcctgtgaaagccggcgtggaaaccaccaagccatccaagcagagcaacaacaaatacgccgccagctcctacctgagcctgacacctgagcagtggaagtcccacagatcctacagctgccaagtgacccacgaaggcagcaccgtggaaaagacagtggcccctacagagtgcagcggcagagccgattgcggctttaccagcgagagctaccagcagggcgtgctgagcgccaccatcctgtacgagatcctgctgggcaaggccaccctgtacgccgtgctggtgtctgccctggtgctgatggctatggtcaagcggaaggacagccggggacgcgccaagagaagcggatctggcgtgaagcagaccctgaatttcgacctgctgaagctggctggcgacgtggaatccaacccaggccctactagtatggactggatttggcgcatccttttccttgtcggcgctgctaccggcgcgcattccgggccccagctccagctgcaagagtctggacctggcctggtcaagcctagcgagacactgagcctgacctgtaccgtgtccggcgatagcatcagcagcggcgattactactggggctggatcagacagcctcctggcaaaggactggaatggatcggccacatctactacagcggcgtgacctactacaaccccagcctgaagtccagagtgaccatcagcgtggacaccagccggaaccagttctccctgaagctgtctagcgtgacagccgccgataccgccgtgtactactgcaccagagaggacagcagcaactggcggagtagaggccagggaacactggtcacagttagctctggatccggcggaggcggaagtggaggcggaggatctggcggcggaggctctttcgaagaagttcagctccaagagtctggccccgacctggtcaagcctagccaaagcctgagcctgacctgtaccgtgaccggctacagcatcacaagcggctatggatggcactggatcagacagttccccggcaacaaactggaatggatgggctacatccactacagcggcagcaccacctacaatcccagcctgaagtcccggatcagcatcagcagagacaccagcaagaaccagttcttcctgcaactgaacagcgtgaccaccgaggacaccgccacctactattgtgctcggagcctgagatattggggccagggcacaaccctgaccgtgtcatctacgcgtgcctctacaaagggaccctccgtgtttcctctggctcccagcagcaagtctacaagcggaggaacagccgctctgggctgcctggtcaaggattactttcccgagcctgtgaccgtgtcctggaatagcggagcactgacaagcggcgtgcacacctttccagccgtgctgcaaagcagcggcctgtactctctgagcagcgtggtcacagtgcctagctctagcctgggcacccagacctacatctgcaatgtgaaccacaagcctagcaacaccaaggtggacaagagagtggaacccaagagctgtatccccgaggacacattcttcccaagccccgagagcagctgcgacgtgaagctggtggaaaagagcttcgagacagacaccaacctgaacttccagaacctgagcgtgatcggcttcagaatcctgctgctgaaagtggccggctttaacctgctgatgaccctgcggctgtggtccagc

SEQ ID NO: 3438 - DNA, 2685 bp, Artificial Sequence
  Synthetic Polynucloetide
atggccttaccagtgaccgccttgctcctgccgctggccttgctgctccacgccgccaggccggaagtgcagctggttgaatctggcggaggactggttcagcctggcggatctctgagactgtcttgtgccgccagcggcttcagcttcagcgacttttggatgagctgggtccgacaggcccctggcaaaggacttgaatgggtcgccacaatcagccaggccggcagcgagaaggactacgtggactctgtgaagggcagattcaccatcagccgggacaacgccaagaagtccctgtacctccagatgaacagcctgagagccgaggacaccgccgtgtactattgtgcctctggcgtgtacagcttcgactacagaggccagggcaccctggtcacagtctcttctggtaccggcggaggcggatctggcggcggaggtagcggtggcggaggatctgaattcgacgacatccagatgacacagagccctagcagcctgtctgccagcgtgggagacagagtgaccatcacctgtagcgccaccagcagcatcagctacatgcactggtatcagcagaagcccggcaaggcccctaaaggctggatctacgataccagcaaactggcccacggcgtgcccagcagattttctggttctggcagcggcaccgacttcaccctgacaatatctagcctccagcctgaggacttcgccacctactactgccaccagagaagaagctaccccttcaccttcggccagggcaccaaggtggaaatcaaactcgagggacagcctaaggccaatcctaccgtgacactgttccctccaagcagcgaagaactccaggccaacaaggccacacttgtgtgcctgatctccgacttctaccctggggctgtgacagtggcttggaaggccgatggatctcctgtgaaagccggcgtggaaaccaccaagccatccaagcagagcaacaacaaatacgccgccagctcctacctgagcctgacacctgagcagtggaagtcccacagatcctacagctgccaagtgacccacgaaggcagcaccgtggaaaagacagtggcccctacagagtgcagcggcagagccgattgcggctttaccagcgagagctaccagcagggcgtgctgagcgccaccatcctgtacgagatcctgctgggcaaggccaccctgtacgccgtgctggtgtctgccctggtgctgatggctatggtcaagcggaaggacagccggggacgcgccaagagaagcggatctggcgtgaagcagaccctgaatttcgacctgctgaagctggctggcgacgtggaatccaacccaggccctactagtatggactggatttggcgcatccttttccttgtcggcgctgctaccggcgcgcattccgggccccagctccagctgcaagagtctggacctggcctggtcaagcctagcgagacactgagcctgacctgtaccgtgtccggcgatagcatcagcagcggcgattactactggggctggatcagacagcctcctggcaaaggactggaatggatcggccacatctactacagcggcgtgacctactacaaccccagcctgaagtccagagtgaccatcagcgtggacaccagccggaaccagttctccctgaagctgtctagcgtgacagccgccgataccgccgtgtactactgcaccagagaggacagcagcaactggcggagtagaggccagggaacactggtcacagttagctctggatccggcggaggcggaagtggaggcggaggatctggcggcggaggctctttcgaagaagtgcaactggttcagagcggagccgaagtgaagaaacctggggcctctgtgaaggtgtcctgcaaggcttccggctacacctttaccaatttctggattcactgggtccgacaggctccaggccaaggactggaatggatcggagagatcgaccccagcgacagctacaccaactacaaccagaaattcaaaggccgggtcaccatcaccagagacaccagcacaagcaccgcctacctggaactgagcagcctgagaagcgaggacaccgccgtgtactactgcgccagggaaatcaccaccgtggattattggggccagggaaccctggtcaccgtgtcatctacgcgtgcctctacaaagggaccctccgtgtttcctctggctcccagcagcaagtctacaagcggaggaacagccgctctgggctgcctggtcaaggattactttcccgagcctgtgaccgtgtcctggaatagcggagcactgacaagcggcgtgcacacctttccagccgtgctgcaaagcagcggcctgtactctctgagcagcgtggtcacagtgcctagctctagcctgggcacccagacctacatctgcaatgtgaaccacaagcctagcaacaccaaggtggacaagagagtggaacccaagagctgtatccccgaggacacattcttcccaagccccgagagcagctgcgacgtgaagctggtggaaaagagcttcgagacagacaccaacctgaacttccagaacctgagcgtgatcggcttcagaatcctgctgctgaaagtggccggctttaacctgctgatgaccctgcggctgtggtccagc

SEQ ID NO: 3439 - DNA, 2706 bp, Artificial Sequence
  Synthetic Polynucloetide
atggccttaccagtgaccgccttgctcctgccgctggccttgctgctccacgccgccaggccggaagtgcagctggttgaatctggcggaggactggttcagcctggcggatctctgagactgtcttgtgccgccagcggcttcagcttcagcgacttttggatgagctgggtccgacaggcccctggcaaaggacttgaatgggtcgccacaatcagccaggccggcagcgagaaggactacgtggactctgtgaagggcagattcaccatcagccgggacaacgccaagaagtccctgtacctccagatgaacagcctgagagccgaggacaccgccgtgtactattgtgcctctggcgtgtacagcttcgactacagaggccagggcaccctggtcacagtctcttctggtaccggcggaggcggatctggcggcggaggtagcggtggcggaggatctgaattcgacgacatccagatgacacagagccctagcagcctgtctgccagcgtgggagacagagtgaccatcacatgcaaggccagccagggcttcaacaaatacgtggcctggtatcagcagaagcccggcaaggctcctaagctgctgatctactacaccagcacactccagcctggcgtgcccagcagattttctggctctggcagcggcagagactacaccctgacaatatccagcctccagccagaggacttcgccacctactactgtctccagtacggcaacctgctgtacgcctttggacagggcaccaaggtggaaatcaagagactcgagggacagcctaaggccaatcctaccgtgacactgttccctccaagcagcgaagaactccaggccaacaaggccacacttgtgtgcctgatctccgacttctaccctggggctgtgacagtggcttggaaggccgatggatctcctgtgaaagccggcgtggaaaccaccaagccatccaagcagagcaacaacaaatacgccgccagctcctacctgagcctgacacctgagcagtggaagtcccacagatcctacagctgccaagtgacccacgaaggcagcaccgtggaaaagacagtggcccctacagagtgcagcggcagagccgattgcggctttaccagcgagagctaccagcagggcgtgctgagcgccaccatcctgtacgagatcctgctgggcaaggccaccctgtacgccgtgctggtgtctgccctggtgctgatggctatggtcaagcggaaggacagccggggacgcgccaagagaagcggatctggcgtgaagcagaccctgaatttcgacctgctgaagctggctggcgacgtggaatccaacccaggccctactagtatggactggatttggcgcatccttttccttgtcggcgctgctaccggcgcgcattccgggccccagctccagctgcaagagtctggacctggcctggtcaagcctagcgagacactgagcctgacctgtaccgtgtccggcgatagcatcagcagcggcgattactactggggctggatcagacagcctcctggcaaaggactggaatggatcggccacatctactacagcggcgtgacctactacaaccccagcctgaagtccagagtgaccatcagcgtggacaccagccggaaccagttctccctgaagctgtctagcgtgacagccgccgataccgccgtgtactactgcaccagagaggacagcagcaactggcggagtagaggccagggaacactggtcacagttagctctggatccggcggaggcggaagtggaggcggaggatctggcggcggaggctctttcgaagaagttcagcttgtgcagagcggagccgaagtgaagaaacctggggcctctgtgaaggtgtcctgcaaagccagcggctacacctttaccagctactggatcggctgggtccgacaggctcctggacaaggactggaatggatcggcgacatctatcccggcggaggctacaccaactacaacgagaagttcaagggccgcgtgacaatcaccagagacacctctacaagcaccgcctacctggaactgagcagcctgagaagcgaggacaccgccgtgtactactgcgccagactggatggcagcagctacagaggcgctatggattcttggggccagggcacactggtcaccgtttcttctacgcgtgcctctacaaagggaccctccgtgtttcctctggctcccagcagcaagtctacaagcggaggaacagccgctctgggctgcctggtcaaggattactttcccgagcctgtgaccgtgtcctggaatagcggagcactgacaagcggcgtgcacacctttccagccgtgctgcaaagcagcggcctgtactctctgagcagcgtggtcacagtgcctagctctagcctgggcacccagacctacatctgcaatgtgaaccacaagcctagcaacaccaaggtggacaagagagtggaacccaagagctgtatccccgaggacacattcttcccaagccccgagagcagctgcgacgtgaagctggtggaaaagagcttcgagacagacaccaacctgaacttccagaacctgagcgtgatcggcttcagaatcctgctgctgaaagtggccggctttaacctgctgatgaccctgcggctgtggtccagc

SEQ ID NO: 3440 - DNA, 2694 bp, Artificial Sequence
  Synthetic Polynucloetide
atggccttaccagtgaccgccttgctcctgccgctggccttgctgctccacgccgccaggccggaagtgcagctggttgaatctggcggaggactggttcagcctggcggatctctgagactgtcttgtgccgccagcggcttcagcttcagcgacttttggatgagctgggtccgacaggcccctggcaaaggacttgaatgggtcgccacaatcagccaggccggcagcgagaaggactacgtggactctgtgaagggcagattcaccatcagccgggacaacgccaagaagtccctgtacctccagatgaacagcctgagagccgaggacaccgccgtgtactattgtgcctctggcgtgtacagcttcgactacagaggccagggcaccctggtcacagtctcttctggtaccggcggaggcggatctggcggcggaggtagcggtggcggaggatctgaattcgacgacatccagatgacacagagccctagcagcctgtctgccagcgtgggagacagagtgaccatcacctgtagagccagccaggacatccggtactacctgaactggtatcagcagaagcccggcaaggcccctaagctgctgatctatgtggcctccagcctccagagcggagtgccttctagattttctggcagcggctccggcaccgagtttaccctgacagtgtctagcttgcagcccgaggacttcgccacctactactgcctgcaagtgtacagcacccctcggacctttggacagggcaccaaggtggaaatcaaactcgagggacagcctaaggccaatcctaccgtgacactgttccctccaagcagcgaagaactccaggccaacaaggccacacttgtgtgcctgatctccgacttctaccctggggctgtgacagtggcttggaaggccgatggatctcctgtgaaagccggcgtggaaaccaccaagccatccaagcagagcaacaacaaatacgccgccagctcctacctgagcctgacacctgagcagtggaagtcccacagatcctacagctgccaagtgacccacgaaggcagcaccgtggaaaagacagtggcccctacagagtgcagcggcagagccgattgcggctttaccagcgagagctaccagcagggcgtgctgagcgccaccatcctgtacgagatcctgctgggcaaggccaccctgtacgccgtgctggtgtctgccctggtgctgatggctatggtcaagcggaaggacagccggggacgcgccaagagaagcggatctggcgtgaagcagaccctgaatttcgacctgctgaagctggctggcgacgtggaatccaacccaggccctactagtatggactggatttggcgcatccttttccttgtcggcgctgctaccggcgcgcattccgggccccagctccagctgcaagagtctggacctggcctggtcaagcctagcgagacactgagcctgacctgtaccgtgtccggcgatagcatcagcagcggcgattactactggggctggatcagacagcctcctggcaaaggactggaatggatcggccacatctactacagcggcgtgacctactacaaccccagcctgaagtccagagtgaccatcagcgtggacaccagccggaaccagttctccctgaagctgtctagcgtgacagccgccgataccgccgtgtactactgcaccagagaggacagcagcaactggcggagtagaggccagggaacactggtcacagttagctctggatccggcggaggcggaagtggaggcggaggatctggcggcggaggctctttcgaagaagtgcagcttgttgaatctggcggcggactggctaagcctggcggatctctgagactgtcttgtgccgccagcggcttccggttcaccttcaacaactactacatggactgggtccgacaggcccctggacaaggacttgaatgggtgtccagaatcagcagcagcggcgaccctacttggtacgccgattctgtgaagggcagattcaccatcagcagagagaacgccaagaacaccctgttcctccagatgaactccctgagagccgaggacaccgccgtgtactattgtgcctctctgaccaccggcagcgattcttggggacagggcgtgctggttaccgtgtcatctacgcgtgcctctacaaagggaccctccgtgtttcctctggctcccagcagcaagtctacaagcggaggaacagccgctctgggctgcctggtcaaggattactttcccgagcctgtgaccgtgtcctggaatagcggagcactgacaagcggcgtgcacacctttccagccgtgctgcaaagcagcggcctgtactctctgagcagcgtggtcacagtgcctagctctagcctgggcacccagacctacatctgcaatgtgaaccacaagcctagcaacaccaaggtggacaagagagtggaacccaagagctgtatccccgaggacacattcttcccaagccccgagagcagctgcgacgtgaagctggtggaaaagagcttcgagacagacaccaacctgaacttccagaacctgagcgtgatcggcttcagaatcctgctgctgaaagtggccggctttaacctgctgatgaccctgcggctgtggtccagc

SEQ ID NO: 3441 - DNA, 2694 bp, Artificial Sequence
  Synthetic Polynucloetide
atggccttaccagtgaccgccttgctcctgccgctggccttgctgctccacgccgccaggccggaagtgcagctggttgaatctggcggaggactggttcagcctggcggatctctgagactgtcttgtgccgccagcggcttcagcttcagcgacttttggatgagctgggtccgacaggcccctggcaaaggacttgaatgggtcgccacaatcagccaggccggcagcgagaaggactacgtggactctgtgaagggcagattcaccatcagccgggacaacgccaagaagtccctgtacctccagatgaacagcctgagagccgaggacaccgccgtgtactattgtgcctctggcgtgtacagcttcgactacagaggccagggcaccctggtcacagtctcttctggtaccggcggaggcggatctggcggcggaggtagcggtggcggaggatctgaattcgagatcgtgatgacacagagccccgccacactgagtgtgtctccaggcgaaagagccacactgtcctgtagagccagccagagcgtgtccagaaacctggcctggtatcagcagaagcctggacaggctccccggctgttgatctacggcgcttctacaagagccaccggcattcccgccagattttctggctctggcagcggcaccgagttcaccctgacaatcggaagcctccagagcgaggacttcgccgtgtactactgccagcagtacaagacctggcctcggacctttggacagggcaccaacgtggaaatcaaactcgagggacagcctaaggccaatcctaccgtgacactgttccctccaagcagcgaagaactccaggccaacaaggccacacttgtgtgcctgatctccgacttctaccctggggctgtgacagtggcttggaaggccgatggatctcctgtgaaagccggcgtggaaaccaccaagccatccaagcagagcaacaacaaatacgccgccagctcctacctgagcctgacacctgagcagtggaagtcccacagatcctacagctgccaagtgacccacgaaggcagcaccgtggaaaagacagtggcccctacagagtgcagcggcagagccgattgcggctttaccagcgagagctaccagcagggcgtgctgagcgccaccatcctgtacgagatcctgctgggcaaggccaccctgtacgccgtgctggtgtctgccctggtgctgatggctatggtcaagcggaaggacagccggggacgcgccaagagaagcggatctggcgtgaagcagaccctgaatttcgacctgctgaagctggctggcgacgtggaatccaacccaggccctactagtatggactggatttggcgcatccttttccttgtcggcgctgctaccggcgcgcattccgggccccagctccagctgcaagagtctggacctggcctggtcaagcctagcgagacactgagcctgacctgtaccgtgtccggcgatagcatcagcagcggcgattactactggggctggatcagacagcctcctggcaaaggactggaatggatcggccacatctactacagcggcgtgacctactacaaccccagcctgaagtccagagtgaccatcagcgtggacaccagccggaaccagttctccctgaagctgtctagcgtgacagccgccgataccgccgtgtactactgcaccagagaggacagcagcaactggcggagtagaggccagggaacactggtcacagttagctctggatccggcggaggcggaagtggaggcggaggatctggcggcggaggctctttcgaacaagttcagctgcaacaatggggagccggcctgctgaagcctagcgaaacactgtctctgacctgcgccgtgttcggcggctctttcagcggctactactggtcctggatcagacagcctcctggcaaaggactggaatggatcggcgagatcaaccaccggggcaacaccaacgacaaccccagcctgaaaagcagagtgaccatcagcgtggacaccagcaagaaccagttcgccctgaagctgagcagcgtgacagccgctgataccgccgtgtattattgcgccagagagcggggctacacctacggcaatttcgatcactggggccagggcaccctggtcacagtttcttctacgcgtgcctctacaaagggaccctccgtgtttcctctggctcccagcagcaagtctacaagcggaggaacagccgctctgggctgcctggtcaaggattactttcccgagcctgtgaccgtgtcctggaatagcggagcactgacaagcggcgtgcacacctttccagccgtgctgcaaagcagcggcctgtactctctgagcagcgtggtcacagtgcctagctctagcctgggcacccagacctacatctgcaatgtgaaccacaagcctagcaacaccaaggtggacaagagagtggaacccaagagctgtatccccgaggacacattcttcccaagccccgagagcagctgcgacgtgaagctggtggaaaagagcttcgagacagacaccaacctgaacttccagaacctgagcgtgatcggcttcagaatcctgctgctgaaagtggccggctttaacctgctgatgaccctgcggctgtggtccagc

SEQ ID NO: 3442 - DNA, 2697 bp, Artificial Sequence
  Synthetic Polynucloetide
atggccttaccagtgaccgccttgctcctgccgctggccttgctgctccacgccgccaggccggaagtgcagctggttgaatctggcggaggactggttcagcctggcggatctctgagactgtcttgtgccgccagcggcttcagcttcagcgacttttggatgagctgggtccgacaggcccctggcaaaggacttgaatgggtcgccacaatcagccaggccggcagcgagaaggactacgtggactctgtgaagggcagattcaccatcagccgggacaacgccaagaagtccctgtacctccagatgaacagcctgagagccgaggacaccgccgtgtactattgtgcctctggcgtgtacagcttcgactacagaggccagggcaccctggtcacagtctcttctggtaccggcggaggcggatctggcggcggaggtagcggtggcggaggatctgaattcgagatcgtgatgacccctagcagcgccacactgagtgtgtctccaggcgaaagagccacactgtcctgtagagccagccagagcgtgtccagaaacctggcctggtatcagcagaagcctggacaggctccccggctgttgatctacggcgcttctacaagagccaccggcattcccgccagattttctggctctggcagcggcaccgagttcaccctgacaatctctagcctccagagcgaggacttcgccgtgtactactgccaccagtacagcaactggatgtgcagcttcggccagggcaccaagctggaaatcaaactcgagggacagcctaaggccaatcctaccgtgacactgttccctccaagcagcgaagaactccaggccaacaaggccacacttgtgtgcctgatctccgacttctaccctggggctgtgacagtggcttggaaggccgatggatctcctgtgaaagccggcgtggaaaccaccaagccatccaagcagagcaacaacaaatacgccgccagctcctacctgagcctgacacctgagcagtggaagtcccacagatcctacagctgccaagtgacccacgaaggcagcaccgtggaaaagacagtggcccctacagagtgcagcggcagagccgattgcggctttaccagcgagagctaccagcagggcgtgctgagcgccaccatcctgtacgagatcctgctgggcaaggccaccctgtacgccgtgctggtgtctgccctggtgctgatggctatggtcaagcggaaggacagccggggacgcgccaagagaagcggatctggcgtgaagcagaccctgaatttcgacctgctgaagctggctggcgacgtggaatccaacccaggccctactagtatggactggatttggcgcatccttttccttgtcggcgctgctaccggcgcgcattccgggccccagctccagctgcaagagtctggacctggcctggtcaagcctagcgagacactgagcctgacctgtaccgtgtccggcgatagcatcagcagcggcgattactactggggctggatcagacagcctcctggcaaaggactggaatggatcggccacatctactacagcggcgtgacctactacaaccccagcctgaagtccagagtgaccatcagcgtggacaccagccggaaccagttctccctgaagctgtctagcgtgacagccgccgataccgccgtgtactactgcaccagagaggacagcagcaactggcggagtagaggccagggaacactggtcacagttagctctggatccggcggaggcggaagtggaggcggaggatctggcggcggaggctctttcgaagaagttcagctccttgagtcaggtggcggcctggttcaacctggcggatctctgagactgagctgtgccgccagcggcttcacctttagcagatacgccatgaactgggtccgacaggcccctggcaaaggactggaatgggtgtccggcatctctggaagcggcggcagaacctactacgccgattctgtgaagggcagattcaccatcagccgggacaacagcaagaacaccctgtacctccagatgaacagcctgagagccgaggacacagccgtgtattattgcgccaaggaccgggacttttggagcggcccttttgactattggggccagggaaccctggtcaccgttagctctacgcgtgcctctacaaagggaccctccgtgtttcctctggctcccagcagcaagtctacaagcggaggaacagccgctctgggctgcctggtcaaggattactttcccgagcctgtgaccgtgtcctggaatagcggagcactgacaagcggcgtgcacacctttccagccgtgctgcaaagcagcggcctgtactctctgagcagcgtggtcacagtgcctagctctagcctgggcacccagacctacatctgcaatgtgaaccacaagcctagcaacaccaaggtggacaagagagtggaacccaagagctgtatccccgaggacacattcttcccaagccccgagagcagctgcgacgtgaagctggtggaaaagagcttcgagacagacaccaacctgaacttccagaacctgagcgtgatcggcttcagaatcctgctgctgaaagtggccggctttaacctgctgatgaccctgcggctgtggtccagc

SEQ ID NO: 3443 - DNA, 2712 bp, Artificial Sequence
  Synthetic Polynucloetide
atggccttaccagtgaccgccttgctcctgccgctggccttgctgctccacgccgccaggccggaagtgcagctggttgaatctggcggaggactggttcagcctggcggatctctgagactgtcttgtgccgccagcggcttcagcttcagcgacttttggatgagctgggtccgacaggcccctggcaaaggacttgaatgggtcgccacaatcagccaggccggcagcgagaaggactacgtggactctgtgaagggcagattcaccatcagccgggacaacgccaagaagtccctgtacctccagatgaacagcctgagagccgaggacaccgccgtgtactattgtgcctctggcgtgtacagcttcgactacagaggccagggcaccctggtcacagtctcttctggtaccggcggaggcggatctggcggcggaggtagcggtggcggaggatctgaattcgacatccagatgacccagagccccagcagcctgtctgccagcgtgggcgacagagtgaccatcacatgcaaggccagcaagaacatcagaagctacctggcctggtatcagcagaagcccggcaaggcccccaagctgctgatctacagcggcagcacactgcacagcggcgtgcccagcagattttccggctctggcagcggcaccgacttcaccctgaccatctctagcctccagcccgaggacttcgccacctactactgccagcagcaccacgagtaccccctgacattcggccagggcaccaaggtggaaatcaagagactcgagggacagcctaaggccaatcctaccgtgacactgttccctccaagcagcgaagaactccaggccaacaaggccacacttgtgtgcctgatctccgacttctaccctggggctgtgacagtggcttggaaggccgatggatctcctgtgaaagccggcgtggaaaccaccaagccatccaagcagagcaacaacaaatacgccgccagctcctacctgagcctgacacctgagcagtggaagtcccacagatcctacagctgccaagtgacccacgaaggcagcaccgtggaaaagacagtggcccctacagagtgcagcggcagagccgattgcggctttaccagcgagagctaccagcagggcgtgctgagcgccaccatcctgtacgagatcctgctgggcaaggccaccctgtacgccgtgctggtgtctgccctggtgctgatggctatggtcaagcggaaggacagccggggacgcgccaagagaagcggatctggcgtgaagcagaccctgaatttcgacctgctgaagctggctggcgacgtggaatccaacccaggccctactagtatggactggatttggcgcatccttttccttgtcggcgctgctaccggcgcgcattccgggccccagctccagctgcaagagtctggacctggcctggtcaagcctagcgagacactgagcctgacctgtaccgtgtccggcgatagcatcagcagcggcgattactactggggctggatcagacagcctcctggcaaaggactggaatggatcggccacatctactacagcggcgtgacctactacaaccccagcctgaagtccagagtgaccatcagcgtggacaccagccggaaccagttctccctgaagctgtctagcgtgacagccgccgataccgccgtgtactactgcaccagagaggacagcagcaactggcggagtagaggccagggaacactggtcacagttagctctggatccggcggaggcggaagtggaggcggaggatctggcggcggaggctctttcgaacaggtgcaactccaggaatctggccccggactcgtgaagcccagcgagacactgagcctgacctgtaccgtgtccggctacaccatcaccagcggctacgactggtcctggatcagacagcctcctggcaagggcctggaatggatcggctacatcaactacggcggctccaccaactacaagcccagcctgggaagccgcgtgacaatcagcgtggacacctccaagaaccagttcagcctgaagctgagcagcgtgacagccgccgataccgccgtgtactactgcgcccggtacaacgagtacaagagctacatctacgattggtacttcgacttctggggccagggaaccctcgtgaccgtgtctagtacgcgtgcctctacaaagggaccctccgtgtttcctctggctcccagcagcaagtctacaagcggaggaacagccgctctgggctgcctggtcaaggattactttcccgagcctgtgaccgtgtcctggaatagcggagcactgacaagcggcgtgcacacctttccagccgtgctgcaaagcagcggcctgtactctctgagcagcgtggtcacagtgcctagctctagcctgggcacccagacctacatctgcaatgtgaaccacaagcctagcaacaccaaggtggacaagagagtggaacccaagagctgtatccccgaggacacattcttcccaagccccgagagcagctgcgacgtgaagctggtggaaaagagcttcgagacagacaccaacctgaacttccagaacctgagcgtgatcggcttcagaatcctgctgctgaaagtggccggctttaacctgctgatgaccctgcggctgtggtccagc

SEQ ID NO: 3444 - DNA, 2718 bp, Artificial Sequence
  Synthetic Polynucloetide
atggccttaccagtgaccgccttgctcctgccgctggccttgctgctccacgccgccaggccggaagtgcagctggttgaatctggcggaggactggttcagcctggcggatctctgagactgtcttgtgccgccagcggcttcagcttcagcgacttttggatgagctgggtccgacaggcccctggcaaaggacttgaatgggtcgccacaatcagccaggccggcagcgagaaggactacgtggactctgtgaagggcagattcaccatcagccgggacaacgccaagaagtccctgtacctccagatgaacagcctgagagccgaggacaccgccgtgtactattgtgcctctggcgtgtacagcttcgactacagaggccagggcaccctggtcacagtctcttctggtaccggcggaggcggatctggcggcggaggtagcggtggcggaggatctgaattccagtctgtggtcacacagcctccatccgtgtctgctgcccctggacagaaagtgaccatctcctgtagcggcagcagcagcaacatcggcaacaactacgtgtcctggtatcagcagctccccggcacagctcccaaactgctgatctacgacaacaacaagcggcccagcggcatccccgatagattttctggcagcaagagcggcaccagcgccacactgggaattaccggacttcagacaggcgacgaggccgactactactgtggcacatgggatggcagcctgtacaccatgcttttcggcggaggcaccaagctgacagtgcttctcgagggacagcctaaggccaatcctaccgtgacactgttccctccaagcagcgaagaactccaggccaacaaggccacacttgtgtgcctgatctccgacttctaccctggggctgtgacagtggcttggaaggccgatggatctcctgtgaaagccggcgtggaaaccaccaagccatccaagcagagcaacaacaaatacgccgccagctcctacctgagcctgacacctgagcagtggaagtcccacagatcctacagctgccaagtgacccacgaaggcagcaccgtggaaaagacagtggcccctacagagtgcagcggcagagccgattgcggctttaccagcgagagctaccagcagggcgtgctgagcgccaccatcctgtacgagatcctgctgggcaaggccaccctgtacgccgtgctggtgtctgccctggtgctgatggctatggtcaagcggaaggacagccggggacgcgccaagagaagcggatctggcgtgaagcagaccctgaatttcgacctgctgaagctggctggcgacgtggaatccaacccaggccctactagtatggactggatttggcgcatccttttccttgtcggcgctgctaccggcgcgcattccgggccccagctccagctgcaagagtctggacctggcctggtcaagcctagcgagacactgagcctgacctgtaccgtgtccggcgatagcatcagcagcggcgattactactggggctggatcagacagcctcctggcaaaggactggaatggatcggccacatctactacagcggcgtgacctactacaaccccagcctgaagtccagagtgaccatcagcgtggacaccagccggaaccagttctccctgaagctgtctagcgtgacagccgccgataccgccgtgtactactgcaccagagaggacagcagcaactggcggagtagaggccagggaacactggtcacagttagctctggatccggcggaggcggaagtggaggcggaggatctggcggcggaggctctttcgaagaagtgcaactggtggaatctggcggcggactggttaagcctggcggatctctgagactgtcttgtgccgccagcggcttcaccttcagcaatgcctggatgagctgggttcgacaggcccctggaaaaggactggaatgggtcggattcatccggtccaaagcctacggcggcaccacagaatatgccgcctctgtgaagggcagattcaccatcagccgggacgacagcaagtctatcgcctacctccagatgaacaacctgaaaaccgaggacaccgccgtgtactactgcgccagagatggcctgtacagcagctcttggtacgacagcgattactggggccagggcacactggtcacagtgtcatctacgcgtgcctctacaaagggaccctccgtgtttcctctggctcccagcagcaagtctacaagcggaggaacagccgctctgggctgcctggtcaaggattactttcccgagcctgtgaccgtgtcctggaatagcggagcactgacaagcggcgtgcacacctttccagccgtgctgcaaagcagcggcctgtactctctgagcagcgtggtcacagtgcctagctctagcctgggcacccagacctacatctgcaatgtgaaccacaagcctagcaacaccaaggtggacaagagagtggaacccaagagctgtatccccgaggacacattcttcccaagccccgagagcagctgcgacgtgaagctggtggaaaagagcttcgagacagacaccaacctgaacttccagaacctgagcgtgatcggcttcagaatcctgctgctgaaagtggccggctttaacctgctgatgaccctgcggctgtggtccagc

SEQ ID NO: 3445 - DNA, 2733 bp, Artificial Sequence
  Synthetic Polynucloetide
atggccttaccagtgaccgccttgctcctgccgctggccttgctgctccacgccgccaggccggaagtgcagctggttgaatctggcggaggactggttcagcctggcggatctctgagactgtcttgtgccgccagcggcttcagcttcagcgacttttggatgagctgggtccgacaggcccctggcaaaggacttgaatgggtcgccacaatcagccaggccggcagcgagaaggactacgtggactctgtgaagggcagattcaccatcagccgggacaacgccaagaagtccctgtacctccagatgaacagcctgagagccgaggacaccgccgtgtactattgtgcctctggcgtgtacagcttcgactacagaggccagggcaccctggtcacagtctcttctggtaccggcggaggcggatctggcggcggaggtagcggtggcggaggatctgaattccagtctgtgctgacacagcctcctagtgtgtctggcgctcctggacagagagtgaccatctcttgtaccggcagcagcagcaatatcggagccggctatgacgtgcactggtatcagcagctccctggcacagcccctaaactgctgatcttcggcaacagcaacagacccagcggcgtgcccgatagattcagcggctttaagagcggcacaagcgccagcctggctatcactggactgcaagccgaggacgaggccgactacttctgccagagctacgatagcagcctgagcggcagcggagtgtttggcacaggcaccaaagtgacagtgcttggcctcgagggacagcctaaggccaatcctaccgtgacactgttccctccaagcagcgaagaactccaggccaacaaggccacacttgtgtgcctgatctccgacttctaccctggggctgtgacagtggcttggaaggccgatggatctcctgtgaaagccggcgtggaaaccaccaagccatccaagcagagcaacaacaaatacgccgccagctcctacctgagcctgacacctgagcagtggaagtcccacagatcctacagctgccaagtgacccacgaaggcagcaccgtggaaaagacagtggcccctacagagtgcagcggcagagccgattgcggctttaccagcgagagctaccagcagggcgtgctgagcgccaccatcctgtacgagatcctgctgggcaaggccaccctgtacgccgtgctggtgtctgccctggtgctgatggctatggtcaagcggaaggacagccggggacgcgccaagagaagcggatctggcgtgaagcagaccctgaatttcgacctgctgaagctggctggcgacgtggaatccaacccaggccctactagtatggactggatttggcgcatccttttccttgtcggcgctgctaccggcgcgcattccgggccccagctccagctgcaagagtctggacctggcctggtcaagcctagcgagacactgagcctgacctgtaccgtgtccggcgatagcatcagcagcggcgattactactggggctggatcagacagcctcctggcaaaggactggaatggatcggccacatctactacagcggcgtgacctactacaaccccagcctgaagtccagagtgaccatcagcgtggacaccagccggaaccagttctccctgaagctgtctagcgtgacagccgccgataccgccgtgtactactgcaccagagaggacagcagcaactggcggagtagaggccagggaacactggtcacagttagctctggatccggcggaggcggaagtggaggcggaggatctggcggcggaggctctttcgaacaaatgcaactggttcaaagcggcggtggcctggtgcaacctggaagaagtctgagactgagctgtgccgccagcggcttcaccttcgatgattacgccatgcactgggtccgacaggcccctggaaaaggactggaatgggtgtccggcatctcctggaatagcggctctatcggctacgccgacagcgtgaagggcagattcaccatcagccgggacaacgccaagaacagcctgtacctccagatgaactccctgagagccgaggatacagccctgtactactgcgccaaggacatccacagcggcagctactacggcctgctgtactacgctatggacgtgtggggccagggcacaaccgtgacagtttcttctacgcgtgcctctacaaagggaccctccgtgtttcctctggctcccagcagcaagtctacaagcggaggaacagccgctctgggctgcctggtcaaggattactttcccgagcctgtgaccgtgtcctggaatagcggagcactgacaagcggcgtgcacacctttccagccgtgctgcaaagcagcggcctgtactctctgagcagcgtggtcacagtgcctagctctagcctgggcacccagacctacatctgcaatgtgaaccacaagcctagcaacaccaaggtggacaagagagtggaacccaagagctgtatccccgaggacacattcttcccaagccccgagagcagctgcgacgtgaagctggtggaaaagagcttcgagacagacaccaacctgaacttccagaacctgagcgtgatcggcttcagaatcctgctgctgaaagtggccggctttaacctgctgatgaccctgcggctgtggtccagc

SEQ ID NO: 3446 - DNA, 2733 bp, Artificial Sequence
  Synthetic Polynucloetide
atggccttaccagtgaccgccttgctcctgccgctggccttgctgctccacgccgccaggccggaagtgcagctggttgaatctggcggaggactggttcagcctggcggatctctgagactgtcttgtgccgccagcggcttcagcttcagcgacttttggatgagctgggtccgacaggcccctggcaaaggacttgaatgggtcgccacaatcagccaggccggcagcgagaaggactacgtggactctgtgaagggcagattcaccatcagccgggacaacgccaagaagtccctgtacctccagatgaacagcctgagagccgaggacaccgccgtgtactattgtgcctctggcgtgtacagcttcgactacagaggccagggcaccctggtcacagtctcttctggtaccggcggaggcggatctggcggcggaggtagcggtggcggaggatctgaattcctgcctgttctgacacagcctccatctgcctctggcacacctggacagagagtgaccatcagctgtagcggcagaagcagcaacatcggcagcaacagcgtgaactggtacagacagcttcctggcgctgcccctaagctgctgatctacagcaacaaccagcggcctcctggcgtgccagtcagattttctggcagcaagagcggcacaagcgccagcctggctatttctggactccagtctgaggacgaggccacctactactgtgccacctgggacgacaacctgaacgtgcactacgtgttcggcaccggcaccaaagtgacagtgcttggaagtagactcgagggacagcctaaggccaatcctaccgtgacactgttccctccaagcagcgaagaactccaggccaacaaggccacacttgtgtgcctgatctccgacttctaccctggggctgtgacagtggcttggaaggccgatggatctcctgtgaaagccggcgtggaaaccaccaagccatccaagcagagcaacaacaaatacgccgccagctcctacctgagcctgacacctgagcagtggaagtcccacagatcctacagctgccaagtgacccacgaaggcagcaccgtggaaaagacagtggcccctacagagtgcagcggcagagccgattgcggctttaccagcgagagctaccagcagggcgtgctgagcgccaccatcctgtacgagatcctgctgggcaaggccaccctgtacgccgtgctggtgtctgccctggtgctgatggctatggtcaagcggaaggacagccggggacgcgccaagagaagcggatctggcgtgaagcagaccctgaatttcgacctgctgaagctggctggcgacgtggaatccaacccaggccctactagtatggactggatttggcgcatccttttccttgtcggcgctgctaccggcgcgcattccgggccccagctccagctgcaagagtctggacctggcctggtcaagcctagcgagacactgagcctgacctgtaccgtgtccggcgatagcatcagcagcggcgattactactggggctggatcagacagcctcctggcaaaggactggaatggatcggccacatctactacagcggcgtgacctactacaaccccagcctgaagtccagagtgaccatcagcgtggacaccagccggaaccagttctccctgaagctgtctagcgtgacagccgccgataccgccgtgtactactgcaccagagaggacagcagcaactggcggagtagaggccagggaacactggtcacagttagctctggatccggcggaggcggaagtggaggcggaggatctggcggcggaggctctttcgaacttgaaatggctcaggtgcagctggtgcagagcggagccgaagtgaagaaacctggcagcagcgtgaaggtgtcctgcaaagcttctggcggcaccttcagcagctacgccatctcttgggttcgacaggcccctggacaaggactggaatggatgggcagaatcatccccatcctgggaatcgccaactacgcccagaaattccagggcagagtgacaatcaccgccgacaagagcaccagcaccgcctacatggaactgagcagcctgagaagcgaggacaccgccgtgtactattgtgcaagaggcggctactacagccacgacatgtggagcgaagattggggccagggcacactggtcacagtgtcatctacgcgtgcctctacaaagggaccctccgtgtttcctctggctcccagcagcaagtctacaagcggaggaacagccgctctgggctgcctggtcaaggattactttcccgagcctgtgaccgtgtcctggaatagcggagcactgacaagcggcgtgcacacctttccagccgtgctgcaaagcagcggcctgtactctctgagcagcgtggtcacagtgcctagctctagcctgggcacccagacctacatctgcaatgtgaaccacaagcctagcaacaccaaggtggacaagagagtggaacccaagagctgtatccccgaggacacattcttcccaagccccgagagcagctgcgacgtgaagctggtggaaaagagcttcgagacagacaccaacctgaacttccagaacctgagcgtgatcggcttcagaatcctgctgctgaaagtggccggctttaacctgctgatgaccctgcggctgtggtccagc

SEQ ID NO: 3447 - DNA, 2715 bp, Artificial Sequence
  Synthetic Polynucloetide
atggccttaccagtgaccgccttgctcctgccgctggccttgctgctccacgccgccaggccggaagtgcagctggttgaatctggcggaggactggttcagcctggcggatctctgagactgtcttgtgccgccagcggcttcagcttcagcgacttttggatgagctgggtccgacaggcccctggcaaaggacttgaatgggtcgccacaatcagccaggccggcagcgagaaggactacgtggactctgtgaagggcagattcaccatcagccgggacaacgccaagaagtccctgtacctccagatgaacagcctgagagccgaggacaccgccgtgtactattgtgcctctggcgtgtacagcttcgactacagaggccagggcaccctggtcacagtctcttctggtaccggcggaggcggatctggcggcggaggtagcggtggcggaggatctgaattcgacttcgtgatgacacagagccctgatagcctggccgtgtctctcggcgagcgagtgaccatgagctgcaagtctagccagagcctgctgaacagcggcaaccagaagaactacctgacctggtatcagcagaagcccggccagcctcctaagctgctgatctactgggccagcaccagagaaagcggcgtgcccgatagattttctggctctggcagcggcaccgacttcaccctgacaatttctagcctgcaagccgaggacgtggccgtgtactactgccagaacgactacagctacccctacaccttcggccagggcaccaagctggaaatcaaactcgagggacagcctaaggccaatcctaccgtgacactgttccctccaagcagcgaagaactccaggccaacaaggccacacttgtgtgcctgatctccgacttctaccctggggctgtgacagtggcttggaaggccgatggatctcctgtgaaagccggcgtggaaaccaccaagccatccaagcagagcaacaacaaatacgccgccagctcctacctgagcctgacacctgagcagtggaagtcccacagatcctacagctgccaagtgacccacgaaggcagcaccgtggaaaagacagtggcccctacagagtgcagcggcagagccgattgcggctttaccagcgagagctaccagcagggcgtgctgagcgccaccatcctgtacgagatcctgctgggcaaggccaccctgtacgccgtgctggtgtctgccctggtgctgatggctatggtcaagcggaaggacagccggggacgcgccaagagaagcggatctggcgtgaagcagaccctgaatttcgacctgctgaagctggctggcgacgtggaatccaacccaggccctactagtatggactggatttggcgcatccttttccttgtcggcgctgctaccggcgcgcattccgggccccagctccagctgcaagagtctggacctggcctggtcaagcctagcgagacactgagcctgacctgtaccgtgtccggcgatagcatcagcagcggcgattactactggggctggatcagacagcctcctggcaaaggactggaatggatcggccacatctactacagcggcgtgacctactacaaccccagcctgaagtccagagtgaccatcagcgtggacaccagccggaaccagttctccctgaagctgtctagcgtgacagccgccgataccgccgtgtactactgcaccagagaggacagcagcaactggcggagtagaggccagggaacactggtcacagttagctctggatccggcggaggcggaagtggaggcggaggatctggcggcggaggctctttcgaagaagtgcaactggttcagagcggagccgagctgaagaaacctggggccagcgtgaaggtgtcctgtaaagccagcggctacacctttaccgactactacatgaaatgggtccgacaggccccaggccagggactcgaatggatcggcgatattatccccagcaacggggccaccttctacaaccagaaattcaagggccgcgtgaccatcaccgtggacaagagcacaagcaccgcctacatggaactgagcagcctgagaagcgaggacaccgccgtgtattattgcgccagaagccatctgctgcgggccagttggttcgcctattggggacagggaaccctggtcaccgttagctctacgcgtgcctctacaaagggaccctccgtgtttcctctggctcccagcagcaagtctacaagcggaggaacagccgctctgggctgcctggtcaaggattactttcccgagcctgtgaccgtgtcctggaatagcggagcactgacaagcggcgtgcacacctttccagccgtgctgcaaagcagcggcctgtactctctgagcagcgtggtcacagtgcctagctctagcctgggcacccagacctacatctgcaatgtgaaccacaagcctagcaacaccaaggtggacaagagagtggaacccaagagctgtatccccgaggacacattcttcccaagccccgagagcagctgcgacgtgaagctggtggaaaagagcttcgagacagacaccaacctgaacttccagaacctgagcgtgatcggcttcagaatcctgctgctgaaagtggccggctttaacctgctgatgaccctgcggctgtggtccagc

SEQ ID NO: 3448 - DNA, 2715 bp, Artificial Sequence
  Synthetic Polynucloetide
atggccttaccagtgaccgccttgctcctgccgctggccttgctgctccacgccgccaggccggaagtgcagctggttgaatctggcggaggactggttcagcctggcggatctctgagactgtcttgtgccgccagcggcttcagcttcagcgacttttggatgagctgggtccgacaggcccctggcaaaggacttgaatgggtcgccacaatcagccaggccggcagcgagaaggactacgtggactctgtgaagggcagattcaccatcagccgggacaacgccaagaagtccctgtacctccagatgaacagcctgagagccgaggacaccgccgtgtactattgtgcctctggcgtgtacagcttcgactacagaggccagggcaccctggtcacagtctcttctggtaccggcggaggcggatctggcggcggaggtagcggtggcggaggatctgaattcgacttcgtgatgacacagagccctgatagcctggccgtgtctctcggcgagcgagtgaccatgagctgcaagtctagccagagcctgctgaacagcggcaaccagaagaactacctgacctggtatcagcagaagcccggccagcctcctaagctgctgatctactgggccagcaccagagaaagcggcgtgcccgatagattttctggctctggcagcggcaccgacttcaccctgacaatttctagcctgcaagccgaggacgtggccgtgtactactgccagaacgactacagctacccctacaccttcggccagggcaccaagctggaaatcaaactcgagggacagcctaaggccaatcctaccgtgacactgttccctccaagcagcgaagaactccaggccaacaaggccacacttgtgtgcctgatctccgacttctaccctggggctgtgacagtggcttggaaggccgatggatctcctgtgaaagccggcgtggaaaccaccaagccatccaagcagagcaacaacaaatacgccgccagctcctacctgagcctgacacctgagcagtggaagtcccacagatcctacagctgccaagtgacccacgaaggcagcaccgtggaaaagacagtggcccctacagagtgcagcggcagagccgattgcggctttaccagcgagagctaccagcagggcgtgctgagcgccaccatcctgtacgagatcctgctgggcaaggccaccctgtacgccgtgctggtgtctgccctggtgctgatggctatggtcaagcggaaggacagccggggacgcgccaagagaagcggatctggcgtgaagcagaccctgaatttcgacctgctgaagctggctggcgacgtggaatccaacccaggccctactagtatggactggatttggcgcatccttttccttgtcggcgctgctaccggcgcgcattccgggccccagctccagctgcaagagtctggacctggcctggtcaagcctagcgagacactgagcctgacctgtaccgtgtccggcgatagcatcagcagcggcgattactactggggctggatcagacagcctcctggcaaaggactggaatggatcggccacatctactacagcggcgtgacctactacaaccccagcctgaagtccagagtgaccatcagcgtggacaccagccggaaccagttctccctgaagctgtctagcgtgacagccgccgataccgccgtgtactactgcaccagagaggacagcagcaactggcggagtagaggccagggaacactggtcacagttagctctggatccggcggaggcggaagtggaggcggaggatctggcggcggaggctctttcgaacaagtgcaactggttcagagcggagccgagctgaagaaacctggggccagcgtgaaggtgtcctgtaaagccagcggctacacctttaccgactactacatgaaatgggtccgacaggccccaggccagggactcgaatggatcggcgatattatccccagcaacggggccaccttctacaaccagaaattcaagggccgcgtgaccatcaccgtggacaagagcacaagcaccgcctacatggaactgagcagcctgagaagcgaggacaccgccgtgtattattgcgccagaagccatctgctgcgggccagttggttcgcctattggggacagggaaccctggtcaccgttagctctacgcgtgcctctacaaagggaccctccgtgtttcctctggctcccagcagcaagtctacaagcggaggaacagccgctctgggctgcctggtcaaggattactttcccgagcctgtgaccgtgtcctggaatagcggagcactgacaagcggcgtgcacacctttccagccgtgctgcaaagcagcggcctgtactctctgagcagcgtggtcacagtgcctagctctagcctgggcacccagacctacatctgcaatgtgaaccacaagcctagcaacaccaaggtggacaagagagtggaacccaagagctgtatccccgaggacacattcttcccaagccccgagagcagctgcgacgtgaagctggtggaaaagagcttcgagacagacaccaacctgaacttccagaacctgagcgtgatcggcttcagaatcctgctgctgaaagtggccggctttaacctgctgatgaccctgcggctgtggtccagc

SEQ ID NO: 3449 - DNA, 2685 bp, Artificial Sequence
  Synthetic Polynucloetide
atggccttaccagtgaccgccttgctcctgccgctggccttgctgctccacgccgccaggccggaagtgcagctggttgaatctggcggaggactggttcagcctggcggatctctgagactgtcttgtgccgccagcggcttcagcttcagcgacttttggatgagctgggtccgacaggcccctggcaaaggacttgaatgggtcgccacaatcagccaggccggcagcgagaaggactacgtggactctgtgaagggcagattcaccatcagccgggacaacgccaagaagtccctgtacctccagatgaacagcctgagagccgaggacaccgccgtgtactattgtgcctctggcgtgtacagcttcgactacagaggccagggcaccctggtcacagtctcttctggtaccggcggaggcggatctggcggcggaggtagcggtggcggaggatctgaattcgacgtgcagatcacacagagccctagctacctggctgcctctcctggcgagacaatcaccatcaactgtcgggccagcaagagcatcagcaaggacctggcctggtatcaagagaagcccggcaagaccaacaagctgctgatctacagcggcagcacactccagtctggcatccccagcagattttccggctctggcagcggcaccgatttcaccctgaccataagcagcctggaacctgaggacttcgccatgtactactgccagcagcacaacaagtacccctacacctttggcggaggcaccaagctggaaatcaagagactcgagggacagcctaaggccaatcctaccgtgacactgttccctccaagcagcgaagaactccaggccaacaaggccacacttgtgtgcctgatctccgacttctaccctggggctgtgacagtggcttggaaggccgatggatctcctgtgaaagccggcgtggaaaccaccaagccatccaagcagagcaacaacaaatacgccgccagctcctacctgagcctgacacctgagcagtggaagtcccacagatcctacagctgccaagtgacccacgaaggcagcaccgtggaaaagacagtggcccctacagagtgcagcggcagagccgattgcggctttaccagcgagagctaccagcagggcgtgctgagcgccaccatcctgtacgagatcctgctgggcaaggccaccctgtacgccgtgctggtgtctgccctggtgctgatggctatggtcaagcggaaggacagccggggacgcgccaagagaagcggatctggcgtgaagcagaccctgaatttcgacctgctgaagctggctggcgacgtggaatccaacccaggccctactagtatggactggatttggcgcatccttttccttgtcggcgctgctaccggcgcgcattccgggccccagctccagctgcaagagtctggacctggcctggtcaagcctagcgagacactgagcctgacctgtaccgtgtccggcgatagcatcagcagcggcgattactactggggctggatcagacagcctcctggcaaaggactggaatggatcggccacatctactacagcggcgtgacctactacaaccccagcctgaagtccagagtgaccatcagcgtggacaccagccggaaccagttctccctgaagctgtctagcgtgacagccgccgataccgccgtgtactactgcaccagagaggacagcagcaactggcggagtagaggccagggaacactggtcacagttagctctggatccggcggaggcggaagtggaggcggaggatctggcggcggaggctctttcgaacaagttcaactgcaacagcctggggccgagcttgttagacctggcgcttctgtgaagctgagctgcaaggccagcggctacaccttcaccagctactggatgaactgggtcaagcagcggcctgaccagggcctcgaatggatcggcagaatcgacccctacgacagcgagacacactacaaccagaagttcaaggacaaggccatcctgaccgtggacaagagcagctccaccgcctacatgcaactgagcagcctgacctctgaggatagcgccgtgtactattgcgccagaggcaactgggacgactattggggccagggcacaaccctgacagtgtctagtacgcgtgcctctacaaagggaccctccgtgtttcctctggctcccagcagcaagtctacaagcggaggaacagccgctctgggctgcctggtcaaggattactttcccgagcctgtgaccgtgtcctggaatagcggagcactgacaagcggcgtgcacacctttccagccgtgctgcaaagcagcggcctgtactctctgagcagcgtggtcacagtgcctagctctagcctgggcacccagacctacatctgcaatgtgaaccacaagcctagcaacaccaaggtggacaagagagtggaacccaagagctgtatccccgaggacacattcttcccaagccccgagagcagctgcgacgtgaagctggtggaaaagagcttcgagacagacaccaacctgaacttccagaacctgagcgtgatcggcttcagaatcctgctgctgaaagtggccggctttaacctgctgatgaccctgcggctgtggtccagc

SEQ ID NO: 3450 - DNA, 2691 bp, Artificial Sequence
  Synthetic Polynucloetide
atggccttaccagtgaccgccttgctcctgccgctggccttgctgctccacgccgccaggccggaagtgcagctggttgaatctggcggaggactggttcagcctggcggatctctgagactgtcttgtgccgccagcggcttcagcttcagcgacttttggatgagctgggtccgacaggcccctggcaaaggacttgaatgggtcgccacaatcagccaggccggcagcgagaaggactacgtggactctgtgaagggcagattcaccatcagccgggacaacgccaagaagtccctgtacctccagatgaacagcctgagagccgaggacaccgccgtgtactattgtgcctctggcgtgtacagcttcgactacagaggccagggcaccctggtcacagtctcttctggtaccggcggaggcggatctggcggcggaggtagcggtggcggaggatctgaattcgagatcgtgctgacacagagccctaccagcatgacagcctctccaggcgagcaagtgaccatcacctgtagagccagcagcagcatcaactacatgcactggtatcagcagaagcctggcgcaagccccagaccttggatctacgagacaagcaagctggcctccggcgtgcccgatagattttctggatctgccagcggcaccagctacagcctgaccatcaacaacatggaagccgaggacgccgccacctactactgccagcagtggaattacccctcctggacctttggcggaggcaccaagctggaacttaaactcgagggacagcctaaggccaatcctaccgtgacactgttccctccaagcagcgaagaactccaggccaacaaggccacacttgtgtgcctgatctccgacttctaccctggggctgtgacagtggcttggaaggccgatggatctcctgtgaaagccggcgtggaaaccaccaagccatccaagcagagcaacaacaaatacgccgccagctcctacctgagcctgacacctgagcagtggaagtcccacagatcctacagctgccaagtgacccacgaaggcagcaccgtggaaaagacagtggcccctacagagtgcagcggcagagccgattgcggctttaccagcgagagctaccagcagggcgtgctgagcgccaccatcctgtacgagatcctgctgggcaaggccaccctgtacgccgtgctggtgtctgccctggtgctgatggctatggtcaagcggaaggacagccggggacgcgccaagagaagcggatctggcgtgaagcagaccctgaatttcgacctgctgaagctggctggcgacgtggaatccaacccaggccctactagtatggactggatttggcgcatccttttccttgtcggcgctgctaccggcgcgcattccgggccccagctccagctgcaagagtctggacctggcctggtcaagcctagcgagacactgagcctgacctgtaccgtgtccggcgatagcatcagcagcggcgattactactggggctggatcagacagcctcctggcaaaggactggaatggatcggccacatctactacagcggcgtgacctactacaaccccagcctgaagtccagagtgaccatcagcgtggacaccagccggaaccagttctccctgaagctgtctagcgtgacagccgccgataccgccgtgtactactgcaccagagaggacagcagcaactggcggagtagaggccagggaacactggtcacagttagctctggatccggcggaggcggaagtggaggcggaggatctggcggcggaggctctttcgaagaagtgcagctcgttgagtctggtggcggactggttcagcctggaagaagcctgaagctgagctgtgccgccagcggcttcaccttcagcgactacaatatggcctgggtccgacaggcccctaagaaaggactggaatgggtcgccaccatcctgtacgatggcggcagaacctactaccggggcagcgtgaagggcagattcaccatcagcagagacaacgccaagagcaccctgtacctgcggatggactctctgagaagcgaggataccgccacatattactgtgccacacacagccggggcaccgactactttgattattggggccagggcgtgatggttaccgtgtctagtacgcgtgcctctacaaagggaccctccgtgtttcctctggctcccagcagcaagtctacaagcggaggaacagccgctctgggctgcctggtcaaggattactttcccgagcctgtgaccgtgtcctggaatagcggagcactgacaagcggcgtgcacacctttccagccgtgctgcaaagcagcggcctgtactctctgagcagcgtggtcacagtgcctagctctagcctgggcacccagacctacatctgcaatgtgaaccacaagcctagcaacaccaaggtggacaagagagtggaacccaagagctgtatccccgaggacacattcttcccaagccccgagagcagctgcgacgtgaagctggtggaaaagagcttcgagacagacaccaacctgaacttccagaacctgagcgtgatcggcttcagaatcctgctgctgaaagtggccggctttaacctgctgatgaccctgcggctgtggtccagc

SEQ ID NO: 3451 - DNA, 2718 bp, Artificial Sequence
  Synthetic Polynucloetide
atggccttaccagtgaccgccttgctcctgccgctggccttgctgctccacgccgccaggccggaagtgcagctggttgaatctggcggaggactggttcagcctggcggatctctgagactgtcttgtgccgccagcggcttcagcttcagcgacttttggatgagctgggtccgacaggcccctggcaaaggacttgaatgggtcgccacaatcagccaggccggcagcgagaaggactacgtggactctgtgaagggcagattcaccatcagccgggacaacgccaagaagtccctgtacctccagatgaacagcctgagagccgaggacaccgccgtgtactattgtgcctctggcgtgtacagcttcgactacagaggccagggcaccctggtcacagtctcttctggtaccggcggaggcggatctggcggcggaggtagcggtggcggaggatctgaattcgacatcgtgatgacacagagcccttctagcctggccgtgtctgagggcgagacagtgaccatcaactgcaagagcagccagagcttcctgtctagcggcgacggcaagaattacgtggcctggtatcagtacaagcccggacagagccccaagctgctgatctactgggccagcacaagacagagcggcgtgcccgatagattcatcggctctggcagcggcaccgacttcaccctgacaatctctacagtgcaggccgaggacctggctatctactactgccagcagtattacgacacccctctgacctttggctccggcaccaagctggaaatcaaactcgagggacagcctaaggccaatcctaccgtgacactgttccctccaagcagcgaagaactccaggccaacaaggccacacttgtgtgcctgatctccgacttctaccctggggctgtgacagtggcttggaaggccgatggatctcctgtgaaagccggcgtggaaaccaccaagccatccaagcagagcaacaacaaatacgccgccagctcctacctgagcctgacacctgagcagtggaagtcccacagatcctacagctgccaagtgacccacgaaggcagcaccgtggaaaagacagtggcccctacagagtgcagcggcagagccgattgcggctttaccagcgagagctaccagcagggcgtgctgagcgccaccatcctgtacgagatcctgctgggcaaggccaccctgtacgccgtgctggtgtctgccctggtgctgatggctatggtcaagcggaaggacagccggggacgcgccaagagaagcggatctggcgtgaagcagaccctgaatttcgacctgctgaagctggctggcgacgtggaatccaacccaggccctactagtatggactggatttggcgcatccttttccttgtcggcgctgctaccggcgcgcattccgggccccagctccagctgcaagagtctggacctggcctggtcaagcctagcgagacactgagcctgacctgtaccgtgtccggcgatagcatcagcagcggcgattactactggggctggatcagacagcctcctggcaaaggactggaatggatcggccacatctactacagcggcgtgacctactacaaccccagcctgaagtccagagtgaccatcagcgtggacaccagccggaaccagttctccctgaagctgtctagcgtgacagccgccgataccgccgtgtactactgcaccagagaggacagcagcaactggcggagtagaggccagggaacactggtcacagttagctctggatccggcggaggcggaagtggaggcggaggatctggcggcggaggctctttcgaagaagtgaagctgcaagagtctggccccagcctggtgcagagtagccaaacactgagcctgacctgtaccgtgtccggctttagcctgaccagctaccacatccactgggtccgacagacccctggcaaaggactggaatggatgggcgtgatgtggagcgacggcgacaccagctataacagcgccctgaagtcccggctgagcatcagcagagatacaagccagagccaggtgttcctgaagatgaacagcctccagaccgaggacaccgccacctactattgtgccagaggctactacagcagctacctgtacctttggttcgcctattggggccagggcaccctggttacagtcagctctacgcgtgcctctacaaagggaccctccgtgtttcctctggctcccagcagcaagtctacaagcggaggaacagccgctctgggctgcctggtcaaggattactttcccgagcctgtgaccgtgtcctggaatagcggagcactgacaagcggcgtgcacacctttccagccgtgctgcaaagcagcggcctgtactctctgagcagcgtggtcacagtgcctagctctagcctgggcacccagacctacatctgcaatgtgaaccacaagcctagcaacaccaaggtggacaagagagtggaacccaagagctgtatccccgaggacacattcttcccaagccccgagagcagctgcgacgtgaagctggtggaaaagagcttcgagacagacaccaacctgaacttccagaacctgagcgtgatcggcttcagaatcctgctgctgaaagtggccggctttaacctgctgatgaccctgcggctgtggtccagc

SEQ ID NO: 3452 - DNA, 2730 bp, Artificial Sequence
  Synthetic Polynucloetide
atggccttaccagtgaccgccttgctcctgccgctggccttgctgctccacgccgccaggccggaagtgcagctggttgaatctggcggaggactggttcagcctggcggatctctgagactgtcttgtgccgccagcggcttcagcttcagcgacttttggatgagctgggtccgacaggcccctggcaaaggacttgaatgggtcgccacaatcagccaggccggcagcgagaaggactacgtggactctgtgaagggcagattcaccatcagccgggacaacgccaagaagtccctgtacctccagatgaacagcctgagagccgaggacaccgccgtgtactattgtgcctctggcgtgtacagcttcgactacagaggccagggcaccctggtcacagtctcttctggtaccggcggaggcggatctggcggcggaggtagcggtggcggaggatctgaattcgacgtgctgatgacccagacacctgtgtctctgccagtgtctctcggaggccaggtgtccatctcctgtagaagcagccagagcctggtgcactccgacggcgatacctacctgcactggtatctccagaagcctggacagagccctcagctcctgatctaccgggtgtccaacagattcagcggcgtgcccgatagattttccggcagcggctctggcaccgacttcaccctgaagatcagcagagtggaacccgaggacctgggcctgtactactgtctccagaccacacacttcccaccttggacctttggcggaggcaccaagctggaaatgaaactcgagggacagcctaaggccaatcctaccgtgacactgttccctccaagcagcgaagaactccaggccaacaaggccacacttgtgtgcctgatctccgacttctaccctggggctgtgacagtggcttggaaggccgatggatctcctgtgaaagccggcgtggaaaccaccaagccatccaagcagagcaacaacaaatacgccgccagctcctacctgagcctgacacctgagcagtggaagtcccacagatcctacagctgccaagtgacccacgaaggcagcaccgtggaaaagacagtggcccctacagagtgcagcggcagagccgattgcggctttaccagcgagagctaccagcagggcgtgctgagcgccaccatcctgtacgagatcctgctgggcaaggccaccctgtacgccgtgctggtgtctgccctggtgctgatggctatggtcaagcggaaggacagccggggacgcgccaagagaagcggatctggcgtgaagcagaccctgaatttcgacctgctgaagctggctggcgacgtggaatccaacccaggccctactagtatggactggatttggcgcatccttttccttgtcggcgctgctaccggcgcgcattccgggccccagctccagctgcaagagtctggacctggcctggtcaagcctagcgagacactgagcctgacctgtaccgtgtccggcgatagcatcagcagcggcgattactactggggctggatcagacagcctcctggcaaaggactggaatggatcggccacatctactacagcggcgtgacctactacaaccccagcctgaagtccagagtgaccatcagcgtggacaccagccggaaccagttctccctgaagctgtctagcgtgacagccgccgataccgccgtgtactactgcaccagagaggacagcagcaactggcggagtagaggccagggaacactggtcacagttagctctggatccggcggaggcggaagtggaggcggaggatctggcggcggaggctctttcgaacaggttcagctccagcagtctggacccgagcttagaaggccaggatctagcgtcagactgagctgcaaggccagcggctaccggatcaaggacttcctgatccactggattaagaacagacccgagcacggcctggaatggatcggatggattgaccctgaggacggcgagactaagtacgcccagaagttccagaccaaggccacactgaccgccgacacctctagcaacaccgcctacatgcaactgagcagcctgaccagcgaggacaccgccacctacttttgtgctagatggggcgacgtgtactacggcctgatgagaggccatgtgatggatgcctggggccagggaacaagcgtgacagtctcttctacgcgtgcctctacaaagggaccctccgtgtttcctctggctcccagcagcaagtctacaagcggaggaacagccgctctgggctgcctggtcaaggattactttcccgagcctgtgaccgtgtcctggaatagcggagcactgacaagcggcgtgcacacctttccagccgtgctgcaaagcagcggcctgtactctctgagcagcgtggtcacagtgcctagctctagcctgggcacccagacctacatctgcaatgtgaaccacaagcctagcaacaccaaggtggacaagagagtggaacccaagagctgtatccccgaggacacattcttcccaagccccgagagcagctgcgacgtgaagctggtggaaaagagcttcgagacagacaccaacctgaacttccagaacctgagcgtgatcggcttcagaatcctgctgctgaaagtggccggctttaacctgctgatgaccctgcggctgtggtccagc

SEQ ID NO: 3453 - DNA, 2715 bp, Artificial Sequence
  Synthetic Polynucloetide
atggccttaccagtgaccgccttgctcctgccgctggccttgctgctccacgccgccaggccggaagtgcagctggttgaatctggcggaggactggttcagcctggcggatctctgagactgtcttgtgccgccagcggcttcagcttcagcgacttttggatgagctgggtccgacaggcccctggcaaaggacttgaatgggtcgccacaatcagccaggccggcagcgagaaggactacgtggactctgtgaagggcagattcaccatcagccgggacaacgccaagaagtccctgtacctccagatgaacagcctgagagccgaggacaccgccgtgtactattgtgcctctggcgtgtacagcttcgactacagaggccagggcaccctggtcacagtctcttctggtaccggcggaggcggatctggcggcggaggtagcggtggcggaggatctgaattcgacatcgtgatgacacagagccccgccacactgtcactgtctccaggcgaaagagccacactgagctgtcggagcagcaagagcctccagaacgtgaacggcaacacctacctgtactggttccagcagaagcccggccagtctcctcagctcctgatctacagaatgagcaacctgaacagcggcgtgcccgacagattttctggcagcggaagcggcaccgagttcaccctgaccataagcagcctggaacctgaggacttcgccgtgtactactgtatgcagcacctggaataccccatcaccttcggagccggcaccaagctggaaatcaaactcgagggacagcctaaggccaatcctaccgtgacactgttccctccaagcagcgaagaactccaggccaacaaggccacacttgtgtgcctgatctccgacttctaccctggggctgtgacagtggcttggaaggccgatggatctcctgtgaaagccggcgtggaaaccaccaagccatccaagcagagcaacaacaaatacgccgccagctcctacctgagcctgacacctgagcagtggaagtcccacagatcctacagctgccaagtgacccacgaaggcagcaccgtggaaaagacagtggcccctacagagtgcagcggcagagccgattgcggctttaccagcgagagctaccagcagggcgtgctgagcgccaccatcctgtacgagatcctgctgggcaaggccaccctgtacgccgtgctggtgtctgccctggtgctgatggctatggtcaagcggaaggacagccggggacgcgccaagagaagcggatctggcgtgaagcagaccctgaatttcgacctgctgaagctggctggcgacgtggaatccaacccaggccctactagtatggactggatttggcgcatccttttccttgtcggcgctgctaccggcgcgcattccgggccccagctccagctgcaagagtctggacctggcctggtcaagcctagcgagacactgagcctgacctgtaccgtgtccggcgatagcatcagcagcggcgattactactggggctggatcagacagcctcctggcaaaggactggaatggatcggccacatctactacagcggcgtgacctactacaaccccagcctgaagtccagagtgaccatcagcgtggacaccagccggaaccagttctccctgaagctgtctagcgtgacagccgccgataccgccgtgtactactgcaccagagaggacagcagcaactggcggagtagaggccagggaacactggtcacagttagctctggatccggcggaggcggaagtggaggcggaggatctggcggcggaggctctttcgaagaagtgcaactggttgaatctggcggcggactggttaagcctggcggatctctgaagctgagctgtgccgccagcggctacacctttaccagctacgtgatgcactgggtccgacaggcccctggcaaaggacttgagtggatcggctacatcaacccctacaacgatggcaccaagtacaacgagaagttccagggcagagtgaccatcagctccgacaagagcatcagcaccgcctacatggaactgagcagcctgagaagcgaggataccgccatgtactattgcgccagaggcacctactactacggcaccagagtgttcgactactggggccagggaaccctggtcacagtctcttctacgcgtgcctctacaaagggaccctccgtgtttcctctggctcccagcagcaagtctacaagcggaggaacagccgctctgggctgcctggtcaaggattactttcccgagcctgtgaccgtgtcctggaatagcggagcactgacaagcggcgtgcacacctttccagccgtgctgcaaagcagcggcctgtactctctgagcagcgtggtcacagtgcctagctctagcctgggcacccagacctacatctgcaatgtgaaccacaagcctagcaacaccaaggtggacaagagagtggaacccaagagctgtatccccgaggacacattcttcccaagccccgagagcagctgcgacgtgaagctggtggaaaagagcttcgagacagacaccaacctgaacttccagaacctgagcgtgatcggcttcagaatcctgctgctgaaagtggccggctttaacctgctgatgaccctgcggctgtggtccagc

SEQ ID NO: 3454 - DNA, 2703 bp, Artificial Sequence
  Synthetic Polynucloetide
atggccttaccagtgaccgccttgctcctgccgctggccttgctgctccacgccgccaggccggaagtgcagctggttgaatctggcggaggactggttcagcctggcggatctctgagactgtcttgtgccgccagcggcttcagcttcagcgacttttggatgagctgggtccgacaggcccctggcaaaggacttgaatgggtcgccacaatcagccaggccggcagcgagaaggactacgtggactctgtgaagggcagattcaccatcagccgggacaacgccaagaagtccctgtacctccagatgaacagcctgagagccgaggacaccgccgtgtactattgtgcctctggcgtgtacagcttcgactacagaggccagggcaccctggtcacagtctcttctggtaccggcggaggcggatctggcggcggaggtagcggtggcggaggatctgaattcgacatccagatgacacagagccctagcagcctgtctgccagcgtgggagacagagtgaccatcacatgcaaggccagcgaccacatcaacaactggctggcctggtatcagcagaagcctggacaggcccctaagctgctgatctacggcgctaccacactggaaacaggcgtgcccagcagattttctggcagcggctctggcaccgactacaccctgacaatatccagcctccagcctgaggacttcgccacctactactgtcagcagagctggaacaccccttggacattcggccagggcaccaagctggaaatcaagagactcgagggacagcctaaggccaatcctaccgtgacactgttccctccaagcagcgaagaactccaggccaacaaggccacacttgtgtgcctgatctccgacttctaccctggggctgtgacagtggcttggaaggccgatggatctcctgtgaaagccggcgtggaaaccaccaagccatccaagcagagcaacaacaaatacgccgccagctcctacctgagcctgacacctgagcagtggaagtcccacagatcctacagctgccaagtgacccacgaaggcagcaccgtggaaaagacagtggcccctacagagtgcagcggcagagccgattgcggctttaccagcgagagctaccagcagggcgtgctgagcgccaccatcctgtacgagatcctgctgggcaaggccaccctgtacgccgtgctggtgtctgccctggtgctgatggctatggtcaagcggaaggacagccggggacgcgccaagagaagcggatctggcgtgaagcagaccctgaatttcgacctgctgaagctggctggcgacgtggaatccaacccaggccctactagtatggactggatttggcgcatccttttccttgtcggcgctgctaccggcgcgcattccgggccccagctccagctgcaagagtctggacctggcctggtcaagcctagcgagacactgagcctgacctgtaccgtgtccggcgatagcatcagcagcggcgattactactggggctggatcagacagcctcctggcaaaggactggaatggatcggccacatctactacagcggcgtgacctactacaaccccagcctgaagtccagagtgaccatcagcgtggacaccagccggaaccagttctccctgaagctgtctagcgtgacagccgccgataccgccgtgtactactgcaccagagaggacagcagcaactggcggagtagaggccagggaacactggtcacagttagctctggatccggcggaggcggaagtggaggcggaggatctggcggcggaggctctttcgaacaagttcagcttcaacagcctggcgctgagctggtcaaacctggcgcttctgtgaagatgagctgcaaagccagcggctacgccttcagcagctactggatcaactggatgaagcagaaacccggccagggactcgaatggatcggccaaatctatcccggcgacggcgacaccaactacaacggcaagttcaagggcagagccacactgaccgccgatacctctagcagcacagcctacatgcagctgagcagcctgaccagcgaagatagcgccgtgtacttctgtgcccggtccatcacaacagtcgtgggctgcgctatggactattggggccagggaacaagcgtgaccgtgtctagtacgcgtgcctctacaaagggaccctccgtgtttcctctggctcccagcagcaagtctacaagcggaggaacagccgctctgggctgcctggtcaaggattactttcccgagcctgtgaccgtgtcctggaatagcggagcactgacaagcggcgtgcacacctttccagccgtgctgcaaagcagcggcctgtactctctgagcagcgtggtcacagtgcctagctctagcctgggcacccagacctacatctgcaatgtgaaccacaagcctagcaacaccaaggtggacaagagagtggaacccaagagctgtatccccgaggacacattcttcccaagccccgagagcagctgcgacgtgaagctggtggaaaagagcttcgagacagacaccaacctgaacttccagaacctgagcgtgatcggcttcagaatcctgctgctgaaagtggccggctttaacctgctgatgaccctgcggctgtggtccagc

SEQ ID NO: 3455 - DNA, 2709 bp, Artificial Sequence
  Synthetic Polynucloetide
atggccttaccagtgaccgccttgctcctgccgctggccttgctgctccacgccgccaggccggaagtgcagctggttgaatctggcggaggactggttcagcctggcggatctctgagactgtcttgtgccgccagcggcttcagcttcagcgacttttggatgagctgggtccgacaggcccctggcaaaggacttgaatgggtcgccacaatcagccaggccggcagcgagaaggactacgtggactctgtgaagggcagattcaccatcagccgggacaacgccaagaagtccctgtacctccagatgaacagcctgagagccgaggacaccgccgtgtactattgtgcctctggcgtgtacagcttcgactacagaggccagggcaccctggtcacagtctcttctggtaccggcggaggcggatctggcggcggaggtagcggtggcggaggatctgaattccagatcgtgctgtctcagtctcctgccatcctgagcgcttccccaggcgagaaagtgaccatgacctgtagagccagcagcagcgtgtcctacatgcactggtatcagcagaagcccggcagcagccctaagccttggatctacgccaccagcaatctggcctctggcgtgccagccagattttctggctctggcagcggcaccagctacagcttcacaatcagcagagtggaagccgaggacgccgccacctactattgtcagcagtggaccttcaatcctcctaccttcggcggaggcacccggctggaaatcaaaagaacagtggctgctctcgagggacagcctaaggccaatcctaccgtgacactgttccctccaagcagcgaagaactccaggccaacaaggccacacttgtgtgcctgatctccgacttctaccctggggctgtgacagtggcttggaaggccgatggatctcctgtgaaagccggcgtggaaaccaccaagccatccaagcagagcaacaacaaatacgccgccagctcctacctgagcctgacacctgagcagtggaagtcccacagatcctacagctgccaagtgacccacgaaggcagcaccgtggaaaagacagtggcccctacagagtgcagcggcagagccgattgcggctttaccagcgagagctaccagcagggcgtgctgagcgccaccatcctgtacgagatcctgctgggcaaggccaccctgtacgccgtgctggtgtctgccctggtgctgatggctatggtcaagcggaaggacagccggggacgcgccaagagaagcggatctggcgtgaagcagaccctgaatttcgacctgctgaagctggctggcgacgtggaatccaacccaggccctactagtatggactggatttggcgcatccttttccttgtcggcgctgctaccggcgcgcattccgggccccagctccagctgcaagagtctggacctggcctggtcaagcctagcgagacactgagcctgacctgtaccgtgtccggcgatagcatcagcagcggcgattactactggggctggatcagacagcctcctggcaaaggactggaatggatcggccacatctactacagcggcgtgacctactacaaccccagcctgaagtccagagtgaccatcagcgtggacaccagccggaaccagttctccctgaagctgtctagcgtgacagccgccgataccgccgtgtactactgcaccagagaggacagcagcaactggcggagtagaggccagggaacactggtcacagttagctctggatccggcggaggcggaagtggaggcggaggatctggcggcggaggctctttcgaacaggcttatctgcaacagagcggagccgaactcgtcagacctggcgcttctgtgaagatgagctgcaaggccagcggctacaccttcaccagctataatatgcactgggtcaagcagacccctcggcagggactcgaatggatcggcggaatctatcccggcaacggcgacacctcctacaaccagaagttcaagggcaaagccacactgaccgtgggcaagagcagcagcaccgcctatatgcagctcagcagcctgaccagcgaggacagcgccgtgtacttctgcgccagatacgactacaactacgctatggactactggggccagggcaccagcgtgacagttagctctgccagcacgcgtgcctctacaaagggaccctccgtgtttcctctggctcccagcagcaagtctacaagcggaggaacagccgctctgggctgcctggtcaaggattactttcccgagcctgtgaccgtgtcctggaatagcggagcactgacaagcggcgtgcacacctttccagccgtgctgcaaagcagcggcctgtactctctgagcagcgtggtcacagtgcctagctctagcctgggcacccagacctacatctgcaatgtgaaccacaagcctagcaacaccaaggtggacaagagagtggaacccaagagctgtatccccgaggacacattcttcccaagccccgagagcagctgcgacgtgaagctggtggaaaagagcttcgagacagacaccaacctgaacttccagaacctgagcgtgatcggcttcagaatcctgctgctgaaagtggccggctttaacctgctgatgaccctgcggctgtggtccagc

SEQ ID NO: 3456 - DNA, 2703 bp, Artificial Sequence
  Synthetic Polynucloetide
atggccttaccagtgaccgccttgctcctgccgctggccttgctgctccacgccgccaggccggaagtgcagctggttgaatctggcggaggactggttcagcctggcggatctctgagactgtcttgtgccgccagcggcttcagcttcagcgacttttggatgagctgggtccgacaggcccctggcaaaggacttgaatgggtcgccacaatcagccaggccggcagcgagaaggactacgtggactctgtgaagggcagattcaccatcagccgggacaacgccaagaagtccctgtacctccagatgaacagcctgagagccgaggacaccgccgtgtactattgtgcctctggcgtgtacagcttcgactacagaggccagggcaccctggtcacagtctcttctggtaccggcggaggcggatctggcggcggaggtagcggtggcggaggatctgaattcgagatcgtgctgacacagagccctgccaccctgtctctgagccctggcgaaagagccaccctgagctgtagagccagccagagcgtgtccagctacctggcctggtatcagcagaagcccggccaggctccccggctgctgatctacgatgccagcaatagagccaccggcatccccgccagattttccggctctggcagcggcaccgacttcaccctgaccatcagctccctggaacccgaggacttcgccgtgtactactgccagcagcggagcaactggcccatcacattcggccagggcacccggctggaaatcaaactcgagggacagcctaaggccaatcctaccgtgacactgttccctccaagcagcgaagaactccaggccaacaaggccacacttgtgtgcctgatctccgacttctaccctggggctgtgacagtggcttggaaggccgatggatctcctgtgaaagccggcgtggaaaccaccaagccatccaagcagagcaacaacaaatacgccgccagctcctacctgagcctgacacctgagcagtggaagtcccacagatcctacagctgccaagtgacccacgaaggcagcaccgtggaaaagacagtggcccctacagagtgcagcggcagagccgattgcggctttaccagcgagagctaccagcagggcgtgctgagcgccaccatcctgtacgagatcctgctgggcaaggccaccctgtacgccgtgctggtgtctgccctggtgctgatggctatggtcaagcggaaggacagccggggacgcgccaagagaagcggatctggcgtgaagcagaccctgaatttcgacctgctgaagctggctggcgacgtggaatccaacccaggccctactagtatggactggatttggcgcatccttttccttgtcggcgctgctaccggcgcgcattccgggccccagctccagctgcaagagtctggacctggcctggtcaagcctagcgagacactgagcctgacctgtaccgtgtccggcgatagcatcagcagcggcgattactactggggctggatcagacagcctcctggcaaaggactggaatggatcggccacatctactacagcggcgtgacctactacaaccccagcctgaagtccagagtgaccatcagcgtggacaccagccggaaccagttctccctgaagctgtctagcgtgacagccgccgataccgccgtgtactactgcaccagagaggacagcagcaactggcggagtagaggccagggaacactggtcacagttagctctggatccggcggaggcggaagtggaggcggaggatctggcggcggaggctctttcgaagaggtgcagcttgttgagtctggcggaggactggtgcagcccgatagaagcctgagactgtcttgtgccgccagcggcttcaccttccacgattatgccatgcactgggtccgacaggcccctggcaaaggacttgaatgggtgtccaccatctcttggaacagcggcacaatcggctacgccgactctgtgaagggcagattcaccatcagccgggacaacgccaagaacagcctgtacctccagatgaactccctgagagccgaggacacagccctgtactactgcgccaaggacatccagtacggcaactactactacggcatggacgtgtggggccagggcacaacagtgacagtctcttctacgcgtgcctctacaaagggaccctccgtgtttcctctggctcccagcagcaagtctacaagcggaggaacagccgctctgggctgcctggtcaaggattactttcccgagcctgtgaccgtgtcctggaatagcggagcactgacaagcggcgtgcacacctttccagccgtgctgcaaagcagcggcctgtactctctgagcagcgtggtcacagtgcctagctctagcctgggcacccagacctacatctgcaatgtgaaccacaagcctagcaacaccaaggtggacaagagagtggaacccaagagctgtatccccgaggacacattcttcccaagccccgagagcagctgcgacgtgaagctggtggaaaagagcttcgagacagacaccaacctgaacttccagaacctgagcgtgatcggcttcagaatcctgctgctgaaagtggccggctttaacctgctgatgaccctgcggctgtggtccagc

SEQ ID NO: 3457 - DNA, 2688 bp, Artificial Sequence
  Synthetic Polynucloetide
atggccttaccagtgaccgccttgctcctgccgctggccttgctgctccacgccgccaggccggaagtgcagctggttgaatctggcggaggactggttcagcctggcggatctctgagactgtcttgtgccgccagcggcttcagcttcagcgacttttggatgagctgggtccgacaggcccctggcaaaggacttgaatgggtcgccacaatcagccaggccggcagcgagaaggactacgtggactctgtgaagggcagattcaccatcagccgggacaacgccaagaagtccctgtacctccagatgaacagcctgagagccgaggacaccgccgtgtactattgtgcctctggcgtgtacagcttcgactacagaggccagggcaccctggtcacagtctcttctggtaccggcggaggcggatctggcggcggaggtagcggtggcggaggatctgaattcgacatccagatgacacagagccctagcagcctgtctgccagcgtgggagatagagtgaccatcaactgcaaggccagccaggacatcaacagctacctgagctggttccagcagaagcctggcaaggcccctaagacactgatctaccgggccaacagactggtggatggcgtgccaagcagattttctggcagcggcagcggccaggattacaccctgacaatatccagcctccagcctgaggacttcgccacctactactgcctccagtacgacgagttccctctgacctttggcggaggcaccaaggtggaaatcaaactcgagggacagcctaaggccaatcctaccgtgacactgttccctccaagcagcgaagaactccaggccaacaaggccacacttgtgtgcctgatctccgacttctaccctggggctgtgacagtggcttggaaggccgatggatctcctgtgaaagccggcgtggaaaccaccaagccatccaagcagagcaacaacaaatacgccgccagctcctacctgagcctgacacctgagcagtggaagtcccacagatcctacagctgccaagtgacccacgaaggcagcaccgtggaaaagacagtggcccctacagagtgcagcggcagagccgattgcggctttaccagcgagagctaccagcagggcgtgctgagcgccaccatcctgtacgagatcctgctgggcaaggccaccctgtacgccgtgctggtgtctgccctggtgctgatggctatggtcaagcggaaggacagccggggacgcgccaagagaagcggatctggcgtgaagcagaccctgaatttcgacctgctgaagctggctggcgacgtggaatccaacccaggccctactagtatggactggatttggcgcatccttttccttgtcggcgctgctaccggcgcgcattccgggccccagctccagctgcaagagtctggacctggcctggtcaagcctagcgagacactgagcctgacctgtaccgtgtccggcgatagcatcagcagcggcgattactactggggctggatcagacagcctcctggcaaaggactggaatggatcggccacatctactacagcggcgtgacctactacaaccccagcctgaagtccagagtgaccatcagcgtggacaccagccggaaccagttctccctgaagctgtctagcgtgacagccgccgataccgccgtgtactactgcaccagagaggacagcagcaactggcggagtagaggccagggaacactggtcacagttagctctggatccggcggaggcggaagtggaggcggaggatctggcggcggaggctctttcgaacaggtgcaactggtgcagtctggggccgaagtgaagaaacctggggcctctgtgaaggtgtcctgcaaagccagcggctacacctttaccaactacgacatcaactgggtccgacaggctccaggccaaggactggaatggatcggctggatctatcctggcgacggcagcaccaagtacaacgagaagttcaaggccaaggccacactgaccgccgataccagcacaagcaccgcctacatggaactgcggagcctgagaagcgacgacaccgccgtgtactattgtgcctccggctacgaggacgctatggactattggggccagggcaccaccgtgacagtgtctagtacgcgtgcctctacaaagggaccctccgtgtttcctctggctcccagcagcaagtctacaagcggaggaacagccgctctgggctgcctggtcaaggattactttcccgagcctgtgaccgtgtcctggaatagcggagcactgacaagcggcgtgcacacctttccagccgtgctgcaaagcagcggcctgtactctctgagcagcgtggtcacagtgcctagctctagcctgggcacccagacctacatctgcaatgtgaaccacaagcctagcaacaccaaggtggacaagagagtggaacccaagagctgtatccccgaggacacattcttcccaagccccgagagcagctgcgacgtgaagctggtggaaaagagcttcgagacagacaccaacctgaacttccagaacctgagcgtgatcggcttcagaatcctgctgctgaaagtggccggctttaacctgctgatgaccctgcggctgtggtccagc

SEQ ID NO: 3458 - DNA, 2694 bp, Artificial Sequence
  Synthetic Polynucloetide
atggccttaccagtgaccgccttgctcctgccgctggccttgctgctccacgccgccaggccggaagtgcagctggttgaatctggcggaggactggttcagcctggcggatctctgagactgtcttgtgccgccagcggcttcagcttcagcgacttttggatgagctgggtccgacaggcccctggcaaaggacttgaatgggtcgccacaatcagccaggccggcagcgagaaggactacgtggactctgtgaagggcagattcaccatcagccgggacaacgccaagaagtccctgtacctccagatgaacagcctgagagccgaggacaccgccgtgtactattgtgcctctggcgtgtacagcttcgactacagaggccagggcaccctggtcacagtctcttctggtaccggcggaggcggatctggcggcggaggtagcggtggcggaggatctgaattcgacatcgtgatgacccagacacctctgagcctgagcgtgacacctggacagcctgccagcattagctgcaagagcagccagtctctgctggacggcgacggcaagacctacctgaattggctgctccagaagcctggacagagccctcagcggctgatctacctggtgtccaagctggatagcggcgtgcccgatagattttctggcagcggctctggcaccgacttcaccctgaagatcagcagagtggaagccgaggacgtgggcgtgtactactgttggcagggcacacacttccccagaacattcggccagggcacaaagctggaaatcaaactcgagggacagcctaaggccaatcctaccgtgacactgttccctccaagcagcgaagaactccaggccaacaaggccacacttgtgtgcctgatctccgacttctaccctggggctgtgacagtggcttggaaggccgatggatctcctgtgaaagccggcgtggaaaccaccaagccatccaagcagagcaacaacaaatacgccgccagctcctacctgagcctgacacctgagcagtggaagtcccacagatcctacagctgccaagtgacccacgaaggcagcaccgtggaaaagacagtggcccctacagagtgcagcggcagagccgattgcggctttaccagcgagagctaccagcagggcgtgctgagcgccaccatcctgtacgagatcctgctgggcaaggccaccctgtacgccgtgctggtgtctgccctggtgctgatggctatggtcaagcggaaggacagccggggacgcgccaagagaagcggatctggcgtgaagcagaccctgaatttcgacctgctgaagctggctggcgacgtggaatccaacccaggccctactagtatggactggatttggcgcatccttttccttgtcggcgctgctaccggcgcgcattccgggccccagctccagctgcaagagtctggacctggcctggtcaagcctagcgagacactgagcctgacctgtaccgtgtccggcgatagcatcagcagcggcgattactactggggctggatcagacagcctcctggcaaaggactggaatggatcggccacatctactacagcggcgtgacctactacaaccccagcctgaagtccagagtgaccatcagcgtggacaccagccggaaccagttctccctgaagctgtctagcgtgacagccgccgataccgccgtgtactactgcaccagagaggacagcagcaactggcggagtagaggccagggaacactggtcacagttagctctggatccggcggaggcggaagtggaggcggaggatctggcggcggaggctctttcgaacaagtgcaactggttcagagcggagccgaagtgaagaaacctggggcctctgtgaaggtgtcctgcaaggccagcggctacaccttcaaggacacctacatccactgggtccgacaggcccctggacaaggacttgagtggatgggcagaatcgaccccgccaacggcaacaccaaatacgaccccaagttccagggcagagtgaccatgaccagagacaccagcatcagcaccgcctacatggaactgagccggctgagatccgatgacaccgccgtgtactattgcgctagaagaggcggagtggattggggccagggaacactggttaccgtgtctagtacgcgtgcctctacaaagggaccctccgtgtttcctctggctcccagcagcaagtctacaagcggaggaacagccgctctgggctgcctggtcaaggattactttcccgagcctgtgaccgtgtcctggaatagcggagcactgacaagcggcgtgcacacctttccagccgtgctgcaaagcagcggcctgtactctctgagcagcgtggtcacagtgcctagctctagcctgggcacccagacctacatctgcaatgtgaaccacaagcctagcaacaccaaggtggacaagagagtggaacccaagagctgtatccccgaggacacattcttcccaagccccgagagcagctgcgacgtgaagctggtggaaaagagcttcgagacagacaccaacctgaacttccagaacctgagcgtgatcggcttcagaatcctgctgctgaaagtggccggctttaacctgctgatgaccctgcggctgtggtccagc

SEQ ID NO: 3459 - DNA, 2697 bp, Artificial Sequence
  Synthetic Polynucloetide
atggccttaccagtgaccgccttgctcctgccgctggccttgctgctccacgccgccaggccggaagtgcagctggttgaatctggcggaggactggttcagcctggcggatctctgagactgtcttgtgccgccagcggcttcagcttcagcgacttttggatgagctgggtccgacaggcccctggcaaaggacttgaatgggtcgccacaatcagccaggccggcagcgagaaggactacgtggactctgtgaagggcagattcaccatcagccgggacaacgccaagaagtccctgtacctccagatgaacagcctgagagccgaggacaccgccgtgtactattgtgcctctggcgtgtacagcttcgactacagaggccagggcaccctggtcacagtctcttctggtaccggcggaggcggatctggcggcggaggtagcggtggcggaggatctgaattcgacatccagatgacacagagccctagcagcctgtctgccagcgtgggagacagagtgaccatcacatgcaaggccagccaggatgtgtctacagccgtggcctggttccagcagaagcctggaaaagcccctaagctgctgatctacagccccagctacagatacaccggcgtgcccagcagattttctggcagcggctctggcaccgacttcaccctgacaatatccagcctccagcctgaggacttcacctactactgccagcagctctacagcaccccttacacattcggccagggcaccaaggtggaaatcaaactcgagggacagcctaaggccaatcctaccgtgacactgttccctccaagcagcgaagaactccaggccaacaaggccacacttgtgtgcctgatctccgacttctaccctggggctgtgacagtggcttggaaggccgatggatctcctgtgaaagccggcgtggaaaccaccaagccatccaagcagagcaacaacaaatacgccgccagctcctacctgagcctgacacctgagcagtggaagtcccacagatcctacagctgccaagtgacccacgaaggcagcaccgtggaaaagacagtggcccctacagagtgcagcggcagagccgattgcggctttaccagcgagagctaccagcagggcgtgctgagcgccaccatcctgtacgagatcctgctgggcaaggccaccctgtacgccgtgctggtgtctgccctggtgctgatggctatggtcaagcggaaggacagccggggacgcgccaagagaagcggatctggcgtgaagcagaccctgaatttcgacctgctgaagctggctggcgacgtggaatccaacccaggccctactagtatggactggatttggcgcatccttttccttgtcggcgctgctaccggcgcgcattccgggccccagctccagctgcaagagtctggacctggcctggtcaagcctagcgagacactgagcctgacctgtaccgtgtccggcgatagcatcagcagcggcgattactactggggctggatcagacagcctcctggcaaaggactggaatggatcggccacatctactacagcggcgtgacctactacaaccccagcctgaagtccagagtgaccatcagcgtggacaccagccggaaccagttctccctgaagctgtctagcgtgacagccgccgataccgccgtgtactactgcaccagagaggacagcagcaactggcggagtagaggccagggaacactggtcacagttagctctggatccggcggaggcggaagtggaggcggaggatctggcggcggaggctctttcgaagaagtgcaactggttcagagcggagccgaagtgaagaaacctggggcctctgtgaaggtgtcctgcaaagccagcggctacacctttaccgactactacctggacgtggtcgtgcggcaagctcctggacaaggactggaatggatcggcagagtgaacccctacaacggcggcaccatctacaaccagaaattcaagggaagagtgaccctgaccagagacaccagcacctccacagcctacctggaactgagcagcctgagaagcgaagataccgccgtgtactactgcgccagggaccactacagatatgaccctctgctggactactggggccagggaaccctggttacagtgtctagtacgcgtgcctctacaaagggaccctccgtgtttcctctggctcccagcagcaagtctacaagcggaggaacagccgctctgggctgcctggtcaaggattactttcccgagcctgtgaccgtgtcctggaatagcggagcactgacaagcggcgtgcacacctttccagccgtgctgcaaagcagcggcctgtactctctgagcagcgtggtcacagtgcctagctctagcctgggcacccagacctacatctgcaatgtgaaccacaagcctagcaacaccaaggtggacaagagagtggaacccaagagctgtatccccgaggacacattcttcccaagccccgagagcagctgcgacgtgaagctggtggaaaagagcttcgagacagacaccaacctgaacttccagaacctgagcgtgatcggcttcagaatcctgctgctgaaagtggccggctttaacctgctgatgaccctgcggctgtggtccagc

SEQ ID NO: 3460 - DNA, 2715 bp, Artificial Sequence
  Synthetic Polynucloetide
atggccttaccagtgaccgccttgctcctgccgctggccttgctgctccacgccgccaggccggaagtgcagctggttgaatctggcggaggactggttcagcctggcggatctctgagactgtcttgtgccgccagcggcttcagcttcagcgacttttggatgagctgggtccgacaggcccctggcaaaggacttgaatgggtcgccacaatcagccaggccggcagcgagaaggactacgtggactctgtgaagggcagattcaccatcagccgggacaacgccaagaagtccctgtacctccagatgaacagcctgagagccgaggacaccgccgtgtactattgtgcctctggcgtgtacagcttcgactacagaggccagggcaccctggtcacagtctcttctggtaccggcggaggcggatctggcggcggaggtagcggtggcggaggatctgaattcgacatccagatgacacagagccctagcagcctgtctgccagcgtgggagacagagtgaccatcacctgtagagccagccagagcgtgtccaccagcagctacaactacatgcactggtatcagcagaagcccggcaagcctcctaagctgctgattaagtacgccagcaacctggaaagcggcgtgcccagcagattttctggcagcggctctggcaccgacttcaccctgacaatatccagcctccagcctgaggacttcgccacctactactgtcagcactcctgggagatccctctgacattcggccagggcaccaaggtggaaatcaaactcgagggacagcctaaggccaatcctaccgtgacactgttccctccaagcagcgaagaactccaggccaacaaggccacacttgtgtgcctgatctccgacttctaccctggggctgtgacagtggcttggaaggccgatggatctcctgtgaaagccggcgtggaaaccaccaagccatccaagcagagcaacaacaaatacgccgccagctcctacctgagcctgacacctgagcagtggaagtcccacagatcctacagctgccaagtgacccacgaaggcagcaccgtggaaaagacagtggcccctacagagtgcagcggcagagccgattgcggctttaccagcgagagctaccagcagggcgtgctgagcgccaccatcctgtacgagatcctgctgggcaaggccaccctgtacgccgtgctggtgtctgccctggtgctgatggctatggtcaagcggaaggacagccggggacgcgccaagagaagcggatctggcgtgaagcagaccctgaatttcgacctgctgaagctggctggcgacgtggaatccaacccaggccctactagtatggactggatttggcgcatccttttccttgtcggcgctgctaccggcgcgcattccgggccccagctccagctgcaagagtctggacctggcctggtcaagcctagcgagacactgagcctgacctgtaccgtgtccggcgatagcatcagcagcggcgattactactggggctggatcagacagcctcctggcaaaggactggaatggatcggccacatctactacagcggcgtgacctactacaaccccagcctgaagtccagagtgaccatcagcgtggacaccagccggaaccagttctccctgaagctgtctagcgtgacagccgccgataccgccgtgtactactgcaccagagaggacagcagcaactggcggagtagaggccagggaacactggtcacagttagctctggatccggcggaggcggaagtggaggcggaggatctggcggcggaggctctttcgaagaagtgcaactggttcagagcggagccgaagtgaagaaacctggggcctctgtgaaggtgtcctgcaaggccagcggctacagcttcaccgactattatatgcactgggtccgacaggctccaggccagggacttgagtggatcggcagaatcaacccctacaacggcgctgccttctacagccagaacttcaaggatagagtgaccctgaccgtggacaccagcaccagcacagcctacctggaactgagcagcctgagaagcgaggacaccgccgtgtactactgcgccattgagagaggcgctgacctggaaggctacgctatggattattggggccagggaaccctggtcaccgtgtcatctacgcgtgcctctacaaagggaccctccgtgtttcctctggctcccagcagcaagtctacaagcggaggaacagccgctctgggctgcctggtcaaggattactttcccgagcctgtgaccgtgtcctggaatagcggagcactgacaagcggcgtgcacacctttccagccgtgctgcaaagcagcggcctgtactctctgagcagcgtggtcacagtgcctagctctagcctgggcacccagacctacatctgcaatgtgaaccacaagcctagcaacaccaaggtggacaagagagtggaacccaagagctgtatccccgaggacacattcttcccaagccccgagagcagctgcgacgtgaagctggtggaaaagagcttcgagacagacaccaacctgaacttccagaacctgagcgtgatcggcttcagaatcctgctgctgaaagtggccggctttaacctgctgatgaccctgcggctgtggtccagc

SEQ ID NO: 3461 - DNA, 2709 bp, Artificial Sequence
  Synthetic Polynucloetide
atggccttaccagtgaccgccttgctcctgccgctggccttgctgctccacgccgccaggccggaagtgcagctggttgaatctggcggaggactggttcagcctggcggatctctgagactgtcttgtgccgccagcggcttcagcttcagcgacttttggatgagctgggtccgacaggcccctggcaaaggacttgaatgggtcgccacaatcagccaggccggcagcgagaaggactacgtggactctgtgaagggcagattcaccatcagccgggacaacgccaagaagtccctgtacctccagatgaacagcctgagagccgaggacaccgccgtgtactattgtgcctctggcgtgtacagcttcgactacagaggccagggcaccctggtcacagtctcttctggtaccggcggaggcggatctggcggcggaggtagcggtggcggaggatctgaattcgagatcgtgctgacacagtctccagccacactgagcgcttctccaggcgagagagtgaccctgacctgtagagccagcagcaacgtgatctccagctacgtgcactggtatcagcagaagcctggcagcagccccagactgtttctgtacagcaccagcaatctggcctccggcgtgccaagcagattttctggctctggcagcggcaccgacttcacctttaccatctctagcctggaagccgaggacgccgccacctactactgtcagcagtacagcggctaccctctgaccttcggccagggcacaagactggaaatcaaactcgagggacagcctaaggccaatcctaccgtgacactgttccctccaagcagcgaagaactccaggccaacaaggccacacttgtgtgcctgatctccgacttctaccctggggctgtgacagtggcttggaaggccgatggatctcctgtgaaagccggcgtggaaaccaccaagccatccaagcagagcaacaacaaatacgccgccagctcctacctgagcctgacacctgagcagtggaagtcccacagatcctacagctgccaagtgacccacgaaggcagcaccgtggaaaagacagtggcccctacagagtgcagcggcagagccgattgcggctttaccagcgagagctaccagcagggcgtgctgagcgccaccatcctgtacgagatcctgctgggcaaggccaccctgtacgccgtgctggtgtctgccctggtgctgatggctatggtcaagcggaaggacagccggggacgcgccaagagaagcggatctggcgtgaagcagaccctgaatttcgacctgctgaagctggctggcgacgtggaatccaacccaggccctactagtatggactggatttggcgcatccttttccttgtcggcgctgctaccggcgcgcattccgggccccagctccagctgcaagagtctggacctggcctggtcaagcctagcgagacactgagcctgacctgtaccgtgtccggcgatagcatcagcagcggcgattactactggggctggatcagacagcctcctggcaaaggactggaatggatcggccacatctactacagcggcgtgacctactacaaccccagcctgaagtccagagtgaccatcagcgtggacaccagccggaaccagttctccctgaagctgtctagcgtgacagccgccgataccgccgtgtactactgcaccagagaggacagcagcaactggcggagtagaggccagggaacactggtcacagttagctctggatccggcggaggcggaagtggaggcggaggatctggcggcggaggctctttcgaacaagttcagctgcaagagtctggccctggcctggtcaagcctagcgaaacactgagcctgacctgcgccgtgtctggctactctatcaccagcgcctactattggaactggatcagacagcctcctggcaaaggactggaatggatcggctacatcagctacgacggcagaaacaactacaaccccagcctgaagaaccggatcaccatcaatcccgacaccagcaagaaccagttcagcctccagctgaacagcgtgacccctgaggataccgccgtgtactactgtgccagagaaggcgactacgacgtgggcaactactacgctatggactactggggccagggaaccctggtcacagtctcttctacgcgtgcctctacaaagggaccctccgtgtttcctctggctcccagcagcaagtctacaagcggaggaacagccgctctgggctgcctggtcaaggattactttcccgagcctgtgaccgtgtcctggaatagcggagcactgacaagcggcgtgcacacctttccagccgtgctgcaaagcagcggcctgtactctctgagcagcgtggtcacagtgcctagctctagcctgggcacccagacctacatctgcaatgtgaaccacaagcctagcaacaccaaggtggacaagagagtggaacccaagagctgtatccccgaggacacattcttcccaagccccgagagcagctgcgacgtgaagctggtggaaaagagcttcgagacagacaccaacctgaacttccagaacctgagcgtgatcggcttcagaatcctgctgctgaaagtggccggctttaacctgctgatgaccctgcggctgtggtccagc

SEQ ID NO: 3462 - DNA, 2709 bp, Artificial Sequence
  Synthetic Polynucloetide
atggccttaccagtgaccgccttgctcctgccgctggccttgctgctccacgccgccaggccggaagtgcagctggttgaatctggcggaggactggttcagcctggcggatctctgagactgtcttgtgccgccagcggcttcagcttcagcgacttttggatgagctgggtccgacaggcccctggcaaaggacttgaatgggtcgccacaatcagccaggccggcagcgagaaggactacgtggactctgtgaagggcagattcaccatcagccgggacaacgccaagaagtccctgtacctccagatgaacagcctgagagccgaggacaccgccgtgtactattgtgcctctggcgtgtacagcttcgactacagaggccagggcaccctggtcacagtctcttctggtaccggcggaggcggatctggcggcggaggtagcggtggcggaggatctgaattcgagatcgtgctgacacagtctcccgccacactgtcactgtctccaggcgaaagagccacactgagctgtagagccagcagcaacgtgatctccagctacgtgcactggtatcagcagaagcctggacaggcccctcggctgctgatctacagcacaagcaatctggcctctggcatccccgccagattttctggctctggaagcggcaccgacttcaccctgaccataagcagcctggaacctgaggacttcgccgtgtactactgccagcagtatagcggctaccctctgaccttcggccagggcacaagactggaaatcaaactcgagggacagcctaaggccaatcctaccgtgacactgttccctccaagcagcgaagaactccaggccaacaaggccacacttgtgtgcctgatctccgacttctaccctggggctgtgacagtggcttggaaggccgatggatctcctgtgaaagccggcgtggaaaccaccaagccatccaagcagagcaacaacaaatacgccgccagctcctacctgagcctgacacctgagcagtggaagtcccacagatcctacagctgccaagtgacccacgaaggcagcaccgtggaaaagacagtggcccctacagagtgcagcggcagagccgattgcggctttaccagcgagagctaccagcagggcgtgctgagcgccaccatcctgtacgagatcctgctgggcaaggccaccctgtacgccgtgctggtgtctgccctggtgctgatggctatggtcaagcggaaggacagccggggacgcgccaagagaagcggatctggcgtgaagcagaccctgaatttcgacctgctgaagctggctggcgacgtggaatccaacccaggccctactagtatggactggatttggcgcatccttttccttgtcggcgctgctaccggcgcgcattccgggccccagctccagctgcaagagtctggacctggcctggtcaagcctagcgagacactgagcctgacctgtaccgtgtccggcgatagcatcagcagcggcgattactactggggctggatcagacagcctcctggcaaaggactggaatggatcggccacatctactacagcggcgtgacctactacaaccccagcctgaagtccagagtgaccatcagcgtggacaccagccggaaccagttctccctgaagctgtctagcgtgacagccgccgataccgccgtgtactactgcaccagagaggacagcagcaactggcggagtagaggccagggaacactggtcacagttagctctggatccggcggaggcggaagtggaggcggaggatctggcggcggaggctctttcgaagaagtgcaactggtggaaagtggcggcggactggtgcaacctggaagaagcctgagactgtcctgtgccgccagcggctactctatcacaagcgcctactactggaactgggtccgacaggctcctggcaaaggactggaatgggtgtcctacatcagctacgacggcagaaacaactacaaccccagcctgaagaaccgcttcaccatcagccgggacaacgccaagaagtccctgtacctccagatgaacagcctgagagccgaggacacagccctgtactattgcgccaaagagggcgactacgacgtcggcaactactacgctatggactactggggccagggaaccaccgtgactgtctcttctacgcgtgcctctacaaagggaccctccgtgtttcctctggctcccagcagcaagtctacaagcggaggaacagccgctctgggctgcctggtcaaggattactttcccgagcctgtgaccgtgtcctggaatagcggagcactgacaagcggcgtgcacacctttccagccgtgctgcaaagcagcggcctgtactctctgagcagcgtggtcacagtgcctagctctagcctgggcacccagacctacatctgcaatgtgaaccacaagcctagcaacaccaaggtggacaagagagtggaacccaagagctgtatccccgaggacacattcttcccaagccccgagagcagctgcgacgtgaagctggtggaaaagagcttcgagacagacaccaacctgaacttccagaacctgagcgtgatcggcttcagaatcctgctgctgaaagtggccggctttaacctgctgatgaccctgcggctgtggtccagc

SEQ ID NO: 3463 - DNA, 2706 bp, Artificial Sequence
  Synthetic Polynucloetide
atggccttaccagtgaccgccttgctcctgccgctggccttgctgctccacgccgccaggccggaagtgcagctggttgaatctggcggaggactggttcagcctggcggatctctgagactgtcttgtgccgccagcggcttcagcttcagcgacttttggatgagctgggtccgacaggcccctggcaaaggacttgaatgggtcgccacaatcagccaggccggcagcgagaaggactacgtggactctgtgaagggcagattcaccatcagccgggacaacgccaagaagtccctgtacctccagatgaacagcctgagagccgaggacaccgccgtgtactattgtgcctctggcgtgtacagcttcgactacagaggccagggcaccctggtcacagtctcttctggtaccggcggaggcggatctggcggcggaggtagcggtggcggaggatctgaattcgacgtggtcatgacacagaccccactgagcctgcctgtgtctctgggagatcaggccagcatctcctgtagaagcagccagagcctggtgcacagcaacggcaacacctacctgcggtggtatctccagaagcctggacagagccccaaggtgctgatctacaaggtgtccaacagagtgtccggcgtgcccgatagattttctggcagcggctctggcaccgacttcaccctgaagatcaatagagtggaagccgaggacctgggcgtgtacttctgtagccagagcacccatgtgccttggacctttggcggaggcaccaagctggaaatcaagctcgagggacagcctaaggccaatcctaccgtgacactgttccctccaagcagcgaagaactccaggccaacaaggccacacttgtgtgcctgatctccgacttctaccctggggctgtgacagtggcttggaaggccgatggatctcctgtgaaagccggcgtggaaaccaccaagccatccaagcagagcaacaacaaatacgccgccagctcctacctgagcctgacacctgagcagtggaagtcccacagatcctacagctgccaagtgacccacgaaggcagcaccgtggaaaagacagtggcccctacagagtgcagcggcagagccgattgcggctttaccagcgagagctaccagcagggcgtgctgagcgccaccatcctgtacgagatcctgctgggcaaggccaccctgtacgccgtgctggtgtctgccctggtgctgatggctatggtcaagcggaaggacagccggggacgcgccaagagaagcggatctggcgtgaagcagaccctgaatttcgacctgctgaagctggctggcgacgtggaatccaacccaggccctactagtatggactggatttggcgcatccttttccttgtcggcgctgctaccggcgcgcattccgggccccagctccagctgcaagagtctggacctggcctggtcaagcctagcgagacactgagcctgacctgtaccgtgtccggcgatagcatcagcagcggcgattactactggggctggatcagacagcctcctggcaaaggactggaatggatcggccacatctactacagcggcgtgacctactacaaccccagcctgaagtccagagtgaccatcagcgtggacaccagccggaaccagttctccctgaagctgtctagcgtgacagccgccgataccgccgtgtactactgcaccagagaggacagcagcaactggcggagtagaggccagggaacactggtcacagttagctctggatccggcggaggcggaagtggaggcggaggatctggcggcggaggctctttcgaaggcgtgaagctggacgagacaggcggaggacttgttcaacctggcggagccatgaagctgagctgtgtgaccagcggctttaccttcggccactactggatgaactgggtccgacagtcccctgagaaaggactggaatgggtcgcccagttcagaaacaagccctacaactacgaaacctactacagcgacagcgtgaagggcagattcaccatcagccgggacgacagcaagtccagcgtgtacctccagatgaacaacctgcgcgtggaagataccggcatctactactgtaccggggccagctacggcatggaatatctcggccagggcaccagcgtgaccgtgtctacaacgcgtgcctctacaaagggaccctccgtgtttcctctggctcccagcagcaagtctacaagcggaggaacagccgctctgggctgcctggtcaaggattactttcccgagcctgtgaccgtgtcctggaatagcggagcactgacaagcggcgtgcacacctttccagccgtgctgcaaagcagcggcctgtactctctgagcagcgtggtcacagtgcctagctctagcctgggcacccagacctacatctgcaatgtgaaccacaagcctagcaacaccaaggtggacaagagagtggaacccaagagctgtatccccgaggacacattcttcccaagccccgagagcagctgcgacgtgaagctggtggaaaagagcttcgagacagacaccaacctgaacttccagaacctgagcgtgatcggcttcagaatcctgctgctgaaagtggccggctttaacctgctgatgaccctgcggctgtggtccagc

SEQ ID NO: 3464 - DNA, 2724 bp, Artificial Sequence
  Synthetic Polynucloetide
atggccttaccagtgaccgccttgctcctgccgctggccttgctgctccacgccgccaggccggaagtgcagctggttgaatctggcggaggactggttcagcctggcggatctctgagactgtcttgtgccgccagcggcttcagcttcagcgacttttggatgagctgggtccgacaggcccctggcaaaggacttgaatgggtcgccacaatcagccaggccggcagcgagaaggactacgtggactctgtgaagggcagattcaccatcagccgggacaacgccaagaagtccctgtacctccagatgaacagcctgagagccgaggacaccgccgtgtactattgtgcctctggcgtgtacagcttcgactacagaggccagggcaccctggtcacagtctcttctggtaccggcggaggcggatctggcggcggaggtagcggtggcggaggatctgaattccaggtgcaactggtggaatctggcggcaatctggttcagcctggcggctctctgagactgtcttgtgccgccagcggcttcaccttcggcagcttttctatgagctgggtccgacaagctcctggcggaggacttgaatgggtggcaggactgtctgccagaagcagcctgacacactacgccgactctgtgaagggcagattcaccatcagccgggacaacgccaagaacagcgtgtacctccagatgaacagcctgagagtggaagataccgccgtgtactactgcgccagaagaagctacgacagcagcggctactggggccacttctacagctacatggatgtgtggggccagggcaccctggttacagtttctctcgagggacagcctaaggccaatcctaccgtgacactgttccctccaagcagcgaagaactccaggccaacaaggccacacttgtgtgcctgatctccgacttctaccctggggctgtgacagtggcttggaaggccgatggatctcctgtgaaagccggcgtggaaaccaccaagccatccaagcagagcaacaacaaatacgccgccagctcctacctgagcctgacacctgagcagtggaagtcccacagatcctacagctgccaagtgacccacgaaggcagcaccgtggaaaagacagtggcccctacagagtgcagcggcagagccgattgcggctttaccagcgagagctaccagcagggcgtgctgagcgccaccatcctgtacgagatcctgctgggcaaggccaccctgtacgccgtgctggtgtctgccctggtgctgatggctatggtcaagcggaaggacagccggggacgcgccaagagaagcggatctggcgtgaagcagaccctgaatttcgacctgctgaagctggctggcgacgtggaatccaacccaggccctactagtatggactggatttggcgcatccttttccttgtcggcgctgctaccggcgcgcattccgggccccagctccagctgcaagagtctggacctggcctggtcaagcctagcgagacactgagcctgacctgtaccgtgtccggcgatagcatcagcagcggcgattactactggggctggatcagacagcctcctggcaaaggactggaatggatcggccacatctactacagcggcgtgacctactacaaccccagcctgaagtccagagtgaccatcagcgtggacaccagccggaaccagttctccctgaagctgtctagcgtgacagccgccgataccgccgtgtactactgcaccagagaggacagcagcaactggcggagtagaggccagggaacactggtcacagttagctctggatccggcggaggcggaagtggaggcggaggatctggcggcggaggctctttcgaatctgtgctgacccagcctagctccgtgtctgctgctcctggacagaaagtgaccatctcctgtagcggcagcaccagcaacatcggcaacaactacgtgtcctggtatcagcagcaccccggcaaggcccctaagctgatgatctacgacgtgtccaagaggcccagcggcgtgccagatagattttccggcagcaagagcggcaacagcgccagcctggatattagcggactccagtctgaggacgaggccgactactattgcgccgcctgggatgatagcctgagcgagtttctgtttggcaccggcaccaagctgacagtgcttggaacgcgtgcctctacaaagggaccctccgtgtttcctctggctcccagcagcaagtctacaagcggaggaacagccgctctgggctgcctggtcaaggattactttcccgagcctgtgaccgtgtcctggaatagcggagcactgacaagcggcgtgcacacctttccagccgtgctgcaaagcagcggcctgtactctctgagcagcgtggtcacagtgcctagctctagcctgggcacccagacctacatctgcaatgtgaaccacaagcctagcaacaccaaggtggacaagagagtggaacccaagagctgtatccccgaggacacattcttcccaagccccgagagcagctgcgacgtgaagctggtggaaaagagcttcgagacagacaccaacctgaacttccagaacctgagcgtgatcggcttcagaatcctgctgctgaaagtggccggctttaacctgctgatgaccctgcggctgtggtccagc

SEQ ID NO: 3465 - DNA, 2709 bp, Artificial Sequence
  Synthetic Polynucloetide
atggccttaccagtgaccgccttgctcctgccgctggccttgctgctccacgccgccaggccggaagtgcagctggttgaatctggcggaggactggttcagcctggcggatctctgagactgtcttgtgccgccagcggcttcagcttcagcgacttttggatgagctgggtccgacaggcccctggcaaaggacttgaatgggtcgccacaatcagccaggccggcagcgagaaggactacgtggactctgtgaagggcagattcaccatcagccgggacaacgccaagaagtccctgtacctccagatgaacagcctgagagccgaggacaccgccgtgtactattgtgcctctggcgtgtacagcttcgactacagaggccagggcaccctggtcacagtctcttctggtaccggcggaggcggatctggcggcggaggtagcggtggcggaggatctgaattcgacgtggtcatgacacagagcccttctagcctgtctgccagcgtgggcgacagagtgacaatcacctgtcagagcagcctggacatcagccactacctgaactggtatcagcagaagcccggcaaggcccctaagctgctgatctacgacgccagcaatctggaaaccggcgtgcccagcagattttctggcagcggaagcggcacccacttcaccttcacaatatccagcctccagcctgaggacttcgccacctactactgccagcagtacgacaacctgcctctgacctttggcggaggcaccaagctggaaatcaagagactcgagggacagcctaaggccaatcctaccgtgacactgttccctccaagcagcgaagaactccaggccaacaaggccacacttgtgtgcctgatctccgacttctaccctggggctgtgacagtggcttggaaggccgatggatctcctgtgaaagccggcgtggaaaccaccaagccatccaagcagagcaacaacaaatacgccgccagctcctacctgagcctgacacctgagcagtggaagtcccacagatcctacagctgccaagtgacccacgaaggcagcaccgtggaaaagacagtggcccctacagagtgcagcggcagagccgattgcggctttaccagcgagagctaccagcagggcgtgctgagcgccaccatcctgtacgagatcctgctgggcaaggccaccctgtacgccgtgctggtgtctgccctggtgctgatggctatggtcaagcggaaggacagccggggacgcgccaagagaagcggatctggcgtgaagcagaccctgaatttcgacctgctgaagctggctggcgacgtggaatccaacccaggccctactagtatggactggatttggcgcatccttttccttgtcggcgctgctaccggcgcgcattccgggccccagctccagctgcaagagtctggacctggcctggtcaagcctagcgagacactgagcctgacctgtaccgtgtccggcgatagcatcagcagcggcgattactactggggctggatcagacagcctcctggcaaaggactggaatggatcggccacatctactacagcggcgtgacctactacaaccccagcctgaagtccagagtgaccatcagcgtggacaccagccggaaccagttctccctgaagctgtctagcgtgacagccgccgataccgccgtgtactactgcaccagagaggacagcagcaactggcggagtagaggccagggaacactggtcacagttagctctggatccggcggaggcggaagtggaggcggaggatctggcggcggaggctctttcgaacaagttcaactggttcaatcaggcggaggcgtggtgcaacctggtggctctctgagagtgtcttgtgctgcctctggcgtgaccctgagcgactatggaatgcactgggtccgacaggcccctggcaaaggacttgagtgggtcgccttcatcagaaacgacggcagcgacaagtattacgccgacagcgtgaagggcagattcaccatcagccgggacaacagcgagaaaaccgtgtctctccagatgtctagcctgagagccgaggacaccgccgtgtactactgtgccaagaatggcgagagcggccctctggactactggtatctggatctgtggggcagaggcaccctggtcacagtctcttctacgcgtgcctctacaaagggaccctccgtgtttcctctggctcccagcagcaagtctacaagcggaggaacagccgctctgggctgcctggtcaaggattactttcccgagcctgtgaccgtgtcctggaatagcggagcactgacaagcggcgtgcacacctttccagccgtgctgcaaagcagcggcctgtactctctgagcagcgtggtcacagtgcctagctctagcctgggcacccagacctacatctgcaatgtgaaccacaagcctagcaacaccaaggtggacaagagagtggaacccaagagctgtatccccgaggacacattcttcccaagccccgagagcagctgcgacgtgaagctggtggaaaagagcttcgagacagacaccaacctgaacttccagaacctgagcgtgatcggcttcagaatcctgctgctgaaagtggccggctttaacctgctgatgaccctgcggctgtggtccagc

SEQ ID NO: 3466 - DNA, 2721 bp, Artificial Sequence
  Synthetic Polynucloetide
atggccttaccagtgaccgccttgctcctgccgctggccttgctgctccacgccgccaggccggaagtgcagctggttgaatctggcggaggactggttcagcctggcggatctctgagactgtcttgtgccgccagcggcttcagcttcagcgacttttggatgagctgggtccgacaggcccctggcaaaggacttgaatgggtcgccacaatcagccaggccggcagcgagaaggactacgtggactctgtgaagggcagattcaccatcagccgggacaacgccaagaagtccctgtacctccagatgaacagcctgagagccgaggacaccgccgtgtactattgtgcctctggcgtgtacagcttcgactacagaggccagggcaccctggtcacagtctcttctggtaccggcggaggcggatctggcggcggaggtagcggtggcggaggatctgaattcagctacgagctgacacagcctccatccgtgtctggcacacctggacagagagtggctatctcctgtagcggcagcagcagcaacatcggcaccagaatggtcacctggtatcagcacgtgccaggcacagcccctaagctgctgatcttcaacaacaaccagcggcctagcggcgtgcccgatagattttctgccagcaagagcggcacaagcgccagcctggctatcatcggactccagtctgacgacgaggccgactactactgtgccacctgggacgacaacgtgaagtcctacgtgttcggcaccggcaccaaagtgacagtgcttggaagtagactcgagggacagcctaaggccaatcctaccgtgacactgttccctccaagcagcgaagaactccaggccaacaaggccacacttgtgtgcctgatctccgacttctaccctggggctgtgacagtggcttggaaggccgatggatctcctgtgaaagccggcgtggaaaccaccaagccatccaagcagagcaacaacaaatacgccgccagctcctacctgagcctgacacctgagcagtggaagtcccacagatcctacagctgccaagtgacccacgaaggcagcaccgtggaaaagacagtggcccctacagagtgcagcggcagagccgattgcggctttaccagcgagagctaccagcagggcgtgctgagcgccaccatcctgtacgagatcctgctgggcaaggccaccctgtacgccgtgctggtgtctgccctggtgctgatggctatggtcaagcggaaggacagccggggacgcgccaagagaagcggatctggcgtgaagcagaccctgaatttcgacctgctgaagctggctggcgacgtggaatccaacccaggccctactagtatggactggatttggcgcatccttttccttgtcggcgctgctaccggcgcgcattccgggccccagctccagctgcaagagtctggacctggcctggtcaagcctagcgagacactgagcctgacctgtaccgtgtccggcgatagcatcagcagcggcgattactactggggctggatcagacagcctcctggcaaaggactggaatggatcggccacatctactacagcggcgtgacctactacaaccccagcctgaagtccagagtgaccatcagcgtggacaccagccggaaccagttctccctgaagctgtctagcgtgacagccgccgataccgccgtgtactactgcaccagagaggacagcagcaactggcggagtagaggccagggaacactggtcacagttagctctggatccggcggaggcggaagtggaggcggaggatctggcggcggaggctctttcgaacttgaaatggcccaggttcagctccagcagtggggagctggactgctgaagcctagcgagacactgagcctgacctgtgctgtgtacggcggcagcttcagcggctactactggtcctggatcagacagcctcctggcaaaggactggaatggatcggcgagatcaaccacagcggctccaccaactacaaccccagcctgaagtccagagtgaccatcagcgtggacaccagcaagaaccagttctccctgaagctgagcagcgtgacagccgctgataccgccgtgtactattgcgctagagcccctcagtcttggtacgtgggagatgtgtggggccagggcacactggttacagtgtcatctacgcgtgcctctacaaagggaccctccgtgtttcctctggctcccagcagcaagtctacaagcggaggaacagccgctctgggctgcctggtcaaggattactttcccgagcctgtgaccgtgtcctggaatagcggagcactgacaagcggcgtgcacacctttccagccgtgctgcaaagcagcggcctgtactctctgagcagcgtggtcacagtgcctagctctagcctgggcacccagacctacatctgcaatgtgaaccacaagcctagcaacaccaaggtggacaagagagtggaacccaagagctgtatccccgaggacacattcttcccaagccccgagagcagctgcgacgtgaagctggtggaaaagagcttcgagacagacaccaacctgaacttccagaacctgagcgtgatcggcttcagaatcctgctgctgaaagtggccggctttaacctgctgatgaccctgcggctgtggtccagc

SEQ ID NO: 3467 - DNA, 2712 bp, Artificial Sequence
  Synthetic Polynucloetide
atggccttaccagtgaccgccttgctcctgccgctggccttgctgctccacgccgccaggccggaagtgcagctggttgaatctggcggaggactggttcagcctggcggatctctgagactgtcttgtgccgccagcggcttcagcttcagcgacttttggatgagctgggtccgacaggcccctggcaaaggacttgaatgggtcgccacaatcagccaggccggcagcgagaaggactacgtggactctgtgaagggcagattcaccatcagccgggacaacgccaagaagtccctgtacctccagatgaacagcctgagagccgaggacaccgccgtgtactattgtgcctctggcgtgtacagcttcgactacagaggccagggcaccctggtcacagtctcttctggtaccggcggaggcggatctggcggcggaggtagcggtggcggaggatctgaattccagtctgtgctgacacagcctcctagcctgtctgtggcccctggaaagacagccagcatcacatgcggcggcaacaacatcggcatgaagtccgtgcactggtatcagcagaggccaggacaggctcctgtgctggtcatctactacgacagcgacagaccctctggcatccccggcagattttccggcagcaactctggcaataccgccacactgaccatctccagagtggaagctggcgacgaggccgactactactgccaagtgtgggataccaccggcgatcaccctggctatgtgtttggcaccggcaccaaagtgacagtgcttctcgagggacagcctaaggccaatcctaccgtgacactgttccctccaagcagcgaagaactccaggccaacaaggccacacttgtgtgcctgatctccgacttctaccctggggctgtgacagtggcttggaaggccgatggatctcctgtgaaagccggcgtggaaaccaccaagccatccaagcagagcaacaacaaatacgccgccagctcctacctgagcctgacacctgagcagtggaagtcccacagatcctacagctgccaagtgacccacgaaggcagcaccgtggaaaagacagtggcccctacagagtgcagcggcagagccgattgcggctttaccagcgagagctaccagcagggcgtgctgagcgccaccatcctgtacgagatcctgctgggcaaggccaccctgtacgccgtgctggtgtctgccctggtgctgatggctatggtcaagcggaaggacagccggggacgcgccaagagaagcggatctggcgtgaagcagaccctgaatttcgacctgctgaagctggctggcgacgtggaatccaacccaggccctactagtatggactggatttggcgcatccttttccttgtcggcgctgctaccggcgcgcattccgggccccagctccagctgcaagagtctggacctggcctggtcaagcctagcgagacactgagcctgacctgtaccgtgtccggcgatagcatcagcagcggcgattactactggggctggatcagacagcctcctggcaaaggactggaatggatcggccacatctactacagcggcgtgacctactacaaccccagcctgaagtccagagtgaccatcagcgtggacaccagccggaaccagttctccctgaagctgtctagcgtgacagccgccgataccgccgtgtactactgcaccagagaggacagcagcaactggcggagtagaggccagggaacactggtcacagttagctctggatccggcggaggcggaagtggaggcggaggatctggcggcggaggctctttcgaacaagttcaactggttcagagcggagccgaagtgaagaaacctggcagcagcgtgaaggtgtcctgcaaagcaagcggcggcacctttagcagctacgccatctcttgggtccgacaggcacctggacaaggactggaatggatgggcggcatcatccccatcttcggcacagccaattacgcccagaaattccagggcagagtgaccatcaccgccgacgagtctacaagcaccgcctacatggaactgagcagcctgagaagcgaggacaccgccgtgtactattgtgccagaggcgtgtacggctacagcggctctgccccttatgatgagtggggccagggaaccctggtcaccgtttcttctacgcgtgcctctacaaagggaccctccgtgtttcctctggctcccagcagcaagtctacaagcggaggaacagccgctctgggctgcctggtcaaggattactttcccgagcctgtgaccgtgtcctggaatagcggagcactgacaagcggcgtgcacacctttccagccgtgctgcaaagcagcggcctgtactctctgagcagcgtggtcacagtgcctagctctagcctgggcacccagacctacatctgcaatgtgaaccacaagcctagcaacaccaaggtggacaagagagtggaacccaagagctgtatccccgaggacacattcttcccaagccccgagagcagctgcgacgtgaagctggtggaaaagagcttcgagacagacaccaacctgaacttccagaacctgagcgtgatcggcttcagaatcctgctgctgaaagtggccggctttaacctgctgatgaccctgcggctgtggtccagc

SEQ ID NO: 3468 - DNA, 2706 bp, Artificial Sequence
  Synthetic Polynucloetide
atggccttaccagtgaccgccttgctcctgccgctggccttgctgctccacgccgccaggccggaagtgcagctggttgaatctggcggaggactggttcagcctggcggatctctgagactgtcttgtgccgccagcggcttcagcttcagcgacttttggatgagctgggtccgacaggcccctggcaaaggacttgaatgggtcgccacaatcagccaggccggcagcgagaaggactacgtggactctgtgaagggcagattcaccatcagccgggacaacgccaagaagtccctgtacctccagatgaacagcctgagagccgaggacaccgccgtgtactattgtgcctctggcgtgtacagcttcgactacagaggccagggcaccctggtcacagtctcttctggtaccggcggaggcggatctggcggcggaggtagcggtggcggaggatctgaattcgaggtgcaactggttgagtctggcggaggactggtgcagcctggaagaagcctgagactgtcttgtgccgccagcggcttcaccttcgacgattatgccatgcactgggtccgacaggcccctggcaaaggacttgaatgggtgtccggcatctcctggaacagcggctctatcggctacgccgattccgtgaagggcagattcaccatcagccgggacaacgccaagaacagcctgtacctccagatgaactccctgagagccgaggacacagccctgtactactgcgccaaagacaaaggcggaggctactacgacttttggagcggcagcgattattggggccagggcacactggtcacagtgtctagcctcgagggacagcctaaggccaatcctaccgtgacactgttccctccaagcagcgaagaactccaggccaacaaggccacacttgtgtgcctgatctccgacttctaccctggggctgtgacagtggcttggaaggccgatggatctcctgtgaaagccggcgtggaaaccaccaagccatccaagcagagcaacaacaaatacgccgccagctcctacctgagcctgacacctgagcagtggaagtcccacagatcctacagctgccaagtgacccacgaaggcagcaccgtggaaaagacagtggcccctacagagtgcagcggcagagccgattgcggctttaccagcgagagctaccagcagggcgtgctgagcgccaccatcctgtacgagatcctgctgggcaaggccaccctgtacgccgtgctggtgtctgccctggtgctgatggctatggtcaagcggaaggacagccggggacgcgccaagagaagcggatctggcgtgaagcagaccctgaatttcgacctgctgaagctggctggcgacgtggaatccaacccaggccctactagtatggactggatttggcgcatccttttccttgtcggcgctgctaccggcgcgcattccgggccccagctccagctgcaagagtctggacctggcctggtcaagcctagcgagacactgagcctgacctgtaccgtgtccggcgatagcatcagcagcggcgattactactggggctggatcagacagcctcctggcaaaggactggaatggatcggccacatctactacagcggcgtgacctactacaaccccagcctgaagtccagagtgaccatcagcgtggacaccagccggaaccagttctccctgaagctgtctagcgtgacagccgccgataccgccgtgtactactgcaccagagaggacagcagcaactggcggagtagaggccagggaacactggtcacagttagctctggatccggcggaggcggaagtggaggcggaggatctggcggcggaggctctttcgaatcttctgagctgacacaggaccctgccgtgtctgttgctctgggccagacagtgcggattacctgtcagggcgatagcctgagaagctactacgcctcctggtatcagcagaagccaggccaggctcctgtgctggtcatctacggcaagaacaacagacccagcggcatccccgatagattcagcggaagcagctctggcaataccgccagcctgacaattactggcgctcaggccgaggacgaggccgactactactgcaacagcagagatagcagcggctgggttttcggcggaggcacaaaactgacagtgctgacgcgtgcctctacaaagggaccctccgtgtttcctctggctcccagcagcaagtctacaagcggaggaacagccgctctgggctgcctggtcaaggattactttcccgagcctgtgaccgtgtcctggaatagcggagcactgacaagcggcgtgcacacctttccagccgtgctgcaaagcagcggcctgtactctctgagcagcgtggtcacagtgcctagctctagcctgggcacccagacctacatctgcaatgtgaaccacaagcctagcaacaccaaggtggacaagagagtggaacccaagagctgtatccccgaggacacattcttcccaagccccgagagcagctgcgacgtgaagctggtggaaaagagcttcgagacagacaccaacctgaacttccagaacctgagcgtgatcggcttcagaatcctgctgctgaaagtggccggctttaacctgctgatgaccctgcggctgtggtccagc

SEQ ID NO: 3469 - DNA, 2733 bp, Artificial Sequence
  Synthetic Polynucloetide
atggccttaccagtgaccgccttgctcctgccgctggccttgctgctccacgccgccaggccggaagtgcagctggttgaatctggcggaggactggttcagcctggcggatctctgagactgtcttgtgccgccagcggcttcagcttcagcgacttttggatgagctgggtccgacaggcccctggcaaaggacttgaatgggtcgccacaatcagccaggccggcagcgagaaggactacgtggactctgtgaagggcagattcaccatcagccgggacaacgccaagaagtccctgtacctccagatgaacagcctgagagccgaggacaccgccgtgtactattgtgcctctggcgtgtacagcttcgactacagaggccagggcaccctggtcacagtctcttctggtaccggcggaggcggatctggcggcggaggtagcggtggcggaggatctgaattcgaagtgcagctccagcagtctggacctggcctggttaagcctagccagacactgagcctgacctgtgccatcagcggcgatagcgtgctgagcaacagcgacacctggaactggatcagacagagccctagcagaggactggaatggctgggcagaacctaccacagaagcacttggtacgacgactacgccagctctgtgcggggcagagtgtccatcaatgtggacaccagcaagaaccagtacagcctgcaactgaacgccgtgacacctgaggataccggcgtgtactactgcgccagagacagactccaggacggcaactcttggagcgacgcctttgatgtgtggggccagggcacaatggtcaccgtttctagcctcgagggacagcctaaggccaatcctaccgtgacactgttccctccaagcagcgaagaactccaggccaacaaggccacacttgtgtgcctgatctccgacttctaccctggggctgtgacagtggcttggaaggccgatggatctcctgtgaaagccggcgtggaaaccaccaagccatccaagcagagcaacaacaaatacgccgccagctcctacctgagcctgacacctgagcagtggaagtcccacagatcctacagctgccaagtgacccacgaaggcagcaccgtggaaaagacagtggcccctacagagtgcagcggcagagccgattgcggctttaccagcgagagctaccagcagggcgtgctgagcgccaccatcctgtacgagatcctgctgggcaaggccaccctgtacgccgtgctggtgtctgccctggtgctgatggctatggtcaagcggaaggacagccggggacgcgccaagagaagcggatctggcgtgaagcagaccctgaatttcgacctgctgaagctggctggcgacgtggaatccaacccaggccctactagtatggactggatttggcgcatccttttccttgtcggcgctgctaccggcgcgcattccgggccccagctccagctgcaagagtctggacctggcctggtcaagcctagcgagacactgagcctgacctgtaccgtgtccggcgatagcatcagcagcggcgattactactggggctggatcagacagcctcctggcaaaggactggaatggatcggccacatctactacagcggcgtgacctactacaaccccagcctgaagtccagagtgaccatcagcgtggacaccagccggaaccagttctccctgaagctgtctagcgtgacagccgccgataccgccgtgtactactgcaccagagaggacagcagcaactggcggagtagaggccagggaacactggtcacagttagctctggatccggcggaggcggaagtggaggcggaggatctggcggcggaggctctttcgaacaatctgctctgacacagcctgccagcgtgtcaggatctcctggacagagcatcaccatctcttgcaccggcaccagctctgatgtcggcggctacaattacgtgtcctggtatcagcagcaccccggcaaggcccctaagctgatgatctacgacgtgtccaacagacccagcggcgtgtccaatagattctccggcagcaagagcggcaacaccgccagcctgacaatttctggactgcaagccgaggacgaggccgactactactgtagcagctacaccagcagcagcacactggtgtacgtgttcggcacaggcaccaaagtgaccgtgcttacgcgtgcctctacaaagggaccctccgtgtttcctctggctcccagcagcaagtctacaagcggaggaacagccgctctgggctgcctggtcaaggattactttcccgagcctgtgaccgtgtcctggaatagcggagcactgacaagcggcgtgcacacctttccagccgtgctgcaaagcagcggcctgtactctctgagcagcgtggtcacagtgcctagctctagcctgggcacccagacctacatctgcaatgtgaaccacaagcctagcaacaccaaggtggacaagagagtggaacccaagagctgtatccccgaggacacattcttcccaagccccgagagcagctgcgacgtgaagctggtggaaaagagcttcgagacagacaccaacctgaacttccagaacctgagcgtgatcggcttcagaatcctgctgctgaaagtggccggctttaacctgctgatgaccctgcggctgtggtccagc

SEQ ID NO: 3470 - DNA, 2667 bp, Artificial Sequence
  Synthetic Polynucloetide
atggccttaccagtgaccgccttgctcctgccgctggccttgctgctccacgccgccaggccggaagtgcagctggttgaatctggcggaggactggttcagcctggcggatctctgagactgtcttgtgccgccagcggcttcagcttcagcgacttttggatgagctgggtccgacaggcccctggcaaaggacttgaatgggtcgccacaatcagccaggccggcagcgagaaggactacgtggactctgtgaagggcagattcaccatcagccgggacaacgccaagaagtccctgtacctccagatgaacagcctgagagccgaggacaccgccgtgtactattgtgcctctggcgtgtacagcttcgactacagaggccagggcaccctggtcacagtctcttctggtaccggcggaggcggatctggcggcggaggtagcggtggcggaggatctgaattccaggtgcaactggttcagtctggggccgaagtgaagaaacctggggcctctgtgaaggtgtcctgcaaggcttccggctacacctttaccagctacgacatcaactgggtccgacaggccacaggccaaggactggaatggatgggctggatgaaccccaacagcggcaataccggctacgcccagaaattccagggcagagtgaccatgaccagaaacaccagcatcagcaccgcctacatggaactgagcagcctgagaagcgaggacaccgccgtgtactattgcgccagaggcgacagcaccaaggtggaaatcaaactcgagggacagcctaaggccaatcctaccgtgacactgttccctccaagcagcgaagaactccaggccaacaaggccacacttgtgtgcctgatctccgacttctaccctggggctgtgacagtggcttggaaggccgatggatctcctgtgaaagccggcgtggaaaccaccaagccatccaagcagagcaacaacaaatacgccgccagctcctacctgagcctgacacctgagcagtggaagtcccacagatcctacagctgccaagtgacccacgaaggcagcaccgtggaaaagacagtggcccctacagagtgcagcggcagagccgattgcggctttaccagcgagagctaccagcagggcgtgctgagcgccaccatcctgtacgagatcctgctgggcaaggccaccctgtacgccgtgctggtgtctgccctggtgctgatggctatggtcaagcggaaggacagccggggacgcgccaagagaagcggatctggcgtgaagcagaccctgaatttcgacctgctgaagctggctggcgacgtggaatccaacccaggccctactagtatggactggatttggcgcatccttttccttgtcggcgctgctaccggcgcgcattccgggccccagctccagctgcaagagtctggacctggcctggtcaagcctagcgagacactgagcctgacctgtaccgtgtccggcgatagcatcagcagcggcgattactactggggctggatcagacagcctcctggcaaaggactggaatggatcggccacatctactacagcggcgtgacctactacaaccccagcctgaagtccagagtgaccatcagcgtggacaccagccggaaccagttctccctgaagctgtctagcgtgacagccgccgataccgccgtgtactactgcaccagagaggacagcagcaactggcggagtagaggccagggaacactggtcacagttagctctggatccggcggaggcggaagtggaggcggaggatctggcggcggaggctctttcgaacaatctgtgctgacccagcctagatccgtgtctggctctcctggacagagcgtgaccatctcttgtaccggcaccagctctgatgtcggcggctacaattacgtgtcctggtatcagcagcaccccggcgaagcccctaagctgattatctacgacgccgacaagcggcccagcggcatcagcaatagattcagctctggcaagagcggcaacaccgccagcctgacaatcagcggactccaggtggaagatgaggccgactactactgctgctcctatgccggcggaagcacctgggttttcggaggcggtacaaaagtgaccgtgctgacgcgtgcctctacaaagggaccctccgtgtttcctctggctcccagcagcaagtctacaagcggaggaacagccgctctgggctgcctggtcaaggattactttcccgagcctgtgaccgtgtcctggaatagcggagcactgacaagcggcgtgcacacctttccagccgtgctgcaaagcagcggcctgtactctctgagcagcgtggtcacagtgcctagctctagcctgggcacccagacctacatctgcaatgtgaaccacaagcctagcaacaccaaggtggacaagagagtggaacccaagagctgtatccccgaggacacattcttcccaagccccgagagcagctgcgacgtgaagctggtggaaaagagcttcgagacagacaccaacctgaacttccagaacctgagcgtgatcggcttcagaatcctgctgctgaaagtggccggctttaacctgctgatgaccctgcggctgtggtccagc

SEQ ID NO: 3471 - DNA, 2733 bp, Artificial Sequence
  Synthetic Polynucloetide
atggccttaccagtgaccgccttgctcctgccgctggccttgctgctccacgccgccaggccggaagtgcagctggttgaatctggcggaggactggttcagcctggcggatctctgagactgtcttgtgccgccagcggcttcagcttcagcgacttttggatgagctgggtccgacaggcccctggcaaaggacttgaatgggtcgccacaatcagccaggccggcagcgagaaggactacgtggactctgtgaagggcagattcaccatcagccgggacaacgccaagaagtccctgtacctccagatgaacagcctgagagccgaggacaccgccgtgtactattgtgcctctggcgtgtacagcttcgactacagaggccagggcaccctggtcacagtctcttctggtaccggcggaggcggatctggcggcggaggtagcggtggcggaggatctgaattcgaagtgcagctccagcagtctggacctggcctggttaagcctagccagacactgagcctgacctgtgccatcagcggcgatagcgtgtcctctaatagcgccgcctggaactggatcagacagagccctagcagaggactggaatggctgggcagaacctactaccgcagcaagtggtacagcgactacgccgtgtccgtgaagtcccggatcaccatcaatcccgacaccagcaagaaccagttcagcctgcaactgaacagcgtgacccctgaggataccgccgtgtactactgcgccagagatccctacgacttttggagcggctaccccgacgcctttgacatctggggacagggcacaatggtcaccgtttctagcctcgagggacagcctaaggccaatcctaccgtgacactgttccctccaagcagcgaagaactccaggccaacaaggccacacttgtgtgcctgatctccgacttctaccctggggctgtgacagtggcttggaaggccgatggatctcctgtgaaagccggcgtggaaaccaccaagccatccaagcagagcaacaacaaatacgccgccagctcctacctgagcctgacacctgagcagtggaagtcccacagatcctacagctgccaagtgacccacgaaggcagcaccgtggaaaagacagtggcccctacagagtgcagcggcagagccgattgcggctttaccagcgagagctaccagcagggcgtgctgagcgccaccatcctgtacgagatcctgctgggcaaggccaccctgtacgccgtgctggtgtctgccctggtgctgatggctatggtcaagcggaaggacagccggggacgcgccaagagaagcggatctggcgtgaagcagaccctgaatttcgacctgctgaagctggctggcgacgtggaatccaacccaggccctactagtatggactggatttggcgcatccttttccttgtcggcgctgctaccggcgcgcattccgggccccagctccagctgcaagagtctggacctggcctggtcaagcctagcgagacactgagcctgacctgtaccgtgtccggcgatagcatcagcagcggcgattactactggggctggatcagacagcctcctggcaaaggactggaatggatcggccacatctactacagcggcgtgacctactacaaccccagcctgaagtccagagtgaccatcagcgtggacaccagccggaaccagttctccctgaagctgtctagcgtgacagccgccgataccgccgtgtactactgcaccagagaggacagcagcaactggcggagtagaggccagggaacactggtcacagttagctctggatccggcggaggcggaagtggaggcggaggatctggcggcggaggctctttcgaacaatctgctctgacacagcctgccagcgtgtcaggatctcctggacagagcatcaccatctcttgcaccggcaccagctctgatgtcggcggctacaattacgtgtcctggtatcagcagcaccccggcaaggcccctaaagtgattatcagcgaagtgaacaacagacccagcggcgtgtcccacagattcagcggctctaagtctggcaacaccgccagcctgacaatctctggactgcaagccgaggacgaggccgactacttctgtagcagctacaccagcggcagaaccctgtacgtgttcggcacaggcagcaaagtgacagtgctgggaacgcgtgcctctacaaagggaccctccgtgtttcctctggctcccagcagcaagtctacaagcggaggaacagccgctctgggctgcctggtcaaggattactttcccgagcctgtgaccgtgtcctggaatagcggagcactgacaagcggcgtgcacacctttccagccgtgctgcaaagcagcggcctgtactctctgagcagcgtggtcacagtgcctagctctagcctgggcacccagacctacatctgcaatgtgaaccacaagcctagcaacaccaaggtggacaagagagtggaacccaagagctgtatccccgaggacacattcttcccaagccccgagagcagctgcgacgtgaagctggtggaaaagagcttcgagacagacaccaacctgaacttccagaacctgagcgtgatcggcttcagaatcctgctgctgaaagtggccggctttaacctgctgatgaccctgcggctgtggtccagc

SEQ ID NO: 3472 - DNA, 2730 bp, Artificial Sequence
  Synthetic Polynucloetide
atggccttaccagtgaccgccttgctcctgccgctggccttgctgctccacgccgccaggccggaagtgcagctggttgaatctggcggaggactggttcagcctggcggatctctgagactgtcttgtgccgccagcggcttcagcttcagcgacttttggatgagctgggtccgacaggcccctggcaaaggacttgaatgggtcgccacaatcagccaggccggcagcgagaaggactacgtggactctgtgaagggcagattcaccatcagccgggacaacgccaagaagtccctgtacctccagatgaacagcctgagagccgaggacaccgccgtgtactattgtgcctctggcgtgtacagcttcgactacagaggccagggcaccctggtcacagtctcttctggtaccggcggaggcggatctggcggcggaggtagcggtggcggaggatctgaattccaatctgctctgacacagcctgccagcgcctctggatctcctggacagagcgtgaccatctcctgtaccggcacctcttctgatgtcggcggctacaactacgtgtcctggtatcagcagcaccccggcaaggcccctaagctgatgatctacgacgtgtccaacagacccagcggcgtgtccaatagattctccggcagcaagagcggcaacaccgccagcctgacaatttctggactgcaagccgaggacgaggccgactactactgtagcagctacaccagcagcagcacactgtacgtgttcggcacaggcacccagctcacagttcttctcgagggacagcctaaggccaatcctaccgtgacactgttccctccaagcagcgaagaactccaggccaacaaggccacacttgtgtgcctgatctccgacttctaccctggggctgtgacagtggcttggaaggccgatggatctcctgtgaaagccggcgtggaaaccaccaagccatccaagcagagcaacaacaaatacgccgccagctcctacctgagcctgacacctgagcagtggaagtcccacagatcctacagctgccaagtgacccacgaaggcagcaccgtggaaaagacagtggcccctacagagtgcagcggcagagccgattgcggctttaccagcgagagctaccagcagggcgtgctgagcgccaccatcctgtacgagatcctgctgggcaaggccaccctgtacgccgtgctggtgtctgccctggtgctgatggctatggtcaagcggaaggacagccggggacgcgccaagagaagcggatctggcgtgaagcagaccctgaatttcgacctgctgaagctggctggcgacgtggaatccaacccaggccctactagtatggactggatttggcgcatccttttccttgtcggcgctgctaccggcgcgcattccgggccccagctccagctgcaagagtctggacctggcctggtcaagcctagcgagacactgagcctgacctgtaccgtgtccggcgatagcatcagcagcggcgattactactggggctggatcagacagcctcctggcaaaggactggaatggatcggccacatctactacagcggcgtgacctactacaaccccagcctgaagtccagagtgaccatcagcgtggacaccagccggaaccagttctccctgaagctgtctagcgtgacagccgccgataccgccgtgtactactgcaccagagaggacagcagcaactggcggagtagaggccagggaacactggtcacagttagctctggatccggcggaggcggaagtggaggcggaggatctggcggcggaggctctttcgaagaagtgcagctccagcagtctggacctggcctggttaagcctagccagacactgagcctgacctgtgccatcagcggcgattccatgctgagcaacagcgacacctggaactggatcagacagagccccagcagaggcctggaatggctgggcagaacataccacagaagcacttggtacgacgactacgccagctctgtgcggggcagagtgtccatcaatgtggacaccagcaagaaccagtacagcctgcaactgaacgccgtgacacctgaggataccggcgtgtactactgtgccagagtgcggctccaggacggcaattcttggagcgacgcctttgatgtgtggggccagggcacaatggtcaccgtttctagcacgcgtgcctctacaaagggaccctccgtgtttcctctggctcccagcagcaagtctacaagcggaggaacagccgctctgggctgcctggtcaaggattactttcccgagcctgtgaccgtgtcctggaatagcggagcactgacaagcggcgtgcacacctttccagccgtgctgcaaagcagcggcctgtactctctgagcagcgtggtcacagtgcctagctctagcctgggcacccagacctacatctgcaatgtgaaccacaagcctagcaacaccaaggtggacaagagagtggaacccaagagctgtatccccgaggacacattcttcccaagccccgagagcagctgcgacgtgaagctggtggaaaagagcttcgagacagacaccaacctgaacttccagaacctgagcgtgatcggcttcagaatcctgctgctgaaagtggccggctttaacctgctgatgaccctgcggctgtggtccagc

SEQ ID NO: 3473 - DNA, 2730 bp, Artificial Sequence
  Synthetic Polynucloetide
atggccttaccagtgaccgccttgctcctgccgctggccttgctgctccacgccgccaggccggaagtgcagctggttgaatctggcggaggactggttcagcctggcggatctctgagactgtcttgtgccgccagcggcttcagcttcagcgacttttggatgagctgggtccgacaggcccctggcaaaggacttgaatgggtcgccacaatcagccaggccggcagcgagaaggactacgtggactctgtgaagggcagattcaccatcagccgggacaacgccaagaagtccctgtacctccagatgaacagcctgagagccgaggacaccgccgtgtactattgtgcctctggcgtgtacagcttcgactacagaggccagggcaccctggtcacagtctcttctggtaccggcggaggcggatctggcggcggaggtagcggtggcggaggatctgaattcgacgtgatgctgacccagacaccactgagcctgcctgtgtctctgggcgatcaggccagcatctcctgtagaagcagccagagcatcctgcacagcaccggcgatacctacctggaatggtatctccagaagcctggacagagccccaagctgctgattaacaaggtgtccaaccggctgagcggcgtgcccgatagattttctggcagcggctctggcaccgacttcaccctgaagatcagcagagtggaagccgaggacctgggcgtgtactactgcttccaaggcagccatgttccttggacctttggcggaggcaccaagctggaaatcaagagagctgacgccgctcctaccgtgtccatctttcctctcgagggacagcctaaggccaatcctaccgtgacactgttccctccaagcagcgaagaactccaggccaacaaggccacacttgtgtgcctgatctccgacttctaccctggggctgtgacagtggcttggaaggccgatggatctcctgtgaaagccggcgtggaaaccaccaagccatccaagcagagcaacaacaaatacgccgccagctcctacctgagcctgacacctgagcagtggaagtcccacagatcctacagctgccaagtgacccacgaaggcagcaccgtggaaaagacagtggcccctacagagtgcagcggcagagccgattgcggctttaccagcgagagctaccagcagggcgtgctgagcgccaccatcctgtacgagatcctgctgggcaaggccaccctgtacgccgtgctggtgtctgccctggtgctgatggctatggtcaagcggaaggacagccggggacgcgccaagagaagcggatctggcgtgaagcagaccctgaatttcgacctgctgaagctggctggcgacgtggaatccaacccaggccctactagtatggactggatttggcgcatccttttccttgtcggcgctgctaccggcgcgcattccgggccccagctccagctgcaagagtctggacctggcctggtcaagcctagcgagacactgagcctgacctgtaccgtgtccggcgatagcatcagcagcggcgattactactggggctggatcagacagcctcctggcaaaggactggaatggatcggccacatctactacagcggcgtgacctactacaaccccagcctgaagtccagagtgaccatcagcgtggacaccagccggaaccagttctccctgaagctgtctagcgtgacagccgccgataccgccgtgtactactgcaccagagaggacagcagcaactggcggagtagaggccagggaacactggtcacagttagctctggatccggcggaggcggaagtggaggcggaggatctggcggcggaggctctttcgaacaagtgaagctccagcagagcggccctagccttgtgaaacctggcgcttccgtgaagatgagctgcaaggccagcggctacaccttcaccgatttctacatgaaatgggtcaagcagagccacggcaagtctctggaatggatcggcgacatcaaccccaacatcggagacaccttctacaaccagaagttcaagggcaaagccacactgaccgtggacaagagcagcagcaccgcctacatgcagctcaacagcctgaccagcgaggacagcgccgtgtacttttgttccgtgggctacttcgacgtgtggggagccggaacaaccgtgacagtctcttctacgcgtgcctctacaaagggaccctccgtgtttcctctggctcccagcagcaagtctacaagcggaggaacagccgctctgggctgcctggtcaaggattactttcccgagcctgtgaccgtgtcctggaatagcggagcactgacaagcggcgtgcacacctttccagccgtgctgcaaagcagcggcctgtactctctgagcagcgtggtcacagtgcctagctctagcctgggcacccagacctacatctgcaatgtgaaccacaagcctagcaacaccaaggtggacaagagagtggaacccaagagctgtatccccgaggacacattcttcccaagccccgagagcagctgcgacgtgaagctggtggaaaagagcttcgagacagacaccaacctgaacttccagaacctgagcgtgatcggcttcagaatcctgctgctgaaagtggccggctttaacctgctgatgaccctgcggctgtggtccagc

SEQ ID NO: 3474 - DNA, 2718 bp, Artificial Sequence
  Synthetic Polynucloetide
atggccttaccagtgaccgccttgctcctgccgctggccttgctgctccacgccgccaggccggaagtgcagctggttgaatctggcggaggactggttcagcctggcggatctctgagactgtcttgtgccgccagcggcttcagcttcagcgacttttggatgagctgggtccgacaggcccctggcaaaggacttgaatgggtcgccacaatcagccaggccggcagcgagaaggactacgtggactctgtgaagggcagattcaccatcagccgggacaacgccaagaagtccctgtacctccagatgaacagcctgagagccgaggacaccgccgtgtactattgtgcctctggcgtgtacagcttcgactacagaggccagggcaccctggtcacagtctcttctggtaccggcggaggcggatctggcggcggaggtagcggtggcggaggatctgaattcgagatcgtgctgacacagtctcccgccacactgtcactgtctccaggcgaaagagccacactgagctgtagagccagccagagcgtgtccatctacctggcctggtatcagcagaagcctggacaggctccccggctgctgatctacgatgccagcaatagagccacaggcatccccgccagattttctggctctggcagcggcaccgatttcaccctgaccataagcagcctggaacctgaggacttcgccgtgtactactgccagcagagaagcaactggcctcctttcacattcggccctggcaccaaggtggacatcaaactcgagggacagcctaaggccaatcctaccgtgacactgttccctccaagcagcgaagaactccaggccaacaaggccacacttgtgtgcctgatctccgacttctaccctggggctgtgacagtggcttggaaggccgatggatctcctgtgaaagccggcgtggaaaccaccaagccatccaagcagagcaacaacaaatacgccgccagctcctacctgagcctgacacctgagcagtggaagtcccacagatcctacagctgccaagtgacccacgaaggcagcaccgtggaaaagacagtggcccctacagagtgcagcggcagagccgattgcggctttaccagcgagagctaccagcagggcgtgctgagcgccaccatcctgtacgagatcctgctgggcaaggccaccctgtacgccgtgctggtgtctgccctggtgctgatggctatggtcaagcggaaggacagccggggacgcgccaagagaagcggatctggcgtgaagcagaccctgaatttcgacctgctgaagctggctggcgacgtggaatccaacccaggccctactagtatggactggatttggcgcatccttttccttgtcggcgctgctaccggcgcgcattccgggccccagctccagctgcaagagtctggacctggcctggtcaagcctagcgagacactgagcctgacctgtaccgtgtccggcgatagcatcagcagcggcgattactactggggctggatcagacagcctcctggcaaaggactggaatggatcggccacatctactacagcggcgtgacctactacaaccccagcctgaagtccagagtgaccatcagcgtggacaccagccggaaccagttctccctgaagctgtctagcgtgacagccgccgataccgccgtgtactactgcaccagagaggacagcagcaactggcggagtagaggccagggaacactggtcacagttagctctggatccggcggaggcggaagtggaggcggaggatctggcggcggaggctctttcgaacaggtgcagcttgttgaaagcggaggcggagttgtgcagcctggcagaagtctgagactgtcttgtgccgccagcggcttcaccttcagcagctatggaatgcactgggtccgacaggcccctggcaaaggacttgaatgggttgccgtgatctgggacgacggcagcaacaagtattacgtggacagcgtgaagggcagattcaccatcagccgggacaacagcaagaacaccctgtacctccagatgaacagcctgagagccgaggacacagccgtgtattattgcgccagagatgactactacggcagcggctccttcaacagctactatggcacagacgtgtggggccagggcacaacagttaccgttagctctacgcgtgcctctacaaagggaccctccgtgtttcctctggctcccagcagcaagtctacaagcggaggaacagccgctctgggctgcctggtcaaggattactttcccgagcctgtgaccgtgtcctggaatagcggagcactgacaagcggcgtgcacacctttccagccgtgctgcaaagcagcggcctgtactctctgagcagcgtggtcacagtgcctagctctagcctgggcacccagacctacatctgcaatgtgaaccacaagcctagcaacaccaaggtggacaagagagtggaacccaagagctgtatccccgaggacacattcttcccaagccccgagagcagctgcgacgtgaagctggtggaaaagagcttcgagacagacaccaacctgaacttccagaacctgagcgtgatcggcttcagaatcctgctgctgaaagtggccggctttaacctgctgatgaccctgcggctgtggtccagc

SEQ ID NO: 3475 - DNA, 2673 bp, Artificial Sequence
  Synthetic Polynucloetide
atggccttaccagtgaccgccttgctcctgccgctggccttgctgctccacgccgccaggccggaagtgcagctggttgaatctggcggaggactggttcagcctggcggatctctgagactgtcttgtgccgccagcggcttcagcttcagcgacttttggatgagctgggtccgacaggcccctggcaaaggacttgaatgggtcgccacaatcagccaggccggcagcgagaaggactacgtggactctgtgaagggcagattcaccatcagccgggacaacgccaagaagtccctgtacctccagatgaacagcctgagagccgaggacaccgccgtgtactattgtgcctctggcgtgtacagcttcgactacagaggccagggcaccctggtcacagtctcttctggtaccggcggaggcggatctggcggcggaggtagcggtggcggaggatctgaattcgacatccagatgacacagagccctagcagcctgtctgccagcgtgggagacagagtgaccatcacctgtagagccagccagggcatctcttcttggctggcctggtatcagcagaagcccgagaaggcccctaagagcctgatctatgccgccagctctctccagagcggagtgcctagcagattttctggcagcggctccggcaccgatttcaccctgacaatatccagcctccagcctgaggacttcgccacctactactgccagcagtacaacagctacccctacaccttcggccagggcaccaagctggaaatcaaactcgagggacagcctaaggccaatcctaccgtgacactgttccctccaagcagcgaagaactccaggccaacaaggccacacttgtgtgcctgatctccgacttctaccctggggctgtgacagtggcttggaaggccgatggatctcctgtgaaagccggcgtggaaaccaccaagccatccaagcagagcaacaacaaatacgccgccagctcctacctgagcctgacacctgagcagtggaagtcccacagatcctacagctgccaagtgacccacgaaggcagcaccgtggaaaagacagtggcccctacagagtgcagcggcagagccgattgcggctttaccagcgagagctaccagcagggcgtgctgagcgccaccatcctgtacgagatcctgctgggcaaggccaccctgtacgccgtgctggtgtctgccctggtgctgatggctatggtcaagcggaaggacagccggggacgcgccaagagaagcggatctggcgtgaagcagaccctgaatttcgacctgctgaagctggctggcgacgtggaatccaacccaggccctactagtatggactggatttggcgcatccttttccttgtcggcgctgctaccggcgcgcattccgggccccagctccagctgcaagagtctggacctggcctggtcaagcctagcgagacactgagcctgacctgtaccgtgtccggcgatagcatcagcagcggcgattactactggggctggatcagacagcctcctggcaaaggactggaatggatcggccacatctactacagcggcgtgacctactacaaccccagcctgaagtccagagtgaccatcagcgtggacaccagccggaaccagttctccctgaagctgtctagcgtgacagccgccgataccgccgtgtactactgcaccagagaggacagcagcaactggcggagtagaggccagggaacactggtcacagttagctctggatccggcggaggcggaagtggaggcggaggatctggcggcggaggctctttcgaagaagtgcaactggttcaatctggcggcggactggttcatccaggcggttctctgagactgagctgtgccggctctggcttcaccttcagcacctacctgatgtactgggtccgacaggcccctggcaagacactggaatgggtgtccgctattggcagcggaggcgatacctactacgccgactctgtgaagggcagattcaccatcagccgggacaacgccaagaacagcctgtacctccagatgaactccctgagagccgaggacatggccgtgtactactgtgccagaggactcggctattggggccagggaacactggtcacagtgtcctctacgcgtgcctctacaaagggaccctccgtgtttcctctggctcccagcagcaagtctacaagcggaggaacagccgctctgggctgcctggtcaaggattactttcccgagcctgtgaccgtgtcctggaatagcggagcactgacaagcggcgtgcacacctttccagccgtgctgcaaagcagcggcctgtactctctgagcagcgtggtcacagtgcctagctctagcctgggcacccagacctacatctgcaatgtgaaccacaagcctagcaacaccaaggtggacaagagagtggaacccaagagctgtatccccgaggacacattcttcccaagccccgagagcagctgcgacgtgaagctggtggaaaagagcttcgagacagacaccaacctgaacttccagaacctgagcgtgatcggcttcagaatcctgctgctgaaagtggccggctttaacctgctgatgaccctgcggctgtggtccagc

SEQ ID NO: 3476 - DNA, 2730 bp, Artificial Sequence
  Synthetic Polynucloetide
atggccttaccagtgaccgccttgctcctgccgctggccttgctgctccacgccgccaggccggaagtgcagctggttgaatctggcggaggactggttcagcctggcggatctctgagactgtcttgtgccgccagcggcttcagcttcagcgacttttggatgagctgggtccgacaggcccctggcaaaggacttgaatgggtcgccacaatcagccaggccggcagcgagaaggactacgtggactctgtgaagggcagattcaccatcagccgggacaacgccaagaagtccctgtacctccagatgaacagcctgagagccgaggacaccgccgtgtactattgtgcctctggcgtgtacagcttcgactacagaggccagggcaccctggtcacagtctcttctggtaccggcggaggcggatctggcggcggaggtagcggtggcggaggatctgaattcctgcctgttctgacacagcctccatccgtgtctgtggcccctggaaagaccgccagaatcacatgcggcggcaacaacatcggcagcaagagcgtgcactggtatcagcagaagcctggacaggctcctgtgctggtggtgtacgacgacagcgatagacctagcggcatccccgagagattcagcggcagcaattccggcaataccgccacactgaccatcagcagagtggaagctggcgacgaggccgactactactgccaagtgtgggacagcagcagcgactacgtggtgtttggcggcggaacaaagctgacagtgcttctcgagggacagcctaaggccaatcctaccgtgacactgttccctccaagcagcgaagaactccaggccaacaaggccacacttgtgtgcctgatctccgacttctaccctggggctgtgacagtggcttggaaggccgatggatctcctgtgaaagccggcgtggaaaccaccaagccatccaagcagagcaacaacaaatacgccgccagctcctacctgagcctgacacctgagcagtggaagtcccacagatcctacagctgccaagtgacccacgaaggcagcaccgtggaaaagacagtggcccctacagagtgcagcggcagagccgattgcggctttaccagcgagagctaccagcagggcgtgctgagcgccaccatcctgtacgagatcctgctgggcaaggccaccctgtacgccgtgctggtgtctgccctggtgctgatggctatggtcaagcggaaggacagccggggacgcgccaagagaagcggatctggcgtgaagcagaccctgaatttcgacctgctgaagctggctggcgacgtggaatccaacccaggccctactagtatggactggatttggcgcatccttttccttgtcggcgctgctaccggcgcgcattccgggccccagctccagctgcaagagtctggacctggcctggtcaagcctagcgagacactgagcctgacctgtaccgtgtccggcgatagcatcagcagcggcgattactactggggctggatcagacagcctcctggcaaaggactggaatggatcggccacatctactacagcggcgtgacctactacaaccccagcctgaagtccagagtgaccatcagcgtggacaccagccggaaccagttctccctgaagctgtctagcgtgacagccgccgataccgccgtgtactactgcaccagagaggacagcagcaactggcggagtagaggccagggaacactggtcacagttagctctggatccggcggaggcggaagtggaggcggaggatctggcggcggaggctctttcgaagaagttcaactggtgcagagcggagccgaagtgaagaagccaggcgagagcctgaagattagctgcaaaggcagcggctacagcttcaccagctactggatcggctgggtccgacagatgcctggcaaaggactggaatggatgggcatcatctaccccggcgacagcgacaccagatacagccctagctttcagggccaagtgaccatctccgccgacaagagcatcagcacagcctacctccagtggtcctctctgaaggccagcgataccgccatgtactactgcgccagacaagtctggggatggcaaggcggcatgtaccccaggtctaactggtggtacaacctggactcttggggccagggcacactggtcacagtctcttctacgcgtgcctctacaaagggaccctccgtgtttcctctggctcccagcagcaagtctacaagcggaggaacagccgctctgggctgcctggtcaaggattactttcccgagcctgtgaccgtgtcctggaatagcggagcactgacaagcggcgtgcacacctttccagccgtgctgcaaagcagcggcctgtactctctgagcagcgtggtcacagtgcctagctctagcctgggcacccagacctacatctgcaatgtgaaccacaagcctagcaacaccaaggtggacaagagagtggaacccaagagctgtatccccgaggacacattcttcccaagccccgagagcagctgcgacgtgaagctggtggaaaagagcttcgagacagacaccaacctgaacttccagaacctgagcgtgatcggcttcagaatcctgctgctgaaagtggccggctttaacctgctgatgaccctgcggctgtggtccagc

SEQ ID NO: 3477 - DNA, 2709 bp, Artificial Sequence
  Synthetic Polynucloetide
atggccttaccagtgaccgccttgctcctgccgctggccttgctgctccacgccgccaggccggaagtgcagctggttgaatctggcggaggactggttcagcctggcggatctctgagactgtcttgtgccgccagcggcttcagcttcagcgacttttggatgagctgggtccgacaggcccctggcaaaggacttgaatgggtcgccacaatcagccaggccggcagcgagaaggactacgtggactctgtgaagggcagattcaccatcagccgggacaacgccaagaagtccctgtacctccagatgaacagcctgagagccgaggacaccgccgtgtactattgtgcctctggcgtgtacagcttcgactacagaggccagggcaccctggtcacagtctcttctggtaccggcggaggcggatctggcggcggaggtagcggtggcggaggatctgaattcgagctggtcatgacacagagccctgcttctctggccgtgtcactgggacagagagccaccatctcttgcagagccagcgagagcgtggacagctacggcaagagcttcatgcactggtatcagctcaagcccggccagcctcctaagctgctgatctacagagcctccaacctggaaagcggcgtgccagccagattttctggcagcggcagcagaaccgacttcaccctgaccattgatcccgtggaagccgatgatgccgccacctactactgccagcagaacaacgaggacccctggacatttggcggaggcaccaagctggaaatcaaactcgagggacagcctaaggccaatcctaccgtgacactgttccctccaagcagcgaagaactccaggccaacaaggccacacttgtgtgcctgatctccgacttctaccctggggctgtgacagtggcttggaaggccgatggatctcctgtgaaagccggcgtggaaaccaccaagccatccaagcagagcaacaacaaatacgccgccagctcctacctgagcctgacacctgagcagtggaagtcccacagatcctacagctgccaagtgacccacgaaggcagcaccgtggaaaagacagtggcccctacagagtgcagcggcagagccgattgcggctttaccagcgagagctaccagcagggcgtgctgagcgccaccatcctgtacgagatcctgctgggcaaggccaccctgtacgccgtgctggtgtctgccctggtgctgatggctatggtcaagcggaaggacagccggggacgcgccaagagaagcggatctggcgtgaagcagaccctgaatttcgacctgctgaagctggctggcgacgtggaatccaacccaggccctactagtatggactggatttggcgcatccttttccttgtcggcgctgctaccggcgcgcattccgggccccagctccagctgcaagagtctggacctggcctggtcaagcctagcgagacactgagcctgacctgtaccgtgtccggcgatagcatcagcagcggcgattactactggggctggatcagacagcctcctggcaaaggactggaatggatcggccacatctactacagcggcgtgacctactacaaccccagcctgaagtccagagtgaccatcagcgtggacaccagccggaaccagttctccctgaagctgtctagcgtgacagccgccgataccgccgtgtactactgcaccagagaggacagcagcaactggcggagtagaggccagggaacactggtcacagttagctctggatccggcggaggcggaagtggaggcggaggatctggcggcggaggctctttcgaagaagtgcagctcgaacagtctggccccgagcttgtgaaacctggcgcttccgtgaagatgagctgcaaggccagcggctacaccttcaccaactactacatgaaatgggtcaagcagagccacggcaagtccctggaatggatcggcgatctgaaccccaacaacggcgacaccttctacaaccagaagttcaagggcaaagccacactgaccgtggacaagagcagcaacaccgcctacatgcagctcaactccctgaccagcgaggacagcgccgtgtactactgtgccagaaccggcagatacgaagagaacgctatggactactggggccagggcacaagcgtgacagtctcttctacgcgtgcctctacaaagggaccctccgtgtttcctctggctcccagcagcaagtctacaagcggaggaacagccgctctgggctgcctggtcaaggattactttcccgagcctgtgaccgtgtcctggaatagcggagcactgacaagcggcgtgcacacctttccagccgtgctgcaaagcagcggcctgtactctctgagcagcgtggtcacagtgcctagctctagcctgggcacccagacctacatctgcaatgtgaaccacaagcctagcaacaccaaggtggacaagagagtggaacccaagagctgtatccccgaggacacattcttcccaagccccgagagcagctgcgacgtgaagctggtggaaaagagcttcgagacagacaccaacctgaacttccagaacctgagcgtgatcggcttcagaatcctgctgctgaaagtggccggctttaacctgctgatgaccctgcggctgtggtccagc

SEQ ID NO: 3478 - DNA, 2691 bp, Artificial Sequence
  Synthetic Polynucloetide
atggccttaccagtgaccgccttgctcctgccgctggccttgctgctccacgccgccaggccggaagtgcagctggttgaatctggcggaggactggttcagcctggcggatctctgagactgtcttgtgccgccagcggcttcagcttcagcgacttttggatgagctgggtccgacaggcccctggcaaaggacttgaatgggtcgccacaatcagccaggccggcagcgagaaggactacgtggactctgtgaagggcagattcaccatcagccgggacaacgccaagaagtccctgtacctccagatgaacagcctgagagccgaggacaccgccgtgtactattgtgcctctggcgtgtacagcttcgactacagaggccagggcaccctggtcacagtctcttctggtaccggcggaggcggatctggcggcggaggtagcggtggcggaggatctgaattcgacgtggtcatgacacagagcccttctagcctgtctgccagcgtgggcgacagagtgaccatcacctgtatggcctccgaggacatctacatccggctggcctggtatcagcagaagcctggaaacgcccctaagctgctgatctacgccgccacctctctggaaacaggcgtgccaagcagattttccggcagcggctctggcaccgatttcaccctgacaatatccagcctccagcctgaggacttcgccacctactactgccagcagtattggagcagcccctggacatttggcggaggcaccaaggtggaaatcaaactcgagggacagcctaaggccaatcctaccgtgacactgttccctccaagcagcgaagaactccaggccaacaaggccacacttgtgtgcctgatctccgacttctaccctggggctgtgacagtggcttggaaggccgatggatctcctgtgaaagccggcgtggaaaccaccaagccatccaagcagagcaacaacaaatacgccgccagctcctacctgagcctgacacctgagcagtggaagtcccacagatcctacagctgccaagtgacccacgaaggcagcaccgtggaaaagacagtggcccctacagagtgcagcggcagagccgattgcggctttaccagcgagagctaccagcagggcgtgctgagcgccaccatcctgtacgagatcctgctgggcaaggccaccctgtacgccgtgctggtgtctgccctggtgctgatggctatggtcaagcggaaggacagccggggacgcgccaagagaagcggatctggcgtgaagcagaccctgaatttcgacctgctgaagctggctggcgacgtggaatccaacccaggccctactagtatggactggatttggcgcatccttttccttgtcggcgctgctaccggcgcgcattccgggccccagctccagctgcaagagtctggacctggcctggtcaagcctagcgagacactgagcctgacctgtaccgtgtccggcgatagcatcagcagcggcgattactactggggctggatcagacagcctcctggcaaaggactggaatggatcggccacatctactacagcggcgtgacctactacaaccccagcctgaagtccagagtgaccatcagcgtggacaccagccggaaccagttctccctgaagctgtctagcgtgacagccgccgataccgccgtgtactactgcaccagagaggacagcagcaactggcggagtagaggccagggaacactggtcacagttagctctggatccggcggaggcggaagtggaggcggaggatctggcggcggaggctctttcgaacaggttcagctgcaagagtctggccccggactggtcaagcctagccaaacactgagcctgacctgtaccgtgtccggctacagcatcaccagcgactacacctggaactggatcagacagcctcctggcaacggactggaatggatcggctacatcacctacagcggcagcaccagctacaaccccagcctgaaaagccgggtgctgatctccgtggacaccagcaagaatcaggtgtccctgaagctgagcagcgtgacagccgctgataccgccgtgtactactgtgccagactggggagaagatacacaatggactactggggccagggcaccaccgtgacagtttcttctacgcgtgcctctacaaagggaccctccgtgtttcctctggctcccagcagcaagtctacaagcggaggaacagccgctctgggctgcctggtcaaggattactttcccgagcctgtgaccgtgtcctggaatagcggagcactgacaagcggcgtgcacacctttccagccgtgctgcaaagcagcggcctgtactctctgagcagcgtggtcacagtgcctagctctagcctgggcacccagacctacatctgcaatgtgaaccacaagcctagcaacaccaaggtggacaagagagtggaacccaagagctgtatccccgaggacacattcttcccaagccccgagagcagctgcgacgtgaagctggtggaaaagagcttcgagacagacaccaacctgaacttccagaacctgagcgtgatcggcttcagaatcctgctgctgaaagtggccggctttaacctgctgatgaccctgcggctgtggtccagc

SEQ ID NO: 3479 - DNA, 2703 bp, Artificial Sequence
  Synthetic Polynucloetide
atggccttaccagtgaccgccttgctcctgccgctggccttgctgctccacgccgccaggccggaagtgcagctggttgaatctggcggaggactggttcagcctggcggatctctgagactgtcttgtgccgccagcggcttcagcttcagcgacttttggatgagctgggtccgacaggcccctggcaaaggacttgaatgggtcgccacaatcagccaggccggcagcgagaaggactacgtggactctgtgaagggcagattcaccatcagccgggacaacgccaagaagtccctgtacctccagatgaacagcctgagagccgaggacaccgccgtgtactattgtgcctctggcgtgtacagcttcgactacagaggccagggcaccctggtcacagtctcttctggtaccggcggaggcggatctggcggcggaggtagcggtggcggaggatctgaattcgatattgtgctgactcagagccctgccactctgagccttagtccaggcgacagagctaccatctcctgtagggcctctgaatccgtgaccattctgggctctcatctcatatattggtatcaacaaaagccgggccagcctccacggctgctcattcaactggcctctaacgtgcagaccggcgtgccagctagattttctggctctggctcccggaccgactttacactgacaatcagctccgtggaacccgaagattttgccgtctattattgcctccagtccaggaccattcctcggacattcggccagggaacaaaactcgaaatcaagcggctcgagggacagcctaaggccaatcctaccgtgacactgttccctccaagcagcgaagaactccaggccaacaaggccacacttgtgtgcctgatctccgacttctaccctggggctgtgacagtggcttggaaggccgatggatctcctgtgaaagccggcgtggaaaccaccaagccatccaagcagagcaacaacaaatacgccgccagctcctacctgagcctgacacctgagcagtggaagtcccacagatcctacagctgccaagtgacccacgaaggcagcaccgtggaaaagacagtggcccctacagagtgcagcggcagagccgattgcggctttaccagcgagagctaccagcagggcgtgctgagcgccaccatcctgtacgagatcctgctgggcaaggccaccctgtacgccgtgctggtgtctgccctggtgctgatggctatggtcaagcggaaggacagccggggacgcgccaagagaagcggatctggcgtgaagcagaccctgaatttcgacctgctgaagctggctggcgacgtggaatccaacccaggccctactagtatggactggatttggcgcatccttttccttgtcggcgctgctaccggcgcgcattccgggccccagctccagctgcaagagtctggacctggcctggtcaagcctagcgagacactgagcctgacctgtaccgtgtccggcgatagcatcagcagcggcgattactactggggctggatcagacagcctcctggcaaaggactggaatggatcggccacatctactacagcggcgtgacctactacaaccccagcctgaagtccagagtgaccatcagcgtggacaccagccggaaccagttctccctgaagctgtctagcgtgacagccgccgataccgccgtgtactactgcaccagagaggacagcagcaactggcggagtagaggccagggaacactggtcacagttagctctggatccggcggaggcggaagtggaggcggaggatctggcggcggaggctctttcgaacaggtgcagctcgttcagagtggccccgaagtgaaaaagccaggcgagtccgtgaagatttcctgcaaagcctccggctacacattccggcactactctatgaattgggtcaagcaggccccaggccagggccttaagtggatgggacgcatcaataccgagtccggcgtgccaatctacgccgatgacttcaaaggccggttcagcttcaccgtggatacctctgcctccaccgcctacctggaaatcagcagcctgaccagcgaggatacagctgtgtacttctgtagcaacgattacctctacagcctggatttctggggacagggaaccacactgaccgtgtctagcacgcgtgcctctacaaagggaccctccgtgtttcctctggctcccagcagcaagtctacaagcggaggaacagccgctctgggctgcctggtcaaggattactttcccgagcctgtgaccgtgtcctggaatagcggagcactgacaagcggcgtgcacacctttccagccgtgctgcaaagcagcggcctgtactctctgagcagcgtggtcacagtgcctagctctagcctgggcacccagacctacatctgcaatgtgaaccacaagcctagcaacaccaaggtggacaagagagtggaacccaagagctgtatccccgaggacacattcttcccaagccccgagagcagctgcgacgtgaagctggtggaaaagagcttcgagacagacaccaacctgaacttccagaacctgagcgtgatcggcttcagaatcctgctgctgaaagtggccggctttaacctgctgatgaccctgcggctgtggtccagc

SEQ ID NO: 3480 - DNA, 2703 bp, Artificial Sequence
  Synthetic Polynucloetide
atggccttaccagtgaccgccttgctcctgccgctggccttgctgctccacgccgccaggccggaagtgcagctggttgaatctggcggaggactggttcagcctggcggatctctgagactgtcttgtgccgccagcggcttcagcttcagcgacttttggatgagctgggtccgacaggcccctggcaaaggacttgaatgggtcgccacaatcagccaggccggcagcgagaaggactacgtggactctgtgaagggcagattcaccatcagccgggacaacgccaagaagtccctgtacctccagatgaacagcctgagagccgaggacaccgccgtgtactattgtgcctctggcgtgtacagcttcgactacagaggccagggcaccctggtcacagtctcttctggtaccggcggaggcggatctggcggcggaggtagcggtggcggaggatctgaattcgacatcgtgctgacacagtctcccgccacactgtcactgagccctggcgatagagccacactgagctgtagagccagcgagagcgtgacaatcctgggcagccacctgatctactggtatcagcagaagcccggacaggcccctagactgctgattcagctcgccagcaatgtgcagacaggcatccctgccagattttccggcagcggcagcagaaccgatttcaccctgaccataagcagcctggaacctgaggacttcgccgtgtactactgcctccagagccggacaatccccagaacctttggacagggcaccaagctggaaatcaagagactcgagggacagcctaaggccaatcctaccgtgacactgttccctccaagcagcgaagaactccaggccaacaaggccacacttgtgtgcctgatctccgacttctaccctggggctgtgacagtggcttggaaggccgatggatctcctgtgaaagccggcgtggaaaccaccaagccatccaagcagagcaacaacaaatacgccgccagctcctacctgagcctgacacctgagcagtggaagtcccacagatcctacagctgccaagtgacccacgaaggcagcaccgtggaaaagacagtggcccctacagagtgcagcggcagagccgattgcggctttaccagcgagagctaccagcagggcgtgctgagcgccaccatcctgtacgagatcctgctgggcaaggccaccctgtacgccgtgctggtgtctgccctggtgctgatggctatggtcaagcggaaggacagccggggacgcgccaagagaagcggatctggcgtgaagcagaccctgaatttcgacctgctgaagctggctggcgacgtggaatccaacccaggccctactagtatggactggatttggcgcatccttttccttgtcggcgctgctaccggcgcgcattccgggccccagctccagctgcaagagtctggacctggcctggtcaagcctagcgagacactgagcctgacctgtaccgtgtccggcgatagcatcagcagcggcgattactactggggctggatcagacagcctcctggcaaaggactggaatggatcggccacatctactacagcggcgtgacctactacaaccccagcctgaagtccagagtgaccatcagcgtggacaccagccggaaccagttctccctgaagctgtctagcgtgacagccgccgataccgccgtgtactactgcaccagagaggacagcagcaactggcggagtagaggccagggaacactggtcacagttagctctggatccggcggaggcggaagtggaggcggaggatctggcggcggaggctctttcgaacaggttcagctggtgcagtctggcagcgagctgaagaaacctggcgagagcgtgaagatcagctgcaaggccagcggctacaccttcacacactacagcatgaactgggtccgacaggcccctggacaaggactggaatggatgggcagaatcaacaccgagacaggcgagcccctgtacgccgacgatttcaagggcagattcgtgttcagcctggacaccagcgccagcacagcctatctccagatcagctctctgaaggccgaggacaccgccgtgtactactgctccaacgactacctgtactccctggactattggggccagggcacactggtcacagtgtctagtacgcgtgcctctacaaagggaccctccgtgtttcctctggctcccagcagcaagtctacaagcggaggaacagccgctctgggctgcctggtcaaggattactttcccgagcctgtgaccgtgtcctggaatagcggagcactgacaagcggcgtgcacacctttccagccgtgctgcaaagcagcggcctgtactctctgagcagcgtggtcacagtgcctagctctagcctgggcacccagacctacatctgcaatgtgaaccacaagcctagcaacaccaaggtggacaagagagtggaacccaagagctgtatccccgaggacacattcttcccaagccccgagagcagctgcgacgtgaagctggtggaaaagagcttcgagacagacaccaacctgaacttccagaacctgagcgtgatcggcttcagaatcctgctgctgaaagtggccggctttaacctgctgatgaccctgcggctgtggtccagc

SEQ ID NO: 3481 - DNA, 2706 bp, Artificial Sequence
  Synthetic Polynucloetide
atggccttaccagtgaccgccttgctcctgccgctggccttgctgctccacgccgccaggccggaagtgcagctggttgaatctggcggaggactggttcagcctggcggatctctgagactgtcttgtgccgccagcggcttcagcttcagcgacttttggatgagctgggtccgacaggcccctggcaaaggacttgaatgggtcgccacaatcagccaggccggcagcgagaaggactacgtggactctgtgaagggcagattcaccatcagccgggacaacgccaagaagtccctgtacctccagatgaacagcctgagagccgaggacaccgccgtgtactattgtgcctctggcgtgtacagcttcgactacagaggccagggcaccctggtcacagtctcttctggtaccggcggaggcggatctggcggcggaggtagcggtggcggaggatctgaattcgacatccagctgactcagagccctagctttctgagcgccagcgtgggcgacagagtgaccattacatgtagagccagccagggcatcagcaccgacctgaactggtatcagcagaagcctggcaaggcccctaagctgctgatctacgccgccagcaatctggaaagcggcgtgccaagcagattttccggctctggcagcggcaccgagttcaccctgacaatatctagcctccagcctgaggacttcgccacctactactgccagcagagctacaactggccctacacctttggcggaggcaccaaggtggaaatcaagagactcgagggacagcctaaggccaatcctaccgtgacactgttccctccaagcagcgaagaactccaggccaacaaggccacacttgtgtgcctgatctccgacttctaccctggggctgtgacagtggcttggaaggccgatggatctcctgtgaaagccggcgtggaaaccaccaagccatccaagcagagcaacaacaaatacgccgccagctcctacctgagcctgacacctgagcagtggaagtcccacagatcctacagctgccaagtgacccacgaaggcagcaccgtggaaaagacagtggcccctacagagtgcagcggcagagccgattgcggctttaccagcgagagctaccagcagggcgtgctgagcgccaccatcctgtacgagatcctgctgggcaaggccaccctgtacgccgtgctggtgtctgccctggtgctgatggctatggtcaagcggaaggacagccggggacgcgccaagagaagcggatctggcgtgaagcagaccctgaatttcgacctgctgaagctggctggcgacgtggaatccaacccaggccctactagtatggactggatttggcgcatccttttccttgtcggcgctgctaccggcgcgcattccgggccccagctccagctgcaagagtctggacctggcctggtcaagcctagcgagacactgagcctgacctgtaccgtgtccggcgatagcatcagcagcggcgattactactggggctggatcagacagcctcctggcaaaggactggaatggatcggccacatctactacagcggcgtgacctactacaaccccagcctgaagtccagagtgaccatcagcgtggacaccagccggaaccagttctccctgaagctgtctagcgtgacagccgccgataccgccgtgtactactgcaccagagaggacagcagcaactggcggagtagaggccagggaacactggtcacagttagctctggatccggcggaggcggaagtggaggcggaggatctggcggcggaggctctttcgaagaagttcagctggttgaatcaggcggaggactcgtgaaacctggcggctctctgagactgtcttgtgccgccagcggcttcaccttcagcaacttcgagatgaactgggtccgacaggccccaggcaaaggactggaatgggtgtccggcatcagctccaatggccggtacatcaactacgccgacagcgtgaagggcagattcaccatcagccgggacaacgccaagaacagcctgtacctccagatgaactccctgagagccgaggacaccgccgtgtactattgtgccagagtggtggacttcgaccaggactacaacggcttcgactattggggccagggcaccctggttaccgttagctctacgcgtgcctctacaaagggaccctccgtgtttcctctggctcccagcagcaagtctacaagcggaggaacagccgctctgggctgcctggtcaaggattactttcccgagcctgtgaccgtgtcctggaatagcggagcactgacaagcggcgtgcacacctttccagccgtgctgcaaagcagcggcctgtactctctgagcagcgtggtcacagtgcctagctctagcctgggcacccagacctacatctgcaatgtgaaccacaagcctagcaacaccaaggtggacaagagagtggaacccaagagctgtatccccgaggacacattcttcccaagccccgagagcagctgcgacgtgaagctggtggaaaagagcttcgagacagacaccaacctgaacttccagaacctgagcgtgatcggcttcagaatcctgctgctgaaagtggccggctttaacctgctgatgaccctgcggctgtggtccagc

SEQ ID NO: 3482 - DNA, 2700 bp, Artificial Sequence
  Synthetic Polynucloetide
atggccttaccagtgaccgccttgctcctgccgctggccttgctgctccacgccgccaggccggaagtgcagctggttgaatctggcggaggactggttcagcctggcggatctctgagactgtcttgtgccgccagcggcttcagcttcagcgacttttggatgagctgggtccgacaggcccctggcaaaggacttgaatgggtcgccacaatcagccaggccggcagcgagaaggactacgtggactctgtgaagggcagattcaccatcagccgggacaacgccaagaagtccctgtacctccagatgaacagcctgagagccgaggacaccgccgtgtactattgtgcctctggcgtgtacagcttcgactacagaggccagggcaccctggtcacagtctcttctggtaccggcggaggcggatctggcggcggaggtagcggtggcggaggatctgaattcgacatccaactgactcagagccccagctttctgagcgcctctgtgggcgacagagtgaccatcacatgtagtctcagcctgggcatcagcacatggcgggattggtttccgccgaggcttggcaggggccttgagccgctgacctacgccgccagcacactgcaaagcggagtgcctagcagattttccggcagcggctctggcaccgagttcaccctgacaatatccagcctccagcctgaggacttcgccacctactactgccagcagctcaacagctaccctctgacctttggcggaggcaccaaggtggaaatcaagagactcgagggacagcctaaggccaatcctaccgtgacactgttccctccaagcagcgaagaactccaggccaacaaggccacacttgtgtgcctgatctccgacttctaccctggggctgtgacagtggcttggaaggccgatggatctcctgtgaaagccggcgtggaaaccaccaagccatccaagcagagcaacaacaaatacgccgccagctcctacctgagcctgacacctgagcagtggaagtcccacagatcctacagctgccaagtgacccacgaaggcagcaccgtggaaaagacagtggcccctacagagtgcagcggcagagccgattgcggctttaccagcgagagctaccagcagggcgtgctgagcgccaccatcctgtacgagatcctgctgggcaaggccaccctgtacgccgtgctggtgtctgccctggtgctgatggctatggtcaagcggaaggacagccggggacgcgccaagagaagcggatctggcgtgaagcagaccctgaatttcgacctgctgaagctggctggcgacgtggaatccaacccaggccctactagtatggactggatttggcgcatccttttccttgtcggcgctgctaccggcgcgcattccgggccccagctccagctgcaagagtctggacctggcctggtcaagcctagcgagacactgagcctgacctgtaccgtgtccggcgatagcatcagcagcggcgattactactggggctggatcagacagcctcctggcaaaggactggaatggatcggccacatctactacagcggcgtgacctactacaaccccagcctgaagtccagagtgaccatcagcgtggacaccagccggaaccagttctccctgaagctgtctagcgtgacagccgccgataccgccgtgtactactgcaccagagaggacagcagcaactggcggagtagaggccagggaacactggtcacagttagctctggatccggcggaggcggaagtggaggcggaggatctggcggcggaggctctttcgaagaagttcaactggttgagtctggtggcggcctggttaagcctggcggatctctgagactgagctgtgccgccagcggcttcacctttagcacatacggcatgagctgggtccgacaggcccctggaaaaggacttgagtgggtcgcctacatcaacaacggctccggctacatctactacgccgacagcgtgaagggcagattcaccatcagccgggacaacgccaagaacagcctgtacctccagatgaactccctgagagccgaggacaccgccgtgtactattgtgccagaggacagtggtggagcggcggagactttgattattggggccagggcaccctggtcaccgtttcttctacgcgtgcctctacaaagggaccctccgtgtttcctctggctcccagcagcaagtctacaagcggaggaacagccgctctgggctgcctggtcaaggattactttcccgagcctgtgaccgtgtcctggaatagcggagcactgacaagcggcgtgcacacctttccagccgtgctgcaaagcagcggcctgtactctctgagcagcgtggtcacagtgcctagctctagcctgggcacccagacctacatctgcaatgtgaaccacaagcctagcaacaccaaggtggacaagagagtggaacccaagagctgtatccccgaggacacattcttcccaagccccgagagcagctgcgacgtgaagctggtggaaaagagcttcgagacagacaccaacctgaacttccagaacctgagcgtgatcggcttcagaatcctgctgctgaaagtggccggctttaacctgctgatgaccctgcggctgtggtccagc

SEQ ID NO: 3483 - DNA, 2703 bp, Artificial Sequence
  Synthetic Polynucloetide
atggccttaccagtgaccgccttgctcctgccgctggccttgctgctccacgccgccaggccggaagtgcagctggttgaatctggcggaggactggttcagcctggcggatctctgagactgtcttgtgccgccagcggcttcagcttcagcgacttttggatgagctgggtccgacaggcccctggcaaaggacttgaatgggtcgccacaatcagccaggccggcagcgagaaggactacgtggactctgtgaagggcagattcaccatcagccgggacaacgccaagaagtccctgtacctccagatgaacagcctgagagccgaggacaccgccgtgtactattgtgcctctggcgtgtacagcttcgactacagaggccagggcaccctggtcacagtctcttctggtaccggcggaggcggatctggcggcggaggtagcggtggcggaggatctgaattcgagatcgtgctgacacagtctcccgccacactgtcactgtctccaggcgaaagagccacactgagctgtagcgccagcagcagcgtgtcctacatgtactggtatcagcagaagcccggacaggcccctagactgctgatctacagaaccagcaacctggcctctggcatccccgccagattttctggctctggcagcggcaccgatttcaccctgaccataagcagcctggaacctgaggacttcgccgtgtactactgccagcagtaccacagctaccccaccacctttggacagggcaccaaggtggaaatcaagcggacagttctcgagggacagcctaaggccaatcctaccgtgacactgttccctccaagcagcgaagaactccaggccaacaaggccacacttgtgtgcctgatctccgacttctaccctggggctgtgacagtggcttggaaggccgatggatctcctgtgaaagccggcgtggaaaccaccaagccatccaagcagagcaacaacaaatacgccgccagctcctacctgagcctgacacctgagcagtggaagtcccacagatcctacagctgccaagtgacccacgaaggcagcaccgtggaaaagacagtggcccctacagagtgcagcggcagagccgattgcggctttaccagcgagagctaccagcagggcgtgctgagcgccaccatcctgtacgagatcctgctgggcaaggccaccctgtacgccgtgctggtgtctgccctggtgctgatggctatggtcaagcggaaggacagccggggacgcgccaagagaagcggatctggcgtgaagcagaccctgaatttcgacctgctgaagctggctggcgacgtggaatccaacccaggccctactagtatggactggatttggcgcatccttttccttgtcggcgctgctaccggcgcgcattccgggccccagctccagctgcaagagtctggacctggcctggtcaagcctagcgagacactgagcctgacctgtaccgtgtccggcgatagcatcagcagcggcgattactactggggctggatcagacagcctcctggcaaaggactggaatggatcggccacatctactacagcggcgtgacctactacaaccccagcctgaagtccagagtgaccatcagcgtggacaccagccggaaccagttctccctgaagctgtctagcgtgacagccgccgataccgccgtgtactactgcaccagagaggacagcagcaactggcggagtagaggccagggaacactggtcacagttagctctggatccggcggaggcggaagtggaggcggaggatctggcggcggaggctctttcgaagaagtgcagctggttgaatcaggtggcggcctggttcaacctggcggatctctgagactgtcttgtgccgccagcggcttcagcttcaacacctacgccatgaactgggtccgacaggctcctggcaaaggactggaatgggtgtcccacatcagaagcaagagcaacaacttcgccacctactacgccgacagcgtgaaggacagattcaccatcagccgggacaacgccaagaacagcctgtacctccagatgaactccctgagagccgaggacaccgccgtgtattattgcgccagacaaggcggcgacttccctatggattattggggccagggcaccctggtcaccgtttcttctacgcgtgcctctacaaagggaccctccgtgtttcctctggctcccagcagcaagtctacaagcggaggaacagccgctctgggctgcctggtcaaggattactttcccgagcctgtgaccgtgtcctggaatagcggagcactgacaagcggcgtgcacacctttccagccgtgctgcaaagcagcggcctgtactctctgagcagcgtggtcacagtgcctagctctagcctgggcacccagacctacatctgcaatgtgaaccacaagcctagcaacaccaaggtggacaagagagtggaacccaagagctgtatccccgaggacacattcttcccaagccccgagagcagctgcgacgtgaagctggtggaaaagagcttcgagacagacaccaacctgaacttccagaacctgagcgtgatcggcttcagaatcctgctgctgaaagtggccggctttaacctgctgatgaccctgcggctgtggtccagc

SEQ ID NO: 3484 - DNA, 2691 bp, Artificial Sequence
  Synthetic Polynucloetide
atggccttaccagtgaccgccttgctcctgccgctggccttgctgctccacgccgccaggccggaagtgcagctggttgaatctggcggaggactggttcagcctggcggatctctgagactgtcttgtgccgccagcggcttcagcttcagcgacttttggatgagctgggtccgacaggcccctggcaaaggacttgaatgggtcgccacaatcagccaggccggcagcgagaaggactacgtggactctgtgaagggcagattcaccatcagccgggacaacgccaagaagtccctgtacctccagatgaacagcctgagagccgaggacaccgccgtgtactattgtgcctctggcgtgtacagcttcgactacagaggccagggcaccctggtcacagtctcttctggtaccggcggaggcggatctggcggcggaggtagcggtggcggaggatctgaattcgacgtggtcatgacacagagcccttctagcctgtctgccagcgtgggcgacagagtgaccatcacctgtaaagccagcgaggacatctacatccggctggcctggtatcagcagaagcctggaaaggcccctaagctgctgatctacgccgccacctctctggaaacaggcgtgccaagcagattttccggcagcggctctggcaccgatttcaccctgacaatatccagcctccagcctgaggacttcgccacctactactgccagcagtattggaccacaccttggacctttggcggaggcaccaaggtggaaatcaaactcgagggacagcctaaggccaatcctaccgtgacactgttccctccaagcagcgaagaactccaggccaacaaggccacacttgtgtgcctgatctccgacttctaccctggggctgtgacagtggcttggaaggccgatggatctcctgtgaaagccggcgtggaaaccaccaagccatccaagcagagcaacaacaaatacgccgccagctcctacctgagcctgacacctgagcagtggaagtcccacagatcctacagctgccaagtgacccacgaaggcagcaccgtggaaaagacagtggcccctacagagtgcagcggcagagccgattgcggctttaccagcgagagctaccagcagggcgtgctgagcgccaccatcctgtacgagatcctgctgggcaaggccaccctgtacgccgtgctggtgtctgccctggtgctgatggctatggtcaagcggaaggacagccggggacgcgccaagagaagcggatctggcgtgaagcagaccctgaatttcgacctgctgaagctggctggcgacgtggaatccaacccaggccctactagtatggactggatttggcgcatccttttccttgtcggcgctgctaccggcgcgcattccgggccccagctccagctgcaagagtctggacctggcctggtcaagcctagcgagacactgagcctgacctgtaccgtgtccggcgatagcatcagcagcggcgattactactggggctggatcagacagcctcctggcaaaggactggaatggatcggccacatctactacagcggcgtgacctactacaaccccagcctgaagtccagagtgaccatcagcgtggacaccagccggaaccagttctccctgaagctgtctagcgtgacagccgccgataccgccgtgtactactgcaccagagaggacagcagcaactggcggagtagaggccagggaacactggtcacagttagctctggatccggcggaggcggaagtggaggcggaggatctggcggcggaggctctttcgaacaggtgcagctccaagagtctggccctggactggtcaagcctagccagacactgagcctgacctgtaccgtgtccggctacagcatcaccatcgactacacctggaactggatcagacagcctcctggcaaaggactggaatggatcggctacatcacctacagcggcagcaccgactacaaccccagcctgaaaagccgggtgctgatctccgtggacaccagcaagaatcaggtgtccctgaagctgagcagcgtgacagccgctgataccgccgtgtactactgtgccagactgggcagaagatacgccctggattattggggccagggcaccaccgtgacagtgtcatctacgcgtgcctctacaaagggaccctccgtgtttcctctggctcccagcagcaagtctacaagcggaggaacagccgctctgggctgcctggtcaaggattactttcccgagcctgtgaccgtgtcctggaatagcggagcactgacaagcggcgtgcacacctttccagccgtgctgcaaagcagcggcctgtactctctgagcagcgtggtcacagtgcctagctctagcctgggcacccagacctacatctgcaatgtgaaccacaagcctagcaacaccaaggtggacaagagagtggaacccaagagctgtatccccgaggacacattcttcccaagccccgagagcagctgcgacgtgaagctggtggaaaagagcttcgagacagacaccaacctgaacttccagaacctgagcgtgatcggcttcagaatcctgctgctgaaagtggccggctttaacctgctgatgaccctgcggctgtggtccagc

SEQ ID NO: 3485 - DNA, 2703 bp, Artificial Sequence
  Synthetic Polynucloetide
atggccttaccagtgaccgccttgctcctgccgctggccttgctgctccacgccgccaggccggaagtgcagctggttgaatctggcggaggactggttcagcctggcggatctctgagactgtcttgtgccgccagcggcttcagcttcagcgacttttggatgagctgggtccgacaggcccctggcaaaggacttgaatgggtcgccacaatcagccaggccggcagcgagaaggactacgtggactctgtgaagggcagattcaccatcagccgggacaacgccaagaagtccctgtacctccagatgaacagcctgagagccgaggacaccgccgtgtactattgtgcctctggcgtgtacagcttcgactacagaggccagggcaccctggtcacagtctcttctggtaccggcggaggcggatctggcggcggaggtagcggtggcggaggatctgaattcgacatccagatgacccagaccacaagcagcctgtctgccagcctgggcgacagagtgaccatctcttgtagagccagccaggacatcagcaactacctgaactggtatcagcagaaacccgacggcaccgtgaagctgctgatctactacaccagcatcctgcacagcggcgtgcccagcagattttctggctctggcagcggcaccgactacagcctgaccatcagcaatctggaacaagaggacttcgctacctacttctgccagcaaggcaacaccctgccttggacatttggcggaggcaccaagctggaaatcaaagctctcgagggacagcctaaggccaatcctaccgtgacactgttccctccaagcagcgaagaactccaggccaacaaggccacacttgtgtgcctgatctccgacttctaccctggggctgtgacagtggcttggaaggccgatggatctcctgtgaaagccggcgtggaaaccaccaagccatccaagcagagcaacaacaaatacgccgccagctcctacctgagcctgacacctgagcagtggaagtcccacagatcctacagctgccaagtgacccacgaaggcagcaccgtggaaaagacagtggcccctacagagtgcagcggcagagccgattgcggctttaccagcgagagctaccagcagggcgtgctgagcgccaccatcctgtacgagatcctgctgggcaaggccaccctgtacgccgtgctggtgtctgccctggtgctgatggctatggtcaagcggaaggacagccggggacgcgccaagagaagcggatctggcgtgaagcagaccctgaatttcgacctgctgaagctggctggcgacgtggaatccaacccaggccctactagtatggactggatttggcgcatccttttccttgtcggcgctgctaccggcgcgcattccgggccccagctccagctgcaagagtctggacctggcctggtcaagcctagcgagacactgagcctgacctgtaccgtgtccggcgatagcatcagcagcggcgattactactggggctggatcagacagcctcctggcaaaggactggaatggatcggccacatctactacagcggcgtgacctactacaaccccagcctgaagtccagagtgaccatcagcgtggacaccagccggaaccagttctccctgaagctgtctagcgtgacagccgccgataccgccgtgtactactgcaccagagaggacagcagcaactggcggagtagaggccagggaacactggtcacagttagctctggatccggcggaggcggaagtggaggcggaggatctggcggcggaggctctttcgaagtgcaactggttgaatctggcggcggactggttaagcctggcggatctctgaagctgagctgtgccgcctctggcttcgccttcagcatctacgatatgagctgggtccgacagacccctgagaagagactggaatgggtcgcctacatctctagcggcggagggacctactatcccgacacagtgaagggcagattcaccatctccagagacaacgccaagaacaccctgtacctccagatgagcagcctgaagtccgaggacaccgccatgtactactgcgccagacacagcggctatggcacacattggggagtgctgtttgcctactggggccagggaacactggtcacagtttctgctacgcgtgcctctacaaagggaccctccgtgtttcctctggctcccagcagcaagtctacaagcggaggaacagccgctctgggctgcctggtcaaggattactttcccgagcctgtgaccgtgtcctggaatagcggagcactgacaagcggcgtgcacacctttccagccgtgctgcaaagcagcggcctgtactctctgagcagcgtggtcacagtgcctagctctagcctgggcacccagacctacatctgcaatgtgaaccacaagcctagcaacaccaaggtggacaagagagtggaacccaagagctgtatccccgaggacacattcttcccaagccccgagagcagctgcgacgtgaagctggtggaaaagagcttcgagacagacaccaacctgaacttccagaacctgagcgtgatcggcttcagaatcctgctgctgaaagtggccggctttaacctgctgatgaccctgcggctgtggtccagc

SEQ ID NO: 3486 - DNA, 2736 bp, Artificial Sequence
  Synthetic Polynucloetide
atggccttaccagtgaccgccttgctcctgccgctggccttgctgctccacgccgccaggccggaagtgcagctggttgaatctggcggaggactggttcagcctggcggatctctgagactgtcttgtgccgccagcggcttcagcttcagcgacttttggatgagctgggtccgacaggcccctggcaaaggacttgaatgggtcgccacaatcagccaggccggcagcgagaaggactacgtggactctgtgaagggcagattcaccatcagccgggacaacgccaagaagtccctgtacctccagatgaacagcctgagagccgaggacaccgccgtgtactattgtgcctctggcgtgtacagcttcgactacagaggccagggcaccctggtcacagtctcttctggtaccggcggaggcggatctggcggcggaggtagcggtggcggaggatctgaattcgacatcgtgatgacacagagccctgatagcctggccgtgtctctgggagagagagccaccatcaactgcaagagcagccagagcctgctgtacagaagcaaccagaagaactacctggcctggtatcagcagaagcccggccagcctcctaagctgctgatctactgggccagcaccagagaaagcggcgtgcccgatagattttctggctctggcagcggcaccgacttcaccctgacaatttctagcctgcaagccgaggacgtggccgtgtactactgccagcagtattacaactaccccagaaccttcggccagggcaccaaggtggaaatcaagagaacagttctcgagggacagcctaaggccaatcctaccgtgacactgttccctccaagcagcgaagaactccaggccaacaaggccacacttgtgtgcctgatctccgacttctaccctggggctgtgacagtggcttggaaggccgatggatctcctgtgaaagccggcgtggaaaccaccaagccatccaagcagagcaacaacaaatacgccgccagctcctacctgagcctgacacctgagcagtggaagtcccacagatcctacagctgccaagtgacccacgaaggcagcaccgtggaaaagacagtggcccctacagagtgcagcggcagagccgattgcggctttaccagcgagagctaccagcagggcgtgctgagcgccaccatcctgtacgagatcctgctgggcaaggccaccctgtacgccgtgctggtgtctgccctggtgctgatggctatggtcaagcggaaggacagccggggacgcgccaagagaagcggatctggcgtgaagcagaccctgaatttcgacctgctgaagctggctggcgacgtggaatccaacccaggccctactagtatggactggatttggcgcatccttttccttgtcggcgctgctaccggcgcgcattccgggccccagctccagctgcaagagtctggacctggcctggtcaagcctagcgagacactgagcctgacctgtaccgtgtccggcgatagcatcagcagcggcgattactactggggctggatcagacagcctcctggcaaaggactggaatggatcggccacatctactacagcggcgtgacctactacaaccccagcctgaagtccagagtgaccatcagcgtggacaccagccggaaccagttctccctgaagctgtctagcgtgacagccgccgataccgccgtgtactactgcaccagagaggacagcagcaactggcggagtagaggccagggaacactggtcacagttagctctggatccggcggaggcggaagtggaggcggaggatctggcggcggaggctctttcgaagaagttcagctgcttgaatcaggcggcggactggttcaacctggcggatctctgagactgagctgtgccgccagcggctacagcatcacaagcgactatgcctggaactgggtccgacaggcccctggcaaaggactggaatgggtgtcctacatcagcaacagcggcagcaccagctacaaccccagcctgaagtcccggttcaccatcagcagagacaacagcaagaacaccctgtacctccagatgaacagcctgagagctgaggacaccgccgtgtattattgcgccaaagagcggaactacgactacgacgattactactacgctatggactactggggccagggaaccctggtcacagtctcttctacgcgtgcctctacaaagggaccctccgtgtttcctctggctcccagcagcaagtctacaagcggaggaacagccgctctgggctgcctggtcaaggattactttcccgagcctgtgaccgtgtcctggaatagcggagcactgacaagcggcgtgcacacctttccagccgtgctgcaaagcagcggcctgtactctctgagcagcgtggtcacagtgcctagctctagcctgggcacccagacctacatctgcaatgtgaaccacaagcctagcaacaccaaggtggacaagagagtggaacccaagagctgtatccccgaggacacattcttcccaagccccgagagcagctgcgacgtgaagctggtggaaaagagcttcgagacagacaccaacctgaacttccagaacctgagcgtgatcggcttcagaatcctgctgctgaaagtggccggctttaacctgctgatgaccctgcggctgtggtccagc

SEQ ID NO: 3487 - DNA, 2715 bp, Artificial Sequence
  Synthetic Polynucloetide
atggccttaccagtgaccgccttgctcctgccgctggccttgctgctccacgccgccaggccggaagtgcagctggttgaatctggcggaggactggttcagcctggcggatctctgagactgtcttgtgccgccagcggcttcagcttcagcgacttttggatgagctgggtccgacaggcccctggcaaaggacttgaatgggtcgccacaatcagccaggccggcagcgagaaggactacgtggactctgtgaagggcagattcaccatcagccgggacaacgccaagaagtccctgtacctccagatgaacagcctgagagccgaggacaccgccgtgtactattgtgcctctggcgtgtacagcttcgactacagaggccagggcaccctggtcacagtctcttctggtaccggcggaggcggatctggcggcggaggtagcggtggcggaggatctgaattcgacgtggtcatgacacagagccctctgagcctgcctgtgacacttggacagcctgccagcatcagctgtagaagcagccagagcctgctgcacagcagcggcaatacctacctggaatggtatcagcagaggcccggacagagccccagacctctgatctacaagatcagcacccggttcagcggcgtgcccgatagattttctggctctggcagcggcaccgacttcaccctgaagattagcagagtggaagccgaggacgtgggcgtgtactactgcttccaaggcagccacgtgccatacacctttggcggcggaacaaaggtggaaatcaagagactcgagggacagcctaaggccaatcctaccgtgacactgttccctccaagcagcgaagaactccaggccaacaaggccacacttgtgtgcctgatctccgacttctaccctggggctgtgacagtggcttggaaggccgatggatctcctgtgaaagccggcgtggaaaccaccaagccatccaagcagagcaacaacaaatacgccgccagctcctacctgagcctgacacctgagcagtggaagtcccacagatcctacagctgccaagtgacccacgaaggcagcaccgtggaaaagacagtggcccctacagagtgcagcggcagagccgattgcggctttaccagcgagagctaccagcagggcgtgctgagcgccaccatcctgtacgagatcctgctgggcaaggccaccctgtacgccgtgctggtgtctgccctggtgctgatggctatggtcaagcggaaggacagccggggacgcgccaagagaagcggatctggcgtgaagcagaccctgaatttcgacctgctgaagctggctggcgacgtggaatccaacccaggccctactagtatggactggatttggcgcatccttttccttgtcggcgctgctaccggcgcgcattccgggccccagctccagctgcaagagtctggacctggcctggtcaagcctagcgagacactgagcctgacctgtaccgtgtccggcgatagcatcagcagcggcgattactactggggctggatcagacagcctcctggcaaaggactggaatggatcggccacatctactacagcggcgtgacctactacaaccccagcctgaagtccagagtgaccatcagcgtggacaccagccggaaccagttctccctgaagctgtctagcgtgacagccgccgataccgccgtgtactactgcaccagagaggacagcagcaactggcggagtagaggccagggaacactggtcacagttagctctggatccggcggaggcggaagtggaggcggaggatctggcggcggaggctctttcgaacaagttcagctggttcagagcggagccgaagtgaagaaacctggggcctctgtgaaggtgtcctgcaaagcctctggcctgaccatcgaggactactacatgcactgggtccgacaggcccctggacaaggacttgaatggatgggctggatcgaccccgagaacggcgatacagagtacggccctaagttccagggcagagtgaccatgaccagagacaccagcatcaacaccgcctacatggaactgagccggctgagatccgatgacaccgccgtgtactattgcgccgtgcacaatgcccactacggcacttggtttgcctattggggccagggcacactggtcaccgttagctctacgcgtgcctctacaaagggaccctccgtgtttcctctggctcccagcagcaagtctacaagcggaggaacagccgctctgggctgcctggtcaaggattactttcccgagcctgtgaccgtgtcctggaatagcggagcactgacaagcggcgtgcacacctttccagccgtgctgcaaagcagcggcctgtactctctgagcagcgtggtcacagtgcctagctctagcctgggcacccagacctacatctgcaatgtgaaccacaagcctagcaacaccaaggtggacaagagagtggaacccaagagctgtatccccgaggacacattcttcccaagccccgagagcagctgcgacgtgaagctggtggaaaagagcttcgagacagacaccaacctgaacttccagaacctgagcgtgatcggcttcagaatcctgctgctgaaagtggccggctttaacctgctgatgaccctgcggctgtggtccagc

SEQ ID NO: 3488 - DNA, 2691 bp, Artificial Sequence
  Synthetic Polynucloetide
atggccttaccagtgaccgccttgctcctgccgctggccttgctgctccacgccgccaggccggaagtgcagctggttgaatctggcggaggactggttcagcctggcggatctctgagactgtcttgtgccgccagcggcttcagcttcagcgacttttggatgagctgggtccgacaggcccctggcaaaggacttgaatgggtcgccacaatcagccaggccggcagcgagaaggactacgtggactctgtgaagggcagattcaccatcagccgggacaacgccaagaagtccctgtacctccagatgaacagcctgagagccgaggacaccgccgtgtactattgtgcctctggcgtgtacagcttcgactacagaggccagggcaccctggtcacagtctcttctggtaccggcggaggcggatctggcggcggaggtagcggtggcggaggatctgaattcgacatccagatgacacagagccctagcagcctgtctgccagcgtgggagacagagtgaccatcacctgtagagccagcgagaacatctacagcaacctggcctggtatcagcagaagcctggcaaggcccctaagctgctgatctacgccgccaccaatctggctgatggcgtgccaagcagattttccggctctggcagcggcaccgatttcaccctgacaatatccagcctccagcctgaggacttcgccacctactactgccagcacttttggggcacccctacattcggccagggcaccaaggtggaaatcaagagaacagttctcgagggacagcctaaggccaatcctaccgtgacactgttccctccaagcagcgaagaactccaggccaacaaggccacacttgtgtgcctgatctccgacttctaccctggggctgtgacagtggcttggaaggccgatggatctcctgtgaaagccggcgtggaaaccaccaagccatccaagcagagcaacaacaaatacgccgccagctcctacctgagcctgacacctgagcagtggaagtcccacagatcctacagctgccaagtgacccacgaaggcagcaccgtggaaaagacagtggcccctacagagtgcagcggcagagccgattgcggctttaccagcgagagctaccagcagggcgtgctgagcgccaccatcctgtacgagatcctgctgggcaaggccaccctgtacgccgtgctggtgtctgccctggtgctgatggctatggtcaagcggaaggacagccggggacgcgccaagagaagcggatctggcgtgaagcagaccctgaatttcgacctgctgaagctggctggcgacgtggaatccaacccaggccctactagtatggactggatttggcgcatccttttccttgtcggcgctgctaccggcgcgcattccgggccccagctccagctgcaagagtctggacctggcctggtcaagcctagcgagacactgagcctgacctgtaccgtgtccggcgatagcatcagcagcggcgattactactggggctggatcagacagcctcctggcaaaggactggaatggatcggccacatctactacagcggcgtgacctactacaaccccagcctgaagtccagagtgaccatcagcgtggacaccagccggaaccagttctccctgaagctgtctagcgtgacagccgccgataccgccgtgtactactgcaccagagaggacagcagcaactggcggagtagaggccagggaacactggtcacagttagctctggatccggcggaggcggaagtggaggcggaggatctggcggcggaggctctttcgaagaagtgcagctggttgaatcaggtggcggcctggttcaacctggcggatctctgagactgagctgtgccgcctctggcttcagcctgacaaattacggcgtgcactgggtccgacaggcccctggaaaaggactggaatgggtgtccgtgatttggagcggcggcagcaccgattacaacgccgccttcatcagccggttcaccatcagcgccgacaccagcaagaataccgcctacctccagatgaactccctgagagccgaggacaccgccgtgtactattgcgccagagaactgatccacgctatggacaactggggccagggaaccctggtcacagtctcttctacgcgtgcctctacaaagggaccctccgtgtttcctctggctcccagcagcaagtctacaagcggaggaacagccgctctgggctgcctggtcaaggattactttcccgagcctgtgaccgtgtcctggaatagcggagcactgacaagcggcgtgcacacctttccagccgtgctgcaaagcagcggcctgtactctctgagcagcgtggtcacagtgcctagctctagcctgggcacccagacctacatctgcaatgtgaaccacaagcctagcaacaccaaggtggacaagagagtggaacccaagagctgtatccccgaggacacattcttcccaagccccgagagcagctgcgacgtgaagctggtggaaaagagcttcgagacagacaccaacctgaacttccagaacctgagcgtgatcggcttcagaatcctgctgctgaaagtggccggctttaacctgctgatgaccctgcggctgtggtccagc

SEQ ID NO: 3489 - DNA, 2712 bp, Artificial Sequence
  Synthetic Polynucloetide
atggccttaccagtgaccgccttgctcctgccgctggccttgctgctccacgccgccaggccggaagtgcagctggttgaatctggcggaggactggttcagcctggcggatctctgagactgtcttgtgccgccagcggcttcagcttcagcgacttttggatgagctgggtccgacaggcccctggcaaaggacttgaatgggtcgccacaatcagccaggccggcagcgagaaggactacgtggactctgtgaagggcagattcaccatcagccgggacaacgccaagaagtccctgtacctccagatgaacagcctgagagccgaggacaccgccgtgtactattgtgcctctggcgtgtacagcttcgactacagaggccagggcaccctggtcacagtctcttctggtaccggcggaggcggatctggcggcggaggtagcggtggcggaggatctgaattcgacttcgtgatgacacagagccctctgagcctgcctgtgacacctggcgaacctgccagcatcagctgtagaagcagccagagcatcgtgcacagcaacggcaacacctacctggaatggtatctccagaagcctggacagagcccacagctgctgatctacaaggtgtccaacagattcagcggcgtgcccgacagattttctggcagcggctctggcaccgacttcaccctgaagattagcagagtggaagccgaggacgtgggcgtgtactactgcttccaaggctctcacgtgcccctgacctttggacagggcaccaagctggaaatcaagagactcgagggacagcctaaggccaatcctaccgtgacactgttccctccaagcagcgaagaactccaggccaacaaggccacacttgtgtgcctgatctccgacttctaccctggggctgtgacagtggcttggaaggccgatggatctcctgtgaaagccggcgtggaaaccaccaagccatccaagcagagcaacaacaaatacgccgccagctcctacctgagcctgacacctgagcagtggaagtcccacagatcctacagctgccaagtgacccacgaaggcagcaccgtggaaaagacagtggcccctacagagtgcagcggcagagccgattgcggctttaccagcgagagctaccagcagggcgtgctgagcgccaccatcctgtacgagatcctgctgggcaaggccaccctgtacgccgtgctggtgtctgccctggtgctgatggctatggtcaagcggaaggacagccggggacgcgccaagagaagcggatctggcgtgaagcagaccctgaatttcgacctgctgaagctggctggcgacgtggaatccaacccaggccctactagtatggactggatttggcgcatccttttccttgtcggcgctgctaccggcgcgcattccgggccccagctccagctgcaagagtctggacctggcctggtcaagcctagcgagacactgagcctgacctgtaccgtgtccggcgatagcatcagcagcggcgattactactggggctggatcagacagcctcctggcaaaggactggaatggatcggccacatctactacagcggcgtgacctactacaaccccagcctgaagtccagagtgaccatcagcgtggacaccagccggaaccagttctccctgaagctgtctagcgtgacagccgccgataccgccgtgtactactgcaccagagaggacagcagcaactggcggagtagaggccagggaacactggtcacagttagctctggatccggcggaggcggaagtggaggcggaggatctggcggcggaggctctttcgaagaagtgcagctggttgaaagcggagccgaagtgaagaaacctggggcctctgtgaaggtgtcctgcaaggccagcggctacacctttaccagctactggattcactgggtccgacaggcccctggacaaggacttgagtggatgggcgagaacgacccctccaacggcaggaccaactacaacgagaagttcaagaaccgcgtgaccctgaccgtggacaccagcatctctaccgcctacatggaactgagccggctgagatccgatgacaccgccgtgtactattgcgccagaggacccaactacttttacagcatggactactggggccagggcacaatggtcaccgttagctctacgcgtgcctctacaaagggaccctccgtgtttcctctggctcccagcagcaagtctacaagcggaggaacagccgctctgggctgcctggtcaaggattactttcccgagcctgtgaccgtgtcctggaatagcggagcactgacaagcggcgtgcacacctttccagccgtgctgcaaagcagcggcctgtactctctgagcagcgtggtcacagtgcctagctctagcctgggcacccagacctacatctgcaatgtgaaccacaagcctagcaacaccaaggtggacaagagagtggaacccaagagctgtatccccgaggacacattcttcccaagccccgagagcagctgcgacgtgaagctggtggaaaagagcttcgagacagacaccaacctgaacttccagaacctgagcgtgatcggcttcagaatcctgctgctgaaagtggccggctttaacctgctgatgaccctgcggctgtggtccagc

SEQ ID NO: 3490 - DNA, 2691 bp, Artificial Sequence
  Synthetic Polynucloetide
atggccttaccagtgaccgccttgctcctgccgctggccttgctgctccacgccgccaggccggaagtgcagctggttgaatctggcggaggactggttcagcctggcggatctctgagactgtcttgtgccgccagcggcttcagcttcagcgacttttggatgagctgggtccgacaggcccctggcaaaggacttgaatgggtcgccacaatcagccaggccggcagcgagaaggactacgtggactctgtgaagggcagattcaccatcagccgggacaacgccaagaagtccctgtacctccagatgaacagcctgagagccgaggacaccgccgtgtactattgtgcctctggcgtgtacagcttcgactacagaggccagggcaccctggtcacagtctcttctggtaccggcggaggcggatctggcggcggaggtagcggtggcggaggatctgaattcgacatccagctgactcagagccctagctttctgagcgccagcgtgggcgacagagtgaccatcacatgtagcgccagatccagcatcagcttcatgtactggtatcagcagaagcccggcaaggcccctaagctgctgatctacgacaccagcaatctggcctctggcgtgcccagcagattttctggaagcggcagcggcaccgagttcaccctgacaatctctagcctggaagccgaggatgccgccacctactattgccagcagtggtccagctatcccctgacatttggacagggcaccaagctggaaatcaaactcgagggacagcctaaggccaatcctaccgtgacactgttccctccaagcagcgaagaactccaggccaacaaggccacacttgtgtgcctgatctccgacttctaccctggggctgtgacagtggcttggaaggccgatggatctcctgtgaaagccggcgtggaaaccaccaagccatccaagcagagcaacaacaaatacgccgccagctcctacctgagcctgacacctgagcagtggaagtcccacagatcctacagctgccaagtgacccacgaaggcagcaccgtggaaaagacagtggcccctacagagtgcagcggcagagccgattgcggctttaccagcgagagctaccagcagggcgtgctgagcgccaccatcctgtacgagatcctgctgggcaaggccaccctgtacgccgtgctggtgtctgccctggtgctgatggctatggtcaagcggaaggacagccggggacgcgccaagagaagcggatctggcgtgaagcagaccctgaatttcgacctgctgaagctggctggcgacgtggaatccaacccaggccctactagtatggactggatttggcgcatccttttccttgtcggcgctgctaccggcgcgcattccgggccccagctccagctgcaagagtctggacctggcctggtcaagcctagcgagacactgagcctgacctgtaccgtgtccggcgatagcatcagcagcggcgattactactggggctggatcagacagcctcctggcaaaggactggaatggatcggccacatctactacagcggcgtgacctactacaaccccagcctgaagtccagagtgaccatcagcgtggacaccagccggaaccagttctccctgaagctgtctagcgtgacagccgccgataccgccgtgtactactgcaccagagaggacagcagcaactggcggagtagaggccagggaacactggtcacagttagctctggatccggcggaggcggaagtggaggcggaggatctggcggcggaggctctttcgaacaggttcagctggttcagtctggggccgaagtgaagaaacctggggcctctgtgaaggtgtcctgcaaggcttccggctacacctttaccggctcttggatgaactgggtccgacaggctcctggacagggactcgaatggatcggcagaatctatcctggcgacggcgagacaaactacaacggcaagttcaaggaccgcgtgacaatcaccgccgacaagagcacaagcaccgcctacatggaactgagcagcctgcggagcgaagataccgccgtgtactactgcgcccggatctacggcaacaacgtgtacttcgatgtgtggggccagggcacaaccgtgacagtctcttctacgcgtgcctctacaaagggaccctccgtgtttcctctggctcccagcagcaagtctacaagcggaggaacagccgctctgggctgcctggtcaaggattactttcccgagcctgtgaccgtgtcctggaatagcggagcactgacaagcggcgtgcacacctttccagccgtgctgcaaagcagcggcctgtactctctgagcagcgtggtcacagtgcctagctctagcctgggcacccagacctacatctgcaatgtgaaccacaagcctagcaacaccaaggtggacaagagagtggaacccaagagctgtatccccgaggacacattcttcccaagccccgagagcagctgcgacgtgaagctggtggaaaagagcttcgagacagacaccaacctgaacttccagaacctgagcgtgatcggcttcagaatcctgctgctgaaagtggccggctttaacctgctgatgaccctgcggctgtggtccagc

SEQ ID NO: 3491 - DNA, 2715 bp, Artificial Sequence
  Synthetic Polynucloetide
atggccttaccagtgaccgccttgctcctgccgctggccttgctgctccacgccgccaggccggaagtgcagctggttgaatctggcggaggactggttcagcctggcggatctctgagactgtcttgtgccgccagcggcttcagcttcagcgacttttggatgagctgggtccgacaggcccctggcaaaggacttgaatgggtcgccacaatcagccaggccggcagcgagaaggactacgtggactctgtgaagggcagattcaccatcagccgggacaacgccaagaagtccctgtacctccagatgaacagcctgagagccgaggacaccgccgtgtactattgtgcctctggcgtgtacagcttcgactacagaggccagggcaccctggtcacagtctcttctggtaccggcggaggcggatctggcggcggaggtagcggtggcggaggatctgaattccagctggtgctgacacagtctccaagcgcctctgccagcctgggatctagcgtgaagctgacctgtacactgagcagcggccacaagaccgacaccatcgactggtatcagcagcagcctggcaaggcccctagatacctgatgaagctggaaggcagcggcagctacaacaaaggctctggcgtgcccgatagattcagcggcagttcttctggcgctgattggtatctgaccatcagcagcctccagagcgaggacgaggccgattactactgcggcacagactaccccggcaactacctgtttggcggcggaacacagctgacagtgcttggcctcgagggacagcctaaggccaatcctaccgtgacactgttccctccaagcagcgaagaactccaggccaacaaggccacacttgtgtgcctgatctccgacttctaccctggggctgtgacagtggcttggaaggccgatggatctcctgtgaaagccggcgtggaaaccaccaagccatccaagcagagcaacaacaaatacgccgccagctcctacctgagcctgacacctgagcagtggaagtcccacagatcctacagctgccaagtgacccacgaaggcagcaccgtggaaaagacagtggcccctacagagtgcagcggcagagccgattgcggctttaccagcgagagctaccagcagggcgtgctgagcgccaccatcctgtacgagatcctgctgggcaaggccaccctgtacgccgtgctggtgtctgccctggtgctgatggctatggtcaagcggaaggacagccggggacgcgccaagagaagcggatctggcgtgaagcagaccctgaatttcgacctgctgaagctggctggcgacgtggaatccaacccaggccctactagtatggactggatttggcgcatccttttccttgtcggcgctgctaccggcgcgcattccgggccccagctccagctgcaagagtctggacctggcctggtcaagcctagcgagacactgagcctgacctgtaccgtgtccggcgatagcatcagcagcggcgattactactggggctggatcagacagcctcctggcaaaggactggaatggatcggccacatctactacagcggcgtgacctactacaaccccagcctgaagtccagagtgaccatcagcgtggacaccagccggaaccagttctccctgaagctgtctagcgtgacagccgccgataccgccgtgtactactgcaccagagaggacagcagcaactggcggagtagaggccagggaacactggtcacagttagctctggatccggcggaggcggaagtggaggcggaggatctggcggcggaggctctttcgaacaagaacagctggttgaaagcggcggaggactggttcaacctggcggttctctgagactgagctgtgccgccagcggcttcaccttcagcgactactacatgagctggatcagacaggccccaggcaaaggactggaatgggtcgccacaatctaccccagcagcggcaagacctactacgccgattctgccaagggcagactgaccatctccagcgacaacgccaaggacagcctgtacctccagatgaacagcctgagagccgaggacaccgccgtgtactactgcaccagagatagctacgccgacgacgccgctctgtttgacatttggggccagggcaccaccgtgaccgtttcttctacgcgtgcctctacaaagggaccctccgtgtttcctctggctcccagcagcaagtctacaagcggaggaacagccgctctgggctgcctggtcaaggattactttcccgagcctgtgaccgtgtcctggaatagcggagcactgacaagcggcgtgcacacctttccagccgtgctgcaaagcagcggcctgtactctctgagcagcgtggtcacagtgcctagctctagcctgggcacccagacctacatctgcaatgtgaaccacaagcctagcaacaccaaggtggacaagagagtggaacccaagagctgtatccccgaggacacattcttcccaagccccgagagcagctgcgacgtgaagctggtggaaaagagcttcgagacagacaccaacctgaacttccagaacctgagcgtgatcggcttcagaatcctgctgctgaaagtggccggctttaacctgctgatgaccctgcggctgtggtccagc

SEQ ID NO: 3492 - DNA, 2705 bp, Artificial Sequence
  Synthetic Polynucloetide
atggccttaccagtgaccgccttgctcctgccgctggccttgctgctccacgccgccaggccggaagtgcagctggttgaatctggcggaggactggttcagcctggcggatctctgagactgtcttgtgccgccagcggcttcagcttcagcgacttttggatgagctgggtccgacaggcccctggcaaaggacttgaatgggtcgccacaatcagccaggccggcagcgagaaggactacgtggactctgtgaagggcagattcaccatcagccgggacaacgccaagaagtccctgtacctccagatgaacagcctgagagccgaggacaccgccgtgtactattgtgcctctggcgtgtacagcttcgactacagaggccagggcaccctggtcacagtctcttctggtaccggcggaggcggatctggcggcggaggtagcggtggcggaggatctgaattcgagattgtgttgacacagtctcccgataccctgtcactgtcacccggcgagaaggcaacgctgagttgcagagcaagccagtcagtctcctcttcttttctggcctggtatcagcaaaaaccaggtcaggcaccatctctcctgatttacgttgccagcagacgggcggctggcattcccgacaggttctctggaagcggatctgggaccgattttaccctgacaattagccgcttggagcccgaagactttggtatgttttactgccagcactacggaaggacacctttcacatttggcccgggcacgaaagtcgatataaaacgcgcctcgagggacagcctaaggccaatcctaccgtgacactgttccctccaagcagcgaagaactccaggccaacaaggccacacttgtgtgcctgatctccgacttctaccctggggctgtgacagtggcttggaaggccgatggatctcctgtgaaagccggcgtggaaaccaccaagccatccaagcagagcaacaacaaatacgccgccagctcctacctgagcctgacacctgagcagtggaagtcccacagatcctacagctgccaagtgacccacgaaggcagcaccgtggaaaagacagtggcccctacagagtgcagcggcagagccgattgcggctttaccagcgagagctaccagcagggcgtgctgagcgccaccatcctgtacgagatcctgctgggcaaggccaccctgtacgccgtgctggtgtctgccctggtgctgatggctatggtcaagcggaaggacagccggggacgcgccaagagaagcggatctggcgtgaagcagaccctgaatttcgacctgctgaagctggctggcgacgtggaatccaacccaggccctactagtatggactggatttggcgcatccttttccttgtcggcgctgctaccggcgcgcattccgggccccagctccagctgcaagagtctggacctggcctggtcaagcctagcgagacactgagcctgacctgtaccgtgtccggcgatagcatcagcagcggcgattactactggggctggatcagacagcctcctggcaaaggactggaatggatcggccacatctactacagcggcgtgacctactacaaccccagcctgaagtccagagtgaccatcagcgtggacaccagccggaaccagttctccctgaagctgtctagcgtgacagccgccgataccgccgtgtactactgcaccagagaggacagcagcaactggcggagtagaggccagggaacactggtcacagttagctctggatccggcggaggcggaagtggaggcggaggatctggcggcggaggctctttcgaacagatccagttggtggaatcagggggcggtgtggtgcagccgggtaggagcctgagactgtcatgcgtggcgtctggcttcacattcaagaactacggcatgcactgggtgcgacaggcccccggaaagggtttggagtgggtcgccgtgatctggtacgacggatctaatgagtattacggagatcctgtgaagggaaggttcaccatctcccgcgacaatagcaaaaatatgctctacctgcaaatgaactcactcagggcggatgatacggcggtctactattgcgctcgctcagggattgctgtggccggcgcattcgattactggggacagggtaccctggtgacagtatcaagcacgcgtgcctctacaaagggaccctccgtgtttcctctggctcccagcagcaagtctacaagcggaggaacagccgctctgggctgcctggtcaaggattactttcccgagcctgtgaccgtgtcctggaatagcggagcactgacaagcggcgtgcacacctttccagccgtgctgcaaagcagcggcctgtactctctgagcagcgtggtcacagtgcctagctctagcctgggcacccagacctacatctgcaatgtgaaccacaagcctagcaacaccaaggtggacaagagagtggaacccaagagctgtatccccgaggacacattcttcccaagccccgagagcagctgcgacgtgaagctggtggaaaagagcttcgagacagacaccaacctgaacttccagaacctgagcgtgatcggcttcagaatcctgctgctgaaagtggccggctttaacctgctgatgaccctgcggctgtggtccagc

SEQ ID NO: 3493 - DNA, 2721 bp, Artificial Sequence
  Synthetic Polynucloetide
atggccttaccagtgaccgccttgctcctgccgctggccttgctgctccacgccgccaggccggaagtgcagctggttgaatctggcggaggactggttcagcctggcggatctctgagactgtcttgtgccgccagcggcttcagcttcagcgacttttggatgagctgggtccgacaggcccctggcaaaggacttgaatgggtcgccacaatcagccaggccggcagcgagaaggactacgtggactctgtgaagggcagattcaccatcagccgggacaacgccaagaagtccctgtacctccagatgaacagcctgagagccgaggacaccgccgtgtactattgtgcctctggcgtgtacagcttcgactacagaggccagggcaccctggtcacagtctcttctggtaccggcggaggcggatctggcggcggaggtagcggtggcggaggatctgaattcgacattcagatgacccaaagcccgtccagcctgtccgccagcctgggagatagagtgacaatcacgtgtagagcttcccaagggataagaaatgatctcgggtggtatcagcagaagcccggcaaagcccccaaaaggcttatatatgctagtagtacactgcagtctggagttccttcccgattttcaggtagcggctccggtacagagttcaccctcacgataagctcactccagcctgaggatttcgcaacgtactactgcctccagcacaacaattttccctggactttcggccagggcaccaaggtggagatcaagaggctcgagggacagcctaaggccaatcctaccgtgacactgttccctccaagcagcgaagaactccaggccaacaaggccacacttgtgtgcctgatctccgacttctaccctggggctgtgacagtggcttggaaggccgatggatctcctgtgaaagccggcgtggaaaccaccaagccatccaagcagagcaacaacaaatacgccgccagctcctacctgagcctgacacctgagcagtggaagtcccacagatcctacagctgccaagtgacccacgaaggcagcaccgtggaaaagacagtggcccctacagagtgcagcggcagagccgattgcggctttaccagcgagagctaccagcagggcgtgctgagcgccaccatcctgtacgagatcctgctgggcaaggccaccctgtacgccgtgctggtgtctgccctggtgctgatggctatggtcaagcggaaggacagccggggacgcgccaagagaagcggatctggcgtgaagcagaccctgaatttcgacctgctgaagctggctggcgacgtggaatccaacccaggccctactagtatggactggatttggcgcatccttttccttgtcggcgctgctaccggcgcgcattccgggccccagctccagctgcaagagtctggacctggcctggtcaagcctagcgagacactgagcctgacctgtaccgtgtccggcgatagcatcagcagcggcgattactactggggctggatcagacagcctcctggcaaaggactggaatggatcggccacatctactacagcggcgtgacctactacaaccccagcctgaagtccagagtgaccatcagcgtggacaccagccggaaccagttctccctgaagctgtctagcgtgacagccgccgataccgccgtgtactactgcaccagagaggacagcagcaactggcggagtagaggccagggaacactggtcacagttagctctggatccggcggaggcggaagtggaggcggaggatctggcggcggaggctctttcgaacaagttactttgaaggagtctggacctgtactggtgaagccaaccgagacactgacactcacgtgtacagtgagtggtttttccttgatcaacgcaaggatgggcgtcagctggatcaggcaaccccctggcaaggctctggaatggctcgctcacatattcagcaatgccgaaaaaagctaccggacaagcctgaaatcccgcctgactatttccaaggacacttctaagtctcaggtggtgctgaccatgaccaacatggacccggtggacaccgccacctattactgcgcaagaatccctgggtatggtgggaatggtgactaccattattatgggatggatgtgtgggggcaaggcacaaccgtaacggtctcaagcacgcgtgcctctacaaagggaccctccgtgtttcctctggctcccagcagcaagtctacaagcggaggaacagccgctctgggctgcctggtcaaggattactttcccgagcctgtgaccgtgtcctggaatagcggagcactgacaagcggcgtgcacacctttccagccgtgctgcaaagcagcggcctgtactctctgagcagcgtggtcacagtgcctagctctagcctgggcacccagacctacatctgcaatgtgaaccacaagcctagcaacaccaaggtggacaagagagtggaacccaagagctgtatccccgaggacacattcttcccaagccccgagagcagctgcgacgtgaagctggtggaaaagagcttcgagacagacaccaacctgaacttccagaacctgagcgtgatcggcttcagaatcctgctgctgaaagtggccggctttaacctgctgatgaccctgcggctgtggtccagc

SEQ ID NO: 3494 - DNA, 2700 bp, Artificial Sequence
  Synthetic Polynucloetide
atggccttaccagtgaccgccttgctcctgccgctggccttgctgctccacgccgccaggccggaagtgcagctggttgaatctggcggaggactggttcagcctggcggatctctgagactgtcttgtgccgccagcggcttcagcttcagcgacttttggatgagctgggtccgacaggcccctggcaaaggacttgaatgggtcgccacaatcagccaggccggcagcgagaaggactacgtggactctgtgaagggcagattcaccatcagccgggacaacgccaagaagtccctgtacctccagatgaacagcctgagagccgaggacaccgccgtgtactattgtgcctctggcgtgtacagcttcgactacagaggccagggcaccctggtcacagtctcttctggtaccggcggaggcggatctggcggcggaggtagcggtggcggaggatctgaattcgacatcgtgctgacacagagccctccaagcctggctatgagcctgggaaagagagccaccatcagctgtagagccagcgagagcgtgacaatcctgggctctcacctgatccactggtatcagcagaagcccggccagcctcctacactgctgattcagctggcctccaatgtgcagacaggcgtgccagccagattttctggcagcggcagcagaaccgacttcaccctgaccattgatcccgtggaagaggacgacgtggccgtgtactactgcctccagagcagaacaatccccagaacctttggcggaggcaccaagctggaaatcaaactcgagggacagcctaaggccaatcctaccgtgacactgttccctccaagcagcgaagaactccaggccaacaaggccacacttgtgtgcctgatctccgacttctaccctggggctgtgacagtggcttggaaggccgatggatctcctgtgaaagccggcgtggaaaccaccaagccatccaagcagagcaacaacaaatacgccgccagctcctacctgagcctgacacctgagcagtggaagtcccacagatcctacagctgccaagtgacccacgaaggcagcaccgtggaaaagacagtggcccctacagagtgcagcggcagagccgattgcggctttaccagcgagagctaccagcagggcgtgctgagcgccaccatcctgtacgagatcctgctgggcaaggccaccctgtacgccgtgctggtgtctgccctggtgctgatggctatggtcaagcggaaggacagccggggacgcgccaagagaagcggatctggcgtgaagcagaccctgaatttcgacctgctgaagctggctggcgacgtggaatccaacccaggccctactagtatggactggatttggcgcatccttttccttgtcggcgctgctaccggcgcgcattccgggccccagctccagctgcaagagtctggacctggcctggtcaagcctagcgagacactgagcctgacctgtaccgtgtccggcgatagcatcagcagcggcgattactactggggctggatcagacagcctcctggcaaaggactggaatggatcggccacatctactacagcggcgtgacctactacaaccccagcctgaagtccagagtgaccatcagcgtggacaccagccggaaccagttctccctgaagctgtctagcgtgacagccgccgataccgccgtgtactactgcaccagagaggacagcagcaactggcggagtagaggccagggaacactggtcacagttagctctggatccggcggaggcggaagtggaggcggaggatctggcggcggaggctctttcgaacaaatccagctggtgcagtctggccccgagctgaagaaacctggcgagacagtgaagatcagctgcaaggccagcggctacaccttcaccgactacagcatcaactgggtcaagagagcccctggcaagggcctgaaatggatgggctggatcaacaccgaaaccagagagcccgcctacgcctacgacttcagaggcagattcgccttcagcctggaaaccagcgccagcacagcctacctccagatcaacaacctgaagtacgaggacaccgccacctacttttgcgccctggactacagctacgctatggactattggggccagggcaccagcgtgacagtctcttctacgcgtgcctctacaaagggaccctccgtgtttcctctggctcccagcagcaagtctacaagcggaggaacagccgctctgggctgcctggtcaaggattactttcccgagcctgtgaccgtgtcctggaatagcggagcactgacaagcggcgtgcacacctttccagccgtgctgcaaagcagcggcctgtactctctgagcagcgtggtcacagtgcctagctctagcctgggcacccagacctacatctgcaatgtgaaccacaagcctagcaacaccaaggtggacaagagagtggaacccaagagctgtatccccgaggacacattcttcccaagccccgagagcagctgcgacgtgaagctggtggaaaagagcttcgagacagacaccaacctgaacttccagaacctgagcgtgatcggcttcagaatcctgctgctgaaagtggccggctttaacctgctgatgaccctgcggctgtggtccagc

SEQ ID NO: 3495 - DNA, 2706 bp, Artificial Sequence
  Synthetic Polynucloetide
atggccttaccagtgaccgccttgctcctgccgctggccttgctgctccacgccgccaggccggaagtgcagctggttgaatctggcggaggactggttcagcctggcggatctctgagactgtcttgtgccgccagcggcttcagcttcagcgacttttggatgagctgggtccgacaggcccctggcaaaggacttgaatgggtcgccacaatcagccaggccggcagcgagaaggactacgtggactctgtgaagggcagattcaccatcagccgggacaacgccaagaagtccctgtacctccagatgaacagcctgagagccgaggacaccgccgtgtactattgtgcctctggcgtgtacagcttcgactacagaggccagggcaccctggtcacagtctcttctggtaccggcggaggcggatctggcggcggaggtagcggtggcggaggatctgaattcgatattcaactgacacaatcccccagctcactcagcgccagcgtgggggacagggttagctttacctgtcaagcctctcaggatataaataactttctgaactggtatcaacagaagcctgggaaggcgcccaaactcctgatctatgatgcgtccaacctggaaactggcgtgccttcacgctttagcggctctggcagtggtacagacttcacttttaccatctcttcacttcagccggaggacatcgccacatattactgtcaacagtacggaaacttgccctttacttttggaggcggcaccaaagttgaaatcaaaagactcgagggacagcctaaggccaatcctaccgtgacactgttccctccaagcagcgaagaactccaggccaacaaggccacacttgtgtgcctgatctccgacttctaccctggggctgtgacagtggcttggaaggccgatggatctcctgtgaaagccggcgtggaaaccaccaagccatccaagcagagcaacaacaaatacgccgccagctcctacctgagcctgacacctgagcagtggaagtcccacagatcctacagctgccaagtgacccacgaaggcagcaccgtggaaaagacagtggcccctacagagtgcagcggcagagccgattgcggctttaccagcgagagctaccagcagggcgtgctgagcgccaccatcctgtacgagatcctgctgggcaaggccaccctgtacgccgtgctggtgtctgccctggtgctgatggctatggtcaagcggaaggacagccggggacgcgccaagagaagcggatctggcgtgaagcagaccctgaatttcgacctgctgaagctggctggcgacgtggaatccaacccaggccctactagtatggactggatttggcgcatccttttccttgtcggcgctgctaccggcgcgcattccgggccccagctccagctgcaagagtctggacctggcctggtcaagcctagcgagacactgagcctgacctgtaccgtgtccggcgatagcatcagcagcggcgattactactggggctggatcagacagcctcctggcaaaggactggaatggatcggccacatctactacagcggcgtgacctactacaaccccagcctgaagtccagagtgaccatcagcgtggacaccagccggaaccagttctccctgaagctgtctagcgtgacagccgccgataccgccgtgtactactgcaccagagaggacagcagcaactggcggagtagaggccagggaacactggtcacagttagctctggatccggcggaggcggaagtggaggcggaggatctggcggcggaggctctttcgaacaggtccaactgcaagaaagcggacccggactggtgaagccttctgagacacttagtctgacgtgcacggtcagtggcggctccatctcctcctattattggtcatggatacgacaacccccaggtaagggcctggaatggattggctatatctactattcaggaagcacgaactacaatcccagcctgaagtcccgagtgacaatttcagtagataccagtaaaaaccagttcagtcttaaactgtcaagcgtgacagctgccgacaccgctgtgtattactgcgtctcactggtgtattgtggaggggattgttatagcgggttcgattattggggacagggaaccctggtgactgtatcttccacgcgtgcctctacaaagggaccctccgtgtttcctctggctcccagcagcaagtctacaagcggaggaacagccgctctgggctgcctggtcaaggattactttcccgagcctgtgaccgtgtcctggaatagcggagcactgacaagcggcgtgcacacctttccagccgtgctgcaaagcagcggcctgtactctctgagcagcgtggtcacagtgcctagctctagcctgggcacccagacctacatctgcaatgtgaaccacaagcctagcaacaccaaggtggacaagagagtggaacccaagagctgtatccccgaggacacattcttcccaagccccgagagcagctgcgacgtgaagctggtggaaaagagcttcgagacagacaccaacctgaacttccagaacctgagcgtgatcggcttcagaatcctgctgctgaaagtggccggctttaacctgctgatgaccctgcggctgtggtccagc

SEQ ID NO: 3496 - DNA, 2712 bp, Artificial Sequence
  Synthetic Polynucloetide
atggccttaccagtgaccgccttgctcctgccgctggccttgctgctccacgccgccaggccggaagtgcagctggttgaatctggcggaggactggttcagcctggcggatctctgagactgtcttgtgccgccagcggcttcagcttcagcgacttttggatgagctgggtccgacaggcccctggcaaaggacttgaatgggtcgccacaatcagccaggccggcagcgagaaggactacgtggactctgtgaagggcagattcaccatcagccgggacaacgccaagaagtccctgtacctccagatgaacagcctgagagccgaggacaccgccgtgtactattgtgcctctggcgtgtacagcttcgactacagaggccagggcaccctggtcacagtctcttctggtaccggcggaggcggatctggcggcggaggtagcggtggcggaggatctgaattcgatatccagctcactcaaagcccctctagtctctctgcctcagtgggggatcgggtcagttttacttgtcaagcttcacaggatatcaacaacttccttaattggtatcagcagaagccaggaaaagcacccaagctgctcatctatgatgcctcaaatttggagacgggtgttcccagtcgattctctgggtcagggtccgggaccgactttacgtttacgatctcctctctgcagcccgaagacatcgccacatactattgtcaacagtacggcaacttgcctttcacatttgggggcgggactaaggttgaaatcaagaggctcgagggacagcctaaggccaatcctaccgtgacactgttccctccaagcagcgaagaactccaggccaacaaggccacacttgtgtgcctgatctccgacttctaccctggggctgtgacagtggcttggaaggccgatggatctcctgtgaaagccggcgtggaaaccaccaagccatccaagcagagcaacaacaaatacgccgccagctcctacctgagcctgacacctgagcagtggaagtcccacagatcctacagctgccaagtgacccacgaaggcagcaccgtggaaaagacagtggcccctacagagtgcagcggcagagccgattgcggctttaccagcgagagctaccagcagggcgtgctgagcgccaccatcctgtacgagatcctgctgggcaaggccaccctgtacgccgtgctggtgtctgccctggtgctgatggctatggtcaagcggaaggacagccggggacgcgccaagagaagcggatctggcgtgaagcagaccctgaatttcgacctgctgaagctggctggcgacgtggaatccaacccaggccctactagtatggactggatttggcgcatccttttccttgtcggcgctgctaccggcgcgcattccgggccccagctccagctgcaagagtctggacctggcctggtcaagcctagcgagacactgagcctgacctgtaccgtgtccggcgatagcatcagcagcggcgattactactggggctggatcagacagcctcctggcaaaggactggaatggatcggccacatctactacagcggcgtgacctactacaaccccagcctgaagtccagagtgaccatcagcgtggacaccagccggaaccagttctccctgaagctgtctagcgtgacagccgccgataccgccgtgtactactgcaccagagaggacagcagcaactggcggagtagaggccagggaacactggtcacagttagctctggatccggcggaggcggaagtggaggcggaggatctggcggcggaggctctttcgaacaggtacagctgcaggaatctgggcccggacttgtcaagccaagtcagacactttctcttacatgtaccgtgagcggcggaagtataagcagtggaggcttttactggtcttggatacggcagcacccaggcaaaggcttggagtggattggatacattcatcattcaggatctacacactataatccatcccttaagtcccgggtcaccattagcattgatacgtctaagaatctgttcagtctcaggctgtcctccgtcactgctgccgacacagccgtgtactactgcgcctccttggtttactgcggaggcgactgttatagcggctttgattattgggggcaggggaccctcgtaaccgtgagctctacgcgtgcctctacaaagggaccctccgtgtttcctctggctcccagcagcaagtctacaagcggaggaacagccgctctgggctgcctggtcaaggattactttcccgagcctgtgaccgtgtcctggaatagcggagcactgacaagcggcgtgcacacctttccagccgtgctgcaaagcagcggcctgtactctctgagcagcgtggtcacagtgcctagctctagcctgggcacccagacctacatctgcaatgtgaaccacaagcctagcaacaccaaggtggacaagagagtggaacccaagagctgtatccccgaggacacattcttcccaagccccgagagcagctgcgacgtgaagctggtggaaaagagcttcgagacagacaccaacctgaacttccagaacctgagcgtgatcggcttcagaatcctgctgctgaaagtggccggctttaacctgctgatgaccctgcggctgtggtccagc

SEQ ID NO: 3497 - DNA, 2700 bp, Artificial Sequence
  Synthetic Polynucloetide
atggccttaccagtgaccgccttgctcctgccgctggccttgctgctccacgccgccaggccggaagtgcagctggttgaatctggcggaggactggttcagcctggcggatctctgagactgtcttgtgccgccagcggcttcagcttcagcgacttttggatgagctgggtccgacaggcccctggcaaaggacttgaatgggtcgccacaatcagccaggccggcagcgagaaggactacgtggactctgtgaagggcagattcaccatcagccgggacaacgccaagaagtccctgtacctccagatgaacagcctgagagccgaggacaccgccgtgtactattgtgcctctggcgtgtacagcttcgactacagaggccagggcaccctggtcacagtctcttctggtaccggcggaggcggatctggcggcggaggtagcggtggcggaggatctgaattcgacattcagatgacacagagccctagcagcctgagcgcctctgtgggagacagagtgaccatcacatgcaagagcagccagagcgtgctgtactccagcaatcagaagaactacctggcctggttccagcagaagcctggcaaggctcctaagctgctgatctactgggccagcaccagagaaagcggcgtgccaagcagattttctggcagcggctctggcaccgacttcaccctgacaatatccagcctccagcctgaggacttcgccacctacttttgccaccagtacctgagcagctacacattcggacagggcaccaaggtggaaatcaagcggctcgagggacagcctaaggccaatcctaccgtgacactgttccctccaagcagcgaagaactccaggccaacaaggccacacttgtgtgcctgatctccgacttctaccctggggctgtgacagtggcttggaaggccgatggatctcctgtgaaagccggcgtggaaaccaccaagccatccaagcagagcaacaacaaatacgccgccagctcctacctgagcctgacacctgagcagtggaagtcccacagatcctacagctgccaagtgacccacgaaggcagcaccgtggaaaagacagtggcccctacagagtgcagcggcagagccgattgcggctttaccagcgagagctaccagcagggcgtgctgagcgccaccatcctgtacgagatcctgctgggcaaggccaccctgtacgccgtgctggtgtctgccctggtgctgatggctatggtcaagcggaaggacagccggggacgcgccaagagaagcggatctggcgtgaagcagaccctgaatttcgacctgctgaagctggctggcgacgtggaatccaacccaggccctactagtatggactggatttggcgcatccttttccttgtcggcgctgctaccggcgcgcattccgggccccagctccagctgcaagagtctggacctggcctggtcaagcctagcgagacactgagcctgacctgtaccgtgtccggcgatagcatcagcagcggcgattactactggggctggatcagacagcctcctggcaaaggactggaatggatcggccacatctactacagcggcgtgacctactacaaccccagcctgaagtccagagtgaccatcagcgtggacaccagccggaaccagttctccctgaagctgtctagcgtgacagccgccgataccgccgtgtactactgcaccagagaggacagcagcaactggcggagtagaggccagggaacactggtcacagttagctctggatccggcggaggcggaagtggaggcggaggatctggcggcggaggctctttcgaagaggtgcagctggttgaatctggcggaggactggttcagcctggcggatctctgagactgtcttgtgccgccagcggctacaccttcaccacctattggatgcactgggtccgacaggcccctggcaaaggacttgagtgggtcggatatatcaggcccagcaccggctacacagagtacaaccagaagttcaaggaccgcttcaccatcagcgccgacaccagcaagaataccgcctacctccagatgaacagcctgagagccgaggacaccgccgtgtactactgtgccagatccagatggctgctggactattggggccagggcacactggttacagtttctacgcgtgcctctacaaagggaccctccgtgtttcctctggctcccagcagcaagtctacaagcggaggaacagccgctctgggctgcctggtcaaggattactttcccgagcctgtgaccgtgtcctggaatagcggagcactgacaagcggcgtgcacacctttccagccgtgctgcaaagcagcggcctgtactctctgagcagcgtggtcacagtgcctagctctagcctgggcacccagacctacatctgcaatgtgaaccacaagcctagcaacaccaaggtggacaagagagtggaacccaagagctgtatccccgaggacacattcttcccaagccccgagagcagctgcgacgtgaagctggtggaaaagagcttcgagacagacaccaacctgaacttccagaacctgagcgtgatcggcttcagaatcctgctgctgaaagtggccggctttaacctgctgatgaccctgcggctgtggtccagc

SEQ ID NO: 3498 - DNA, 2691 bp, Artificial Sequence
  Synthetic Polynucloetide
atggccttaccagtgaccgccttgctcctgccgctggccttgctgctccacgccgccaggccggaagtgcagctggttgaatctggcggaggactggttcagcctggcggatctctgagactgtcttgtgccgccagcggcttcagcttcagcgacttttggatgagctgggtccgacaggcccctggcaaaggacttgaatgggtcgccacaatcagccaggccggcagcgagaaggactacgtggactctgtgaagggcagattcaccatcagccgggacaacgccaagaagtccctgtacctccagatgaacagcctgagagccgaggacaccgccgtgtactattgtgcctctggcgtgtacagcttcgactacagaggccagggcaccctggtcacagtctcttctggtaccggcggaggcggatctggcggcggaggtagcggtggcggaggatctgaattcgacatccagatgacacagagccctagcagcctgtctgccagcgtgggagacagagtgaccatcacctgtagagccagccaggacatcagcaactacctgaactggtatcagcagaagcccggcaaggcccctaagctgctgatctactacaccagcagactgcacagcggcgtgcccagcagattttctggctctggcagcggcaccgacttcaccctgacaatatctagcctccagcctgaggacttcgccacctactattgccagcagggcaacaccctgccttacacatttggacagggcaccaaggtggaaatcaagagactcgagggacagcctaaggccaatcctaccgtgacactgttccctccaagcagcgaagaactccaggccaacaaggccacacttgtgtgcctgatctccgacttctaccctggggctgtgacagtggcttggaaggccgatggatctcctgtgaaagccggcgtggaaaccaccaagccatccaagcagagcaacaacaaatacgccgccagctcctacctgagcctgacacctgagcagtggaagtcccacagatcctacagctgccaagtgacccacgaaggcagcaccgtggaaaagacagtggcccctacagagtgcagcggcagagccgattgcggctttaccagcgagagctaccagcagggcgtgctgagcgccaccatcctgtacgagatcctgctgggcaaggccaccctgtacgccgtgctggtgtctgccctggtgctgatggctatggtcaagcggaaggacagccggggacgcgccaagagaagcggatctggcgtgaagcagaccctgaatttcgacctgctgaagctggctggcgacgtggaatccaacccaggccctactagtatggactggatttggcgcatccttttccttgtcggcgctgctaccggcgcgcattccgggccccagctccagctgcaagagtctggacctggcctggtcaagcctagcgagacactgagcctgacctgtaccgtgtccggcgatagcatcagcagcggcgattactactggggctggatcagacagcctcctggcaaaggactggaatggatcggccacatctactacagcggcgtgacctactacaaccccagcctgaagtccagagtgaccatcagcgtggacaccagccggaaccagttctccctgaagctgtctagcgtgacagccgccgataccgccgtgtactactgcaccagagaggacagcagcaactggcggagtagaggccagggaacactggtcacagttagctctggatccggcggaggcggaagtggaggcggaggatctggcggcggaggctctttcgaagaagtgcagctggttgaatcaggtggcggcctggttcaacctggcggatctctgagactgagctgtgccgccagcggcttcaccttcagcgactactttatgagctgggtccgacaggcccctggcaaaggacttgaatgggtcgccaccatcagcaatggcggcacctacacttactaccccgacagcgtgaagggcagattcaccatctccagagacaacagcaagaacaccctgtacctccagatgaactccctgagagccgaggacaccgccgtgtactactgcgccagattcgacggctacatcttcgactattggggccagggcaccctggtcacagtctcttctacgcgtgcctctacaaagggaccctccgtgtttcctctggctcccagcagcaagtctacaagcggaggaacagccgctctgggctgcctggtcaaggattactttcccgagcctgtgaccgtgtcctggaatagcggagcactgacaagcggcgtgcacacctttccagccgtgctgcaaagcagcggcctgtactctctgagcagcgtggtcacagtgcctagctctagcctgggcacccagacctacatctgcaatgtgaaccacaagcctagcaacaccaaggtggacaagagagtggaacccaagagctgtatccccgaggacacattcttcccaagccccgagagcagctgcgacgtgaagctggtggaaaagagcttcgagacagacaccaacctgaacttccagaacctgagcgtgatcggcttcagaatcctgctgctgaaagtggccggctttaacctgctgatgaccctgcggctgtggtccagc

SEQ ID NO: 3499 - DNA, 1920 bp, Artificial Sequence
  Synthetic Polynucloetide
atggactggatttggcgcatccttttccttgtcggcgctgctaccggcgcccattccgggccccaggttcagctgcaagagtctggcggaggacttgctcaagctggcggaagcctgagactgtcttgtgccgcctctggcagaaccttcagcatgggctggtttagacaggcccctggcaaagagagagagttcgtcgccgccatcacatacagcggcggcagcccttactacgcctcttctgtcagaggccggttcaccatcagccgggacaacgccaagaacaccgtgtacctccagatgaacagcctgaagccagaggacaccgccgtgtactactgtgccgccaatccaacctacggcagcgactggaatgccgagaattggggccagggcacccaagtgacagtgtctagtggatccggcggcggaggatctggcggaggcggatctgggggcggaggctctttcgaacaagttcagcttcaacagcctggcgctgagctggtcaaacctggcgcttctgtgaagatgagctgcaaagccagcggctacgccttcagcagctactggatcaactggatgaagcagaaacccggccagggactcgaatggatcggccaaatctatcccggcgacggcaccgagaacagattcagcgtgaacttccagaaggccgccaagagcttcagcctgaagatcagcgatagccagctgggcgacgccgccatgtacttttgcgcttatagaagcgccgtgaacgcccggctgatgtttggagatggcacacagctggtggtcaagcccaacggcggaggcggaagtggaggcggaggatctggcggcggaggctctgaagccgacatctaccagacacctagatacctggtcatcggcaccggcaagaaaatcaccctggaatgcagccagacaatgggccacgacaagatgtactggtatcagcaggaccccggcatggaactgcacctgatccactacagctacggcgtgaacagcaccgagaagggcgatctgtctagcgagagcaccgtgtccagaatcagaaccgagcacttcccactgacactggaaagcgccagacctagccacaccagccagtacctgtgtgcctcttctgaggccagaggactggccgagttcaccgacacacagtatttcggccctggcaccagactgaccgttacgcgtgagcagaaactgatctcggaagaggatctggcgaagcccaccacgacgccagcgccgcgaccaccaacaccggcgcccaccatcgcgtcgcagcccctgtccctgcgcccagaggcgtgccggccagcggcggggggcgcagtgcacacgagggggctggacttcgcctgtgacatctacatctgggcgcccttggccgggacttgtggggtccttctcctgtcactggttatcaccctttactgcaaacggggcagaaagaaactcctgtatatattcaaacaaccatttatgagaccagtacaaactactcaagaggaagatggctgtagctgccgatttccagaagaagaagaaggaggatgtgaactgagagtgaagttcagcaggagcgcagacgcccccgcgtaccagcagggccagaaccagctctataacgagctgaatctaggacgaagagaggagtacgatgttttggacaagagacgtggccgggaccctgagatggggggaaagccgagaaggaagaaccctcaggaaggcctgtacaatgaactgcagaaagataagatggcggaggcctacagtgagattgggatgaaaggcgagcgccggaggggcaaggggcacgatggcctttaccagggtctcagtacagccaccaaggacacctacgacgcccttcacatgcaggccctgccccctcgctga

SEQ ID NO: 3500 - DNA, 2979 bp, Artificial Sequence
  Synthetic Polynucloetide
atggccttaccagtgaccgccttgctcctgccgctggccttgctgctccacgccgccaggccggaagccgacatctaccagacacctagatacctggtcatcggcaccggcaagaaaatcaccctggaatgcagccagacaatgggccacgacaagatgtactggtatcagcaggaccccggcatggaactgcacctgatccactacagctacggcgtgaacagcaccgagaagggcgatctgtctagcgagagcaccgtgtccagaatcagaaccgagcacttcccactgacactggaaagcgccagacctagccacaccagccagtacctgtgtgcctcttctgaggccagaggactggccgagttcaccgacacacagtatttcggccctggcaccagactgaccgttctcgagatccagaaccctgatcctgccgtgtaccagctgcgggatagcaagagcagcgacaagagcgtgtgtctgttcaccgacttcgacagccagaccaacgtgtcccagagcaaggactccgacgtgtacatcaccgataagtgcgtgctggacatgcggagcatggacttcaagagcaactccgccgtggcctggtccaacaagtccgatttcgcctgcgccaacgccttcaacaacagcattatccccgaggacacattcttcccaagcagcgacgtgccctgcgacgtgaagctggtggaaaagagcttcgagacagacaccaacctgaacttccagaacctgagcgtgatcggcttcagaatcctgctgctgaaagtggccggctttaacctgctgatgaccctgcggctgtggtccagccgcgccaagagaagcggatctggcgtgaagcagaccctgaatttcgacctgctgaagctggctggcgacgtggaatccaacccaggccctactagtatggactggatttggcgcatccttttccttgtcggcgctgctaccggcgcccattccgggccccaggttcagctgcaagagtctggcggaggacttgctcaagctggcggaagcctgagactgtcttgtgccgcctctggcagaaccttcagcatgggctggtttagacaggcccctggcaaagagagagagttcgtcgccgccatcacatacagcggcggcagcccttactacgcctcttctgtcagaggccggttcaccatcagccgggacaacgccaagaacaccgtgtacctccagatgaacagcctgaagccagaggacaccgccgtgtactactgtgccgccaatccaacctacggcagcgactggaatgccgagaattggggccagggcacccaagtgacagtgtctagtggatccggcggcggaggatctggcggaggcggatctgggggcggaggctctttcgaacaagttcagcttcaacagcctggcgctgagctggtcaaacctggcgcttctgtgaagatgagctgcaaagccagcggctacgccttcagcagctactggatcaactggatgaagcagaaacccggccagggactcgaatggatcggccaaatctatcccggcgacggcaccgagaacagattcagcgtgaacttccagaaggccgccaagagcttcagcctgaagatcagcgatagccagctgggcgacgccgccatgtacttttgcgcttatagaagcgccgtgaacgcccggctgatgtttggagatggcacacagctggtggtcaagcccaacacgcgtgaggacctgaagaacgtgttcccacctgaggtggccgtgttcgagcctagcaaggccgagatcgcccacacccagaaagccaccctcgtgtgcctggctaccggcttctaccccgaccatgtggaactgtcttggtgggtcaacggcaaagaggtgcacagcggcgtgtgtaccgacccccagccactgaaagaacagcccgccctgaacgacagccggtactgcctgagcagcagactgagagtgtccgccaccttctggcagaacccccggaaccacttcagatgccaggtgcagttctacggcctgagcgagaacgacgagtggacccaggacagagccaagcccgtgacccagatcgtgtctgccgaagcctggggcagagccgattgcggcatcaccagcgccagctaccaccagggcgtgctgagcgccaccatcctgtacgagatcctgctgggcaaggccaccctgtacgccgtgctggtgtctgccctggtgctgatggctatggtcaagcggaaggacagccggggaagggccaagcgatctggatctggagcaacaaacttctcactactcaaacaagcaggtgacgtggaggagaatcccgggccttctagaggccatatgaccgagtacaagcccacggtgcgcctcgccacccgcgacgacgtccccagggccgtacgcaccctcgccgccgcgttcgccgactaccccgccacgcgccacaccgtcgatccggaccgccacatcgagcgggtcaccgagctgcaagaactcttcctcacgcgcgtcgggctcgacatcggcaaggtgtgggtcgcggacgacggcgccgcggtggcggtctggaccacgccggagagcgtcgaagcgggggcggtgttcgccgagatcggcccgcgcatggccgagttgagcggttcccggctggccgcgcagcaacagatggaaggcctcctggcgccgcaccggcccaaggagcccgcgtggttcctggccaccgtcggcgtctcgcccgaccaccagggcaagggtctgggcagcgccgtcgtgctccccggagtggaggcggccgagcgcgccggggtgcccgccttcctggagacctccgcgccccgcaacctccccttctacgagcggctcggcttcaccgtcaccgccgacgtcgaggtgcccgaaggaccgcgcacctggtgcatgacccgcaagcccggtgcctga

SEQ ID NO: 3501 - DNA, 2976 bp, Artificial Sequence
  Synthetic Polynucloetide
atggccttaccagtgaccgccttgctcctgccgctggccttgctgctccacgccgccaggccggaagccgacatctaccagacacctagatacctggtcatcggcaccggcaagaaaatcaccctggaatgcagccagacaatgggccacgacaagatgtactggtatcagcaggaccccggcatggaactgcacctgatccactacagctacggcgtgaacagcaccgagaagggcgatctgtctagcgagagcaccgtgtccagaatcagaaccgagcacttcccactgacactggaaagcgccagacctagccacaccagccagtacctgtgtgcctcttctgaggccagaggactggccgagttcaccgacacacagtatttcggccctggcaccagactgaccgttctcgaggacctgaagaacgtgttcccacctgaggtggccgtgttcgagcctagcaaggccgagatcgcccacacccagaaagccaccctcgtgtgcctggctaccggcttctaccccgaccatgtggaactgtcttggtgggtcaacggcaaagaggtgcacagcggcgtgtgtaccgacccccagccactgaaagaacagcccgccctgaacgacagccggtactgcctgagcagcagactgagagtgtccgccaccttctggcagaacccccggaaccacttcagatgccaggtgcagttctacggcctgagcgagaacgacgagtggacccaggacagagccaagcccgtgacccagatcgtgtctgccgaagcctggggcagagccgattgcggcatcaccagcgccagctaccaccagggcgtgctgagcgccaccatcctgtacgagatcctgctgggcaaggccaccctgtacgccgtgctggtgtctgccctggtgctgatggctatggtcaagcggaaggacagccggggaagggccaagcgatctggatctggagcaacaaacttctcactactcaaacaagcaggtgacgtggaggagaatcccgggcctactagtatggactggatttggcgcatccttttccttgtcggcgctgctaccggcgcccattccgggccccaggttcagctgcaagagtctggcggaggacttgctcaagctggcggaagcctgagactgtcttgtgccgcctctggcagaaccttcagcatgggctggtttagacaggcccctggcaaagagagagagttcgtcgccgccatcacatacagcggcggcagcccttactacgcctcttctgtcagaggccggttcaccatcagccgggacaacgccaagaacaccgtgtacctccagatgaacagcctgaagccagaggacaccgccgtgtactactgtgccgccaatccaacctacggcagcgactggaatgccgagaattggggccagggcacccaagtgacagtgtctagtggatccggcggcggaggatctggcggaggcggatctgggggcggaggctctttcgaacaagttcagcttcaacagcctggcgctgagctggtcaaacctggcgcttctgtgaagatgagctgcaaagccagcggctacgccttcagcagctactggatcaactggatgaagcagaaacccggccagggactcgaatggatcggccaaatctatcccggcgacggcaccgagaacagattcagcgtgaacttccagaaggccgccaagagcttcagcctgaagatcagcgatagccagctgggcgacgccgccatgtacttttgcgcttatagaagcgccgtgaacgcccggctgatgtttggagatggcacacagctggtggtcaagcccaacacgcgtatccagaaccctgatcctgccgtgtaccagctgcgggatagcaagagcagcgacaagagcgtgtgtctgttcaccgacttcgacagccagaccaacgtgtcccagagcaaggactccgacgtgtacatcaccgataagtgcgtgctggacatgcggagcatggacttcaagagcaactccgccgtggcctggtccaacaagtccgatttcgcctgcgccaacgccttcaacaacagcattatccccgaggacacattcttcccaagcagcgacgtgccctgcgacgtgaagctggtggaaaagagcttcgagacagacaccaacctgaacttccagaacctgagcgtgatcggcttcagaatcctgctgctgaaagtggccggctttaacctgctgatgaccctgcggctgtggtccagccgcgccaagagaagcggatctggcgtgaagcagaccctgaatttcgacctgctgaagctggctggcgacgtggaatccaacccaggcccttctagaggccatatgaccgagtacaagcccacggtgcgcctcgccacccgcgacgacgtccccagggccgtacgcaccctcgccgccgcgttcgccgactaccccgccacgcgccacaccgtcgatccggaccgccacatcgagcgggtcaccgagctgcaagaactcttcctcacgcgcgtcgggctcgacatcggcaaggtgtgggtcgcggacgacggcgccgcggtggcggtctggaccacgccggagagcgtcgaagcgggggcggtgttcgccgagatcggcccgcgcatggccgagttgagcggttcccggctggccgcgcagcaacagatggaaggcctcctggcgccgcaccggcccaaggagcccgcgtggttcctggccaccgtcggcgtctcgcccgaccaccagggcaagggtctgggcagcgccgtcgtgctccccggagtggaggcggccgagcgcgccggggtgcccgccttcctggagacctccgcgccccgcaacctccccttctacgagcggctcggcttcaccgtcaccgccgacgtcgaggtgcccgaaggaccgcgcacctggtgcatgacccgcaagcccggtgcctga

SEQ ID NO: 3502 - DNA, 2976 bp, Artificial Sequence
  Synthetic Polynucloetide
atggccttaccagtgaccgccttgctcctgccgctggccttgctgctccacgccgccaggccggaagccgacatctaccagacacctagatacctggtcatcggcaccggcaagaaaatcaccctggaatgcagccagacaatgggccacgacaagatgtactggtatcagcaggaccccggcatggaactgcacctgatccactacagctacggcgtgaacagcaccgagaagggcgatctgtctagcgagagcaccgtgtccagaatcagaaccgagcacttcccactgacactggaaagcgccagacctagccacaccagccagtacctgtgtgcctcttctgaggccagaggactggccgagttcaccgacacacagtatttcggccctggcaccagactgaccgttctcgaggacctgaagaacgtgttcccacctgaggtggccgtgttcgagcctagcgaggccgagatcagccacacccagaaagccaccctcgtgtgcctggctaccggcttctaccccgaccatgtggaactgtcttggtgggtcaacggcaaagaggtgcacagcggcgtgtgtaccgacccccagccactgaaagaacagcccgccctgaacgacagccggtactgcctgagcagcagactgagagtgtccgccaccttctggcagaacccccggaaccacttcagatgccaggtgcagttctacggcctgagcgagaacgacgagtggacccaggacagagccaagcccgtgacccagatcgtgtctgccgaagcctggggcagagccgattgcggctttaccagcgagagctaccagcagggcgtgctgagcgccaccatcctgtacgagatcctgctgggcaaggccaccctgtacgccgtgctggtgtctgccctggtgctgatggctatggtcaagcggaaggacagccggggaagggccaagcgatctggatctggagcaacaaacttctcactactcaaacaagcaggtgacgtggaggagaatcccgggcctactagtatggactggatttggcgcatccttttccttgtcggcgctgctaccggcgcccattccgggccccaggttcagctgcaagagtctggcggaggacttgctcaagctggcggaagcctgagactgtcttgtgccgcctctggcagaaccttcagcatgggctggtttagacaggcccctggcaaagagagagagttcgtcgccgccatcacatacagcggcggcagcccttactacgcctcttctgtcagaggccggttcaccatcagccgggacaacgccaagaacaccgtgtacctccagatgaacagcctgaagccagaggacaccgccgtgtactactgtgccgccaatccaacctacggcagcgactggaatgccgagaattggggccagggcacccaagtgacagtgtctagtggatccggcggcggaggatctggcggaggcggatctgggggcggaggctctttcgaacaagttcagcttcaacagcctggcgctgagctggtcaaacctggcgcttctgtgaagatgagctgcaaagccagcggctacgccttcagcagctactggatcaactggatgaagcagaaacccggccagggactcgaatggatcggccaaatctatcccggcgacggcaccgagaacagattcagcgtgaacttccagaaggccgccaagagcttcagcctgaagatcagcgatagccagctgggcgacgccgccatgtacttttgcgcttatagaagcgccgtgaacgcccggctgatgtttggagatggcacacagctggtggtcaagcccaacacgcgtatccagaaccctgatcctgccgtgtaccagctgcgggatagcaagagcagcgacaagagcgtgtgtctgttcaccgacttcgacagccagaccaacgtgtcccagagcaaggactccgacgtgtacatcaccgataagtgcgtgctggacatgcggagcatggacttcaagagcaactccgccgtggcctggtccaacaagtccgatttcgcctgcgccaacgccttcaacaacagcattatccccgaggacacattcttcccaagccccgagagcagctgcgacgtgaagctggtggaaaagagcttcgagacagacaccaacctgaacttccagaacctgagcgtgatcggcttcagaatcctgctgctgaaagtggccggctttaacctgctgatgaccctgcggctgtggtccagccgcgccaagagaagcggatctggcgtgaagcagaccctgaatttcgacctgctgaagctggctggcgacgtggaatccaacccaggcccttctagaggccatatgaccgagtacaagcccacggtgcgcctcgccacccgcgacgacgtccccagggccgtacgcaccctcgccgccgcgttcgccgactaccccgccacgcgccacaccgtcgatccggaccgccacatcgagcgggtcaccgagctgcaagaactcttcctcacgcgcgtcgggctcgacatcggcaaggtgtgggtcgcggacgacggcgccgcggtggcggtctggaccacgccggagagcgtcgaagcgggggcggtgttcgccgagatcggcccgcgcatggccgagttgagcggttcccggctggccgcgcagcaacagatggaaggcctcctggcgccgcaccggcccaaggagcccgcgtggttcctggccaccgtcggcgtctcgcccgaccaccagggcaagggtctgggcagcgccgtcgtgctccccggagtggaggcggccgagcgcgccggggtgcccgccttcctggagacctccgcgccccgcaacctccccttctacgagcggctcggcttcaccgtcaccgccgacgtcgaggtgcccgaaggaccgcgcacctggtgcatgacccgcaagcccggtgcctga

SEQ ID NO: 3503 - DNA, 2274 bp, Artificial Sequence
  Synthetic Polynucloetide
atggccttaccagtgaccgccttgctcctgccgctggccttgctgctccacgccgccaggccggaagccgacatctaccagacacctagatacctggtcatcggcaccggcaagaaaatcaccctggaatgcagccagacaatgggccacgacaagatgtactggtatcagcaggaccccggcatggaactgcacctgatccactacagctacggcgtgaacagcaccgagaagggcgatctgtctagcgagagcaccgtgtccagaatcagaaccgagcacttcccactgacactggaaagcgccagacctagccacaccagccagtacctgtgtgcctcttctgaggccagaggactggccgagttcaccgacacacagtatttcggccctggcaccagactgaccgttctcgaggacctgaagaacgtgttcccacctgaggtggccgtgttcgagcctagcgaggccgagatcagccacacccagaaagccaccctcgtgtgcctggctaccggcttctaccccgaccatgtggaactgtcttggtgggtcaacggcaaagaggtgcacagcggcgtgtgtaccgacccccagccactgaaagaacagcccgccctgaacgacagccggtactgcctgagcagcagactgagagtgtccgccaccttctggcagaacccccggaaccacttcagatgccaggtgcagttctacggcctgagcgagaacgacgagtggacccaggacagagccaagcccgtgacccagatcgtgtctgccgaagcctggggcagagccgattgcggctttaccagcgagagctaccagcagggcgtgctgagcgccaccatcctgtacgagatcctgctgggcaaggccaccctgtacgccgtgctggtgtctgccctggtgctgatggctatggtcaagcggaaggacagccggggaagggccaagcgatctggatctggagcaacaaacttctcactactcaaacaagcaggtgacgtggaggagaatcccgggcctactagtatggactggatttggcgcatccttttccttgtcggcgctgctaccggcgcccattccgggccccaggttcagctgcaagagtctggcggaggacttgctcaagctggcggaagcctgagactgtcttgtgccgcctctggcagaaccttcagcatgggctggtttagacaggcccctggcaaagagagagagttcgtcgccgccatcacatacagcggcggcagcccttactacgcctcttctgtcagaggccggttcaccatcagccgggacaacgccaagaacaccgtgtacctccagatgaacagcctgaagccagaggacaccgccgtgtactactgtgccgccaatccaacctacggcagcgactggaatgccgagaattggggccagggcacccaagtgacagtgtctagtggatccggcggcggaggatctggcggaggcggatctgggggcggaggctctttcgaacaagttcagcttcaacagcctggcgctgagctggtcaaacctggcgcttctgtgaagatgagctgcaaagccagcggctacgccttcagcagctactggatcaactggatgaagcagaaacccggccagggactcgaatggatcggccaaatctatcccggcgacggcaccgagaacagattcagcgtgaacttccagaaggccgccaagagcttcagcctgaagatcagcgatagccagctgggcgacgccgccatgtacttttgcgcttatagaagcgccgtgaacgcccggctgatgtttggagatggcacacagctggtggtcaagcccaacacgcgtatccagaaccctgatcctgccgtgtaccagctgcgggatagcaagagcagcgacaagagcgtgtgtctgttcaccgacttcgacagccagaccaacgtgtcccagagcaaggactccgacgtgtacatcaccgataagtgcgtgctggacatgcggagcatggacttcaagagcaactccgccgtggcctggtccaacaagtccgatttcgcctgcgccaacgccttcaacaacagcattatccccgaggacacattcttcccaagccccgagagcagctgcgacgtgaagctggtggaaaagagcttcgagacagacaccaacctgaacttccagaacctgagcgtgatcggcttcagaatcctgctgctgaaagtggccggctttaacctgctgatgaccctgcggctgtggtccagc

SEQ ID NO: 3504 - DNA, 2949 bp, Artificial Sequence
  Synthetic Polynucloetide
atggccttaccagtgaccgccttgctcctgccgctggccttgctgctccacgccgccaggccggaagccgacatctaccagacacctagatacctggtcatcggcaccggcaagaaaatcaccctggaatgcagccagacaatgggccacgacaagatgtactggtatcagcaggaccccggcatggaactgcacctgatccactacagctacggcgtgaacagcaccgagaagggcgatctgtctagcgagagcaccgtgtccagaatcagaaccgagcacttcccactgacactggaaagcgccagacctagccacaccagccagtacctgtgtgcctcttctgaggccagaggactggccgagttcaccgacacacagtatttcggccctggcaccagactgaccgttctcgaggacctgaagaacgtgttcccacctgaggtggccgtgttcgagcctagcgaggccgagatcagccacacccagaaagccaccctcgtgtgcctggctaccggcttctaccccgaccatgtggaactgtcttggtgggtcaacggcaaagaggtgcacagcggcgtgtgtaccgacccccagccactgaaagaacagcccgccctgaacgacagccggtactgcctgagcagcagactgagagtgtccgccaccttctggcagaacccccggaaccacttcagatgccaggtgcagttctacggcctgagcgagaacgacgagtggacccaggacagagccaagcccgtgacccagatcgtgtctgccgaagcctggggcagagccgattgcggctttaccagcgagagctaccagcagggcgtgctgagcgccaccatcctgtacgagatcctgctgggcaaggccaccctgtacgccgtgctggtgtctgccctggtgctgatggctatggtcaagcggaaggacagccggggaagggccaagcgatctggatctggagcaacaaacttctcactactcaaacaagcaggtgacgtggaggagaatcccgggcctactagtatggactggatttggcgcatccttttccttgtcggcgctgctaccggcgcccattccgggccccaggttcagctgcaagagtctggcggaggacttgctcaagctggcggaagcctgagactgtcttgtgccgcctctggcagaaccttcagcatgggctggtttagacaggcccctggcaaagagagagagttcgtcgccgccatcacatacagcggcggcagcccttactacgcctcttctgtcagaggccggttcaccatcagccgggacaacgccaagaacaccgtgtacctccagatgaacagcctgaagccagaggacaccgccgtgtactactgtgccgccaatccaacctacggcagcgactggaatgccgagaattggggccagggcacccaagtgacagtgtctagtggatccggcggcggaggatctggcggaggcggatctgggggcggaggctctttcgaacaagttcagcttcaacagcctggcgctgagctggtcaaacctggcgcttctgtgaagatgagctgcaaagccagcggctacgccttcagcagctactggatcaactggatgaagcagaaacccggccagggactcgaatggatcggccaaatctatcccggcgacggcaccgagaacagattcagcgtgaacttccagaaggccgccaagagcttcagcctgaagatcagcgatagccagctgggcgacgccgccatgtacttttgcgcttatagaagcgccgtgaacgcccggctgatgtttggagatggcacacagctggtggtcaagcccaacacgcgtatccagaaccctgatcctgccgtgtaccagctgcgggatagcaagagcagcgacaagagcgtgtgtctgttcaccgacttcgacagccagaccaacgtgtcccagagcaaggactccgacgtgtacatcaccgataagtgcgtgctggacatgcggagcatggacttcaagagcaactccgccgtggcctggtccaacaagtccgatttcgcctgcgccaacgccttcaacaacagcattatccccgaggacacattcttcccaagccccgagagcagctgcgacgtgaagctggtggaaaagagcttcgagacagacaccaacctgaacttccagaacctgagcgtgatcggcttcagaatcctgctgctgaaagtggccggctttaacctgctgatgaccctgcggctgtggtccagccgcgccaagagaagcggatctggcgtgaagcagaccctgaatttcgacctgctgaagctggctggcgacgtggaatccaacccaggcccttctagaggcgggatccacaccatggctacctacgaggtgctgtgcgaggtggcaagaaagctgggcaccgacgacagagaagtggtgctgttcctgctgaacgtgttcatccctcagcctacactggcccagctgatcggtgcactgagagccctgaaagaggaaggccggctgacctttcctctgctggccgaatgcctgttcagagccggaagaagggatctgctgcgggacctgctgcatctggaccccagatttctggaaagacacctggccggcaccatgagctacttcagcccttaccagctgaccgtgctgcacgttgacggcgaactgtgcgccagagatattcggagcctgatcttcctgagcaaggacaccatcggcagccggtctacccctcagacatttctgcactgggtgtactgcatggaaaacctggacctgctcggccccacagatgtggatgccctgatgtccatgctgagaagcctgagcagagtggacctccagagacaggtgcagacactgatgggactgcacctgagcggacctagccacagccagcactacagacacacccct

SEQ ID NO: 3505 - DNA, 2286 bp, Artificial Sequence
  Synthetic Polynucloetide
atggccttaccagtgaccgccttgctcctgccgctggccttgctgctccacgccgccaggccggaagccgacatctaccagacacctagatacctggtcatcggcaccggcaagaaaatcaccctggaatgcagccagacaatgggccacgacaagatgtactggtatcagcaggaccccggcatggaactgcacctgatccactacagctacggcgtgaacagcaccgagaagggcgatctgtctagcgagagcaccgtgtccagaatcagaaccgagcacttcccactgacactggaaagcgccagacctagccacaccagccagtacctgtgtgcctcttctgaggccagaggactggccgagttcaccgacacacagtatttcggccctggcaccagactgaccgttctcgagatccagaaccctgatcctgccgtgtaccagctgcgggatagcaagagcagcgacaagagcgtgtgtctgttcaccgacttcgacagccagaccaacgtgtcccagagcaaggactccgacgtgtacatcaccgataagtgcgtgctggacatgcggagcatggacttcaagagcaactccgccgtggcctggtccaacaagtccgatttcgcctgcgccaacgccttcaacaacagcattatccccgaggacacattcttcccaagccccgagagcagctgcgacgtgaagctggtggaaaagagcttcgagacagacaccaacctgaacttccagaacctgagcgtgatcggcttcagaatcctgctgctgaaagtggccggctttaacctgctgatgaccctgcggctgtggtccagccgcgccaagagaagcggatctggcgtgaagcagaccctgaatttcgacctgctgaagctggctggcgacgtggaatccaacccaggccctactagtatggactggatttggcgcatccttttccttgtcggcgctgctaccggcgcccattccgggccccaggttcagctgcaagagtctggcggaggacttgctcaagctggcggaagcctgagactgtcttgtgccgcctctggcagaaccttcagcatgggctggtttagacaggcccctggcaaagagagagagttcgtcgccgccatcacatacagcggcggcagcccttactacgcctcttctgtcagaggccggttcaccatcagccgggacaacgccaagaacaccgtgtacctccagatgaacagcctgaagccagaggacaccgccgtgtactactgtgccgccaatccaacctacggcagcgactggaatgccgagaattggggccagggcacccaagtgacagtgtctagtggatccggcggcggaggatctggcggaggcggatctgggggcggaggctctttcgaacaagttcagcttcaacagcctggcgctgagctggtcaaacctggcgcttctgtgaagatgagctgcaaagccagcggctacgccttcagcagctactggatcaactggatgaagcagaaacccggccagggactcgaatggatcggccaaatctatcccggcgacggcaccgagaacagattcagcgtgaacttccagaaggccgccaagagcttcagcctgaagatcagcgatagccagctgggcgacgccgccatgtacttttgcgcttatagaagcgccgtgaacgcccggctgatgtttggagatggcacacagctggtggtcaagcccaacacgcgtgaggacctgaagaacgtgttcccacctgaggtggccgtgttcgagcctagcgaggccgagatcagccacacccagaaagccaccctcgtgtgcctggctaccggcttctaccccgaccatgtggaactgtcttggtgggtcaacggcaaagaggtgcacagcggcgtgtgtaccgacccccagccactgaaagaacagcccgccctgaacgacagccggtactgcctgagcagcagactgagagtgtccgccaccttctggcagaacccccggaaccacttcagatgccaggtgcagttctacggcctgagcgagaacgacgagtggacccaggacagagccaagcccgtgacccagatcgtgtctgccgaagcctggggcagagccgattgcggctttaccagcgagagctaccagcagggcgtgctgagcgccaccatcctgtacgagatcctgctgggcaaggccaccctgtacgccgtgctggtgtctgccctggtgctgatggctatggtcaagcggaaggacagccgggga

SEQ ID NO: 3506 - DNA, 2952 bp, Artificial Sequence
  Synthetic Polynucloetide
atggccttaccagtgaccgccttgctcctgccgctggccttgctgctccacgccgccaggccggaagccgacatctaccagacacctagatacctggtcatcggcaccggcaagaaaatcaccctggaatgcagccagacaatgggccacgacaagatgtactggtatcagcaggaccccggcatggaactgcacctgatccactacagctacggcgtgaacagcaccgagaagggcgatctgtctagcgagagcaccgtgtccagaatcagaaccgagcacttcccactgacactggaaagcgccagacctagccacaccagccagtacctgtgtgcctcttctgaggccagaggactggccgagttcaccgacacacagtatttcggccctggcaccagactgaccgttctcgagatccagaaccctgatcctgccgtgtaccagctgcgggatagcaagagcagcgacaagagcgtgtgtctgttcaccgacttcgacagccagaccaacgtgtcccagagcaaggactccgacgtgtacatcaccgataagtgcgtgctggacatgcggagcatggacttcaagagcaactccgccgtggcctggtccaacaagtccgatttcgcctgcgccaacgccttcaacaacagcattatccccgaggacacattcttcccaagccccgagagcagctgcgacgtgaagctggtggaaaagagcttcgagacagacaccaacctgaacttccagaacctgagcgtgatcggcttcagaatcctgctgctgaaagtggccggctttaacctgctgatgaccctgcggctgtggtccagccgcgccaagagaagcggatctggcgtgaagcagaccctgaatttcgacctgctgaagctggctggcgacgtggaatccaacccaggccctactagtatggactggatttggcgcatccttttccttgtcggcgctgctaccggcgcccattccgggccccaggttcagctgcaagagtctggcggaggacttgctcaagctggcggaagcctgagactgtcttgtgccgcctctggcagaaccttcagcatgggctggtttagacaggcccctggcaaagagagagagttcgtcgccgccatcacatacagcggcggcagcccttactacgcctcttctgtcagaggccggttcaccatcagccgggacaacgccaagaacaccgtgtacctccagatgaacagcctgaagccagaggacaccgccgtgtactactgtgccgccaatccaacctacggcagcgactggaatgccgagaattggggccagggcacccaagtgacagtgtctagtggatccggcggcggaggatctggcggaggcggatctgggggcggaggctctttcgaacaagttcagcttcaacagcctggcgctgagctggtcaaacctggcgcttctgtgaagatgagctgcaaagccagcggctacgccttcagcagctactggatcaactggatgaagcagaaacccggccagggactcgaatggatcggccaaatctatcccggcgacggcaccgagaacagattcagcgtgaacttccagaaggccgccaagagcttcagcctgaagatcagcgatagccagctgggcgacgccgccatgtacttttgcgcttatagaagcgccgtgaacgcccggctgatgtttggagatggcacacagctggtggtcaagcccaacacgcgtgaggacctgaagaacgtgttcccacctgaggtggccgtgttcgagcctagcgaggccgagatcagccacacccagaaagccaccctcgtgtgcctggctaccggcttctaccccgaccatgtggaactgtcttggtgggtcaacggcaaagaggtgcacagcggcgtgtgtaccgacccccagccactgaaagaacagcccgccctgaacgacagccggtactgcctgagcagcagactgagagtgtccgccaccttctggcagaacccccggaaccacttcagatgccaggtgcagttctacggcctgagcgagaacgacgagtggacccaggacagagccaagcccgtgacccagatcgtgtctgccgaagcctggggcagagccgattgcggctttaccagcgagagctaccagcagggcgtgctgagcgccaccatcctgtacgagatcctgctgggcaaggccaccctgtacgccgtgctggtgtctgccctggtgctgatggctatggtcaagcggaaggacagccggggaagggccaagcgatctggatctggagcaacaaacttctcactactcaaacaagcaggtgacgtggaggagaatcccgggccttctagaggcgggatccacaccatggctacctacgaggtgctgtgcgaggtggcaagaaagctgggcaccgacgacagagaagtggtgctgttcctgctgaacgtgttcatccctcagcctacactggcccagctgatcggtgcactgagagccctgaaagaggaaggccggctgacctttcctctgctggccgaatgcctgttcagagccggaagaagggatctgctgcgggacctgctgcatctggaccccagatttctggaaagacacctggccggcaccatgagctacttcagcccttaccagctgaccgtgctgcacgttgacggcgaactgtgcgccagagatattcggagcctgatcttcctgagcaaggacaccatcggcagccggtctacccctcagacatttctgcactgggtgtactgcatggaaaacctggacctgctcggccccacagatgtggatgccctgatgtccatgctgagaagcctgagcagagtggacctccagagacaggtgcagacactgatgggactgcacctgagcggacctagccacagccagcactacagacacacccct

SEQ ID NO: 3507 - DNA, 2976 bp, Artificial Sequence
  Synthetic Polynucloetide
atggccttaccagtgaccgccttgctcctgccgctggccttgctgctccacgccgccaggccggaagccgacatctaccagacacctagatacctggtcatcggcaccggcaagaaaatcaccctggaatgcagccagacaatgggccacgacaagatgtactggtatcagcaggaccccggcatggaactgcacctgatccactacagctacggcgtgaacagcaccgagaagggcgatctgtctagcgagagcaccgtgtccagaatcagaaccgagcacttcccactgacactggaaagcgccagacctagccacaccagccagtacctgtgtgcctcttctgaggccagaggactggccgagttcaccgacacacagtatttcggccctggcaccagactgaccgttctcgaggacctgaagaacgtgttcccacctgaggtggccgtgttcgagcctagcgaggccgagatcagccacacccagaaagccaccctcgtgtgcctggctaccggcttctaccccgaccatgtggaactgtcttggtgggtcaacggcaaagaggtgcacagcggcgtgtctaccgacccccagccactgaaagaacagcccgccctgaacgacagccggtactgcctgagcagcagactgagagtgtccgccaccttctggcagaacccccggaaccacttcagatgccaggtgcagttctacggcctgagcgagaacgacgagtggacccaggacagagccaagcccgtgacccagatcgtgtctgccgaagcctggggcagagccgattgcggctttaccagcgagagctaccagcagggcgtgctgagcgccaccatcctgtacgagatcctgctgggcaaggccaccctgtacgccgtgctggtgtctgccctggtgctgatggctatggtcaagcggaaggacagccggggaagggccaagcgatctggatctggagcaacaaacttctcactactcaaacaagcaggtgacgtggaggagaatcccgggcctactagtatggactggatttggcgcatccttttccttgtcggcgctgctaccggcgcccattccgggccccaggttcagctgcaagagtctggcggaggacttgctcaagctggcggaagcctgagactgtcttgtgccgcctctggcagaaccttcagcatgggctggtttagacaggcccctggcaaagagagagagttcgtcgccgccatcacatacagcggcggcagcccttactacgcctcttctgtcagaggccggttcaccatcagccgggacaacgccaagaacaccgtgtacctccagatgaacagcctgaagccagaggacaccgccgtgtactactgtgccgccaatccaacctacggcagcgactggaatgccgagaattggggccagggcacccaagtgacagtgtctagtggatccggcggcggaggatctggcggaggcggatctgggggcggaggctctttcgaacaagttcagcttcaacagcctggcgctgagctggtcaaacctggcgcttctgtgaagatgagctgcaaagccagcggctacgccttcagcagctactggatcaactggatgaagcagaaacccggccagggactcgaatggatcggccaaatctatcccggcgacggcaccgagaacagattcagcgtgaacttccagaaggccgccaagagcttcagcctgaagatcagcgatagccagctgggcgacgccgccatgtacttttgcgcttatagaagcgccgtgaacgcccggctgatgtttggagatggcacacagctggtggtcaagcccaacacgcgtatccagaaccctgatcctgccgtgtaccagctgcgggatagcaagagcagcgacaagagcgtgtgtctgttcaccgacttcgacagccagaccaacgtgtcccagagcaaggactccgacgtgtacatcaccgataagaccgtgctggacatgcggagcatggacttcaagagcaactccgccgtggcctggtccaacaagtccgatttcgcctgcgccaacgccttcaacaacagcattatccccgaggacacattcttcccaagccccgagagcagctgcgacgtgaagctggtggaaaagagcttcgagacagacaccaacctgaacttccagaacctgagcgtgatcggcttcagaatcctgctgctgaaagtggccggctttaacctgctgatgaccctgcggctgtggtccagccgcgccaagagaagcggatctggcgtgaagcagaccctgaatttcgacctgctgaagctggctggcgacgtggaatccaacccaggcccttctagaggccatatgaccgagtacaagcccacggtgcgcctcgccacccgcgacgacgtccccagggccgtacgcaccctcgccgccgcgttcgccgactaccccgccacgcgccacaccgtcgatccggaccgccacatcgagcgggtcaccgagctgcaagaactcttcctcacgcgcgtcgggctcgacatcggcaaggtgtgggtcgcggacgacggcgccgcggtggcggtctggaccacgccggagagcgtcgaagcgggggcggtgttcgccgagatcggcccgcgcatggccgagttgagcggttcccggctggccgcgcagcaacagatggaaggcctcctggcgccgcaccggcccaaggagcccgcgtggttcctggccaccgtcggcgtctcgcccgaccaccagggcaagggtctgggcagcgccgtcgtgctccccggagtggaggcggccgagcgcgccggggtgcccgccttcctggagacctccgcgccccgcaacctccccttctacgagcggctcggcttcaccgtcaccgccgacgtcgaggtgcccgaaggaccgcgcacctggtgcatgacccgcaagcccggtgcctga

SEQ ID NO: 3508 - DNA, 3222 bp, Artificial Sequence
  Synthetic Polynucloetide
atggccttaccagtgaccgccttgctcctgccgctggccttgctgctccacgccgccaggccggaagccgacatctaccagacacctagatacctggtcatcggcaccggcaagaaaatcaccctggaatgcagccagacaatgggccacgacaagatgtactggtatcagcaggaccccggcatggaactgcacctgatccactacagctacggcgtgaacagcaccgagaagggcgatctgtctagcgagagcaccgtgtccagaatcagaaccgagcacttcccactgacactggaaagcgccagacctagccacaccagccagtacctgtgtgcctcttctgaggccagaggactggccgagttcaccgacacacagtatttcggccctggcaccagactgaccgttctcgaggacctgaagaacgtgttcccacctgaggtggccgtgttcgagcctagcgaggccgagatcagccacacccagaaagccaccctcgtgtgcctggctaccggcttctaccccgaccatgtggaactgtcttggtgggtcaacggcaaagaggtgcacagcggcgtgtctaccgacccccagccactgaaagaacagcccgccctgaacgacagccggtactgcctgagcagcagactgagagtgtccgccaccttctggcagaacccccggaaccacttcagatgccaggtgcagttctacggcctgagcgagaacgacgagtggacccaggacagagccaagcccgtgacccagatcgtgtctgccgaagcctggggcagagccgattgcggctttaccagcgagagctaccagcagggcgtgctgagcgccaccatcctgtacgagatcctgctgggcaaggccaccctgtacgccgtgctggtgtctgccctggtgctgatggctatggtcaagcggaaggacagccggggaagggccaagcgatctggatctggagcaacaaacttctcactactcaaacaagcaggtgacgtggaggagaatcccgggcctactagtatggactggatttggcgcatccttttccttgtcggcgctgctaccggcgcccattccgggccccaggttcagctgcaagagtctggcggaggacttgctcaagctggcggaagcctgagactgtcttgtgccgcctctggcagaaccttcagcatgggctggtttagacaggcccctggcaaagagagagagttcgtcgccgccatcacatacagcggcggcagcccttactacgcctcttctgtcagaggccggttcaccatcagccgggacaacgccaagaacaccgtgtacctccagatgaacagcctgaagccagaggacaccgccgtgtactactgtgccgccaatccaacctacggcagcgactggaatgccgagaattggggccagggcacccaagtgacagtgtctagtggatccggcggcggaggatctggcggaggcggatctgggggcggaggctctttcgaacaagttcagcttcaacagcctggcgctgagctggtcaaacctggcgcttctgtgaagatgagctgcaaagccagcggctacgccttcagcagctactggatcaactggatgaagcagaaacccggccagggactcgaatggatcggccaaatctatcccggcgacggcaccgagaacagattcagcgtgaacttccagaaggccgccaagagcttcagcctgaagatcagcgatagccagctgggcgacgccgccatgtacttttgcgcttatagaagcgccgtgaacgcccggctgatgtttggagatggcacacagctggtggtcaagcccaacacgcgtgagcagaaactgatctcggaagaggatgggagcggcaccccattcccttctctggcccctcccatcatgctgctggtggacggcaagcagcagatggtggtcgtgtgcctggtgctggatgtggccccacctggactggacagccccatctggtttagcgccggcaatggctctgccctggacgcctttacctacggcccaagccctgccaccgatggcacctggacaaatctggcccacctgagcctgcccagcgaggaactggcttcttgggagcctctcgtgtgccacacaggacctggcgctgagggacacagcagatccacccagcctatgcacctgtctggcgaggccagcaccgccagaacctgtcctcaggaacctctgagaggcacccctggcggagcactgtggctgggagtgctgagactgctgctgttcaagctgctgctgtttgacctgctgctgacctgctcctgtctgtgcgatcctgccggccctctgccttctcctgccaccaccacaagactgagagccctgggcagccacagactgcaccctgccacagagacaggcggcagagaggccacaagcagccctagaccccagcccagagacagaagatggggcgataccccccctggcagaaagcctggatctccagtccgcgccaagagaagcggatctggcgtgaagcagaccctgaatttcgacctgctgaagctggctggcgacgtggaatccaacccaggcccttctagaggccatatgaccgagtacaagcccacggtgcgcctcgccacccgcgacgacgtccccagggccgtacgcaccctcgccgccgcgttcgccgactaccccgccacgcgccacaccgtcgatccggaccgccacatcgagcgggtcaccgagctgcaagaactcttcctcacgcgcgtcgggctcgacatcggcaaggtgtgggtcgcggacgacggcgccgcggtggcggtctggaccacgccggagagcgtcgaagcgggggcggtgttcgccgagatcggcccgcgcatggccgagttgagcggttcccggctggccgcgcagcaacagatggaaggcctcctggcgccgcaccggcccaaggagcccgcgtggttcctggccaccgtcggcgtctcgcccgaccaccagggcaagggtctgggcagcgccgtcgtgctccccggagtggaggcggccgagcgcgccggggtgcccgccttcctggagacctccgcgccccgcaacctccccttctacgagcggctcggcttcaccgtcaccgccgacgtcgaggtgcccgaaggaccgcgcacctggtgcatgacccgcaagcccggtgcctga

SEQ ID NO: 3509 - DNA, 3087 bp, Artificial Sequence
  Synthetic Polynucloetide
atggccttaccagtgaccgccttgctcctgccgctggccttgctgctccacgccgccaggccggaagccgacatctaccagacacctagatacctggtcatcggcaccggcaagaaaatcaccctggaatgcagccagacaatgggccacgacaagatgtactggtatcagcaggaccccggcatggaactgcacctgatccactacagctacggcgtgaacagcaccgagaagggcgatctgtctagcgagagcaccgtgtccagaatcagaaccgagcacttcccactgacactggaaagcgccagacctagccacaccagccagtacctgtgtgcctcttctgaggccagaggactggccgagttcaccgacacacagtatttcggccctggcaccagactgaccgttctcgaggggaaaccaattcccaaccctcttctgggactggattcaaccggcagcggcgacaagcagctggacgccgacgtgtcccccaagcctaccatcttcctgccctctatcgccgagacaaagctccagaaggccggcacctacctgtgcctgctggaaaagttcttcccagatgtgattaagatccactggcaggaaaagaagtccaacaccatcctgggcagccaggaaggcaacaccatgaagaccaacgacacctacatgaagttcagctggctgaccgtgcccgagaagtccctggacaaagaacacagatgcatcgtgcggcacgaaaacaacaagaacggcgtggaccaggaaatcatcttcccacccatcaagaccgatgtgattacaatggaccccaaggacaactgctccaaggacgccaacgataccctgctgctccagctgaccaacaccagcgcctactacatgtacttgttgctgctgctgaagtccgtggtgtacttcgccatcatcacatgctgcctgctgcggagaaccgccttctgctgcaacggcgagaagtctagggccaagcgatctggatctggagcaacaaacttctcactactcaaacaagcaggtgacgtggaggagaatcccgggcctactagtatggactggatttggcgcatccttttccttgtcggcgctgctaccggcgcccattccgggccccaggttcagctgcaagagtctggcggaggacttgctcaagctggcggaagcctgagactgtcttgtgccgcctctggcagaaccttcagcatgggctggtttagacaggcccctggcaaagagagagagttcgtcgccgccatcacatacagcggcggcagcccttactacgcctcttctgtcagaggccggttcaccatcagccgggacaacgccaagaacaccgtgtacctccagatgaacagcctgaagccagaggacaccgccgtgtactactgtgccgccaatccaacctacggcagcgactggaatgccgagaattggggccagggcacccaagtgacagtgtctagtggatccggcggcggaggatctggcggaggcggatctgggggcggaggctctttcgaacaagttcagcttcaacagcctggcgctgagctggtcaaacctggcgcttctgtgaagatgagctgcaaagccagcggctacgccttcagcagctactggatcaactggatgaagcagaaacccggccagggactcgaatggatcggccaaatctatcccggcgacggcaccgagaacagattcagcgtgaacttccagaaggccgccaagagcttcagcctgaagatcagcgatagccagctgggcgacgccgccatgtacttttgcgcttatagaagcgccgtgaacgcccggctgatgtttggagatggcacacagctggtggtcaagcccaacacgcgtgagcagaaactgatctcggaagaggatgggagcggcagccagcctcacaccaagcccagcgtgttcgtgatgaagaacggcaccaacgtggcctgcctcgtgaaagagttctaccccaaggacatcaggatcaacctggtgtccagcaagaagatcaccgagttcgaccccgccatcgtgatctcccccagcggcaagtacaacgccgtgaagctggggaagtacgaggacagcaacagcgtgacctgctccgtgcagcacgacaacaagaccgtgcacagcaccgactttgaagtgaaaaccgactccaccgaccacgtgaagcccaaagagacagagaacaccaagcagcccagcaagagctgccacaagcccaaggccatcgtgcacaccgagaaagtgaacatgatgagcctgaccgtgctgggcctgcggatgctgttcgccaaaaccgtggccgtgaacttcctgctgaccgccaagctgttcttcctccgcgccaagagaagcggatctggcgtgaagcagaccctgaatttcgacctgctgaagctggctggcgacgtggaatccaacccaggcccttctagaggccatatgaccgagtacaagcccacggtgcgcctcgccacccgcgacgacgtccccagggccgtacgcaccctcgccgccgcgttcgccgactaccccgccacgcgccacaccgtcgatccggaccgccacatcgagcgggtcaccgagctgcaagaactcttcctcacgcgcgtcgggctcgacatcggcaaggtgtgggtcgcggacgacggcgccgcggtggcggtctggaccacgccggagagcgtcgaagcgggggcggtgttcgccgagatcggcccgcgcatggccgagttgagcggttcccggctggccgcgcagcaacagatggaaggcctcctggcgccgcaccggcccaaggagcccgcgtggttcctggccaccgtcggcgtctcgcccgaccaccagggcaagggtctgggcagcgccgtcgtgctccccggagtggaggcggccgagcgcgccggggtgcccgccttcctggagacctccgcgccccgcaacctccccttctacgagcggctcggcttcaccgtcaccgccgacgtcgaggtgcccgaaggaccgcgcacctggtgcatgacccgcaagcccggtgcctga

SEQ ID NO: 3510 - DNA, 2298 bp, Artificial Sequence
  Synthetic Polynucloetide
atggccttaccagtgaccgccttgctcctgccgctggccttgctgctccacgccgccaggccggaagccgacatctaccagacacctagatacctggtcatcggcaccggcaagaaaatcaccctggaatgcagccagacaatgggccacgacaagatgtactggtatcagcaggaccccggcatggaactgcacctgatccactacagctacggcgtgaacagcaccgagaagggcgatctgtctagcgagagcaccgtgtccagaatcagaaccgagcacttcccactgacactggaaagcgccagacctagccacaccagccagtacctgtgtgcctcttctgaggccagaggactggccgagttcaccgacacacagtatttcggccctggcaccagactgaccgttctcgagagccagcctcacaccaagcccagcgtgttcgtgatgaagaacggcaccaacgtggcctgcctcgtgaaagagttctaccccaaggacatcaggatcaacctggtgtccagcaagaagatcaccgagttcgaccccgccatcgtgatctcccccagcggcaagtacaacgccgtgaagctggggaagtacgaggacagcaacagcgtgacctgctccgtgcagcacgacaacaagaccgtgcacagcaccgactttgaagtgaaaaccgactccaccgaccacgtgaagcccaaagagacagagaacaccaagcagcccagcaagagctgccacaagcccaaggccatcgtgcacaccgagaaagtgaacatgatgagcctgaccgtgctgggcctgcggatgctgttcgccaaaaccgtggccgtgaacttcctgctgaccgccaagctgttcttcctcagggccaagcgatctggatctggagcaacaaacttctcactactcaaacaagcaggtgacgtggaggagaatcccgggcctactagtatggactggatttggcgcatccttttccttgtcggcgctgctaccggcgcccattccgggccccaggttcagctgcaagagtctggcggaggacttgctcaagctggcggaagcctgagactgtcttgtgccgcctctggcagaaccttcagcatgggctggtttagacaggcccctggcaaagagagagagttcgtcgccgccatcacatacagcggcggcagcccttactacgcctcttctgtcagaggccggttcaccatcagccgggacaacgccaagaacaccgtgtacctccagatgaacagcctgaagccagaggacaccgccgtgtactactgtgccgccaatccaacctacggcagcgactggaatgccgagaattggggccagggcacccaagtgacagtgtctagtggatccggcggcggaggatctggcggaggcggatctgggggcggaggctctttcgaacaagttcagcttcaacagcctggcgctgagctggtcaaacctggcgcttctgtgaagatgagctgcaaagccagcggctacgccttcagcagctactggatcaactggatgaagcagaaacccggccagggactcgaatggatcggccaaatctatcccggcgacggcaccgagaacagattcagcgtgaacttccagaaggccgccaagagcttcagcctgaagatcagcgatagccagctgggcgacgccgccatgtacttttgcgcttatagaagcgccgtgaacgcccggctgatgtttggagatggcacacagctggtggtcaagcccaacacgcgtgacaagcagctggacgccgacgtgtcccccaagcctaccatcttcctgccctctatcgccgagacaaagctccagaaggccggcacctacctgtgcctgctggaaaagttcttcccagatgtgattaagatccactggcaggaaaagaagtccaacaccatcctgggcagccaggaaggcaacaccatgaagaccaacgacacctacatgaagttcagctggctgaccgtgcccgagaagtccctggacaaagaacacagatgcatcgtgcggcacgaaaacaacaagaacggcgtggaccaggaaatcatcttcccacccatcaagaccgatgtgattacaatggaccccaaggacaactgctccaaggacgccaacgataccctgctgctccagctgaccaacaccagcgcctactacatgtacttgttgctgctgctgaagtccgtggtgtacttcgccatcatcacatgctgcctgctgcggagaaccgccttctgctgcaacggcgagaagtct

SEQ ID NO: 3511 - DNA, 3507 bp, Artificial Sequence
  Synthetic Polynucloetide
atggccttaccagtgaccgccttgctcctgccgctggccttgctgctccacgccgccaggccggaagccgacatctaccagacacctagatacctggtcatcggcaccggcaagaaaatcaccctggaatgcagccagacaatgggccacgacaagatgtactggtatcagcaggaccccggcatggaactgcacctgatccactacagctacggcgtgaacagcaccgagaagggcgatctgtctagcgagagcaccgtgtccagaatcagaaccgagcacttcccactgacactggaaagcgccagacctagccacaccagccagtacctgtgtgcctcttctgaggccagaggactggccgagttcaccgacacacagtatttcggccctggcaccagactgaccgttggacagcctaaggccaatcctaccgtgacactgttccctccaagcagcgaagaactccaggccaacaaggccacacttgtgtgcctgatctccgacttctaccctggggctgtgacagtggcttggaaggccgatggatctcctgtgaaagccggcgtggaaaccaccaagccatccaagcagagcaacaacaaatacgccgccagctcctacctgagcctgacacctgagcagtggaagtcccacagatcctacagctgccaagtgacccacgaaggcagcaccgtggaaaagacagtggcccctacagagtgcagcggatcccagagcttcggcctgctggaccccaagctgtgctacctgctggatggcatcctgttcatctacggcgtgatcctgaccgccctgttcctgagagtgaagttcagcagaagcgccgacgcccctgcctaccagcagggacagaaccaactgtacaacgagctgaacctgggcagacgggaagagtacgacgtgctggacaagcggagaggcagggaccctgagatgggcggaaagccccagcggagaaagaacccccaggaaggactgtataacgaactccagaaagacaagatggccgaagcctacagcgagatcggcatgaagggcgagcggagaagaggcaagggccacgatggcctgtaccagggcctgagcaccgccaccaaggacacctatgacgccctgcacatgcaggccctgcctccaagaagggccaagcgatctggatctggagcaacaaacttctcactactcaaacaagcaggtgacgtggaggagaatcccgggcctactagtatggactggatttggcgcatccttttccttgtcggcgctgctaccggcgcccattccgggccccaggttcagctgcaagagtctggcggaggacttgctcaagctggcggaagcctgagactgtcttgtgccgcctctggcagaaccttcagcatgggctggtttagacaggcccctggcaaagagagagagttcgtcgccgccatcacatacagcggcggcagcccttactacgcctcttctgtcagaggccggttcaccatcagccgggacaacgccaagaacaccgtgtacctccagatgaacagcctgaagccagaggacaccgccgtgtactactgtgccgccaatccaacctacggcagcgactggaatgccgagaattggggccagggcacccaagtgacagtgtctagtggatccggcggcggaggatctggcggaggcggatctgggggcggaggctctttcgaacaagttcagcttcaacagcctggcgctgagctggtcaaacctggcgcttctgtgaagatgagctgcaaagccagcggctacgccttcagcagctactggatcaactggatgaagcagaaacccggccagggactcgaatggatcggccaaatctatcccggcgacggcaccgagaacagattcagcgtgaacttccagaaggccgccaagagcttcagcctgaagatcagcgatagccagctgggcgacgccgccatgtacttttgcgcttatagaagcgccgtgaacgcccggctgatgtttggagatggcacacagctggtggtcaagcccaacgcctctacaaagggaccctccgtgtttcctctggctcccagcagcaagtctacaagcggaggaacagccgctctgggctgcctggtcaaggattactttcccgagcctgtgaccgtgtcctggaatagcggagcactgacaagcggcgtgcacacctttccagccgtgctgcaaagcagcggcctgtactctctgagcagcgtggtcacagtgcctagctctagcctgggcacccagacctacatctgcaatgtgaaccacaagcctagcaacaccaaggtggacaagagagtggaacccaagagctgtggtacccagagttttgggttgttggaccctaaattgtgctatctgttggacggaatcctgttcatttacggagtgatcctgaccgcattgttcctgcgggttaagttttccagatccgcagacgcacccgcttaccaacaagggcagaaccaactctacaatgaacttaatttggggcggagggaagagtacgacgttctggacaaaaggaggggacgagatcccgagatgggcggaaagcctcagcgaaggaagaatccgcaagaggggctttataacgaactccagaaagataaaatggcagaagcctatagtgagattgggatgaagggagaaaggaggaggggtaaaggtcacgatgggttgtaccaaggattgagcacagccactaaagatacctatgatgcgctccacatgcaggccctgccgccaagacgcgccaagagaagcggatctggcgtgaagcagaccctgaatttcgacctgctgaagctggctggcgacgtggaatccaacccaggcccttctagaggccatatgaccgagtacaagcccacggtgcgcctcgccacccgcgacgacgtccccagggccgtacgcaccctcgccgccgcgttcgccgactaccccgccacgcgccacaccgtcgatccggaccgccacatcgagcgggtcaccgagctgcaagaactcttcctcacgcgcgtcgggctcgacatcggcaaggtgtgggtcgcggacgacggcgccgcggtggcggtctggaccacgccggagagcgtcgaagcgggggcggtgttcgccgagatcggcccgcgcatggccgagttgagcggttcccggctggccgcgcagcaacagatggaaggcctcctggcgccgcaccggcccaaggagcccgcgtggttcctggccaccgtcggcgtctcgcccgaccaccagggcaagggtctgggcagcgccgtcgtgctccccggagtggaggcggccgagcgcgccggggtgcccgccttcctggagacctccgcgccccgcaacctccccttctacgagcggctcggcttcaccgtcaccgccgacgtcgaggtgcccgaaggaccgcgcacctggtgcatgacccgcaagcccggtgcctga

SEQ ID NO: 3512 - DNA, 2862 bp, Artificial Sequence
  Synthetic Polynucloetide
atggccttaccagtgaccgccttgctcctgccgctggccttgctgctccacgccgccaggccggaagccgacatctaccagacacctagatacctggtcatcggcaccggcaagaaaatcaccctggaatgcagccagacaatgggccacgacaagatgtactggtatcagcaggaccccggcatggaactgcacctgatccactacagctacggcgtgaacagcaccgagaagggcgatctgtctagcgagagcaccgtgtccagaatcagaaccgagcacttcccactgacactggaaagcgccagacctagccacaccagccagtacctgtgtgcctcttctgaggccagaggactggccgagttcaccgacacacagtatttcggccctggcaccagactgaccgttctcgaggacctgaagaacgtgttcccacctgaggtggccgtgttcgagcctagcgaggccgagatcagccacacccagaaagccaccctcgtgtgcctggctaccggcttctaccccgaccatgtggaactgtcttggtgggtcaacggcaaagaggtgcacagcggcgtgtctaccgacccccagccactgaaagaacagcccgccctgaacgacagccggtactgcctgagcagcagactgagagtgtccgccaccttctggcagaacccccggaaccacttcagatgccaggtgcagttctacggcctgagcgagaacgacgagtggacccaggacagagccaagcccgtgacccagatcgtgtctgccgaagcctggggcagagccgattgcggatcccagagcttcggcctgctggaccccaagctgtgctacctgctggatggcatcctgttcatctacggcgtgatcctgaccgccctgttcctgagagtgaagttcagcagaagcgccgacgcccctgcctaccagcagggacagaaccaactgtacaacgagctgaacctgggcagacgggaagagtacgacgtgctggacaagcggagaggcagggaccctgagatgggcggaaagccccagcggagaaagaacccccaggaaggactgtataacgaactccagaaagacaagatggccgaagcctacagcgagatcggcatgaagggcgagcggagaagaggcaagggccacgatggcctgtaccagggcctgagcaccgccaccaaggacacctatgacgccctgcacatgcaggccctgcctccaagaagggccaagcgatctggatctggagcaacaaacttctcactactcaaacaagcaggtgacgtggaggagaatcccgggcctactagtatggactggatttggcgcatccttttccttgtcggcgctgctaccggcgcccattccgggccccaggttcagctgcaagagtctggcggaggacttgctcaagctggcggaagcctgagactgtcttgtgccgcctctggcagaaccttcagcatgggctggtttagacaggcccctggcaaagagagagagttcgtcgccgccatcacatacagcggcggcagcccttactacgcctcttctgtcagaggccggttcaccatcagccgggacaacgccaagaacaccgtgtacctccagatgaacagcctgaagccagaggacaccgccgtgtactactgtgccgccaatccaacctacggcagcgactggaatgccgagaattggggccagggcacccaagtgacagtgtctagtggatccggcggcggaggatctggcggaggcggatctgggggcggaggctctttcgaacaagttcagcttcaacagcctggcgctgagctggtcaaacctggcgcttctgtgaagatgagctgcaaagccagcggctacgccttcagcagctactggatcaactggatgaagcagaaacccggccagggactcgaatggatcggccaaatctatcccggcgacggcaccgagaacagattcagcgtgaacttccagaaggccgccaagagcttcagcctgaagatcagcgatagccagctgggcgacgccgccatgtacttttgcgcttatagaagcgccgtgaacgcccggctgatgtttggagatggcacacagctggtggtcaagcccaacacgcgtatccagaaccctgatcctgccgtgtaccagctgcgggatagcaagagcagcgacaagagcgtgtgtctgttcaccgacttcgacagccagaccaacgtgtcccagagcaaggactccgacgtgtacatcaccgataagaccgtgctggacatgcggagcatggacttcaagagcaactccgccgtggcctggtccaacaagtccgatttcgcctgcgccaacgccttcaacaacagcattatccccgaggacacattcttcccaagccccgagagcagctgcggtacccagagttttgggttgttggaccctaaattgtgctatctgttggacggaatcctgttcatttacggagtgatcctgaccgcattgttcctgcgggttaagttttccagatccgcagacgcacccgcttaccaacaagggcagaaccaactctacaatgaacttaatttggggcggagggaagagtacgacgttctggacaaaaggaggggacgagatcccgagatgggcggaaagcctcagcgaaggaagaatccgcaagaggggctttataacgaactccagaaagataaaatggcagaagcctatagtgagattgggatgaagggagaaaggaggaggggtaaaggtcacgatgggttgtaccaaggattgagcacagccactaaagatacctatgatgcgctccacatgcaggccctgccgccaaga

SEQ ID NO: 3513 - DNA, 2862 bp, Artificial Sequence
  Synthetic Polynucloetide
atggccttaccagtgaccgccttgctcctgccgctggccttgctgctccacgccgccaggccggaagccgacatctaccagacacctagatacctggtcatcggcaccggcaagaaaatcaccctggaatgcagccagacaatgggccacgacaagatgtactggtatcagcaggaccccggcatggaactgcacctgatccactacagctacggcgtgaacagcaccgagaagggcgatctgtctagcgagagcaccgtgtccagaatcagaaccgagcacttcccactgacactggaaagcgccagacctagccacaccagccagtacctgtgtgcctcttctgaggccagaggactggccgagttcaccgacacacagtatttcggccctggcaccagactgaccgttctcgaggacctgaagaacgtgttcccacctgaggtggccgtgttcgagcctagcaaggccgagatcgcccacacccagaaagccaccctcgtgtgcctggctaccggcttctaccccgaccatgtggaactgtcttggtgggtcaacggcaaagaggtgcacagcggcgtgtgtaccgacccccagccactgaaagaacagcccgccctgaacgacagccggtactgcctgagcagcagactgagagtgtccgccaccttctggcagaacccccggaaccacttcagatgccaggtgcagttctacggcctgagcgagaacgacgagtggacccaggacagagccaagcccgtgacccagatcgtgtctgccgaagcctggggcagagccgattgcggatcccagagcttcggcctgctggaccccaagctgtgctacctgctggatggcatcctgttcatctacggcgtgatcctgaccgccctgttcctgagagtgaagttcagcagaagcgccgacgcccctgcctaccagcagggacagaaccaactgtacaacgagctgaacctgggcagacgggaagagtacgacgtgctggacaagcggagaggcagggaccctgagatgggcggaaagccccagcggagaaagaacccccaggaaggactgtataacgaactccagaaagacaagatggccgaagcctacagcgagatcggcatgaagggcgagcggagaagaggcaagggccacgatggcctgtaccagggcctgagcaccgccaccaaggacacctatgacgccctgcacatgcaggccctgcctccaagaagggccaagcgatctggatctggagcaacaaacttctcactactcaaacaagcaggtgacgtggaggagaatcccgggcctactagtatggactggatttggcgcatccttttccttgtcggcgctgctaccggcgcccattccgggccccaggttcagctgcaagagtctggcggaggacttgctcaagctggcggaagcctgagactgtcttgtgccgcctctggcagaaccttcagcatgggctggtttagacaggcccctggcaaagagagagagttcgtcgccgccatcacatacagcggcggcagcccttactacgcctcttctgtcagaggccggttcaccatcagccgggacaacgccaagaacaccgtgtacctccagatgaacagcctgaagccagaggacaccgccgtgtactactgtgccgccaatccaacctacggcagcgactggaatgccgagaattggggccagggcacccaagtgacagtgtctagtggatccggcggcggaggatctggcggaggcggatctgggggcggaggctctttcgaacaagttcagcttcaacagcctggcgctgagctggtcaaacctggcgcttctgtgaagatgagctgcaaagccagcggctacgccttcagcagctactggatcaactggatgaagcagaaacccggccagggactcgaatggatcggccaaatctatcccggcgacggcaccgagaacagattcagcgtgaacttccagaaggccgccaagagcttcagcctgaagatcagcgatagccagctgggcgacgccgccatgtacttttgcgcttatagaagcgccgtgaacgcccggctgatgtttggagatggcacacagctggtggtcaagcccaacacgcgtatccagaaccctgatcctgccgtgtaccagctgcgggatagcaagagcagcgacaagagcgtgtgtctgttcaccgacttcgacagccagaccaacgtgtcccagagcaaggactccgacgtgtacatcaccgataagtgcgtgctggacatgcggagcatggacttcaagagcaactccgccgtggcctggtccaacaagtccgatttcgcctgcgccaacgccttcaacaacagcattatccccgaggacacattcttcccaagcagcgacgtgccctgcggtacccagagttttgggttgttggaccctaaattgtgctatctgttggacggaatcctgttcatttacggagtgatcctgaccgcattgttcctgcgggttaagttttccagatccgcagacgcacccgcttaccaacaagggcagaaccaactctacaatgaacttaatttggggcggagggaagagtacgacgttctggacaaaaggaggggacgagatcccgagatgggcggaaagcctcagcgaaggaagaatccgcaagaggggctttataacgaactccagaaagataaaatggcagaagcctatagtgagattgggatgaagggagaaaggaggaggggtaaaggtcacgatgggttgtaccaaggattgagcacagccactaaagatacctatgatgcgctccacatgcaggccctgccgccaaga

SEQ ID NO: 3514 - DNA, 3075 bp, Artificial Sequence
  Synthetic Polynucloetide
atggccttaccagtgaccgccttgctcctgccgctggccttgctgctccacgccgccaggccggaagccgacatctaccagacacctagatacctggtcatcggcaccggcaagaaaatcaccctggaatgcagccagacaatgggccacgacaagatgtactggtatcagcaggaccccggcatggaactgcacctgatccactacagctacggcgtgaacagcaccgagaagggcgatctgtctagcgagagcaccgtgtccagaatcagaaccgagcacttcccactgacactggaaagcgccagacctagccacaccagccagtacctgtgtgcctcttctgaggccagaggactggccgagttcaccgacacacagtatttcggccctggcaccagactgaccgttctcgaggggaaaccaattcccaaccctcttctgggactggattcaaccggcagcggcgaggacctgaagaacgtgttcccacctgaggtggccgtgttcgagcctagcgaggccgagatcagccacacccagaaagccaccctcgtgtgcctggctaccggcttctaccccgaccatgtggaactgtcttggtgggtcaacggcaaagaggtgcacagcggcgtgtctaccgacccccagccactgaaagaacagcccgccctgaacgacagccggtactgcctgagcagcagactgagagtgtccgccaccttctggcagaacccccggaaccacttcagatgccaggtgcagttctacggcctgagcgagaacgacgagtggacccaggacagagccaagcccgtgacccagatcgtgtctgccgaagcctggggcagagccgattgcggatcccagagcttcggcctgctggaccccaagctgtgctacctgctggatggcatcctgttcatctacggcgtgatcctgaccgccctgttcctgagagtgaagttcagcagaagcgccgacgcccctgcctaccagcagggacagaaccaactgtacaacgagctgaacctgggcagacgggaagagtacgacgtgctggacaagcggagaggcagggaccctgagatgggcggaaagccccagcggagaaagaacccccaggaaggactgtataacgaactccagaaagacaagatggccgaagcctacagcgagatcggcatgaagggcgagcggagaagaggcaagggccacgatggcctgtaccagggcctgagcaccgccaccaaggacacctatgacgccctgcacatgcaggccctgcctccaagaagggccaagcgatctggatctggagcaacaaacttctcactactcaaacaagcaggtgacgtggaggagaatcccgggcctactagtatggactggatttggcgcatccttttccttgtcggcgctgctaccggcgcccattccgggccccaggttcagctgcaagagtctggcggaggacttgctcaagctggcggaagcctgagactgtcttgtgccgcctctggcagaaccttcagcatgggctggtttagacaggcccctggcaaagagagagagttcgtcgccgccatcacatacagcggcggcagcccttactacgcctcttctgtcagaggccggttcaccatcagccgggacaacgccaagaacaccgtgtacctccagatgaacagcctgaagccagaggacaccgccgtgtactactgtgccgccaatccaacctacggcagcgactggaatgccgagaattggggccagggcacccaagtgacagtgtctagtggatccggcggcggaggatctggcggaggcggatctgggggcggaggctctttcgaacaagttcagcttcaacagcctggcgctgagctggtcaaacctggcgcttctgtgaagatgagctgcaaagccagcggctacgccttcagcagctactggatcaactggatgaagcagaaacccggccagggactcgaatggatcggccaaatctatcccggcgacggcaccgagaacagattcagcgtgaacttccagaaggccgccaagagcttcagcctgaagatcagcgatagccagctgggcgacgccgccatgtacttttgcgcttatagaagcgccgtgaacgcccggctgatgtttggagatggcacacagctggtggtcaagcccaacacgcgtgagcagaaactgatctcggaagaggatgggagcggcatccagaaccctgatcctgccgtgtaccagctgcgggatagcaagagcagcgacaagagcgtgtgtctgttcaccgacttcgacagccagaccaacgtgtcccagagcaaggactccgacgtgtacatcaccgataagaccgtgctggacatgcggagcatggacttcaagagcaactccgccgtggcctggtccaacaagtccgatttcgcctgcgccaacgccttcaacaacagcattatccccgaggacacattcttcccaagccccgagagcagctgcggtacccagagttttgggttgttggaccctaaattgtgctatctgttggacggaatcctgttcatttacggagtgatcctgaccgcattgttcctgaggagcaagcggtcacggctgctccacagcgattacatgaatatgacaccacgaagaccgggtcctactcgcaaacactaccaaccctacgcacctccccgcgactttgcagcgtaccgatctcgggttaagttttccagatccgcagacgcacccgcttaccaacaagggcagaaccaactctacaatgaacttaatttggggcggagggaagagtacgacgttctggacaaaaggaggggacgagatcccgagatgggcggaaagcctcagcgaaggaagaatccgcaagaggggctttataacgaactccagaaagataaaatggcagaagcctatagtgagattgggatgaagggagaaaggaggaggggtaaaggtcacgatgggttgtaccaaggattgagcacagccactaaagatacctatgatgcgctccacatgcaggccctgccgccaaga

SEQ ID NO: 3515 - DNA, 3198 bp, Artificial Sequence
  Synthetic Polynucloetide
atggccttaccagtgaccgccttgctcctgccgctggccttgctgctccacgccgccaggccggaagccgacatctaccagacacctagatacctggtcatcggcaccggcaagaaaatcaccctggaatgcagccagacaatgggccacgacaagatgtactggtatcagcaggaccccggcatggaactgcacctgatccactacagctacggcgtgaacagcaccgagaagggcgatctgtctagcgagagcaccgtgtccagaatcagaaccgagcacttcccactgacactggaaagcgccagacctagccacaccagccagtacctgtgtgcctcttctgaggccagaggactggccgagttcaccgacacacagtatttcggccctggcaccagactgaccgttctcgaggggaaaccaattcccaaccctcttctgggactggattcaaccggcagcggcgaggacctgaagaacgtgttcccacctgaggtggccgtgttcgagcctagcgaggccgagatcagccacacccagaaagccaccctcgtgtgcctggctaccggcttctaccccgaccatgtggaactgtcttggtgggtcaacggcaaagaggtgcacagcggcgtgtctaccgacccccagccactgaaagaacagcccgccctgaacgacagccggtactgcctgagcagcagactgagagtgtccgccaccttctggcagaacccccggaaccacttcagatgccaggtgcagttctacggcctgagcgagaacgacgagtggacccaggacagagccaagcccgtgacccagatcgtgtctgccgaagcctggggcagagccgattgcggatcccagagcttcggcctgctggaccccaagctgtgctacctgctggatggcatcctgttcatctacggcgtgatcctgaccgccctgttcctgaggagtaagaggagcaggctcctgcacagtgactacatgaacatgactccacgccgccccggacccacccgcaagcattaccagccctatgccccaccacgcgacttcgcagcctatcgctccagagtgaagttcagcagaagcgccgacgcccctgcctaccagcagggacagaaccaactgtacaacgagctgaacctgggcagacgggaagagtacgacgtgctggacaagcggagaggcagggaccctgagatgggcggaaagccccagcggagaaagaacccccaggaaggactgtataacgaactccagaaagacaagatggccgaagcctacagcgagatcggcatgaagggcgagcggagaagaggcaagggccacgatggcctgtaccagggcctgagcaccgccaccaaggacacctatgacgccctgcacatgcaggccctgcctccaagaagggccaagcgatctggatctggagcaacaaacttctcactactcaaacaagcaggtgacgtggaggagaatcccgggcctactagtatggactggatttggcgcatccttttccttgtcggcgctgctaccggcgcccattccgggccccaggttcagctgcaagagtctggcggaggacttgctcaagctggcggaagcctgagactgtcttgtgccgcctctggcagaaccttcagcatgggctggtttagacaggcccctggcaaagagagagagttcgtcgccgccatcacatacagcggcggcagcccttactacgcctcttctgtcagaggccggttcaccatcagccgggacaacgccaagaacaccgtgtacctccagatgaacagcctgaagccagaggacaccgccgtgtactactgtgccgccaatccaacctacggcagcgactggaatgccgagaattggggccagggcacccaagtgacagtgtctagtggatccggcggcggaggatctggcggaggcggatctgggggcggaggctctttcgaacaagttcagcttcaacagcctggcgctgagctggtcaaacctggcgcttctgtgaagatgagctgcaaagccagcggctacgccttcagcagctactggatcaactggatgaagcagaaacccggccagggactcgaatggatcggccaaatctatcccggcgacggcaccgagaacagattcagcgtgaacttccagaaggccgccaagagcttcagcctgaagatcagcgatagccagctgggcgacgccgccatgtacttttgcgcttatagaagcgccgtgaacgcccggctgatgtttggagatggcacacagctggtggtcaagcccaacacgcgtgagcagaaactgatctcggaagaggatgggagcggcatccagaaccctgatcctgccgtgtaccagctgcgggatagcaagagcagcgacaagagcgtgtgtctgttcaccgacttcgacagccagaccaacgtgtcccagagcaaggactccgacgtgtacatcaccgataagaccgtgctggacatgcggagcatggacttcaagagcaactccgccgtggcctggtccaacaagtccgatttcgcctgcgccaacgccttcaacaacagcattatccccgaggacacattcttcccaagccccgagagcagctgcggtacccagagttttgggttgttggaccctaaattgtgctatctgttggacggaatcctgttcatttacggagtgatcctgaccgcattgttcctgaggagcaagcggtcacggctgctccacagcgattacatgaatatgacaccacgaagaccgggtcctactcgcaaacactaccaaccctacgcacctccccgcgactttgcagcgtaccgatctcgggttaagttttccagatccgcagacgcacccgcttaccaacaagggcagaaccaactctacaatgaacttaatttggggcggagggaagagtacgacgttctggacaaaaggaggggacgagatcccgagatgggcggaaagcctcagcgaaggaagaatccgcaagaggggctttataacgaactccagaaagataaaatggcagaagcctatagtgagattgggatgaagggagaaaggaggaggggtaaaggtcacgatgggttgtaccaaggattgagcacagccactaaagatacctatgatgcgctccacatgcaggccctgccgccaaga

SEQ ID NO: 3516 - DNA, 3081 bp, Artificial Sequence
  Synthetic Polynucloetide
atggccttaccagtgaccgccttgctcctgccgctggccttgctgctccacgccgccaggccggaagccgacatctaccagacacctagatacctggtcatcggcaccggcaagaaaatcaccctggaatgcagccagacaatgggccacgacaagatgtactggtatcagcaggaccccggcatggaactgcacctgatccactacagctacggcgtgaacagcaccgagaagggcgatctgtctagcgagagcaccgtgtccagaatcagaaccgagcacttcccactgacactggaaagcgccagacctagccacaccagccagtacctgtgtgcctcttctgaggccagaggactggccgagttcaccgacacacagtatttcggccctggcaccagactgaccgttctcgaggggaaaccaattcccaaccctcttctgggactggattcaaccggcagcggcgaggacctgaagaacgtgttcccacctgaggtggccgtgttcgagcctagcgaggccgagatcagccacacccagaaagccaccctcgtgtgcctggctaccggcttctaccccgaccatgtggaactgtcttggtgggtcaacggcaaagaggtgcacagcggcgtgtctaccgacccccagccactgaaagaacagcccgccctgaacgacagccggtactgcctgagcagcagactgagagtgtccgccaccttctggcagaacccccggaaccacttcagatgccaggtgcagttctacggcctgagcgagaacgacgagtggacccaggacagagccaagcccgtgacccagatcgtgtctgccgaagcctggggcagagccgattgcggatcccagagcttcggcctgctggaccccaagctgtgctacctgctggatggcatcctgttcatctacggcgtgatcctgaccgccctgttcctgagagtgaagttcagcagaagcgccgacgcccctgcctaccagcagggacagaaccaactgtacaacgagctgaacctgggcagacgggaagagtacgacgtgctggacaagcggagaggcagggaccctgagatgggcggaaagccccagcggagaaagaacccccaggaaggactgtataacgaactccagaaagacaagatggccgaagcctacagcgagatcggcatgaagggcgagcggagaagaggcaagggccacgatggcctgtaccagggcctgagcaccgccaccaaggacacctatgacgccctgcacatgcaggccctgcctccaagaagggccaagcgatctggatctggagcaacaaacttctcactactcaaacaagcaggtgacgtggaggagaatcccgggcctactagtatggactggatttggcgcatccttttccttgtcggcgctgctaccggcgcccattccgggccccaggttcagctgcaagagtctggcggaggacttgctcaagctggcggaagcctgagactgtcttgtgccgcctctggcagaaccttcagcatgggctggtttagacaggcccctggcaaagagagagagttcgtcgccgccatcacatacagcggcggcagcccttactacgcctcttctgtcagaggccggttcaccatcagccgggacaacgccaagaacaccgtgtacctccagatgaacagcctgaagccagaggacaccgccgtgtactactgtgccgccaatccaacctacggcagcgactggaatgccgagaattggggccagggcacccaagtgacagtgtctagtggatccggcggcggaggatctggcggaggcggatctgggggcggaggctctttcgaacaagttcagcttcaacagcctggcgctgagctggtcaaacctggcgcttctgtgaagatgagctgcaaagccagcggctacgccttcagcagctactggatcaactggatgaagcagaaacccggccagggactcgaatggatcggccaaatctatcccggcgacggcaccgagaacagattcagcgtgaacttccagaaggccgccaagagcttcagcctgaagatcagcgatagccagctgggcgacgccgccatgtacttttgcgcttatagaagcgccgtgaacgcccggctgatgtttggagatggcacacagctggtggtcaagcccaacacgcgtgagcagaaactgatctcggaagaggatctggggagcggcatccagaaccctgatcctgccgtgtaccagctgcgggatagcaagagcagcgacaagagcgtgtgtctgttcaccgacttcgacagccagaccaacgtgtcccagagcaaggactccgacgtgtacatcaccgataagaccgtgctggacatgcggagcatggacttcaagagcaactccgccgtggcctggtccaacaagtccgatttcgcctgcgccaacgccttcaacaacagcattatccccgaggacacattcttcccaagccccgagagcagctgcggtacccagagttttgggttgttggaccctaaattgtgctatctgttggacggaatcctgttcatttacggagtgatcctgaccgcattgttcctgaagagaggccggaagaagctgctgtacatcttcaagcagcctttcatgcggcccgtgcagaccacccaggaagaggacggctgctcctgccggttccccgaggaagaagaaggcggctgcgagctgcgggttaagttttccagatccgcagacgcacccgcttaccaacaagggcagaaccaactctacaatgaacttaatttggggcggagggaagagtacgacgttctggacaaaaggaggggacgagatcccgagatgggcggaaagcctcagcgaaggaagaatccgcaagaggggctttataacgaactccagaaagataaaatggcagaagcctatagtgagattgggatgaagggagaaaggaggaggggtaaaggtcacgatgggttgtaccaaggattgagcacagccactaaagatacctatgatgcgctccacatgcaggccctgccgccaaga

SEQ ID NO: 3517 - DNA, 3207 bp, Artificial Sequence
  Synthetic Polynucloetide
atggccttaccagtgaccgccttgctcctgccgctggccttgctgctccacgccgccaggccggaagccgacatctaccagacacctagatacctggtcatcggcaccggcaagaaaatcaccctggaatgcagccagacaatgggccacgacaagatgtactggtatcagcaggaccccggcatggaactgcacctgatccactacagctacggcgtgaacagcaccgagaagggcgatctgtctagcgagagcaccgtgtccagaatcagaaccgagcacttcccactgacactggaaagcgccagacctagccacaccagccagtacctgtgtgcctcttctgaggccagaggactggccgagttcaccgacacacagtatttcggccctggcaccagactgaccgttctcgaggggaaaccaattcccaaccctcttctgggactggattcaaccggcagcggcgaggacctgaagaacgtgttcccacctgaggtggccgtgttcgagcctagcgaggccgagatcagccacacccagaaagccaccctcgtgtgcctggctaccggcttctaccccgaccatgtggaactgtcttggtgggtcaacggcaaagaggtgcacagcggcgtgtctaccgacccccagccactgaaagaacagcccgccctgaacgacagccggtactgcctgagcagcagactgagagtgtccgccaccttctggcagaacccccggaaccacttcagatgccaggtgcagttctacggcctgagcgagaacgacgagtggacccaggacagagccaagcccgtgacccagatcgtgtctgccgaagcctggggcagagccgattgcggatcccagagcttcggcctgctggaccccaagctgtgctacctgctggatggcatcctgttcatctacggcgtgatcctgaccgccctgttcctgaaacggggcagaaagaaactcctgtatatattcaaacaaccatttatgagaccagtacaaactactcaagaggaagatggctgtagctgccgatttccagaagaagaagaaggaggatgtgaactgagagtgaagttcagcagaagcgccgacgcccctgcctaccagcagggacagaaccaactgtacaacgagctgaacctgggcagacgggaagagtacgacgtgctggacaagcggagaggcagggaccctgagatgggcggaaagccccagcggagaaagaacccccaggaaggactgtataacgaactccagaaagacaagatggccgaagcctacagcgagatcggcatgaagggcgagcggagaagaggcaagggccacgatggcctgtaccagggcctgagcaccgccaccaaggacacctatgacgccctgcacatgcaggccctgcctccaagaagggccaagcgatctggatctggagcaacaaacttctcactactcaaacaagcaggtgacgtggaggagaatcccgggcctactagtatggactggatttggcgcatccttttccttgtcggcgctgctaccggcgcccattccgggccccaggttcagctgcaagagtctggcggaggacttgctcaagctggcggaagcctgagactgtcttgtgccgcctctggcagaaccttcagcatgggctggtttagacaggcccctggcaaagagagagagttcgtcgccgccatcacatacagcggcggcagcccttactacgcctcttctgtcagaggccggttcaccatcagccgggacaacgccaagaacaccgtgtacctccagatgaacagcctgaagccagaggacaccgccgtgtactactgtgccgccaatccaacctacggcagcgactggaatgccgagaattggggccagggcacccaagtgacagtgtctagtggatccggcggcggaggatctggcggaggcggatctgggggcggaggctctttcgaacaagttcagcttcaacagcctggcgctgagctggtcaaacctggcgcttctgtgaagatgagctgcaaagccagcggctacgccttcagcagctactggatcaactggatgaagcagaaacccggccagggactcgaatggatcggccaaatctatcccggcgacggcaccgagaacagattcagcgtgaacttccagaaggccgccaagagcttcagcctgaagatcagcgatagccagctgggcgacgccgccatgtacttttgcgcttatagaagcgccgtgaacgcccggctgatgtttggagatggcacacagctggtggtcaagcccaacacgcgtgagcagaaactgatctcggaagaggatctggggagcggcatccagaaccctgatcctgccgtgtaccagctgcgggatagcaagagcagcgacaagagcgtgtgtctgttcaccgacttcgacagccagaccaacgtgtcccagagcaaggactccgacgtgtacatcaccgataagaccgtgctggacatgcggagcatggacttcaagagcaactccgccgtggcctggtccaacaagtccgatttcgcctgcgccaacgccttcaacaacagcattatccccgaggacacattcttcccaagccccgagagcagctgcggtacccagagttttgggttgttggaccctaaattgtgctatctgttggacggaatcctgttcatttacggagtgatcctgaccgcattgttcctgaagagaggccggaagaagctgctgtacatcttcaagcagcctttcatgcggcccgtgcagaccacccaggaagaggacggctgctcctgccggttccccgaggaagaagaaggcggctgcgagctgcgggttaagttttccagatccgcagacgcacccgcttaccaacaagggcagaaccaactctacaatgaacttaatttggggcggagggaagagtacgacgttctggacaaaaggaggggacgagatcccgagatgggcggaaagcctcagcgaaggaagaatccgcaagaggggctttataacgaactccagaaagataaaatggcagaagcctatagtgagattgggatgaagggagaaaggaggaggggtaaaggtcacgatgggttgtaccaaggattgagcacagccactaaagatacctatgatgcgctccacatgcaggccctgccgccaaga

SEQ ID NO: 3518 - DNA, 2880 bp, Artificial Sequence
  Synthetic Polynucloetide
atggccttaccagtgaccgccttgctcctgccgctggccttgctgctccacgccgccaggccggaagccgacatctaccagacacctagatacctggtcatcggcaccggcaagaaaatcaccctggaatgcagccagacaatgggccacgacaagatgtactggtatcagcaggaccccggcatggaactgcacctgatccactacagctacggcgtgaacagcaccgagaagggcgatctgtctagcgagagcaccgtgtccagaatcagaaccgagcacttcccactgacactggaaagcgccagacctagccacaccagccagtacctgtgtgcctcttctgaggccagaggactggccgagttcaccgacacacagtatttcggccctggcaccagactgaccgttctcgagcagagcttcggcctgctggaccccaagctgtgctacctgctggatggcatcctgttcatctacggcgtgatcctgaccgccctgttcctgagagtgaagttcagcagaagcgccgacgcccctgcctaccagcagggacagaaccaactgtacaacgagctgaacctgggcagacgggaagagtacgacgtgctggacaagcggagaggcagggaccctgagatgggcggaaagccccagcggagaaagaacccccaggaaggactgtataacgaactccagaaagacaagatggccgaagcctacagcgagatcggcatgaagggcgagcggagaagaggcaagggccacgatggcctgtaccagggcctgagcaccgccaccaaggacacctatgacgccctgcacatgcaggccctgcctccaagaagggccaagcgatctggatctggagcaacaaacttctcactactcaaacaagcaggtgacgtggaggagaatcccgggcctactagtatggactggatttggcgcatccttttccttgtcggcgctgctaccggcgcccattccgggccccaggttcagctgcaagagtctggcggaggacttgctcaagctggcggaagcctgagactgtcttgtgccgcctctggcagaaccttcagcatgggctggtttagacaggcccctggcaaagagagagagttcgtcgccgccatcacatacagcggcggcagcccttactacgcctcttctgtcagaggccggttcaccatcagccgggacaacgccaagaacaccgtgtacctccagatgaacagcctgaagccagaggacaccgccgtgtactactgtgccgccaatccaacctacggcagcgactggaatgccgagaattggggccagggcacccaagtgacagtgtctagtggatccggcggcggaggatctggcggaggcggatctgggggcggaggctctttcgaacaagttcagcttcaacagcctggcgctgagctggtcaaacctggcgcttctgtgaagatgagctgcaaagccagcggctacgccttcagcagctactggatcaactggatgaagcagaaacccggccagggactcgaatggatcggccaaatctatcccggcgacggcaccgagaacagattcagcgtgaacttccagaaggccgccaagagcttcagcctgaagatcagcgatagccagctgggcgacgccgccatgtacttttgcgcttatagaagcgccgtgaacgcccggctgatgtttggagatggcacacagctggtggtcaagcccaacacgcgtcagagttttgggttgttggaccctaaattgtgctatctgttggacggaatcctgttcatttacggagtgatcctgaccgcattgttcctgcgggttaagttttccagatccgcagacgcacccgcttaccaacaagggcagaaccaactctacaatgaacttaatttggggcggagggaagagtacgacgttctggacaaaaggaggggacgagatcccgagatgggcggaaagcctcagcgaaggaagaatccgcaagaggggctttataacgaactccagaaagataaaatggcagaagcctatagtgagattgggatgaagggagaaaggaggaggggtaaaggtcacgatgggttgtaccaaggattgagcacagccactaaagatacctatgatgcgctccacatgcaggccctgccgccaagacgcgccaagagaagcggatctggcgtgaagcagaccctgaatttcgacctgctgaagctggctggcgacgtggaatccaacccaggcccttctagaggccatatgaccgagtacaagcccacggtgcgcctcgccacccgcgacgacgtccccagggccgtacgcaccctcgccgccgcgttcgccgactaccccgccacgcgccacaccgtcgatccggaccgccacatcgagcgggtcaccgagctgcaagaactcttcctcacgcgcgtcgggctcgacatcggcaaggtgtgggtcgcggacgacggcgccgcggtggcggtctggaccacgccggagagcgtcgaagcgggggcggtgttcgccgagatcggcccgcgcatggccgagttgagcggttcccggctggccgcgcagcaacagatggaaggcctcctggcgccgcaccggcccaaggagcccgcgtggttcctggccaccgtcggcgtctcgcccgaccaccagggcaagggtctgggcagcgccgtcgtgctccccggagtggaggcggccgagcgcgccggggtgcccgccttcctggagacctccgcgccccgcaacctccccttctacgagcggctcggcttcaccgtcaccgccgacgtcgaggtgcccgaaggaccgcgcacctggtgcatgacccgcaagcccggtgcctga

SEQ ID NO: 3519 - DNA, 2352 bp, Artificial Sequence
  Synthetic Polynucloetide
atggccttaccagtgaccgccttgctcctgccgctggccttgctgctccacgccgccaggccggaagccgacatctaccagacacctagatacctggtcatcggcaccggcaagaaaatcaccctggaatgcagccagacaatgggccacgacaagatgtactggtatcagcaggaccccggcatggaactgcacctgatccactacagctacggcgtgaacagcaccgagaagggcgatctgtctagcgagagcaccgtgtccagaatcagaaccgagcacttcccactgacactggaaagcgccagacctagccacaccagccagtacctgtgtgcctcttctgaggccagaggactggccgagttcaccgacacacagtatttcggccctggcaccagactgaccgttctcgagggacagcctaaggccaatcctaccgtgacactgttccctccaagcagcgaagaactccaggccaacaaggccacacttgtgtgcctgatctccgacttctaccctggggctgtgacagtggcttggaaggccgatggatctcctgtgaaagccggcgtggaaaccaccaagccatccaagcagagcaacaacaaatacgccgccagctcctacctgagcctgacacctgagcagtggaagtcccacagatcctacagctgccaagtgacccacgaaggcagcaccgtggaaaagacagtggcccctacagagtgcagccccatcaagaccgatgtgattacaatggaccccaaggacaactgctccaaggacgccaacgataccctgctgctccagctgaccaacaccagcgcctactacatgtacttgttgctgctgctgaagtccgtggtgtacttcgccatcatcacatgctgcctgctgcggagaaccgccttctgctgcaacggcgagaagtctagggccaagcgatctggatctggagcaacaaacttctcactactcaaacaagcaggtgacgtggaggagaatcccgggcctactagtatggactggatttggcgcatccttttccttgtcggcgctgctaccggcgcccattccgggccccaggttcagctgcaagagtctggcggaggacttgctcaagctggcggaagcctgagactgtcttgtgccgcctctggcagaaccttcagcatgggctggtttagacaggcccctggcaaagagagagagttcgtcgccgccatcacatacagcggcggcagcccttactacgcctcttctgtcagaggccggttcaccatcagccgggacaacgccaagaacaccgtgtacctccagatgaacagcctgaagccagaggacaccgccgtgtactactgtgccgccaatccaacctacggcagcgactggaatgccgagaattggggccagggcacccaagtgacagtgtctagtggatccggcggcggaggatctggcggaggcggatctgggggcggaggctctttcgaacaagttcagcttcaacagcctggcgctgagctggtcaaacctggcgcttctgtgaagatgagctgcaaagccagcggctacgccttcagcagctactggatcaactggatgaagcagaaacccggccagggactcgaatggatcggccaaatctatcccggcgacggcaccgagaacagattcagcgtgaacttccagaaggccgccaagagcttcagcctgaagatcagcgatagccagctgggcgacgccgccatgtacttttgcgcttatagaagcgccgtgaacgcccggctgatgtttggagatggcacacagctggtggtcaagcccaacacgcgtgcctctacaaagggaccctccgtgtttcctctggctcccagcagcaagtctacaagcggaggaacagccgctctgggctgcctggtcaaggattactttcccgagcctgtgaccgtgtcctggaatagcggagcactgacaagcggcgtgcacacctttccagccgtgctgcaaagcagcggcctgtactctctgagcagcgtggtcacagtgcctagctctagcctgggcacccagacctacatctgcaatgtgaaccacaagcctagcaacaccaaggtggacaagagagtggaacccaagagctgtgaagtgaaaaccgactccaccgaccacgtgaagcccaaagagacagagaacaccaagcagcccagcaagagctgccacaagcccaaggccatcgtgcacaccgagaaagtgaacatgatgagcctgaccgtgctgggcctgcggatgctgttcgccaaaaccgtggccgtgaacttcctgctgaccgccaagctgttcttcctc

SEQ ID NO: 3520 - DNA, 2286 bp, Artificial Sequence
  Synthetic Polynucloetide
atggccttaccagtgaccgccttgctcctgccgctggccttgctgctccacgccgccaggccggaagccgacatctaccagacacctagatacctggtcatcggcaccggcaagaaaatcaccctggaatgcagccagacaatgggccacgacaagatgtactggtatcagcaggaccccggcatggaactgcacctgatccactacagctacggcgtgaacagcaccgagaagggcgatctgtctagcgagagcaccgtgtccagaatcagaaccgagcacttcccactgacactggaaagcgccagacctagccacaccagccagtacctgtgtgcctcttctgaggccagaggactggccgagttcaccgacacacagtatttcggccctggcaccagactgaccgttctcgagggacagcctaaggccaatcctaccgtgacactgttccctccaagcagcgaagaactccaggccaacaaggccacacttgtgtgcctgatctccgacttctaccctggggctgtgacagtggcttggaaggccgatggatctcctgtgaaagccggcgtggaaaccaccaagccatccaagcagagcaacaacaaatacgccgccagctcctacctgagcctgacacctgagcagtggaagtcccacagatcctacagctgccaagtgacccacgaaggcagcaccgtggaaaagacagtggcccctacagagtgcagcggcagagccgattgcggcatcaccagcgccagctaccaccagggcgtgctgagcgccaccatcctgtacgagatcctgctgggcaaggccaccctgtacgccgtgctggtgtctgccctggtgctgatggctatggtcaagcggaaggacagccggggaagggccaagcgatctggatctggagcaacaaacttctcactactcaaacaagcaggtgacgtggaggagaatcccgggcctactagtatggactggatttggcgcatccttttccttgtcggcgctgctaccggcgcccattccgggccccaggttcagctgcaagagtctggcggaggacttgctcaagctggcggaagcctgagactgtcttgtgccgcctctggcagaaccttcagcatgggctggtttagacaggcccctggcaaagagagagagttcgtcgccgccatcacatacagcggcggcagcccttactacgcctcttctgtcagaggccggttcaccatcagccgggacaacgccaagaacaccgtgtacctccagatgaacagcctgaagccagaggacaccgccgtgtactactgtgccgccaatccaacctacggcagcgactggaatgccgagaattggggccagggcacccaagtgacagtgtctagtggatccggcggcggaggatctggcggaggcggatctgggggcggaggctctttcgaacaagttcagcttcaacagcctggcgctgagctggtcaaacctggcgcttctgtgaagatgagctgcaaagccagcggctacgccttcagcagctactggatcaactggatgaagcagaaacccggccagggactcgaatggatcggccaaatctatcccggcgacggcaccgagaacagattcagcgtgaacttccagaaggccgccaagagcttcagcctgaagatcagcgatagccagctgggcgacgccgccatgtacttttgcgcttatagaagcgccgtgaacgcccggctgatgtttggagatggcacacagctggtggtcaagcccaacacgcgtgcctctacaaagggaccctccgtgtttcctctggctcccagcagcaagtctacaagcggaggaacagccgctctgggctgcctggtcaaggattactttcccgagcctgtgaccgtgtcctggaatagcggagcactgacaagcggcgtgcacacctttccagccgtgctgcaaagcagcggcctgtactctctgagcagcgtggtcacagtgcctagctctagcctgggcacccagacctacatctgcaatgtgaaccacaagcctagcaacaccaaggtggacaagagagtggaacccaagagctgtatccccgaggacacattcttcccaagcagcgacgtgccctgcgacgtgaagctggtggaaaagagcttcgagacagacaccaacctgaacttccagaacctgagcgtgatcggcttcagaatcctgctgctgaaagtggccggctttaacctgctgatgaccctgcggctgtggtccagc

SEQ ID NO: 3521 - DNA, 2286 bp, Artificial Sequence
  Synthetic Polynucloetide
atggccttaccagtgaccgccttgctcctgccgctggccttgctgctccacgccgccaggccggaagccgacatctaccagacacctagatacctggtcatcggcaccggcaagaaaatcaccctggaatgcagccagacaatgggccacgacaagatgtactggtatcagcaggaccccggcatggaactgcacctgatccactacagctacggcgtgaacagcaccgagaagggcgatctgtctagcgagagcaccgtgtccagaatcagaaccgagcacttcccactgacactggaaagcgccagacctagccacaccagccagtacctgtgtgcctcttctgaggccagaggactggccgagttcaccgacacacagtatttcggccctggcaccagactgaccgttctcgagggacagcctaaggccaatcctaccgtgacactgttccctccaagcagcgaagaactccaggccaacaaggccacacttgtgtgcctgatctccgacttctaccctggggctgtgacagtggcttggaaggccgatggatctcctgtgaaagccggcgtggaaaccaccaagccatccaagcagagcaacaacaaatacgccgccagctcctacctgagcctgacacctgagcagtggaagtcccacagatcctacagctgccaagtgacccacgaaggcagcaccgtggaaaagacagtggcccctacagagtgcagcggcagagccgattgcggctttaccagcgagagctaccagcagggcgtgctgagcgccaccatcctgtacgagatcctgctgggcaaggccaccctgtacgccgtgctggtgtctgccctggtgctgatggctatggtcaagcggaaggacagccggggaagggccaagcgatctggatctggagcaacaaacttctcactactcaaacaagcaggtgacgtggaggagaatcccgggcctactagtatggactggatttggcgcatccttttccttgtcggcgctgctaccggcgcccattccgggccccaggttcagctgcaagagtctggcggaggacttgctcaagctggcggaagcctgagactgtcttgtgccgcctctggcagaaccttcagcatgggctggtttagacaggcccctggcaaagagagagagttcgtcgccgccatcacatacagcggcggcagcccttactacgcctcttctgtcagaggccggttcaccatcagccgggacaacgccaagaacaccgtgtacctccagatgaacagcctgaagccagaggacaccgccgtgtactactgtgccgccaatccaacctacggcagcgactggaatgccgagaattggggccagggcacccaagtgacagtgtctagtggatccggcggcggaggatctggcggaggcggatctgggggcggaggctctttcgaacaagttcagcttcaacagcctggcgctgagctggtcaaacctggcgcttctgtgaagatgagctgcaaagccagcggctacgccttcagcagctactggatcaactggatgaagcagaaacccggccagggactcgaatggatcggccaaatctatcccggcgacggcaccgagaacagattcagcgtgaacttccagaaggccgccaagagcttcagcctgaagatcagcgatagccagctgggcgacgccgccatgtacttttgcgcttatagaagcgccgtgaacgcccggctgatgtttggagatggcacacagctggtggtcaagcccaacacgcgtgcctctacaaagggaccctccgtgtttcctctggctcccagcagcaagtctacaagcggaggaacagccgctctgggctgcctggtcaaggattactttcccgagcctgtgaccgtgtcctggaatagcggagcactgacaagcggcgtgcacacctttccagccgtgctgcaaagcagcggcctgtactctctgagcagcgtggtcacagtgcctagctctagcctgggcacccagacctacatctgcaatgtgaaccacaagcctagcaacaccaaggtggacaagagagtggaacccaagagctgtatccccgaggacacattcttcccaagccccgagagcagctgcgacgtgaagctggtggaaaagagcttcgagacagacaccaacctgaacttccagaacctgagcgtgatcggcttcagaatcctgctgctgaaagtggccggctttaacctgctgatgaccctgcggctgtggtccagc

SEQ ID NO: 3522 - DNA, 1776 bp, Artificial Sequence
  Synthetic Polynucloetide
atggactggatttggcgcatccttttccttgtcggcgctgctaccggcgcccattccgggccccaggttcagctgcaagagtctggcggaggacttgctcaagctggcggaagcctgagactgtcttgtgccgcctctggcagaaccttcagcatgggctggtttagacaggcccctggcaaagagagagagttcgtcgccgccatcacatacagcggcggcagcccttactacgcctcttctgtcagaggccggttcaccatcagccgggacaacgccaagaacaccgtgtacctccagatgaacagcctgaagccagaggacaccgccgtgtactactgtgccgccaatccaacctacggcagcgactggaatgccgagaattggggccagggcacccaagtgacagtgtctagtggatccggcggcggaggatctggcggaggcggatctgggggcggaggctctttcgaacaagttcagcttcaacagcctggcgctgagctggtcaaacctggcgcttctgtgaagatgagctgcaaagccagcggctacgccttcagcagctactggatcaactggatgaagcagaaacccggccagggactcgaatggatcggccaaatctatcccggcgacggcaccgagaacagattcagcgtgaacttccagaaggccgccaagagcttcagcctgaagatcagcgatagccagctgggcgacgccgccatgtacttttgcgcttatagaagcgccgtgaacgcccggctgatgtttggagatggcacacagctggtggtcaagcccaacggcggaggcggaagtggaggcggaggatctggcggcggaggctctgaagccgacatctaccagacacctagatacctggtcatcggcaccggcaagaaaatcaccctggaatgcagccagacaatgggccacgacaagatgtactggtatcagcaggaccccggcatggaactgcacctgatccactacagctacggcgtgaacagcaccgagaagggcgatctgtctagcgagagcaccgtgtccagaatcagaaccgagcacttcccactgacactggaaagcgccagacctagccacaccagccagtacctgtgtgcctcttctgaggccagaggactggccgagttcaccgacacacagtatttcggccctggcaccagactgaccgttacgcgtggcggaggcagcgacggtaacgaggagatgggaggaatcactcaaaccccttacaaagtctcaatttcaggaacaactgttatccttacatgtccccagtatcctggcagcgagatcctttggcagcataacgacaagaatatagggggagatgaagacgataagaatatcggatctgacgaggatcacttgagcctgaaagagttctccgagcttgaacaaagcggatattatgtgtgctatccgcgcgggtcaaagccggaagacgctaacttttacctttatctccgagccagagtgtgcgaaaattgcatggaaatggacgttatgtccgttgctacaatagttatcgtagatatatgcatcacgggtggactgcttctgctggtttattattggtccaagaatagaaaggccaaagctaaacccgtgaccagaggcgctggcgcaggcggaaggcaaaggggacaaaacaaagaacggccaccaccagtgccaaatccagattatgagcctattcggaaaggacagagggacctgtactctggcctgaatcagagaagaatc

SEQ ID NO: 3523 - DNA, 1671 bp, Artificial Sequence
  Synthetic Polynucloetide
atggactggatttggcgcatccttttccttgtcggcgctgctaccggcgcccattccgggccccaggttcagctgcaagagtctggcggaggacttgctcaagctggcggaagcctgagactgtcttgtgccgcctctggcagaaccttcagcatgggctggtttagacaggcccctggcaaagagagagagttcgtcgccgccatcacatacagcggcggcagcccttactacgcctcttctgtcagaggccggttcaccatcagccgggacaacgccaagaacaccgtgtacctccagatgaacagcctgaagccagaggacaccgccgtgtactactgtgccgccaatccaacctacggcagcgactggaatgccgagaattggggccagggcacccaagtgacagtgtctagtggatccggcggcggaggatctggcggaggcggatctgggggcggaggctctttcgaacaagttcagcttcaacagcctggcgctgagctggtcaaacctggcgcttctgtgaagatgagctgcaaagccagcggctacgccttcagcagctactggatcaactggatgaagcagaaacccggccagggactcgaatggatcggccaaatctatcccggcgacggcaccgagaacagattcagcgtgaacttccagaaggccgccaagagcttcagcctgaagatcagcgatagccagctgggcgacgccgccatgtacttttgcgcttatagaagcgccgtgaacgcccggctgatgtttggagatggcacacagctggtggtcaagcccaacggcggaggcggaagtggaggcggaggatctggcggcggaggctctgaagccgacatctaccagacacctagatacctggtcatcggcaccggcaagaaaatcaccctggaatgcagccagacaatgggccacgacaagatgtactggtatcagcaggaccccggcatggaactgcacctgatccactacagctacggcgtgaacagcaccgagaagggcgatctgtctagcgagagcaccgtgtccagaatcagaaccgagcacttcccactgacactggaaagcgccagacctagccacaccagccagtacctgtgtgcctcttctgaggccagaggactggccgagttcaccgacacacagtatttcggccctggcaccagactgaccgttacgcgtggcggaggcagcttcaagatccccatcgaggaactggaagatcgggtgttcgtgaactgcaacacctctatcacctgggtggaaggcaccgtgggaacactgctgagcgacatcaccagactggacctcggcaagcggattctggaccctcggggcatctacagatgcaacggcaccgacatctacaaggacaaagaaagcaccgtgcaggtccactacagaatgtgccagtcctgcgtggaactggaccctgctacagtggccggcatcatcgtgaccgatgtgatcgctactctgctgctggctctgggagtgttctgcttcgccggacacgaaacaggcagactgtctggcgctgccgatacacaggccctgctgagaaacgaccaagtgtatcagcccctgcgcgacagagatgatgcccagtattctcacctcggcggcaactgggctagaaacaag

SEQ ID NO: 3524 - DNA, 1701 bp, Artificial Sequence
  Synthetic Polynucloetide
atggactggatttggcgcatccttttccttgtcggcgctgctaccggcgcccattccgggccccaggttcagctgcaagagtctggcggaggacttgctcaagctggcggaagcctgagactgtcttgtgccgcctctggcagaaccttcagcatgggctggtttagacaggcccctggcaaagagagagagttcgtcgccgccatcacatacagcggcggcagcccttactacgcctcttctgtcagaggccggttcaccatcagccgggacaacgccaagaacaccgtgtacctccagatgaacagcctgaagccagaggacaccgccgtgtactactgtgccgccaatccaacctacggcagcgactggaatgccgagaattggggccagggcacccaagtgacagtgtctagtggatccggcggcggaggatctggcggaggcggatctgggggcggaggctctttcgaacaagttcagcttcaacagcctggcgctgagctggtcaaacctggcgcttctgtgaagatgagctgcaaagccagcggctacgccttcagcagctactggatcaactggatgaagcagaaacccggccagggactcgaatggatcggccaaatctatcccggcgacggcaccgagaacagattcagcgtgaacttccagaaggccgccaagagcttcagcctgaagatcagcgatagccagctgggcgacgccgccatgtacttttgcgcttatagaagcgccgtgaacgcccggctgatgtttggagatggcacacagctggtggtcaagcccaacggcggaggcggaagtggaggcggaggatctggcggcggaggctctgaagccgacatctaccagacacctagatacctggtcatcggcaccggcaagaaaatcaccctggaatgcagccagacaatgggccacgacaagatgtactggtatcagcaggaccccggcatggaactgcacctgatccactacagctacggcgtgaacagcaccgagaagggcgatctgtctagcgagagcaccgtgtccagaatcagaaccgagcacttcccactgacactggaaagcgccagacctagccacaccagccagtacctgtgtgcctcttctgaggccagaggactggccgagttcaccgacacacagtatttcggccctggcaccagactgaccgttacgcgtggcggaggcagccagagcatcaagggcaaccacctggtcaaggtgtacgactaccaagaggacggcagcgtgctgctgacatgtgatgccgaggccaagaacatcacctggtttaaggacggcaagatgatcggcttcctgaccgaggacaagaagaagtggaacctgggcagcaacgctaaggaccccagaggcatgtatcagtgcaagggcagccagaacaagagcaagcccctccaggtgtactaccggatgtgccagaactgcatcgagctgaacgccgctaccatcagcggctttctgttcgccgagatcgtgtccatcttcgtgctggccgtgggcgtgtactttatcgctggacaggatggcgtgcggcagagcagagcttccgataagcaaaccctgctgcctaacgaccagctgtaccagcctctgaaggacagagaggacgaccagtacagccacctccagggcaatcagctgagaagaaac

SEQ ID NO: 3525 - DNA, 1650 bp, Artificial Sequence
  Synthetic Polynucloetide
atggactggatttggcgcatccttttccttgtcggcgctgctaccggcgcccattccgggccccaggttcagctgcaagagtctggcggaggacttgctcaagctggcggaagcctgagactgtcttgtgccgcctctggcagaaccttcagcatgggctggtttagacaggcccctggcaaagagagagagttcgtcgccgccatcacatacagcggcggcagcccttactacgcctcttctgtcagaggccggttcaccatcagccgggacaacgccaagaacaccgtgtacctccagatgaacagcctgaagccagaggacaccgccgtgtactactgtgccgccaatccaacctacggcagcgactggaatgccgagaattggggccagggcacccaagtgacagtgtctagtggatccggcggcggaggatctggcggaggcggatctgggggcggaggctctttcgaacaagttcagcttcaacagcctggcgctgagctggtcaaacctggcgcttctgtgaagatgagctgcaaagccagcggctacgccttcagcagctactggatcaactggatgaagcagaaacccggccagggactcgaatggatcggccaaatctatcccggcgacggcaccgagaacagattcagcgtgaacttccagaaggccgccaagagcttcagcctgaagatcagcgatagccagctgggcgacgccgccatgtacttttgcgcttatagaagcgccgtgaacgcccggctgatgtttggagatggcacacagctggtggtcaagcccaacggcggaggcggaagtggaggcggaggatctggcggcggaggctctgaagccgacatctaccagacacctagatacctggtcatcggcaccggcaagaaaatcaccctggaatgcagccagacaatgggccacgacaagatgtactggtatcagcaggaccccggcatggaactgcacctgatccactacagctacggcgtgaacagcaccgagaagggcgatctgtctagcgagagcaccgtgtccagaatcagaaccgagcacttcccactgacactggaaagcgccagacctagccacaccagccagtacctgtgtgcctcttctgaggccagaggactggccgagttcaccgacacacagtatttcggccctggcaccagactgaccgttacgcgtggcggaggcagccagagttttgggttgttggaccctaaattgtgctatctgttggacggaatcctgttcatttacggagtgatcctgaccgcattgttcctgcgggttaagttttccagatccgcagacgcacccgcttaccaacaagggcagaaccaactctacaatgaacttaatttggggcggagggaagagtacgacgttctggacaaaaggaggggacgagatcccgagatgggcggaaagcctcagcgaaggaagaatccgcaagaggggctttataacgaactccagaaagataaaatggcagaagcctatagtgagattgggatgaagggagaaaggaggaggggtaaaggtcacgatgggttgtaccaaggattgagcacagccactaaagatacctatgatgcgctccacatgcaggccctgccgccaaga

SEQ ID NO: 3526 - DNA, 1737 bp, Artificial Sequence
  Synthetic Polynucloetide
atggactggatttggcgcatccttttccttgtcggcgctgctaccggcgcccattccgggccccaggttcagctgcaagagtctggcggaggacttgctcaagctggcggaagcctgagactgtcttgtgccgcctctggcagaaccttcagcatgggctggtttagacaggcccctggcaaagagagagagttcgtcgccgccatcacatacagcggcggcagcccttactacgcctcttctgtcagaggccggttcaccatcagccgggacaacgccaagaacaccgtgtacctccagatgaacagcctgaagccagaggacaccgccgtgtactactgtgccgccaatccaacctacggcagcgactggaatgccgagaattggggccagggcacccaagtgacagtgtctagtggatccggcggcggaggatctggcggaggcggatctgggggcggaggctctttcgaacaagttcagcttcaacagcctggcgctgagctggtcaaacctggcgcttctgtgaagatgagctgcaaagccagcggctacgccttcagcagctactggatcaactggatgaagcagaaacccggccagggactcgaatggatcggccaaatctatcccggcgacggcaccgagaacagattcagcgtgaacttccagaaggccgccaagagcttcagcctgaagatcagcgatagccagctgggcgacgccgccatgtacttttgcgcttatagaagcgccgtgaacgcccggctgatgtttggagatggcacacagctggtggtcaagcccaacacgcgtatccagaaccctgatcctgccgtgtaccagctgcgggatagcaagagcagcgacaagagcgtgtgtctgttcaccgacttcgacagccagaccaacgtgtcccagagcaaggactccgacgtgtacatcaccgataagaccgtgctggacatgcggagcatggacttcaagagcaactccgccgtggcctggtccaacaagtccgatttcgcctgcgccaacgccttcaacaacagcattatccccgaggacacattcttcccaagccccgagagcagctgcgacgtgaagctggtggaaaagagcttcgagacagacaccaacctgaacttccagaacctgagcgtgatcggcttcagaatcctgctgctgaaagtggccggctttaacctgctgatgaccctgcggctgtggtccagccgcgccaagagaagcggatctggcgtgaagcagaccctgaatttcgacctgctgaagctggctggcgacgtggaatccaacccaggcccttctagaggccatatggccaagcctttgtctcaagaagaatccaccctcattgaaagagcaacggctacaatcaacagcatccccatctctgaagactacagcgtcgccagcgcagctctctctagcgacggccgcatcttcactggtgtcaatgtatatcattttactgggggaccttgtgcagaactcgtggtgctgggcactgctgctgctgcggcagctggcaacctgacttgtatcgtcgcgatcggaaatgagaacaggggcatcttgagcccctgcggacggtgccgacaggtgcttctcgatctgcatcctgggatcaaagccatagtgaaggacagtgatggacagccgacggcagttgggattcgtgaattgctgccctctggttatgtgtgggagggctga

SEQ ID NO: 3527 - DNA, 1236 bp, Artificial Sequence
  Synthetic Polynucloetide
atggactggatttggcgcatccttttccttgtcggcgctgctaccggcgcccattccgggccccaggttcagctgcaagagtctggcggaggacttgctcaagctggcggaagcctgagactgtcttgtgccgcctctggcagaaccttcagcatgggctggtttagacaggcccctggcaaagagagagagttcgtcgccgccatcacatacagcggcggcagcccttactacgcctcttctgtcagaggccggttcaccatcagccgggacaacgccaagaacaccgtgtacctccagatgaacagcctgaagccagaggacaccgccgtgtactactgtgccgccaatccaacctacggcagcgactggaatgccgagaattggggccagggcacccaagtgacagtgtctagtggatccggcggcggaggatctggcggaggcggatctgggggcggaggctctttcgaacaagttcagcttcaacagcctggcgctgagctggtcaaacctggcgcttctgtgaagatgagctgcaaagccagcggctacgccttcagcagctactggatcaactggatgaagcagaaacccggccagggactcgaatggatcggccaaatctatcccggcgacggcaccgagaacagattcagcgtgaacttccagaaggccgccaagagcttcagcctgaagatcagcgatagccagctgggcgacgccgccatgtacttttgcgcttatagaagcgccgtgaacgcccggctgatgtttggagatggcacacagctggtggtcaagcccaacacgcgtatccagaaccctgatcctgccgtgtaccagctgcgggatagcaagagcagcgacaagagcgtgtgtctgttcaccgacttcgacagccagaccaacgtgtcccagagcaaggactccgacgtgtacatcaccgataagaccgtgctggacatgcggagcatggacttcaagagcaactccgccgtggcctggtccaacaagtccgatttcgcctgcgccaacgccttcaacaacagcattatccccgaggacacattcttcccaagccccgagagcagctgcgacgtgaagctggtggaaaagagcttcgagacagacaccaacctgaacttccagaacctgagcgtgatcggcttcagaatcctgctgctgaaagtggccggctttaacctgctgatgaccctgcggctgtggtccagc

SEQ ID NO: 3528 - DNA, 1773 bp, Artificial Sequence
  Synthetic Polynucloetide
atggactggatttggcgcatccttttccttgtcggcgctgctaccggcgcccattccgggccccaggttcagctgcaagagtctggcggaggacttgctcaagctggcggaagcctgagactgtcttgtgccgcctctggcagaaccttcagcatgggctggtttagacaggcccctggcaaagagagagagttcgtcgccgccatcacatacagcggcggcagcccttactacgcctcttctgtcagaggccggttcaccatcagccgggacaacgccaagaacaccgtgtacctccagatgaacagcctgaagccagaggacaccgccgtgtactactgtgccgccaatccaacctacggcagcgactggaatgccgagaattggggccagggcacccaagtgacagtgtctagtggatccggcggcggaggatctggcggaggcggatctgggggcggaggctctttcgaacaagttcagcttcaacagcctggcgctgagctggtcaaacctggcgcttctgtgaagatgagctgcaaagccagcggctacgccttcagcagctactggatcaactggatgaagcagaaacccggccagggactcgaatggatcggccaaatctatcccggcgacggcaccgagaacagattcagcgtgaacttccagaaggccgccaagagcttcagcctgaagatcagcgatagccagctgggcgacgccgccatgtacttttgcgcttatagaagcgccgtgaacgcccggctgatgtttggagatggcacacagctggtggtcaagcccaacacgcgtgagcagaaactgatctcggaagaggatgggagcggcatccagaaccctgatcctgccgtgtaccagctgcgggatagcaagagcagcgacaagagcgtgtgtctgttcaccgacttcgacagccagaccaacgtgtcccagagcaaggactccgacgtgtacatcaccgataagtgcgtgctggacatgcggagcatggacttcaagagcaactccgccgtggcctggtccaacaagtccgatttcgcctgcgccaacgccttcaacaacagcattatccccgaggacacattcttcccaagccccgagagcagctgcgacgtgaagctggtggaaaagagcttcgagacagacaccaacctgaacttccagaacctgagcgtgatcggcttcagaatcctgctgctgaaagtggccggctttaacctgctgatgaccctgcggctgtggtccagccgcgccaagagaagcggatctggcgtgaagcagaccctgaatttcgacctgctgaagctggctggcgacgtggaatccaacccaggcccttctagaggccatatggccaagcctttgtctcaagaagaatccaccctcattgaaagagcaacggctacaatcaacagcatccccatctctgaagactacagcgtcgccagcgcagctctctctagcgacggccgcatcttcactggtgtcaatgtatatcattttactgggggaccttgtgcagaactcgtggtgctgggcactgctgctgctgcggcagctggcaacctgacttgtatcgtcgcgatcggaaatgagaacaggggcatcttgagcccctgcggacggtgccgacaggtgcttctcgatctgcatcctgggatcaaagccatagtgaaggacagtgatggacagccgacggcagttgggattcgtgaattgctgccctctggttatgtgtgggagggctga

SEQ ID NO: 3529 - DNA, 1275 bp, Artificial Sequence
  Synthetic Polynucloetide
atggactggatttggcgcatccttttccttgtcggcgctgctaccggcgcccattccgggccccaggttcagctgcaagagtctggcggaggacttgctcaagctggcggaagcctgagactgtcttgtgccgcctctggcagaaccttcagcatgggctggtttagacaggcccctggcaaagagagagagttcgtcgccgccatcacatacagcggcggcagcccttactacgcctcttctgtcagaggccggttcaccatcagccgggacaacgccaagaacaccgtgtacctccagatgaacagcctgaagccagaggacaccgccgtgtactactgtgccgccaatccaacctacggcagcgactggaatgccgagaattggggccagggcacccaagtgacagtgtctagtggatccggcggcggaggatctggcggaggcggatctgggggcggaggctctttcgaacaagttcagcttcaacagcctggcgctgagctggtcaaacctggcgcttctgtgaagatgagctgcaaagccagcggctacgccttcagcagctactggatcaactggatgaagcagaaacccggccagggactcgaatggatcggccaaatctatcccggcgacggcaccgagaacagattcagcgtgaacttccagaaggccgccaagagcttcagcctgaagatcagcgatagccagctgggcgacgccgccatgtacttttgcgcttatagaagcgccgtgaacgcccggctgatgtttggagatggcacacagctggtggtcaagcccaacacgcgtgagcagaaactgatctcggaagaggatgggagcggcatccagaaccctgatcctgccgtgtaccagctgcgggatagcaagagcagcgacaagagcgtgtgtctgttcaccgacttcgacagccagaccaacgtgtcccagagcaaggactccgacgtgtacatcaccgataagtgcgtgctggacatgcggagcatggacttcaagagcaactccgccgtggcctggtccaacaagtccgatttcgcctgcgccaacgccttcaacaacagcattatccccgaggacacattcttcccaagccccgagagcagctgcgacgtgaagctggtggaaaagagcttcgagacagacaccaacctgaacttccagaacctgagcgtgatcggcttcagaatcctgctgctgaaagtggccggctttaacctgctgatgaccctgcggctgtggtccagctga

SEQ ID NO: 3530 - DNA, 1920 bp, Artificial Sequence
  Synthetic Polynucloetide
atggccttaccagtgaccgccttgctcctgccgctggccttgctgctccacgccgccaggccggcatgccaggtccagctcgtcgagtccggcggcggcctcgtccaggccggcgactccgtcaccctctcctgcaccgcctccggccgcaccttctcctcctacgccctcgcctggttccgccagcgccccggcaaggagcgcgagttcgtcgccggcctccgctggggcggccccaccaactacgccgactccgtcaaggaccgcttcaccatctccggcgactccgccaagcacaccatgtacctccagatgaactccctcaagcccgaggacaccgccgtctactactgcggctacaaccccggcggctgggccgtcccctcccagtacgagtacgactcctggggccagggcacccaggtcaccgtctcctccggtaccggcggaggcggatctggcggcggaggtagcggtggcggaggatctgaattcgaagccgacatctaccagacacctagatacctggtcatcggcaccggcaagaaaatcaccctggaatgcagccagacaatgggccacgacaagatgtactggtatcagcaggaccccggcatggaactgcacctgatccactacagctacggcgtgaacagcaccgagaagggcgatctgtctagcgagagcaccgtgtccagaatcagaaccgagcacttcccactgacactggaaagcgccagacctagccacaccagccagtacctgtgtgcctcttctgaggccagaggactggccgagttcaccgacacacagtatttcggccctggcaccagactgaccgttggcggaggcggaagtggaggcggaggatctggcggcggaggctctcaagttcagcttcaacagcctggcgctgagctggtcaaacctggcgcttctgtgaagatgagctgcaaagccagcggctacgccttcagcagctactggatcaactggatgaagcagaaacccggccagggactcgaatggatcggccaaatctatcccggcgacggcaccgagaacagattcagcgtgaacttccagaaggccgccaagagcttcagcctgaagatcagcgatagccagctgggcgacgccgccatgtacttttgcgcttatagaagcgccgtgaacgcccggctgatgtttggagatggcacacagctggtggtcaagcccaacacgcgtgagcagaaactgatctcggaagaggatctgaaaattgaagttatgtatcctcctccttacctagacaatgagaagagcaatggaaccattatccatgtgaaagggaaacacctttgtccaagtcccctatttcccggaccttctaagcccttttgggtgctggtggtggttgggggagtcctggcttgctatagcttgctagtaacagtggcctttattattttctgggtgaggagtaagaggagcaggctcctgcacagtgactacatgaacatgactccacgccgccccggacccacccgcaagcattaccagccctatgccccaccacgcgacttcgcagcctatcgctccagagtgaagttcagcaggagcgcagacgcccccgcgtaccagcagggccagaaccagctctataacgagctcaatctaggacgaagagaggagtacgatgttttggacaagagacgtggccgggaccctgagatggggggaaagccgagaaggaagaaccctcaggaaggcctgtacaatgaactgcagaaagataagatggcggaggcctacagtgagattgggatgaaaggcgagcgccggaggggcaaggggcacgatggcctttaccagggtctcagtacagccaccaaggacacctacgacgcccttcacatgcaggccctgccccctcgc

SEQ ID NO: 3531 - DNA, 1941 bp, Artificial Sequence
  Synthetic Polynucloetide
atggccttaccagtgaccgccttgctcctgccgctggccttgctgctccacgccgccaggccggcatgccaggtccagctcgtcgagtccggcggcggcctcgtccaggccggcgactccgtcaccctctcctgcaccgcctccggccgcaccttctcctcctacgccctcgcctggttccgccagcgccccggcaaggagcgcgagttcgtcgccggcctccgctggggcggccccaccaactacgccgactccgtcaaggaccgcttcaccatctccggcgactccgccaagcacaccatgtacctccagatgaactccctcaagcccgaggacaccgccgtctactactgcggctacaaccccggcggctgggccgtcccctcccagtacgagtacgactcctggggccagggcacccaggtcaccgtctcctccggtaccggcggaggcggatctggcggcggaggtagcggtggcggaggatctgaattcgaagccgacatctaccagacacctagatacctggtcatcggcaccggcaagaaaatcaccctggaatgcagccagacaatgggccacgacaagatgtactggtatcagcaggaccccggcatggaactgcacctgatccactacagctacggcgtgaacagcaccgagaagggcgatctgtctagcgagagcaccgtgtccagaatcagaaccgagcacttcccactgacactggaaagcgccagacctagccacaccagccagtacctgtgtgcctcttctgaggccagaggactggccgagttcaccgacacacagtatttcggccctggcaccagactgaccgttggcggaggcggaagtggaggcggaggatctggcggcggaggctctcaagttcagcttcaacagcctggcgctgagctggtcaaacctggcgcttctgtgaagatgagctgcaaagccagcggctacgccttcagcagctactggatcaactggatgaagcagaaacccggccagggactcgaatggatcggccaaatctatcccggcgacggcaccgagaacagattcagcgtgaacttccagaaggccgccaagagcttcagcctgaagatcagcgatagccagctgggcgacgccgccatgtacttttgcgcttatagaagcgccgtgaacgcccggctgatgtttggagatggcacacagctggtggtcaagcccaacacgcgtgagcagaaactgatctcggaagaggatctggcgaagcccaccacgacgccagcgccgcgaccaccaacaccggcgcccaccatcgcgtcgcagcccctgtccctgcgcccagaggcgtgccggccagcggcggggggcgcagtgcacacgagggggctggacttcgcctgtgacatctacatctgggcgcccttggccgggacttgtggggtccttctcctgtcactggttatcaccctttactgcaaacggggcagaaagaaactcctgtatatattcaaacaaccatttatgagaccagtacaaactactcaagaggaagatggctgtagctgccgatttccagaagaagaagaaggaggatgtgaactgagagtgaagttcagcaggagcgcagacgcccccgcgtaccagcagggccagaaccagctctataacgagctgaatctaggacgaagagaggagtacgatgttttggacaagagacgtggccgggaccctgagatggggggaaagccgagaaggaagaaccctcaggaaggcctgtacaatgaactgcagaaagataagatggcggaggcctacagtgagattgggatgaaaggcgagcgccggaggggcaaggggcacgatggcctttaccagggtctcagtacagccaccaaggacacctacgacgcccttcacatgcaggccctgccccctcgctga

SEQ ID NO: 3532 - DNA, 3180 bp, Artificial Sequence
  Synthetic Polynucloetide
atggccttaccagtgaccgccttgctcctgccgctggccttgctgctccacgccgccaggccggcatgccaggtccagctcgtcgagtccggcggcggcctcgtccaggccggcgactccgtcaccctctcctgcaccgcctccggccgcaccttctcctcctacgccctcgcctggttccgccagcgccccggcaaggagcgcgagttcgtcgccggcctccgctggggcggccccaccaactacgccgactccgtcaaggaccgcttcaccatctccggcgactccgccaagcacaccatgtacctccagatgaactccctcaagcccgaggacaccgccgtctactactgcggctacaaccccggcggctgggccgtcccctcccagtacgagtacgactcctggggccagggcacccaggtcaccgtctcctccggtaccggcggaggcggatctggcggcggaggtagcggtggcggaggatctgaattcgaagccgacatctaccagacacctagatacctggtcatcggcaccggcaagaaaatcaccctggaatgcagccagacaatgggccacgacaagatgtactggtatcagcaggaccccggcatggaactgcacctgatccactacagctacggcgtgaacagcaccgagaagggcgatctgtctagcgagagcaccgtgtccagaatcagaaccgagcacttcccactgacactggaaagcgccagacctagccacaccagccagtacctgtgtgcctcttctgaggccagaggactggccgagttcaccgacacacagtatttcggccctggcaccagactgaccgttggcggaggcggaagtggaggcggaggatctggcggcggaggctctcaagttcagcttcaacagcctggcgctgagctggtcaaacctggcgcttctgtgaagatgagctgcaaagccagcggctacgccttcagcagctactggatcaactggatgaagcagaaacccggccagggactcgaatggatcggccaaatctatcccggcgacggcaccgagaacagattcagcgtgaacttccagaaggccgccaagagcttcagcctgaagatcagcgatagccagctgggcgacgccgccatgtacttttgcgcttatagaagcgccgtgaacgcccggctgatgtttggagatggcacacagctggtggtcaagcccaacacgcgtgagcagaaactgatctcggaagaggatctggcgaagcccaccacgacgccagcgccgcgaccaccaacaccggcgcccaccatcgcgtcgcagcccctgtccctgcgcccagaggcgtgccggccagcggcggggggcgcagtgcacacgagggggctggacttcgcctgtgacatctacatctgggcgcccttggccgggacttgtggggtccttctcctgtcactggttatcaccctttactgcgggcgcgccagagtgaagttcagcaggagcgcagacgcccccgcgtaccagcagggccagaaccagctctataacgagctgaatctaggacgaagagaggagtacgatgttttggacaagagacgtggccgggaccctgagatggggggaaagccgagaaggaagaaccctcaggaaggcctgtacaatgaactgcagaaagataagatggcggaggcctacagtgagattgggatgaaaggcgagcgccggaggggcaaggggcacgatggcctttaccagggtctcagtacagccaccaaggacacctacgacgcccttcacatgcaggccctgccccctcgctctagaggatctggagcaacaaacttctcactactcaaacaagcaggtgacgtggaggagaatcccgggcctgggatccacatggccacttacgaggttctctgtgaggtggcgcggaaactgggcacggatgacagggaagtggtattgttcctcctaaacgtgttcatacctcaacccacactggcccaattaattggagctcttagagctttaaaggaggagggcaggttaacgtttcccctgttagcggaatgtctgtttcgtgcaggtcgcagagacctcttgcgcgacctgcttcacttagacccgcgttttttagagcgccacctagcgggcacaatgagttatttcagcccttatcagctcactgttctccacgtagacggggagctgtgtgcgagggatattaggtctttgatatttttaagcaaggacactatagggtctcgcagcacaccacagacattcttacactgggtgtactgtatggaaaacttagacctactgggtcccactgacgtggatgccctaatgtcaatgcttagatctttgtcaagagtagacctacagcgccaagtgcaaaccctaatgggccttcacctttccggcccatcacactcccaacactatcgccatacaccactcgagaccgatttctacgactacaaggacgacgatgacaagactagtggctccggcgagggcagaggaagtctactaacctgcggagatgtggaagaaaatcctggcccacatatgaccgagtacaagcccacggtgcgcctcgccacccgcgacgacgtccccagggccgtacgcaccctcgccgccgcgttcgccgactaccccgccacgcgccacaccgtcgatccggaccgccacatcgagcgggtcaccgagctgcaagaactcttcctcacgcgcgtcgggctcgacatcggcaaggtgtgggtcgcggacgacggcgccgcggtggcggtctggaccacgccggagagcgtcgaagcgggggcggtgttcgccgagatcggcccgcgcatggccgagttgagcggttcccggctggccgcgcagcaacagatggaaggcctcctggcgccgcaccggcccaaggagcccgcgtggttcctggccaccgtcggcgtctcgcccgaccaccagggcaagggtctgggcagcgccgtcgtgctccccggagtggaggcggccgagcgcgccggggtgcccgccttcctggagacctccgcgccccgcaacctccccttctacgagcggctcggcttcaccgtcaccgccgacgtcgaggtgcccgaaggaccgcgcacctggtgcatgacccgcaagcccggtgcctga

SEQ ID NO: 3533 - DNA, 3000 bp, Artificial Sequence
  Synthetic Polynucloetide
atggccttaccagtgaccgccttgctcctgccgctggccttgctgctccacgccgccaggccggcatgccaggtccagctcgtcgagtccggcggcggcctcgtccaggccggcgactccgtcaccctctcctgcaccgcctccggccgcaccttctcctcctacgccctcgcctggttccgccagcgccccggcaaggagcgcgagttcgtcgccggcctccgctggggcggccccaccaactacgccgactccgtcaaggaccgcttcaccatctccggcgactccgccaagcacaccatgtacctccagatgaactccctcaagcccgaggacaccgccgtctactactgcggctacaaccccggcggctgggccgtcccctcccagtacgagtacgactcctggggccagggcacccaggtcaccgtctcctccggtaccggcggaggcggatctggcggcggaggtagcggtggcggaggatctgaattcgaagccgacatctaccagacacctagatacctggtcatcggcaccggcaagaaaatcaccctggaatgcagccagacaatgggccacgacaagatgtactggtatcagcaggaccccggcatggaactgcacctgatccactacagctacggcgtgaacagcaccgagaagggcgatctgtctagcgagagcaccgtgtccagaatcagaaccgagcacttcccactgacactggaaagcgccagacctagccacaccagccagtacctgtgtgcctcttctgaggccagaggactggccgagttcaccgacacacagtatttcggccctggcaccagactgaccgttctcgagatccagaaccctgatcctgccgtgtaccagctgcgggatagcaagagcagcgacaagagcgtgtgtctgttcaccgacttcgacagccagaccaacgtgtcccagagcaaggactccgacgtgtacatcaccgataagtgcgtgctggacatgcggagcatggacttcaagagcaactccgccgtggcctggtccaacaagtccgatttcgcctgcgccaacgccttcaacaacagcattatccccgaggacacattcttcccaagcagcgacgtgccctgcgacgtgaagctggtggaaaagagcttcgagacagacaccaacctgaacttccagaacctgagcgtgatcggcttcagaatcctgctgctgaaagtggccggctttaacctgctgatgaccctgcggctgtggtccagccgcgccaagagaagcggatctggcgtgaagcagaccctgaatttcgacctgctgaagctggctggcgacgtggaatccaacccaggccctactagtatggactggatttggcgcatccttttccttgtcggcgctgctaccggcgcgcattccttcgaacaagttcagcttcaacagcctggcgctgagctggtcaaacctggcgcttctgtgaagatgagctgcaaagccagcggctacgccttcagcagctactggatcaactggatgaagcagaaacccggccagggactcgaatggatcggccaaatctatcccggcgacggcaccgagaacagattcagcgtgaacttccagaaggccgccaagagcttcagcctgaagatcagcgatagccagctgggcgacgccgccatgtacttttgcgcttatagaagcgccgtgaacgcccggctgatgtttggagatggcacacagctggtggtcaagcccaacacgcgtgaggacctgaagaacgtgttcccacctgaggtggccgtgttcgagcctagcaaggccgagatcgcccacacccagaaagccaccctcgtgtgcctggctaccggcttctaccccgaccatgtggaactgtcttggtgggtcaacggcaaagaggtgcacagcggcgtgtgtaccgacccccagccactgaaagaacagcccgccctgaacgacagccggtactgcctgagcagcagactgagagtgtccgccaccttctggcagaacccccggaaccacttcagatgccaggtgcagttctacggcctgagcgagaacgacgagtggacccaggacagagccaagcccgtgacccagatcgtgtctgccgaagcctggggcagagccgattgcggcatcaccagcgccagctaccaccagggcgtgctgagcgccaccatcctgtacgagatcctgctgggcaaggccaccctgtacgccgtgctggtgtctgccctggtgctgatggctatggtcaagcggaaggacagccggggaagggccaagcgatctggatctggagcaacaaacttctcactactcaaacaagcaggtgacgtggaggagaatcccgggccttctagaggccatatgaccgagtacaagcccacggtgcgcctcgccacccgcgacgacgtccccagggccgtacgcaccctcgccgccgcgttcgccgactaccccgccacgcgccacaccgtcgatccggaccgccacatcgagcgggtcaccgagctgcaagaactcttcctcacgcgcgtcgggctcgacatcggcaaggtgtgggtcgcggacgacggcgccgcggtggcggtctggaccacgccggagagcgtcgaagcgggggcggtgttcgccgagatcggcccgcgcatggccgagttgagcggttcccggctggccgcgcagcaacagatggaaggcctcctggcgccgcaccggcccaaggagcccgcgtggttcctggccaccgtcggcgtctcgcccgaccaccagggcaagggtctgggcagcgccgtcgtgctccccggagtggaggcggccgagcgcgccggggtgcccgccttcctggagacctccgcgccccgcaacctccccttctacgagcggctcggcttcaccgtcaccgccgacgtcgaggtgcccgaaggaccgcgcacctggtgcatgacccgcaagcccggtgcctga

SEQ ID NO: 3534 - DNA, 2997 bp, Artificial Sequence
  Synthetic Polynucloetide
atggccttaccagtgaccgccttgctcctgccgctggccttgctgctccacgccgccaggccggcatgccaggtccagctcgtcgagtccggcggcggcctcgtccaggccggcgactccgtcaccctctcctgcaccgcctccggccgcaccttctcctcctacgccctcgcctggttccgccagcgccccggcaaggagcgcgagttcgtcgccggcctccgctggggcggccccaccaactacgccgactccgtcaaggaccgcttcaccatctccggcgactccgccaagcacaccatgtacctccagatgaactccctcaagcccgaggacaccgccgtctactactgcggctacaaccccggcggctgggccgtcccctcccagtacgagtacgactcctggggccagggcacccaggtcaccgtctcctccggtaccggcggaggcggatctggcggcggaggtagcggtggcggaggatctgaattcgaagccgacatctaccagacacctagatacctggtcatcggcaccggcaagaaaatcaccctggaatgcagccagacaatgggccacgacaagatgtactggtatcagcaggaccccggcatggaactgcacctgatccactacagctacggcgtgaacagcaccgagaagggcgatctgtctagcgagagcaccgtgtccagaatcagaaccgagcacttcccactgacactggaaagcgccagacctagccacaccagccagtacctgtgtgcctcttctgaggccagaggactggccgagttcaccgacacacagtatttcggccctggcaccagactgaccgttctcgaggacctgaagaacgtgttcccacctgaggtggccgtgttcgagcctagcaaggccgagatcgcccacacccagaaagccaccctcgtgtgcctggctaccggcttctaccccgaccatgtggaactgtcttggtgggtcaacggcaaagaggtgcacagcggcgtgtgtaccgacccccagccactgaaagaacagcccgccctgaacgacagccggtactgcctgagcagcagactgagagtgtccgccaccttctggcagaacccccggaaccacttcagatgccaggtgcagttctacggcctgagcgagaacgacgagtggacccaggacagagccaagcccgtgacccagatcgtgtctgccgaagcctggggcagagccgattgcggcatcaccagcgccagctaccaccagggcgtgctgagcgccaccatcctgtacgagatcctgctgggcaaggccaccctgtacgccgtgctggtgtctgccctggtgctgatggctatggtcaagcggaaggacagccggggaagggccaagcgatctggatctggagcaacaaacttctcactactcaaacaagcaggtgacgtggaggagaatcccgggcctactagtatggactggatttggcgcatccttttccttgtcggcgctgctaccggcgcgcattccttcgaacaagttcagcttcaacagcctggcgctgagctggtcaaacctggcgcttctgtgaagatgagctgcaaagccagcggctacgccttcagcagctactggatcaactggatgaagcagaaacccggccagggactcgaatggatcggccaaatctatcccggcgacggcaccgagaacagattcagcgtgaacttccagaaggccgccaagagcttcagcctgaagatcagcgatagccagctgggcgacgccgccatgtacttttgcgcttatagaagcgccgtgaacgcccggctgatgtttggagatggcacacagctggtggtcaagcccaacacgcgtatccagaaccctgatcctgccgtgtaccagctgcgggatagcaagagcagcgacaagagcgtgtgtctgttcaccgacttcgacagccagaccaacgtgtcccagagcaaggactccgacgtgtacatcaccgataagtgcgtgctggacatgcggagcatggacttcaagagcaactccgccgtggcctggtccaacaagtccgatttcgcctgcgccaacgccttcaacaacagcattatccccgaggacacattcttcccaagcagcgacgtgccctgcgacgtgaagctggtggaaaagagcttcgagacagacaccaacctgaacttccagaacctgagcgtgatcggcttcagaatcctgctgctgaaagtggccggctttaacctgctgatgaccctgcggctgtggtccagccgcgccaagagaagcggatctggcgtgaagcagaccctgaatttcgacctgctgaagctggctggcgacgtggaatccaacccaggcccttctagaggccatatgaccgagtacaagcccacggtgcgcctcgccacccgcgacgacgtccccagggccgtacgcaccctcgccgccgcgttcgccgactaccccgccacgcgccacaccgtcgatccggaccgccacatcgagcgggtcaccgagctgcaagaactcttcctcacgcgcgtcgggctcgacatcggcaaggtgtgggtcgcggacgacggcgccgcggtggcggtctggaccacgccggagagcgtcgaagcgggggcggtgttcgccgagatcggcccgcgcatggccgagttgagcggttcccggctggccgcgcagcaacagatggaaggcctcctggcgccgcaccggcccaaggagcccgcgtggttcctggccaccgtcggcgtctcgcccgaccaccagggcaagggtctgggcagcgccgtcgtgctccccggagtggaggcggccgagcgcgccggggtgcccgccttcctggagacctccgcgccccgcaacctccccttctacgagcggctcggcttcaccgtcaccgccgacgtcgaggtgcccgaaggaccgcgcacctggtgcatgacccgcaagcccggtgcctga

SEQ ID NO: 3535 - DNA, 2295 bp, Artificial Sequence
  Synthetic Polynucloetide
atggccttaccagtgaccgccttgctcctgccgctggccttgctgctccacgccgccaggccggcatgccaggtccagctcgtcgagtccggcggcggcctcgtccaggccggcgactccgtcaccctctcctgcaccgcctccggccgcaccttctcctcctacgccctcgcctggttccgccagcgccccggcaaggagcgcgagttcgtcgccggcctccgctggggcggccccaccaactacgccgactccgtcaaggaccgcttcaccatctccggcgactccgccaagcacaccatgtacctccagatgaactccctcaagcccgaggacaccgccgtctactactgcggctacaaccccggcggctgggccgtcccctcccagtacgagtacgactcctggggccagggcacccaggtcaccgtctcctccggtaccggcggaggcggatctggcggcggaggtagcggtggcggaggatctgaattcgaagccgacatctaccagacacctagatacctggtcatcggcaccggcaagaaaatcaccctggaatgcagccagacaatgggccacgacaagatgtactggtatcagcaggaccccggcatggaactgcacctgatccactacagctacggcgtgaacagcaccgagaagggcgatctgtctagcgagagcaccgtgtccagaatcagaaccgagcacttcccactgacactggaaagcgccagacctagccacaccagccagtacctgtgtgcctcttctgaggccagaggactggccgagttcaccgacacacagtatttcggccctggcaccagactgaccgttctcgaggacctgaagaacgtgttcccacctgaggtggccgtgttcgagcctagcgaggccgagatcagccacacccagaaagccaccctcgtgtgcctggctaccggcttctaccccgaccatgtggaactgtcttggtgggtcaacggcaaagaggtgcacagcggcgtgtgtaccgacccccagccactgaaagaacagcccgccctgaacgacagccggtactgcctgagcagcagactgagagtgtccgccaccttctggcagaacccccggaaccacttcagatgccaggtgcagttctacggcctgagcgagaacgacgagtggacccaggacagagccaagcccgtgacccagatcgtgtctgccgaagcctggggcagagccgattgcggctttaccagcgagagctaccagcagggcgtgctgagcgccaccatcctgtacgagatcctgctgggcaaggccaccctgtacgccgtgctggtgtctgccctggtgctgatggctatggtcaagcggaaggacagccggggaagggccaagcgatctggatctggagcaacaaacttctcactactcaaacaagcaggtgacgtggaggagaatcccgggcctactagtatggactggatttggcgcatccttttccttgtcggcgctgctaccggcgcgcattccttcgaacaagttcagcttcaacagcctggcgctgagctggtcaaacctggcgcttctgtgaagatgagctgcaaagccagcggctacgccttcagcagctactggatcaactggatgaagcagaaacccggccagggactcgaatggatcggccaaatctatcccggcgacggcaccgagaacagattcagcgtgaacttccagaaggccgccaagagcttcagcctgaagatcagcgatagccagctgggcgacgccgccatgtacttttgcgcttatagaagcgccgtgaacgcccggctgatgtttggagatggcacacagctggtggtcaagcccaacacgcgtatccagaaccctgatcctgccgtgtaccagctgcgggatagcaagagcagcgacaagagcgtgtgtctgttcaccgacttcgacagccagaccaacgtgtcccagagcaaggactccgacgtgtacatcaccgataagtgcgtgctggacatgcggagcatggacttcaagagcaactccgccgtggcctggtccaacaagtccgatttcgcctgcgccaacgccttcaacaacagcattatccccgaggacacattcttcccaagccccgagagcagctgcgacgtgaagctggtggaaaagagcttcgagacagacaccaacctgaacttccagaacctgagcgtgatcggcttcagaatcctgctgctgaaagtggccggctttaacctgctgatgaccctgcggctgtggtccagc

SEQ ID NO: 3536 - DNA, 2970 bp, Artificial Sequence
  Synthetic Polynucloetide
atggccttaccagtgaccgccttgctcctgccgctggccttgctgctccacgccgccaggccggcatgccaggtccagctcgtcgagtccggcggcggcctcgtccaggccggcgactccgtcaccctctcctgcaccgcctccggccgcaccttctcctcctacgccctcgcctggttccgccagcgccccggcaaggagcgcgagttcgtcgccggcctccgctggggcggccccaccaactacgccgactccgtcaaggaccgcttcaccatctccggcgactccgccaagcacaccatgtacctccagatgaactccctcaagcccgaggacaccgccgtctactactgcggctacaaccccggcggctgggccgtcccctcccagtacgagtacgactcctggggccagggcacccaggtcaccgtctcctccggtaccggcggaggcggatctggcggcggaggtagcggtggcggaggatctgaattcgaagccgacatctaccagacacctagatacctggtcatcggcaccggcaagaaaatcaccctggaatgcagccagacaatgggccacgacaagatgtactggtatcagcaggaccccggcatggaactgcacctgatccactacagctacggcgtgaacagcaccgagaagggcgatctgtctagcgagagcaccgtgtccagaatcagaaccgagcacttcccactgacactggaaagcgccagacctagccacaccagccagtacctgtgtgcctcttctgaggccagaggactggccgagttcaccgacacacagtatttcggccctggcaccagactgaccgttctcgaggacctgaagaacgtgttcccacctgaggtggccgtgttcgagcctagcgaggccgagatcagccacacccagaaagccaccctcgtgtgcctggctaccggcttctaccccgaccatgtggaactgtcttggtgggtcaacggcaaagaggtgcacagcggcgtgtgtaccgacccccagccactgaaagaacagcccgccctgaacgacagccggtactgcctgagcagcagactgagagtgtccgccaccttctggcagaacccccggaaccacttcagatgccaggtgcagttctacggcctgagcgagaacgacgagtggacccaggacagagccaagcccgtgacccagatcgtgtctgccgaagcctggggcagagccgattgcggctttaccagcgagagctaccagcagggcgtgctgagcgccaccatcctgtacgagatcctgctgggcaaggccaccctgtacgccgtgctggtgtctgccctggtgctgatggctatggtcaagcggaaggacagccggggaagggccaagcgatctggatctggagcaacaaacttctcactactcaaacaagcaggtgacgtggaggagaatcccgggcctactagtatggactggatttggcgcatccttttccttgtcggcgctgctaccggcgcgcattccttcgaacaagttcagcttcaacagcctggcgctgagctggtcaaacctggcgcttctgtgaagatgagctgcaaagccagcggctacgccttcagcagctactggatcaactggatgaagcagaaacccggccagggactcgaatggatcggccaaatctatcccggcgacggcaccgagaacagattcagcgtgaacttccagaaggccgccaagagcttcagcctgaagatcagcgatagccagctgggcgacgccgccatgtacttttgcgcttatagaagcgccgtgaacgcccggctgatgtttggagatggcacacagctggtggtcaagcccaacacgcgtatccagaaccctgatcctgccgtgtaccagctgcgggatagcaagagcagcgacaagagcgtgtgtctgttcaccgacttcgacagccagaccaacgtgtcccagagcaaggactccgacgtgtacatcaccgataagtgcgtgctggacatgcggagcatggacttcaagagcaactccgccgtggcctggtccaacaagtccgatttcgcctgcgccaacgccttcaacaacagcattatccccgaggacacattcttcccaagccccgagagcagctgcgacgtgaagctggtggaaaagagcttcgagacagacaccaacctgaacttccagaacctgagcgtgatcggcttcagaatcctgctgctgaaagtggccggctttaacctgctgatgaccctgcggctgtggtccagccgcgccaagagaagcggatctggcgtgaagcagaccctgaatttcgacctgctgaagctggctggcgacgtggaatccaacccaggcccttctagaggcgggatccacaccatggctacctacgaggtgctgtgcgaggtggcaagaaagctgggcaccgacgacagagaagtggtgctgttcctgctgaacgtgttcatccctcagcctacactggcccagctgatcggtgcactgagagccctgaaagaggaaggccggctgacctttcctctgctggccgaatgcctgttcagagccggaagaagggatctgctgcgggacctgctgcatctggaccccagatttctggaaagacacctggccggcaccatgagctacttcagcccttaccagctgaccgtgctgcacgttgacggcgaactgtgcgccagagatattcggagcctgatcttcctgagcaaggacaccatcggcagccggtctacccctcagacatttctgcactgggtgtactgcatggaaaacctggacctgctcggccccacagatgtggatgccctgatgtccatgctgagaagcctgagcagagtggacctccagagacaggtgcagacactgatgggactgcacctgagcggacctagccacagccagcactacagacacacccct

SEQ ID NO: 3537 - DNA, 2307 bp, Artificial Sequence
  Synthetic Polynucloetide
atggccttaccagtgaccgccttgctcctgccgctggccttgctgctccacgccgccaggccggcatgccaggtccagctcgtcgagtccggcggcggcctcgtccaggccggcgactccgtcaccctctcctgcaccgcctccggccgcaccttctcctcctacgccctcgcctggttccgccagcgccccggcaaggagcgcgagttcgtcgccggcctccgctggggcggccccaccaactacgccgactccgtcaaggaccgcttcaccatctccggcgactccgccaagcacaccatgtacctccagatgaactccctcaagcccgaggacaccgccgtctactactgcggctacaaccccggcggctgggccgtcccctcccagtacgagtacgactcctggggccagggcacccaggtcaccgtctcctccggtaccggcggaggcggatctggcggcggaggtagcggtggcggaggatctgaattcgaagccgacatctaccagacacctagatacctggtcatcggcaccggcaagaaaatcaccctggaatgcagccagacaatgggccacgacaagatgtactggtatcagcaggaccccggcatggaactgcacctgatccactacagctacggcgtgaacagcaccgagaagggcgatctgtctagcgagagcaccgtgtccagaatcagaaccgagcacttcccactgacactggaaagcgccagacctagccacaccagccagtacctgtgtgcctcttctgaggccagaggactggccgagttcaccgacacacagtatttcggccctggcaccagactgaccgttctcgagatccagaaccctgatcctgccgtgtaccagctgcgggatagcaagagcagcgacaagagcgtgtgtctgttcaccgacttcgacagccagaccaacgtgtcccagagcaaggactccgacgtgtacatcaccgataagtgcgtgctggacatgcggagcatggacttcaagagcaactccgccgtggcctggtccaacaagtccgatttcgcctgcgccaacgccttcaacaacagcattatccccgaggacacattcttcccaagccccgagagcagctgcgacgtgaagctggtggaaaagagcttcgagacagacaccaacctgaacttccagaacctgagcgtgatcggcttcagaatcctgctgctgaaagtggccggctttaacctgctgatgaccctgcggctgtggtccagccgcgccaagagaagcggatctggcgtgaagcagaccctgaatttcgacctgctgaagctggctggcgacgtggaatccaacccaggccctactagtatggactggatttggcgcatccttttccttgtcggcgctgctaccggcgcgcattccttcgaacaagttcagcttcaacagcctggcgctgagctggtcaaacctggcgcttctgtgaagatgagctgcaaagccagcggctacgccttcagcagctactggatcaactggatgaagcagaaacccggccagggactcgaatggatcggccaaatctatcccggcgacggcaccgagaacagattcagcgtgaacttccagaaggccgccaagagcttcagcctgaagatcagcgatagccagctgggcgacgccgccatgtacttttgcgcttatagaagcgccgtgaacgcccggctgatgtttggagatggcacacagctggtggtcaagcccaacacgcgtgaggacctgaagaacgtgttcccacctgaggtggccgtgttcgagcctagcgaggccgagatcagccacacccagaaagccaccctcgtgtgcctggctaccggcttctaccccgaccatgtggaactgtcttggtgggtcaacggcaaagaggtgcacagcggcgtgtgtaccgacccccagccactgaaagaacagcccgccctgaacgacagccggtactgcctgagcagcagactgagagtgtccgccaccttctggcagaacccccggaaccacttcagatgccaggtgcagttctacggcctgagcgagaacgacgagtggacccaggacagagccaagcccgtgacccagatcgtgtctgccgaagcctggggcagagccgattgcggctttaccagcgagagctaccagcagggcgtgctgagcgccaccatcctgtacgagatcctgctgggcaaggccaccctgtacgccgtgctggtgtctgccctggtgctgatggctatggtcaagcggaaggacagccgggga

SEQ ID NO: 3538 - DNA, 2973 bp, Artificial Sequence
  Synthetic Polynucloetide
atggccttaccagtgaccgccttgctcctgccgctggccttgctgctccacgccgccaggccggcatgccaggtccagctcgtcgagtccggcggcggcctcgtccaggccggcgactccgtcaccctctcctgcaccgcctccggccgcaccttctcctcctacgccctcgcctggttccgccagcgccccggcaaggagcgcgagttcgtcgccggcctccgctggggcggccccaccaactacgccgactccgtcaaggaccgcttcaccatctccggcgactccgccaagcacaccatgtacctccagatgaactccctcaagcccgaggacaccgccgtctactactgcggctacaaccccggcggctgggccgtcccctcccagtacgagtacgactcctggggccagggcacccaggtcaccgtctcctccggtaccggcggaggcggatctggcggcggaggtagcggtggcggaggatctgaattcgaagccgacatctaccagacacctagatacctggtcatcggcaccggcaagaaaatcaccctggaatgcagccagacaatgggccacgacaagatgtactggtatcagcaggaccccggcatggaactgcacctgatccactacagctacggcgtgaacagcaccgagaagggcgatctgtctagcgagagcaccgtgtccagaatcagaaccgagcacttcccactgacactggaaagcgccagacctagccacaccagccagtacctgtgtgcctcttctgaggccagaggactggccgagttcaccgacacacagtatttcggccctggcaccagactgaccgttctcgagatccagaaccctgatcctgccgtgtaccagctgcgggatagcaagagcagcgacaagagcgtgtgtctgttcaccgacttcgacagccagaccaacgtgtcccagagcaaggactccgacgtgtacatcaccgataagtgcgtgctggacatgcggagcatggacttcaagagcaactccgccgtggcctggtccaacaagtccgatttcgcctgcgccaacgccttcaacaacagcattatccccgaggacacattcttcccaagccccgagagcagctgcgacgtgaagctggtggaaaagagcttcgagacagacaccaacctgaacttccagaacctgagcgtgatcggcttcagaatcctgctgctgaaagtggccggctttaacctgctgatgaccctgcggctgtggtccagccgcgccaagagaagcggatctggcgtgaagcagaccctgaatttcgacctgctgaagctggctggcgacgtggaatccaacccaggccctactagtatggactggatttggcgcatccttttccttgtcggcgctgctaccggcgcgcattccttcgaacaagttcagcttcaacagcctggcgctgagctggtcaaacctggcgcttctgtgaagatgagctgcaaagccagcggctacgccttcagcagctactggatcaactggatgaagcagaaacccggccagggactcgaatggatcggccaaatctatcccggcgacggcaccgagaacagattcagcgtgaacttccagaaggccgccaagagcttcagcctgaagatcagcgatagccagctgggcgacgccgccatgtacttttgcgcttatagaagcgccgtgaacgcccggctgatgtttggagatggcacacagctggtggtcaagcccaacacgcgtgaggacctgaagaacgtgttcccacctgaggtggccgtgttcgagcctagcgaggccgagatcagccacacccagaaagccaccctcgtgtgcctggctaccggcttctaccccgaccatgtggaactgtcttggtgggtcaacggcaaagaggtgcacagcggcgtgtgtaccgacccccagccactgaaagaacagcccgccctgaacgacagccggtactgcctgagcagcagactgagagtgtccgccaccttctggcagaacccccggaaccacttcagatgccaggtgcagttctacggcctgagcgagaacgacgagtggacccaggacagagccaagcccgtgacccagatcgtgtctgccgaagcctggggcagagccgattgcggctttaccagcgagagctaccagcagggcgtgctgagcgccaccatcctgtacgagatcctgctgggcaaggccaccctgtacgccgtgctggtgtctgccctggtgctgatggctatggtcaagcggaaggacagccggggaagggccaagcgatctggatctggagcaacaaacttctcactactcaaacaagcaggtgacgtggaggagaatcccgggccttctagaggcgggatccacaccatggctacctacgaggtgctgtgcgaggtggcaagaaagctgggcaccgacgacagagaagtggtgctgttcctgctgaacgtgttcatccctcagcctacactggcccagctgatcggtgcactgagagccctgaaagaggaaggccggctgacctttcctctgctggccgaatgcctgttcagagccggaagaagggatctgctgcgggacctgctgcatctggaccccagatttctggaaagacacctggccggcaccatgagctacttcagcccttaccagctgaccgtgctgcacgttgacggcgaactgtgcgccagagatattcggagcctgatcttcctgagcaaggacaccatcggcagccggtctacccctcagacatttctgcactgggtgtactgcatggaaaacctggacctgctcggccccacagatgtggatgccctgatgtccatgctgagaagcctgagcagagtggacctccagagacaggtgcagacactgatgggactgcacctgagcggacctagccacagccagcactacagacacacccct

SEQ ID NO: 3539 - DNA, 3132 bp, Artificial Sequence
  Synthetic Polynucloetide
atggccttaccagtgaccgccttgctcctgccgctggccttgctgctccacgccgccaggccgctcgaggggaaaccaattcccaaccctcttctgggactggattcaaccggcagcggcgaggacctgaagaacgtgttcccacctgaggtggccgtgttcgagcctagcaaggccgagatcgcccacacccagaaagccaccctcgtgtgcctggctaccggcttctaccccgaccatgtggaactgtcttggtgggtcaacggcaaagaggtgcacagcggcgtgtgtaccgacccccagccactgaaagaacagcccgccctgaacgacagccggtactgcctgagcagcagactgagagtgtccgccaccttctggcagaacccccggaaccacttcagatgccaggtgcagttctacggcctgagcgagaacgacgagtggacccaggacagagccaagcccgtgacccagatcgtgtctgccgaagcctggggcagagccgattgcggcatcaccagcgccagctaccaccagggcgtgctgagcgccaccatcctgtacgagatcctgctgggcaaggccaccctgtacgccgtgctggtgtctgccctggtgctgatggctatggtcaagcggaaggacagccggggaagggccaagcgatctggatctggagcaacaaacttctcactactcaaacaagcaggtgacgtggaggagaatcccgggcctactagcatggccttaccagtgaccgccttgctcctgccgctggccttgctgctccacgccgccaggccggcatgccaggtccagctcgtcgagtccggcggcggcctcgtccaggccggcgactccgtcaccctctcctgcaccgcctccggccgcaccttctcctcctacgccctcgcctggttccgccagcgccccggcaaggagcgcgagttcgtcgccggcctccgctggggcggccccaccaactacgccgactccgtcaaggaccgcttcaccatctccggcgactccgccaagcacaccatgtacctccagatgaactccctcaagcccgaggacaccgccgtctactactgcggctacaaccccggcggctgggccgtcccctcccagtacgagtacgactcctggggccagggcacccaggtcaccgtctcctccggtaccggcggaggcggatctggcggcggaggtagcggtggcggaggatctgaattcgaagccgacatctaccagacacctagatacctggtcatcggcaccggcaagaaaatcaccctggaatgcagccagacaatgggccacgacaagatgtactggtatcagcaggaccccggcatggaactgcacctgatccactacagctacggcgtgaacagcaccgagaagggcgatctgtctagcgagagcaccgtgtccagaatcagaaccgagcacttcccactgacactggaaagcgccagacctagccacaccagccagtacctgtgtgcctcttctgaggccagaggactggccgagttcaccgacacacagtatttcggccctggcaccagactgaccgttggcggaggcggaagtggaggcggaggatctggcggcggaggctctcaagttcagcttcaacagcctggcgctgagctggtcaaacctggcgcttctgtgaagatgagctgcaaagccagcggctacgccttcagcagctactggatcaactggatgaagcagaaacccggccagggactcgaatggatcggccaaatctatcccggcgacggcaccgagaacagattcagcgtgaacttccagaaggccgccaagagcttcagcctgaagatcagcgatagccagctgggcgacgccgccatgtacttttgcgcttatagaagcgccgtgaacgcccggctgatgtttggagatggcacacagctggtggtcaagcccaacacgcgtgagcagaaactgatctcggaagaggatgggagcggcatccagaaccctgatcctgccgtgtaccagctgcgggatagcaagagcagcgacaagagcgtgtgtctgttcaccgacttcgacagccagaccaacgtgtcccagagcaaggactccgacgtgtacatcaccgataagtgcgtgctggacatgcggagcatggacttcaagagcaactccgccgtggcctggtccaacaagtccgatttcgcctgcgccaacgccttcaacaacagcattatccccgaggacacattcttcccaagcagcgacgtgccctgcgacgtgaagctggtggaaaagagcttcgagacagacaccaacctgaacttccagaacctgagcgtgatcggcttcagaatcctgctgctgaaagtggccggctttaacctgctgatgaccctgcggctgtggtccagccgcgccaagagaagcggatctggcgtgaagcagaccctgaatttcgacctgctgaagctggctggcgacgtggaatccaacccaggcccttctagaggccatatgaccgagtacaagcccacggtgcgcctcgccacccgcgacgacgtccccagggccgtacgcaccctcgccgccgcgttcgccgactaccccgccacgcgccacaccgtcgatccggaccgccacatcgagcgggtcaccgagctgcaagaactcttcctcacgcgcgtcgggctcgacatcggcaaggtgtgggtcgcggacgacggcgccgcggtggcggtctggaccacgccggagagcgtcgaagcgggggcggtgttcgccgagatcggcccgcgcatggccgagttgagcggttcccggctggccgcgcagcaacagatggaaggcctcctggcgccgcaccggcccaaggagcccgcgtggttcctggccaccgtcggcgtctcgcccgaccaccagggcaagggtctgggcagcgccgtcgtgctccccggagtggaggcggccgagcgcgccggggtgcccgccttcctggagacctccgcgccccgcaacctccccttctacgagcggctcggcttcaccgtcaccgccgacgtcgaggtgcccgaaggaccgcgcacctggtgcatgacccgcaagcccggtgcctga

SEQ ID NO: 3540 - DNA, 3135 bp, Artificial Sequence
  Synthetic Polynucloetide
atggccttaccagtgaccgccttgctcctgccgctggccttgctgctccacgccgccaggccgctcgagcagaaactgatctcggaagaggatctgggctccggcgatcgccctgatcctgccgtgtaccagctgcgggatagcaagagcagcgacaagagcgtgtgtctgttcaccgacttcgacagccagaccaacgtgtcccagagcaaggactccgacgtgtacatcaccgataagtgcgtgctggacatgcggagcatggacttcaagagcaactccgccgtggcctggtccaacaagtccgatttcgcctgcgccaacgccttcaacaacagcattatccccgaggacacattcttcccaagccccgagagcagctgcgacgtgaagctggtggaaaagagcttcgagacagacaccaacctgaacttccagaacctgagcgtgatcggcttcagaatcctgctgctgaaagtggccggctttaacctgctgatgaccctgcggctgtggtccagctctagtcgcgccaagagaagcggatctggcgtgaagcagaccctgaatttcgacctgctgaagctggctggcgacgtggaatccaacccaggccccactagcatggccttaccagtgaccgccttgctcctgccgctggccttgctgctccacgccgccaggccggcatgccaggtccagctcgtcgagtccggcggcggcctcgtccaggccggcgactccgtcaccctctcctgcaccgcctccggccgcaccttctcctcctacgccctcgcctggttccgccagcgccccggcaaggagcgcgagttcgtcgccggcctccgctggggcggccccaccaactacgccgactccgtcaaggaccgcttcaccatctccggcgactccgccaagcacaccatgtacctccagatgaactccctcaagcccgaggacaccgccgtctactactgcggctacaaccccggcggctgggccgtcccctcccagtacgagtacgactcctggggccagggcacccaggtcaccgtctcctccggtaccggcggaggcggatctggcggcggaggtagcggtggcggaggatctgaattcgaagccgacatctaccagacacctagatacctggtcatcggcaccggcaagaaaatcaccctggaatgcagccagacaatgggccacgacaagatgtactggtatcagcaggaccccggcatggaactgcacctgatccactacagctacggcgtgaacagcaccgagaagggcgatctgtctagcgagagcaccgtgtccagaatcagaaccgagcacttcccactgacactggaaagcgccagacctagccacaccagccagtacctgtgtgcctcttctgaggccagaggactggccgagttcaccgacacacagtatttcggccctggcaccagactgaccgttggcggaggcggaagtggaggcggaggatctggcggcggaggctctcaagttcagcttcaacagcctggcgctgagctggtcaaacctggcgcttctgtgaagatgagctgcaaagccagcggctacgccttcagcagctactggatcaactggatgaagcagaaacccggccagggactcgaatggatcggccaaatctatcccggcgacggcaccgagaacagattcagcgtgaacttccagaaggccgccaagagcttcagcctgaagatcagcgatagccagctgggcgacgccgccatgtacttttgcgcttatagaagcgccgtgaacgcccggctgatgtttggagatggcacacagctggtggtcaagcccaacacgcgtgggaaaccaattcccaaccctcttctgggactggattcaaccggcagcggcgaggacctgaagaacgtgttcccacctgaggtggccgtgttcgagcctagcgaggccgagatcagccacacccagaaagccaccctcgtgtgcctggctaccggcttctaccccgaccatgtggaactgtcttggtgggtcaacggcaaagaggtgcacagcggcgtgtgtaccgacccccagccactgaaagaacagcccgccctgaacgacagccggtactgcctgagcagcagactgagagtgtccgccaccttctggcagaacccccggaaccacttcagatgccaggtgcagttctacggcctgagcgagaacgacgagtggacccaggacagagccaagcccgtgacccagatcgtgtctgccgaagcctggggcagagccgattgcggctttaccagcgagagctaccagcagggcgtgctgagcgccaccatcctgtacgagatcctgctgggcaaggccaccctgtacgccgtgctggtgtctgccctggtgctgatggctatggtcaagcggaaggacagccggggaagggccaagcgatctggatctggagcaacaaacttctcactactcaaacaagcaggtgacgtggaggagaatcccgggccttctagaggccatatgaccgagtacaagcccacggtgcgcctcgccacccgcgacgacgtccccagggccgtacgcaccctcgccgccgcgttcgccgactaccccgccacgcgccacaccgtcgatccggaccgccacatcgagcgggtcaccgagctgcaagaactcttcctcacgcgcgtcgggctcgacatcggcaaggtgtgggtcgcggacgacggcgccgcggtggcggtctggaccacgccggagagcgtcgaagcgggggcggtgttcgccgagatcggcccgcgcatggccgagttgagcggttcccggctggccgcgcagcaacagatggaaggcctcctggcgccgcaccggcccaaggagcccgcgtggttcctggccaccgtcggcgtctcgcccgaccaccagggcaagggtctgggcagcgccgtcgtgctccccggagtggaggcggccgagcgcgccggggtgcccgccttcctggagacctccgcgccccgcaacctccccttctacgagcggctcggcttcaccgtcaccgccgacgtcgaggtgcccgaaggaccgcgcacctggtgcatgacccgcaagcccggtgcctga

SEQ ID NO: 3541 - DNA, 2997 bp, Artificial Sequence
  Synthetic Polynucloetide
atggccttaccagtgaccgccttgctcctgccgctggccttgctgctccacgccgccaggccggcatgccaggtccagctcgtcgagtccggcggcggcctcgtccaggccggcgactccgtcaccctctcctgcaccgcctccggccgcaccttctcctcctacgccctcgcctggttccgccagcgccccggcaaggagcgcgagttcgtcgccggcctccgctggggcggccccaccaactacgccgactccgtcaaggaccgcttcaccatctccggcgactccgccaagcacaccatgtacctccagatgaactccctcaagcccgaggacaccgccgtctactactgcggctacaaccccggcggctgggccgtcccctcccagtacgagtacgactcctggggccagggcacccaggtcaccgtctcctccggtaccggcggaggcggatctggcggcggaggtagcggtggcggaggatctgaattcgaagccgacatctaccagacacctagatacctggtcatcggcaccggcaagaaaatcaccctggaatgcagccagacaatgggccacgacaagatgtactggtatcagcaggaccccggcatggaactgcacctgatccactacagctacggcgtgaacagcaccgagaagggcgatctgtctagcgagagcaccgtgtccagaatcagaaccgagcacttcccactgacactggaaagcgccagacctagccacaccagccagtacctgtgtgcctcttctgaggccagaggactggccgagttcaccgacacacagtatttcggccctggcaccagactgaccgttctcgaggacctgaagaacgtgttcccacctgaggtggccgtgttcgagcctagcgaggccgagatcagccacacccagaaagccaccctcgtgtgcctggctaccggcttctaccccgaccatgtggaactgtcttggtgggtcaacggcaaagaggtgcacagcggcgtgtctaccgacccccagccactgaaagaacagcccgccctgaacgacagccggtactgcctgagcagcagactgagagtgtccgccaccttctggcagaacccccggaaccacttcagatgccaggtgcagttctacggcctgagcgagaacgacgagtggacccaggacagagccaagcccgtgacccagatcgtgtctgccgaagcctggggcagagccgattgcggctttaccagcgagagctaccagcagggcgtgctgagcgccaccatcctgtacgagatcctgctgggcaaggccaccctgtacgccgtgctggtgtctgccctggtgctgatggctatggtcaagcggaaggacagccggggaagggccaagcgatctggatctggagcaacaaacttctcactactcaaacaagcaggtgacgtggaggagaatcccgggcctactagtatggactggatttggcgcatccttttccttgtcggcgctgctaccggcgcgcattccttcgaacaagttcagcttcaacagcctggcgctgagctggtcaaacctggcgcttctgtgaagatgagctgcaaagccagcggctacgccttcagcagctactggatcaactggatgaagcagaaacccggccagggactcgaatggatcggccaaatctatcccggcgacggcaccgagaacagattcagcgtgaacttccagaaggccgccaagagcttcagcctgaagatcagcgatagccagctgggcgacgccgccatgtacttttgcgcttatagaagcgccgtgaacgcccggctgatgtttggagatggcacacagctggtggtcaagcccaacacgcgtatccagaaccctgatcctgccgtgtaccagctgcgggatagcaagagcagcgacaagagcgtgtgtctgttcaccgacttcgacagccagaccaacgtgtcccagagcaaggactccgacgtgtacatcaccgataagaccgtgctggacatgcggagcatggacttcaagagcaactccgccgtggcctggtccaacaagtccgatttcgcctgcgccaacgccttcaacaacagcattatccccgaggacacattcttcccaagccccgagagcagctgcgacgtgaagctggtggaaaagagcttcgagacagacaccaacctgaacttccagaacctgagcgtgatcggcttcagaatcctgctgctgaaagtggccggctttaacctgctgatgaccctgcggctgtggtccagccgcgccaagagaagcggatctggcgtgaagcagaccctgaatttcgacctgctgaagctggctggcgacgtggaatccaacccaggcccttctagaggccatatgaccgagtacaagcccacggtgcgcctcgccacccgcgacgacgtccccagggccgtacgcaccctcgccgccgcgttcgccgactaccccgccacgcgccacaccgtcgatccggaccgccacatcgagcgggtcaccgagctgcaagaactcttcctcacgcgcgtcgggctcgacatcggcaaggtgtgggtcgcggacgacggcgccgcggtggcggtctggaccacgccggagagcgtcgaagcgggggcggtgttcgccgagatcggcccgcgcatggccgagttgagcggttcccggctggccgcgcagcaacagatggaaggcctcctggcgccgcaccggcccaaggagcccgcgtggttcctggccaccgtcggcgtctcgcccgaccaccagggcaagggtctgggcagcgccgtcgtgctccccggagtggaggcggccgagcgcgccggggtgcccgccttcctggagacctccgcgccccgcaacctccccttctacgagcggctcggcttcaccgtcaccgccgacgtcgaggtgcccgaaggaccgcgcacctggtgcatgacccgcaagcccggtgcctga

SEQ ID NO: 3542 - DNA, 3243 bp, Artificial Sequence
  Synthetic Polynucloetide
atggccttaccagtgaccgccttgctcctgccgctggccttgctgctccacgccgccaggccggcatgccaggtccagctcgtcgagtccggcggcggcctcgtccaggccggcgactccgtcaccctctcctgcaccgcctccggccgcaccttctcctcctacgccctcgcctggttccgccagcgccccggcaaggagcgcgagttcgtcgccggcctccgctggggcggccccaccaactacgccgactccgtcaaggaccgcttcaccatctccggcgactccgccaagcacaccatgtacctccagatgaactccctcaagcccgaggacaccgccgtctactactgcggctacaaccccggcggctgggccgtcccctcccagtacgagtacgactcctggggccagggcacccaggtcaccgtctcctccggtaccggcggaggcggatctggcggcggaggtagcggtggcggaggatctgaattcgaagccgacatctaccagacacctagatacctggtcatcggcaccggcaagaaaatcaccctggaatgcagccagacaatgggccacgacaagatgtactggtatcagcaggaccccggcatggaactgcacctgatccactacagctacggcgtgaacagcaccgagaagggcgatctgtctagcgagagcaccgtgtccagaatcagaaccgagcacttcccactgacactggaaagcgccagacctagccacaccagccagtacctgtgtgcctcttctgaggccagaggactggccgagttcaccgacacacagtatttcggccctggcaccagactgaccgttctcgaggacctgaagaacgtgttcccacctgaggtggccgtgttcgagcctagcgaggccgagatcagccacacccagaaagccaccctcgtgtgcctggctaccggcttctaccccgaccatgtggaactgtcttggtgggtcaacggcaaagaggtgcacagcggcgtgtctaccgacccccagccactgaaagaacagcccgccctgaacgacagccggtactgcctgagcagcagactgagagtgtccgccaccttctggcagaacccccggaaccacttcagatgccaggtgcagttctacggcctgagcgagaacgacgagtggacccaggacagagccaagcccgtgacccagatcgtgtctgccgaagcctggggcagagccgattgcggctttaccagcgagagctaccagcagggcgtgctgagcgccaccatcctgtacgagatcctgctgggcaaggccaccctgtacgccgtgctggtgtctgccctggtgctgatggctatggtcaagcggaaggacagccggggaagggccaagcgatctggatctggagcaacaaacttctcactactcaaacaagcaggtgacgtggaggagaatcccgggcctactagtatggactggatttggcgcatccttttccttgtcggcgctgctaccggcgcgcattccttcgaacaagttcagcttcaacagcctggcgctgagctggtcaaacctggcgcttctgtgaagatgagctgcaaagccagcggctacgccttcagcagctactggatcaactggatgaagcagaaacccggccagggactcgaatggatcggccaaatctatcccggcgacggcaccgagaacagattcagcgtgaacttccagaaggccgccaagagcttcagcctgaagatcagcgatagccagctgggcgacgccgccatgtacttttgcgcttatagaagcgccgtgaacgcccggctgatgtttggagatggcacacagctggtggtcaagcccaacacgcgtgagcagaaactgatctcggaagaggatgggagcggcaccccattcccttctctggcccctcccatcatgctgctggtggacggcaagcagcagatggtggtcgtgtgcctggtgctggatgtggccccacctggactggacagccccatctggtttagcgccggcaatggctctgccctggacgcctttacctacggcccaagccctgccaccgatggcacctggacaaatctggcccacctgagcctgcccagcgaggaactggcttcttgggagcctctcgtgtgccacacaggacctggcgctgagggacacagcagatccacccagcctatgcacctgtctggcgaggccagcaccgccagaacctgtcctcaggaacctctgagaggcacccctggcggagcactgtggctgggagtgctgagactgctgctgttcaagctgctgctgtttgacctgctgctgacctgctcctgtctgtgcgatcctgccggccctctgccttctcctgccaccaccacaagactgagagccctgggcagccacagactgcaccctgccacagagacaggcggcagagaggccacaagcagccctagaccccagcccagagacagaagatggggcgataccccccctggcagaaagcctggatctccagtccgcgccaagagaagcggatctggcgtgaagcagaccctgaatttcgacctgctgaagctggctggcgacgtggaatccaacccaggcccttctagaggccatatgaccgagtacaagcccacggtgcgcctcgccacccgcgacgacgtccccagggccgtacgcaccctcgccgccgcgttcgccgactaccccgccacgcgccacaccgtcgatccggaccgccacatcgagcgggtcaccgagctgcaagaactcttcctcacgcgcgtcgggctcgacatcggcaaggtgtgggtcgcggacgacggcgccgcggtggcggtctggaccacgccggagagcgtcgaagcgggggcggtgttcgccgagatcggcccgcgcatggccgagttgagcggttcccggctggccgcgcagcaacagatggaaggcctcctggcgccgcaccggcccaaggagcccgcgtggttcctggccaccgtcggcgtctcgcccgaccaccagggcaagggtctgggcagcgccgtcgtgctccccggagtggaggcggccgagcgcgccggggtgcccgccttcctggagacctccgcgccccgcaacctccccttctacgagcggctcggcttcaccgtcaccgccgacgtcgaggtgcccgaaggaccgcgcacctggtgcatgacccgcaagcccggtgcctga

SEQ ID NO: 3543 - DNA, 3297 bp, Artificial Sequence
  Synthetic Polynucloetide
atggccttaccagtgaccgccttgctcctgccgctggccttgctgctccacgccgccaggccgctcgaggacctgaagaacgtgttcccacctgaggtggccgtgttcgagcctagcgaggccgagatcagccacacccagaaagccaccctcgtgtgcctggctaccggcttctaccccgaccatgtggaactgtcttggtgggtcaacggcaaagaggtgcacagcggcgtgtctaccgacccccagccactgaaagaacagcccgccctgaacgacagccggtactgcctgagcagcagactgagagtgtccgccaccttctggcagaacccccggaaccacttcagatgccaggtgcagttctacggcctgagcgagaacgacgagtggacccaggacagagccaagcccgtgacccagatcgtgtctgccgaagcctggggcagagccgattgcggctttaccagcgagagctaccagcagggcgtgctgagcgccaccatcctgtacgagatcctgctgggcaaggccaccctgtacgccgtgctggtgtctgccctggtgctgatggctatggtcaagcggaaggacagccggggaagggccaagcgatctggatctggagcaacaaacttctcactactcaaacaagcaggtgacgtggaggagaatcccgggcctactagcatggccttaccagtgaccgccttgctcctgccgctggccttgctgctccacgccgccaggccggcatgccaggtccagctcgtcgagtccggcggcggcctcgtccaggccggcgactccgtcaccctctcctgcaccgcctccggccgcaccttctcctcctacgccctcgcctggttccgccagcgccccggcaaggagcgcgagttcgtcgccggcctccgctggggcggccccaccaactacgccgactccgtcaaggaccgcttcaccatctccggcgactccgccaagcacaccatgtacctccagatgaactccctcaagcccgaggacaccgccgtctactactgcggctacaaccccggcggctgggccgtcccctcccagtacgagtacgactcctggggccagggcacccaggtcaccgtctcctccggtaccggcggaggcggatctggcggcggaggtagcggtggcggaggatctgaattcgaagccgacatctaccagacacctagatacctggtcatcggcaccggcaagaaaatcaccctggaatgcagccagacaatgggccacgacaagatgtactggtatcagcaggaccccggcatggaactgcacctgatccactacagctacggcgtgaacagcaccgagaagggcgatctgtctagcgagagcaccgtgtccagaatcagaaccgagcacttcccactgacactggaaagcgccagacctagccacaccagccagtacctgtgtgcctcttctgaggccagaggactggccgagttcaccgacacacagtatttcggccctggcaccagactgaccgttggcggaggcggaagtggaggcggaggatctggcggcggaggctctcaagttcagcttcaacagcctggcgctgagctggtcaaacctggcgcttctgtgaagatgagctgcaaagccagcggctacgccttcagcagctactggatcaactggatgaagcagaaacccggccagggactcgaatggatcggccaaatctatcccggcgacggcaccgagaacagattcagcgtgaacttccagaaggccgccaagagcttcagcctgaagatcagcgatagccagctgggcgacgccgccatgtacttttgcgcttatagaagcgccgtgaacgcccggctgatgtttggagatggcacacagctggtggtcaagcccaacacgcgtgagcagaaactgatctcggaagaggatctggggagcggcaccccattcccttctctggcccctcccatcatgctgctggtggacggcaagcagcagatggtggtcgtgtgcctggtgctggatgtggccccacctggactggacagccccatctggtttagcgccggcaatggctctgccctggacgcctttacctacggcccaagccctgccaccgatggcacctggacaaatctggcccacctgagcctgcccagcgaggaactggcttcttgggagcctctcgtgtgccacacaggacctggcgctgagggacacagcagatccacccagcctatgcacctgtctggcgaggccagcaccgccagaacctgtcctcaggaacctctgagaggcacccctggcggagcactgtggctgggagtgctgagactgctgctgttcaagctgctgctgtttgacctgctgctgacctgctcctgtctgtgcgatcctgccggccctctgccttctcctgccaccaccacaagactgagagccctgggcagccacagactgcaccctgccacagagacaggcggcagagaggccacaagcagccctagaccccagcccagagacagaagatggggcgataccccccctggcagaaagcctggatctccagtccgcgccaagagaagcggatctggcgtgaagcagaccctgaatttcgacctgctgaagctggctggcgacgtggaatccaacccaggcccttctagatctagaggccatatgaccgagtacaagcccacggtgcgcctcgccacccgcgacgacgtccccagggccgtacgcaccctcgccgccgcgttcgccgactaccccgccacgcgccacaccgtcgatccggaccgccacatcgagcgggtcaccgagctgcaagaactcttcctcacgcgcgtcgggctcgacatcggcaaggtgtgggtcgcggacgacggcgccgcggtggcggtctggaccacgccggagagcgtcgaagcgggggcggtgttcgccgagatcggcccgcgcatggccgagttgagcggttcccggctggccgcgcagcaacagatggaaggcctcctggcgccgcaccggcccaaggagcccgcgtggttcctggccaccgtcggcgtctcgcccgaccaccagggcaagggtctgggcagcgccgtcgtgctccccggagtggaggcggccgagcgcgccggggtgcccgccttcctggagacctccgcgccccgcaacctccccttctacgagcggctcggcttcaccgtcaccgccgacgtcgaggtgcccgaaggaccgcgcacctggtgcatgacccgcaagcccggtgcctga

SEQ ID NO: 3544 - DNA, 3108 bp, Artificial Sequence
  Synthetic Polynucloetide
atggccttaccagtgaccgccttgctcctgccgctggccttgctgctccacgccgccaggccggcatgccaggtccagctcgtcgagtccggcggcggcctcgtccaggccggcgactccgtcaccctctcctgcaccgcctccggccgcaccttctcctcctacgccctcgcctggttccgccagcgccccggcaaggagcgcgagttcgtcgccggcctccgctggggcggccccaccaactacgccgactccgtcaaggaccgcttcaccatctccggcgactccgccaagcacaccatgtacctccagatgaactccctcaagcccgaggacaccgccgtctactactgcggctacaaccccggcggctgggccgtcccctcccagtacgagtacgactcctggggccagggcacccaggtcaccgtctcctccggtaccggcggaggcggatctggcggcggaggtagcggtggcggaggatctgaattcgaagccgacatctaccagacacctagatacctggtcatcggcaccggcaagaaaatcaccctggaatgcagccagacaatgggccacgacaagatgtactggtatcagcaggaccccggcatggaactgcacctgatccactacagctacggcgtgaacagcaccgagaagggcgatctgtctagcgagagcaccgtgtccagaatcagaaccgagcacttcccactgacactggaaagcgccagacctagccacaccagccagtacctgtgtgcctcttctgaggccagaggactggccgagttcaccgacacacagtatttcggccctggcaccagactgaccgttctcgaggggaaaccaattcccaaccctcttctgggactggattcaaccggcagcggcgacaagcagctggacgccgacgtgtcccccaagcctaccatcttcctgccctctatcgccgagacaaagctccagaaggccggcacctacctgtgcctgctggaaaagttcttcccagatgtgattaagatccactggcaggaaaagaagtccaacaccatcctgggcagccaggaaggcaacaccatgaagaccaacgacacctacatgaagttcagctggctgaccgtgcccgagaagtccctggacaaagaacacagatgcatcgtgcggcacgaaaacaacaagaacggcgtggaccaggaaatcatcttcccacccatcaagaccgatgtgattacaatggaccccaaggacaactgctccaaggacgccaacgataccctgctgctccagctgaccaacaccagcgcctactacatgtacttgttgctgctgctgaagtccgtggtgtacttcgccatcatcacatgctgcctgctgcggagaaccgccttctgctgcaacggcgagaagtctagggccaagcgatctggatctggagcaacaaacttctcactactcaaacaagcaggtgacgtggaggagaatcccgggcctactagtatggactggatttggcgcatccttttccttgtcggcgctgctaccggcgcgcattccttcgaacaagttcagcttcaacagcctggcgctgagctggtcaaacctggcgcttctgtgaagatgagctgcaaagccagcggctacgccttcagcagctactggatcaactggatgaagcagaaacccggccagggactcgaatggatcggccaaatctatcccggcgacggcaccgagaacagattcagcgtgaacttccagaaggccgccaagagcttcagcctgaagatcagcgatagccagctgggcgacgccgccatgtacttttgcgcttatagaagcgccgtgaacgcccggctgatgtttggagatggcacacagctggtggtcaagcccaacacgcgtgagcagaaactgatctcggaagaggatgggagcggcagccagcctcacaccaagcccagcgtgttcgtgatgaagaacggcaccaacgtggcctgcctcgtgaaagagttctaccccaaggacatcaggatcaacctggtgtccagcaagaagatcaccgagttcgaccccgccatcgtgatctcccccagcggcaagtacaacgccgtgaagctggggaagtacgaggacagcaacagcgtgacctgctccgtgcagcacgacaacaagaccgtgcacagcaccgactttgaagtgaaaaccgactccaccgaccacgtgaagcccaaagagacagagaacaccaagcagcccagcaagagctgccacaagcccaaggccatcgtgcacaccgagaaagtgaacatgatgagcctgaccgtgctgggcctgcggatgctgttcgccaaaaccgtggccgtgaacttcctgctgaccgccaagctgttcttcctccgcgccaagagaagcggatctggcgtgaagcagaccctgaatttcgacctgctgaagctggctggcgacgtggaatccaacccaggcccttctagaggccatatgaccgagtacaagcccacggtgcgcctcgccacccgcgacgacgtccccagggccgtacgcaccctcgccgccgcgttcgccgactaccccgccacgcgccacaccgtcgatccggaccgccacatcgagcgggtcaccgagctgcaagaactcttcctcacgcgcgtcgggctcgacatcggcaaggtgtgggtcgcggacgacggcgccgcggtggcggtctggaccacgccggagagcgtcgaagcgggggcggtgttcgccgagatcggcccgcgcatggccgagttgagcggttcccggctggccgcgcagcaacagatggaaggcctcctggcgccgcaccggcccaaggagcccgcgtggttcctggccaccgtcggcgtctcgcccgaccaccagggcaagggtctgggcagcgccgtcgtgctccccggagtggaggcggccgagcgcgccggggtgcccgccttcctggagacctccgcgccccgcaacctccccttctacgagcggctcggcttcaccgtcaccgccgacgtcgaggtgcccgaaggaccgcgcacctggtgcatgacccgcaagcccggtgcctga

SEQ ID NO: 3545 - DNA, 2319 bp, Artificial Sequence
  Synthetic Polynucloetide
atggccttaccagtgaccgccttgctcctgccgctggccttgctgctccacgccgccaggccggcatgccaggtccagctcgtcgagtccggcggcggcctcgtccaggccggcgactccgtcaccctctcctgcaccgcctccggccgcaccttctcctcctacgccctcgcctggttccgccagcgccccggcaaggagcgcgagttcgtcgccggcctccgctggggcggccccaccaactacgccgactccgtcaaggaccgcttcaccatctccggcgactccgccaagcacaccatgtacctccagatgaactccctcaagcccgaggacaccgccgtctactactgcggctacaaccccggcggctgggccgtcccctcccagtacgagtacgactcctggggccagggcacccaggtcaccgtctcctccggtaccggcggaggcggatctggcggcggaggtagcggtggcggaggatctgaattcgaagccgacatctaccagacacctagatacctggtcatcggcaccggcaagaaaatcaccctggaatgcagccagacaatgggccacgacaagatgtactggtatcagcaggaccccggcatggaactgcacctgatccactacagctacggcgtgaacagcaccgagaagggcgatctgtctagcgagagcaccgtgtccagaatcagaaccgagcacttcccactgacactggaaagcgccagacctagccacaccagccagtacctgtgtgcctcttctgaggccagaggactggccgagttcaccgacacacagtatttcggccctggcaccagactgaccgttctcgagagccagcctcacaccaagcccagcgtgttcgtgatgaagaacggcaccaacgtggcctgcctcgtgaaagagttctaccccaaggacatcaggatcaacctggtgtccagcaagaagatcaccgagttcgaccccgccatcgtgatctcccccagcggcaagtacaacgccgtgaagctggggaagtacgaggacagcaacagcgtgacctgctccgtgcagcacgacaacaagaccgtgcacagcaccgactttgaagtgaaaaccgactccaccgaccacgtgaagcccaaagagacagagaacaccaagcagcccagcaagagctgccacaagcccaaggccatcgtgcacaccgagaaagtgaacatgatgagcctgaccgtgctgggcctgcggatgctgttcgccaaaaccgtggccgtgaacttcctgctgaccgccaagctgttcttcctcagggccaagcgatctggatctggagcaacaaacttctcactactcaaacaagcaggtgacgtggaggagaatcccgggcctactagtatggactggatttggcgcatccttttccttgtcggcgctgctaccggcgcgcattccttcgaacaagttcagcttcaacagcctggcgctgagctggtcaaacctggcgcttctgtgaagatgagctgcaaagccagcggctacgccttcagcagctactggatcaactggatgaagcagaaacccggccagggactcgaatggatcggccaaatctatcccggcgacggcaccgagaacagattcagcgtgaacttccagaaggccgccaagagcttcagcctgaagatcagcgatagccagctgggcgacgccgccatgtacttttgcgcttatagaagcgccgtgaacgcccggctgatgtttggagatggcacacagctggtggtcaagcccaacacgcgtgacaagcagctggacgccgacgtgtcccccaagcctaccatcttcctgccctctatcgccgagacaaagctccagaaggccggcacctacctgtgcctgctggaaaagttcttcccagatgtgattaagatccactggcaggaaaagaagtccaacaccatcctgggcagccaggaaggcaacaccatgaagaccaacgacacctacatgaagttcagctggctgaccgtgcccgagaagtccctggacaaagaacacagatgcatcgtgcggcacgaaaacaacaagaacggcgtggaccaggaaatcatcttcccacccatcaagaccgatgtgattacaatggaccccaaggacaactgctccaaggacgccaacgataccctgctgctccagctgaccaacaccagcgcctactacatgtacttgttgctgctgctgaagtccgtggtgtacttcgccatcatcacatgctgcctgctgcggagaaccgccttctgctgcaacggcgagaagtct

SEQ ID NO: 3546 - DNA, 3153 bp, Artificial Sequence
  Synthetic Polynucloetide
atggccttaccagtgaccgccttgctcctgccgctggccttgctgctccacgccgccaggccgctcgaggggaaaccaattcccaaccctcttctgggactggattcaaccggcagcggcgacaagcagctggacgccgacgtgtcccccaagcctaccatcttcctgccctctatcgccgagacaaagctccagaaggccggcacctacctgtgcctgctggaaaagttcttcccagatgtgattaagatccactggcaggaaaagaagtccaacaccatcctgggcagccaggaaggcaacaccatgaagaccaacgacacctacatgaagttcagctggctgaccgtgcccgagaagtccctggacaaagaacacagatgcatcgtgcggcacgaaaacaacaagaacggcgtggaccaggaaatcatcttcccacccatcaagaccgatgtgattacaatggaccccaaggacaactgctccaaggacgccaacgataccctgctgctccagctgaccaacaccagcgcctactacatgtacttgttgctgctgctgaagtccgtggtgtacttcgccatcatcacatgctgcctgctgcggagaaccgccttctgctgcaacggcgagaagtctagggccaagcgatctggatctggagcaacaaacttctcactactcaaacaagcaggtgacgtggaggagaatcccgggcctactagcatggccttaccagtgaccgccttgctcctgccgctggccttgctgctccacgccgccaggccggcatgccaggtccagctcgtcgagtccggcggcggcctcgtccaggccggcgactccgtcaccctctcctgcaccgcctccggccgcaccttctcctcctacgccctcgcctggttccgccagcgccccggcaaggagcgcgagttcgtcgccggcctccgctggggcggccccaccaactacgccgactccgtcaaggaccgcttcaccatctccggcgactccgccaagcacaccatgtacctccagatgaactccctcaagcccgaggacaccgccgtctactactgcggctacaaccccggcggctgggccgtcccctcccagtacgagtacgactcctggggccagggcacccaggtcaccgtctcctccggtaccggcggaggcggatctggcggcggaggtagcggtggcggaggatctgaattcgaagccgacatctaccagacacctagatacctggtcatcggcaccggcaagaaaatcaccctggaatgcagccagacaatgggccacgacaagatgtactggtatcagcaggaccccggcatggaactgcacctgatccactacagctacggcgtgaacagcaccgagaagggcgatctgtctagcgagagcaccgtgtccagaatcagaaccgagcacttcccactgacactggaaagcgccagacctagccacaccagccagtacctgtgtgcctcttctgaggccagaggactggccgagttcaccgacacacagtatttcggccctggcaccagactgaccgttggcggaggcggaagtggaggcggaggatctggcggcggaggctctcaagttcagcttcaacagcctggcgctgagctggtcaaacctggcgcttctgtgaagatgagctgcaaagccagcggctacgccttcagcagctactggatcaactggatgaagcagaaacccggccagggactcgaatggatcggccaaatctatcccggcgacggcaccgagaacagattcagcgtgaacttccagaaggccgccaagagcttcagcctgaagatcagcgatagccagctgggcgacgccgccatgtacttttgcgcttatagaagcgccgtgaacgcccggctgatgtttggagatggcacacagctggtggtcaagcccaacacgcgtgagcagaaactgatctcggaagaggatgggagcggcagccagcctcacaccaagcccagcgtgttcgtgatgaagaacggcaccaacgtggcctgcctcgtgaaagagttctaccccaaggacatcaggatcaacctggtgtccagcaagaagatcaccgagttcgaccccgccatcgtgatctcccccagcggcaagtacaacgccgtgaagctggggaagtacgaggacagcaacagcgtgacctgctccgtgcagcacgacaacaagaccgtgcacagcaccgactttgaagtgaaaaccgactccaccgaccacgtgaagcccaaagagacagagaacaccaagcagcccagcaagagctgccacaagcccaaggccatcgtgcacaccgagaaagtgaacatgatgagcctgaccgtgctgggcctgcggatgctgttcgccaaaaccgtggccgtgaacttcctgctgaccgccaagctgttcttcctccgcgccaagagaagcggatctggcgtgaagcagaccctgaatttcgacctgctgaagctggctggcgacgtggaatccaacccaggcccttctagaggccatatgaccgagtacaagcccacggtgcgcctcgccacccgcgacgacgtccccagggccgtacgcaccctcgccgccgcgttcgccgactaccccgccacgcgccacaccgtcgatccggaccgccacatcgagcgggtcaccgagctgcaagaactcttcctcacgcgcgtcgggctcgacatcggcaaggtgtgggtcgcggacgacggcgccgcggtggcggtctggaccacgccggagagcgtcgaagcgggggcggtgttcgccgagatcggcccgcgcatggccgagttgagcggttcccggctggccgcgcagcaacagatggaaggcctcctggcgccgcaccggcccaaggagcccgcgtggttcctggccaccgtcggcgtctcgcccgaccaccagggcaagggtctgggcagcgccgtcgtgctccccggagtggaggcggccgagcgcgccggggtgcccgccttcctggagacctccgcgccccgcaacctccccttctacgagcggctcggcttcaccgtcaccgccgacgtcgaggtgcccgaaggaccgcgcacctggtgcatgacccgcaagcccggtgcctga

SEQ ID NO: 3547 - DNA, 3528 bp, Artificial Sequence
  Synthetic Polynucloetide
atggccttaccagtgaccgccttgctcctgccgctggccttgctgctccacgccgccaggccggcatgccaggtccagctcgtcgagtccggcggcggcctcgtccaggccggcgactccgtcaccctctcctgcaccgcctccggccgcaccttctcctcctacgccctcgcctggttccgccagcgccccggcaaggagcgcgagttcgtcgccggcctccgctggggcggccccaccaactacgccgactccgtcaaggaccgcttcaccatctccggcgactccgccaagcacaccatgtacctccagatgaactccctcaagcccgaggacaccgccgtctactactgcggctacaaccccggcggctgggccgtcccctcccagtacgagtacgactcctggggccagggcacccaggtcaccgtctcctccggtaccggcggaggcggatctggcggcggaggtagcggtggcggaggatctgaattcgaagccgacatctaccagacacctagatacctggtcatcggcaccggcaagaaaatcaccctggaatgcagccagacaatgggccacgacaagatgtactggtatcagcaggaccccggcatggaactgcacctgatccactacagctacggcgtgaacagcaccgagaagggcgatctgtctagcgagagcaccgtgtccagaatcagaaccgagcacttcccactgacactggaaagcgccagacctagccacaccagccagtacctgtgtgcctcttctgaggccagaggactggccgagttcaccgacacacagtatttcggccctggcaccagactgaccgttggacagcctaaggccaatcctaccgtgacactgttccctccaagcagcgaagaactccaggccaacaaggccacacttgtgtgcctgatctccgacttctaccctggggctgtgacagtggcttggaaggccgatggatctcctgtgaaagccggcgtggaaaccaccaagccatccaagcagagcaacaacaaatacgccgccagctcctacctgagcctgacacctgagcagtggaagtcccacagatcctacagctgccaagtgacccacgaaggcagcaccgtggaaaagacagtggcccctacagagtgcagcggatcccagagcttcggcctgctggaccccaagctgtgctacctgctggatggcatcctgttcatctacggcgtgatcctgaccgccctgttcctgagagtgaagttcagcagaagcgccgacgcccctgcctaccagcagggacagaaccaactgtacaacgagctgaacctgggcagacgggaagagtacgacgtgctggacaagcggagaggcagggaccctgagatgggcggaaagccccagcggagaaagaacccccaggaaggactgtataacgaactccagaaagacaagatggccgaagcctacagcgagatcggcatgaagggcgagcggagaagaggcaagggccacgatggcctgtaccagggcctgagcaccgccaccaaggacacctatgacgccctgcacatgcaggccctgcctccaagaagggccaagcgatctggatctggagcaacaaacttctcactactcaaacaagcaggtgacgtggaggagaatcccgggcctactagtatggactggatttggcgcatccttttccttgtcggcgctgctaccggcgcgcattccttcgaacaagttcagcttcaacagcctggcgctgagctggtcaaacctggcgcttctgtgaagatgagctgcaaagccagcggctacgccttcagcagctactggatcaactggatgaagcagaaacccggccagggactcgaatggatcggccaaatctatcccggcgacggcaccgagaacagattcagcgtgaacttccagaaggccgccaagagcttcagcctgaagatcagcgatagccagctgggcgacgccgccatgtacttttgcgcttatagaagcgccgtgaacgcccggctgatgtttggagatggcacacagctggtggtcaagcccaacgcctctacaaagggaccctccgtgtttcctctggctcccagcagcaagtctacaagcggaggaacagccgctctgggctgcctggtcaaggattactttcccgagcctgtgaccgtgtcctggaatagcggagcactgacaagcggcgtgcacacctttccagccgtgctgcaaagcagcggcctgtactctctgagcagcgtggtcacagtgcctagctctagcctgggcacccagacctacatctgcaatgtgaaccacaagcctagcaacaccaaggtggacaagagagtggaacccaagagctgtggtacccagagttttgggttgttggaccctaaattgtgctatctgttggacggaatcctgttcatttacggagtgatcctgaccgcattgttcctgcgggttaagttttccagatccgcagacgcacccgcttaccaacaagggcagaaccaactctacaatgaacttaatttggggcggagggaagagtacgacgttctggacaaaaggaggggacgagatcccgagatgggcggaaagcctcagcgaaggaagaatccgcaagaggggctttataacgaactccagaaagataaaatggcagaagcctatagtgagattgggatgaagggagaaaggaggaggggtaaaggtcacgatgggttgtaccaaggattgagcacagccactaaagatacctatgatgcgctccacatgcaggccctgccgccaagacgcgccaagagaagcggatctggcgtgaagcagaccctgaatttcgacctgctgaagctggctggcgacgtggaatccaacccaggcccttctagaggccatatgaccgagtacaagcccacggtgcgcctcgccacccgcgacgacgtccccagggccgtacgcaccctcgccgccgcgttcgccgactaccccgccacgcgccacaccgtcgatccggaccgccacatcgagcgggtcaccgagctgcaagaactcttcctcacgcgcgtcgggctcgacatcggcaaggtgtgggtcgcggacgacggcgccgcggtggcggtctggaccacgccggagagcgtcgaagcgggggcggtgttcgccgagatcggcccgcgcatggccgagttgagcggttcccggctggccgcgcagcaacagatggaaggcctcctggcgccgcaccggcccaaggagcccgcgtggttcctggccaccgtcggcgtctcgcccgaccaccagggcaagggtctgggcagcgccgtcgtgctccccggagtggaggcggccgagcgcgccggggtgcccgccttcctggagacctccgcgccccgcaacctccccttctacgagcggctcggcttcaccgtcaccgccgacgtcgaggtgcccgaaggaccgcgcacctggtgcatgacccgcaagcccggtgcctga

SEQ ID NO: 3548 - DNA, 2883 bp, Artificial Sequence
  Synthetic Polynucloetide
atggccttaccagtgaccgccttgctcctgccgctggccttgctgctccacgccgccaggccggcatgccaggtccagctcgtcgagtccggcggcggcctcgtccaggccggcgactccgtcaccctctcctgcaccgcctccggccgcaccttctcctcctacgccctcgcctggttccgccagcgccccggcaaggagcgcgagttcgtcgccggcctccgctggggcggccccaccaactacgccgactccgtcaaggaccgcttcaccatctccggcgactccgccaagcacaccatgtacctccagatgaactccctcaagcccgaggacaccgccgtctactactgcggctacaaccccggcggctgggccgtcccctcccagtacgagtacgactcctggggccagggcacccaggtcaccgtctcctccggtaccggcggaggcggatctggcggcggaggtagcggtggcggaggatctgaattcgaagccgacatctaccagacacctagatacctggtcatcggcaccggcaagaaaatcaccctggaatgcagccagacaatgggccacgacaagatgtactggtatcagcaggaccccggcatggaactgcacctgatccactacagctacggcgtgaacagcaccgagaagggcgatctgtctagcgagagcaccgtgtccagaatcagaaccgagcacttcccactgacactggaaagcgccagacctagccacaccagccagtacctgtgtgcctcttctgaggccagaggactggccgagttcaccgacacacagtatttcggccctggcaccagactgaccgttctcgaggacctgaagaacgtgttcccacctgaggtggccgtgttcgagcctagcgaggccgagatcagccacacccagaaagccaccctcgtgtgcctggctaccggcttctaccccgaccatgtggaactgtcttggtgggtcaacggcaaagaggtgcacagcggcgtgtctaccgacccccagccactgaaagaacagcccgccctgaacgacagccggtactgcctgagcagcagactgagagtgtccgccaccttctggcagaacccccggaaccacttcagatgccaggtgcagttctacggcctgagcgagaacgacgagtggacccaggacagagccaagcccgtgacccagatcgtgtctgccgaagcctggggcagagccgattgcggatcccagagcttcggcctgctggaccccaagctgtgctacctgctggatggcatcctgttcatctacggcgtgatcctgaccgccctgttcctgagagtgaagttcagcagaagcgccgacgcccctgcctaccagcagggacagaaccaactgtacaacgagctgaacctgggcagacgggaagagtacgacgtgctggacaagcggagaggcagggaccctgagatgggcggaaagccccagcggagaaagaacccccaggaaggactgtataacgaactccagaaagacaagatggccgaagcctacagcgagatcggcatgaagggcgagcggagaagaggcaagggccacgatggcctgtaccagggcctgagcaccgccaccaaggacacctatgacgccctgcacatgcaggccctgcctccaagaagggccaagcgatctggatctggagcaacaaacttctcactactcaaacaagcaggtgacgtggaggagaatcccgggcctactagtatggactggatttggcgcatccttttccttgtcggcgctgctaccggcgcgcattccttcgaacaagttcagcttcaacagcctggcgctgagctggtcaaacctggcgcttctgtgaagatgagctgcaaagccagcggctacgccttcagcagctactggatcaactggatgaagcagaaacccggccagggactcgaatggatcggccaaatctatcccggcgacggcaccgagaacagattcagcgtgaacttccagaaggccgccaagagcttcagcctgaagatcagcgatagccagctgggcgacgccgccatgtacttttgcgcttatagaagcgccgtgaacgcccggctgatgtttggagatggcacacagctggtggtcaagcccaacacgcgtatccagaaccctgatcctgccgtgtaccagctgcgggatagcaagagcagcgacaagagcgtgtgtctgttcaccgacttcgacagccagaccaacgtgtcccagagcaaggactccgacgtgtacatcaccgataagaccgtgctggacatgcggagcatggacttcaagagcaactccgccgtggcctggtccaacaagtccgatttcgcctgcgccaacgccttcaacaacagcattatccccgaggacacattcttcccaagccccgagagcagctgcggtacccagagttttgggttgttggaccctaaattgtgctatctgttggacggaatcctgttcatttacggagtgatcctgaccgcattgttcctgcgggttaagttttccagatccgcagacgcacccgcttaccaacaagggcagaaccaactctacaatgaacttaatttggggcggagggaagagtacgacgttctggacaaaaggaggggacgagatcccgagatgggcggaaagcctcagcgaaggaagaatccgcaagaggggctttataacgaactccagaaagataaaatggcagaagcctatagtgagattgggatgaagggagaaaggaggaggggtaaaggtcacgatgggttgtaccaaggattgagcacagccactaaagatacctatgatgcgctccacatgcaggccctgccgccaaga

SEQ ID NO: 3549 - DNA, 2883 bp, Artificial Sequence
  Synthetic Polynucloetide
atggccttaccagtgaccgccttgctcctgccgctggccttgctgctccacgccgccaggccggcatgccaggtccagctcgtcgagtccggcggcggcctcgtccaggccggcgactccgtcaccctctcctgcaccgcctccggccgcaccttctcctcctacgccctcgcctggttccgccagcgccccggcaaggagcgcgagttcgtcgccggcctccgctggggcggccccaccaactacgccgactccgtcaaggaccgcttcaccatctccggcgactccgccaagcacaccatgtacctccagatgaactccctcaagcccgaggacaccgccgtctactactgcggctacaaccccggcggctgggccgtcccctcccagtacgagtacgactcctggggccagggcacccaggtcaccgtctcctccggtaccggcggaggcggatctggcggcggaggtagcggtggcggaggatctgaattcgaagccgacatctaccagacacctagatacctggtcatcggcaccggcaagaaaatcaccctggaatgcagccagacaatgggccacgacaagatgtactggtatcagcaggaccccggcatggaactgcacctgatccactacagctacggcgtgaacagcaccgagaagggcgatctgtctagcgagagcaccgtgtccagaatcagaaccgagcacttcccactgacactggaaagcgccagacctagccacaccagccagtacctgtgtgcctcttctgaggccagaggactggccgagttcaccgacacacagtatttcggccctggcaccagactgaccgttctcgaggacctgaagaacgtgttcccacctgaggtggccgtgttcgagcctagcaaggccgagatcgcccacacccagaaagccaccctcgtgtgcctggctaccggcttctaccccgaccatgtggaactgtcttggtgggtcaacggcaaagaggtgcacagcggcgtgtgtaccgacccccagccactgaaagaacagcccgccctgaacgacagccggtactgcctgagcagcagactgagagtgtccgccaccttctggcagaacccccggaaccacttcagatgccaggtgcagttctacggcctgagcgagaacgacgagtggacccaggacagagccaagcccgtgacccagatcgtgtctgccgaagcctggggcagagccgattgcggatcccagagcttcggcctgctggaccccaagctgtgctacctgctggatggcatcctgttcatctacggcgtgatcctgaccgccctgttcctgagagtgaagttcagcagaagcgccgacgcccctgcctaccagcagggacagaaccaactgtacaacgagctgaacctgggcagacgggaagagtacgacgtgctggacaagcggagaggcagggaccctgagatgggcggaaagccccagcggagaaagaacccccaggaaggactgtataacgaactccagaaagacaagatggccgaagcctacagcgagatcggcatgaagggcgagcggagaagaggcaagggccacgatggcctgtaccagggcctgagcaccgccaccaaggacacctatgacgccctgcacatgcaggccctgcctccaagaagggccaagcgatctggatctggagcaacaaacttctcactactcaaacaagcaggtgacgtggaggagaatcccgggcctactagtatggactggatttggcgcatccttttccttgtcggcgctgctaccggcgcgcattccttcgaacaagttcagcttcaacagcctggcgctgagctggtcaaacctggcgcttctgtgaagatgagctgcaaagccagcggctacgccttcagcagctactggatcaactggatgaagcagaaacccggccagggactcgaatggatcggccaaatctatcccggcgacggcaccgagaacagattcagcgtgaacttccagaaggccgccaagagcttcagcctgaagatcagcgatagccagctgggcgacgccgccatgtacttttgcgcttatagaagcgccgtgaacgcccggctgatgtttggagatggcacacagctggtggtcaagcccaacacgcgtatccagaaccctgatcctgccgtgtaccagctgcgggatagcaagagcagcgacaagagcgtgtgtctgttcaccgacttcgacagccagaccaacgtgtcccagagcaaggactccgacgtgtacatcaccgataagtgcgtgctggacatgcggagcatggacttcaagagcaactccgccgtggcctggtccaacaagtccgatttcgcctgcgccaacgccttcaacaacagcattatccccgaggacacattcttcccaagcagcgacgtgccctgcggtacccagagttttgggttgttggaccctaaattgtgctatctgttggacggaatcctgttcatttacggagtgatcctgaccgcattgttcctgcgggttaagttttccagatccgcagacgcacccgcttaccaacaagggcagaaccaactctacaatgaacttaatttggggcggagggaagagtacgacgttctggacaaaaggaggggacgagatcccgagatgggcggaaagcctcagcgaaggaagaatccgcaagaggggctttataacgaactccagaaagataaaatggcagaagcctatagtgagattgggatgaagggagaaaggaggaggggtaaaggtcacgatgggttgtaccaaggattgagcacagccactaaagatacctatgatgcgctccacatgcaggccctgccgccaaga

SEQ ID NO: 3550 - DNA, 3096 bp, Artificial Sequence
  Synthetic Polynucloetide
atggccttaccagtgaccgccttgctcctgccgctggccttgctgctccacgccgccaggccggcatgccaggtccagctcgtcgagtccggcggcggcctcgtccaggccggcgactccgtcaccctctcctgcaccgcctccggccgcaccttctcctcctacgccctcgcctggttccgccagcgccccggcaaggagcgcgagttcgtcgccggcctccgctggggcggccccaccaactacgccgactccgtcaaggaccgcttcaccatctccggcgactccgccaagcacaccatgtacctccagatgaactccctcaagcccgaggacaccgccgtctactactgcggctacaaccccggcggctgggccgtcccctcccagtacgagtacgactcctggggccagggcacccaggtcaccgtctcctccggtaccggcggaggcggatctggcggcggaggtagcggtggcggaggatctgaattcgaagccgacatctaccagacacctagatacctggtcatcggcaccggcaagaaaatcaccctggaatgcagccagacaatgggccacgacaagatgtactggtatcagcaggaccccggcatggaactgcacctgatccactacagctacggcgtgaacagcaccgagaagggcgatctgtctagcgagagcaccgtgtccagaatcagaaccgagcacttcccactgacactggaaagcgccagacctagccacaccagccagtacctgtgtgcctcttctgaggccagaggactggccgagttcaccgacacacagtatttcggccctggcaccagactgaccgttctcgaggggaaaccaattcccaaccctcttctgggactggattcaaccggcagcggcgaggacctgaagaacgtgttcccacctgaggtggccgtgttcgagcctagcgaggccgagatcagccacacccagaaagccaccctcgtgtgcctggctaccggcttctaccccgaccatgtggaactgtcttggtgggtcaacggcaaagaggtgcacagcggcgtgtctaccgacccccagccactgaaagaacagcccgccctgaacgacagccggtactgcctgagcagcagactgagagtgtccgccaccttctggcagaacccccggaaccacttcagatgccaggtgcagttctacggcctgagcgagaacgacgagtggacccaggacagagccaagcccgtgacccagatcgtgtctgccgaagcctggggcagagccgattgcggatcccagagcttcggcctgctggaccccaagctgtgctacctgctggatggcatcctgttcatctacggcgtgatcctgaccgccctgttcctgagagtgaagttcagcagaagcgccgacgcccctgcctaccagcagggacagaaccaactgtacaacgagctgaacctgggcagacgggaagagtacgacgtgctggacaagcggagaggcagggaccctgagatgggcggaaagccccagcggagaaagaacccccaggaaggactgtataacgaactccagaaagacaagatggccgaagcctacagcgagatcggcatgaagggcgagcggagaagaggcaagggccacgatggcctgtaccagggcctgagcaccgccaccaaggacacctatgacgccctgcacatgcaggccctgcctccaagaagggccaagcgatctggatctggagcaacaaacttctcactactcaaacaagcaggtgacgtggaggagaatcccgggcctactagtatggactggatttggcgcatccttttccttgtcggcgctgctaccggcgcgcattccttcgaacaagttcagcttcaacagcctggcgctgagctggtcaaacctggcgcttctgtgaagatgagctgcaaagccagcggctacgccttcagcagctactggatcaactggatgaagcagaaacccggccagggactcgaatggatcggccaaatctatcccggcgacggcaccgagaacagattcagcgtgaacttccagaaggccgccaagagcttcagcctgaagatcagcgatagccagctgggcgacgccgccatgtacttttgcgcttatagaagcgccgtgaacgcccggctgatgtttggagatggcacacagctggtggtcaagcccaacacgcgtgagcagaaactgatctcggaagaggatgggagcggcatccagaaccctgatcctgccgtgtaccagctgcgggatagcaagagcagcgacaagagcgtgtgtctgttcaccgacttcgacagccagaccaacgtgtcccagagcaaggactccgacgtgtacatcaccgataagaccgtgctggacatgcggagcatggacttcaagagcaactccgccgtggcctggtccaacaagtccgatttcgcctgcgccaacgccttcaacaacagcattatccccgaggacacattcttcccaagccccgagagcagctgcggtacccagagttttgggttgttggaccctaaattgtgctatctgttggacggaatcctgttcatttacggagtgatcctgaccgcattgttcctgaggagcaagcggtcacggctgctccacagcgattacatgaatatgacaccacgaagaccgggtcctactcgcaaacactaccaaccctacgcacctccccgcgactttgcagcgtaccgatctcgggttaagttttccagatccgcagacgcacccgcttaccaacaagggcagaaccaactctacaatgaacttaatttggggcggagggaagagtacgacgttctggacaaaaggaggggacgagatcccgagatgggcggaaagcctcagcgaaggaagaatccgcaagaggggctttataacgaactccagaaagataaaatggcagaagcctatagtgagattgggatgaagggagaaaggaggaggggtaaaggtcacgatgggttgtaccaaggattgagcacagccactaaagatacctatgatgcgctccacatgcaggccctgccgccaaga

SEQ ID NO: 3551 - DNA, 3219 bp, Artificial Sequence
  Synthetic Polynucloetide
atggccttaccagtgaccgccttgctcctgccgctggccttgctgctccacgccgccaggccggcatgccaggtccagctcgtcgagtccggcggcggcctcgtccaggccggcgactccgtcaccctctcctgcaccgcctccggccgcaccttctcctcctacgccctcgcctggttccgccagcgccccggcaaggagcgcgagttcgtcgccggcctccgctggggcggccccaccaactacgccgactccgtcaaggaccgcttcaccatctccggcgactccgccaagcacaccatgtacctccagatgaactccctcaagcccgaggacaccgccgtctactactgcggctacaaccccggcggctgggccgtcccctcccagtacgagtacgactcctggggccagggcacccaggtcaccgtctcctccggtaccggcggaggcggatctggcggcggaggtagcggtggcggaggatctgaattcgaagccgacatctaccagacacctagatacctggtcatcggcaccggcaagaaaatcaccctggaatgcagccagacaatgggccacgacaagatgtactggtatcagcaggaccccggcatggaactgcacctgatccactacagctacggcgtgaacagcaccgagaagggcgatctgtctagcgagagcaccgtgtccagaatcagaaccgagcacttcccactgacactggaaagcgccagacctagccacaccagccagtacctgtgtgcctcttctgaggccagaggactggccgagttcaccgacacacagtatttcggccctggcaccagactgaccgttctcgaggggaaaccaattcccaaccctcttctgggactggattcaaccggcagcggcgaggacctgaagaacgtgttcccacctgaggtggccgtgttcgagcctagcgaggccgagatcagccacacccagaaagccaccctcgtgtgcctggctaccggcttctaccccgaccatgtggaactgtcttggtgggtcaacggcaaagaggtgcacagcggcgtgtctaccgacccccagccactgaaagaacagcccgccctgaacgacagccggtactgcctgagcagcagactgagagtgtccgccaccttctggcagaacccccggaaccacttcagatgccaggtgcagttctacggcctgagcgagaacgacgagtggacccaggacagagccaagcccgtgacccagatcgtgtctgccgaagcctggggcagagccgattgcggatcccagagcttcggcctgctggaccccaagctgtgctacctgctggatggcatcctgttcatctacggcgtgatcctgaccgccctgttcctgaggagtaagaggagcaggctcctgcacagtgactacatgaacatgactccacgccgccccggacccacccgcaagcattaccagccctatgccccaccacgcgacttcgcagcctatcgctccagagtgaagttcagcagaagcgccgacgcccctgcctaccagcagggacagaaccaactgtacaacgagctgaacctgggcagacgggaagagtacgacgtgctggacaagcggagaggcagggaccctgagatgggcggaaagccccagcggagaaagaacccccaggaaggactgtataacgaactccagaaagacaagatggccgaagcctacagcgagatcggcatgaagggcgagcggagaagaggcaagggccacgatggcctgtaccagggcctgagcaccgccaccaaggacacctatgacgccctgcacatgcaggccctgcctccaagaagggccaagcgatctggatctggagcaacaaacttctcactactcaaacaagcaggtgacgtggaggagaatcccgggcctactagtatggactggatttggcgcatccttttccttgtcggcgctgctaccggcgcgcattccttcgaacaagttcagcttcaacagcctggcgctgagctggtcaaacctggcgcttctgtgaagatgagctgcaaagccagcggctacgccttcagcagctactggatcaactggatgaagcagaaacccggccagggactcgaatggatcggccaaatctatcccggcgacggcaccgagaacagattcagcgtgaacttccagaaggccgccaagagcttcagcctgaagatcagcgatagccagctgggcgacgccgccatgtacttttgcgcttatagaagcgccgtgaacgcccggctgatgtttggagatggcacacagctggtggtcaagcccaacacgcgtgagcagaaactgatctcggaagaggatgggagcggcatccagaaccctgatcctgccgtgtaccagctgcgggatagcaagagcagcgacaagagcgtgtgtctgttcaccgacttcgacagccagaccaacgtgtcccagagcaaggactccgacgtgtacatcaccgataagaccgtgctggacatgcggagcatggacttcaagagcaactccgccgtggcctggtccaacaagtccgatttcgcctgcgccaacgccttcaacaacagcattatccccgaggacacattcttcccaagccccgagagcagctgcggtacccagagttttgggttgttggaccctaaattgtgctatctgttggacggaatcctgttcatttacggagtgatcctgaccgcattgttcctgaggagcaagcggtcacggctgctccacagcgattacatgaatatgacaccacgaagaccgggtcctactcgcaaacactaccaaccctacgcacctccccgcgactttgcagcgtaccgatctcgggttaagttttccagatccgcagacgcacccgcttaccaacaagggcagaaccaactctacaatgaacttaatttggggcggagggaagagtacgacgttctggacaaaaggaggggacgagatcccgagatgggcggaaagcctcagcgaaggaagaatccgcaagaggggctttataacgaactccagaaagataaaatggcagaagcctatagtgagattgggatgaagggagaaaggaggaggggtaaaggtcacgatgggttgtaccaaggattgagcacagccactaaagatacctatgatgcgctccacatgcaggccctgccgccaaga

SEQ ID NO: 3552 - DNA, 3102 bp, Artificial Sequence
  Synthetic Polynucloetide
atggccttaccagtgaccgccttgctcctgccgctggccttgctgctccacgccgccaggccggcatgccaggtccagctcgtcgagtccggcggcggcctcgtccaggccggcgactccgtcaccctctcctgcaccgcctccggccgcaccttctcctcctacgccctcgcctggttccgccagcgccccggcaaggagcgcgagttcgtcgccggcctccgctggggcggccccaccaactacgccgactccgtcaaggaccgcttcaccatctccggcgactccgccaagcacaccatgtacctccagatgaactccctcaagcccgaggacaccgccgtctactactgcggctacaaccccggcggctgggccgtcccctcccagtacgagtacgactcctggggccagggcacccaggtcaccgtctcctccggtaccggcggaggcggatctggcggcggaggtagcggtggcggaggatctgaattcgaagccgacatctaccagacacctagatacctggtcatcggcaccggcaagaaaatcaccctggaatgcagccagacaatgggccacgacaagatgtactggtatcagcaggaccccggcatggaactgcacctgatccactacagctacggcgtgaacagcaccgagaagggcgatctgtctagcgagagcaccgtgtccagaatcagaaccgagcacttcccactgacactggaaagcgccagacctagccacaccagccagtacctgtgtgcctcttctgaggccagaggactggccgagttcaccgacacacagtatttcggccctggcaccagactgaccgttctcgaggggaaaccaattcccaaccctcttctgggactggattcaaccggcagcggcgaggacctgaagaacgtgttcccacctgaggtggccgtgttcgagcctagcgaggccgagatcagccacacccagaaagccaccctcgtgtgcctggctaccggcttctaccccgaccatgtggaactgtcttggtgggtcaacggcaaagaggtgcacagcggcgtgtctaccgacccccagccactgaaagaacagcccgccctgaacgacagccggtactgcctgagcagcagactgagagtgtccgccaccttctggcagaacccccggaaccacttcagatgccaggtgcagttctacggcctgagcgagaacgacgagtggacccaggacagagccaagcccgtgacccagatcgtgtctgccgaagcctggggcagagccgattgcggatcccagagcttcggcctgctggaccccaagctgtgctacctgctggatggcatcctgttcatctacggcgtgatcctgaccgccctgttcctgagagtgaagttcagcagaagcgccgacgcccctgcctaccagcagggacagaaccaactgtacaacgagctgaacctgggcagacgggaagagtacgacgtgctggacaagcggagaggcagggaccctgagatgggcggaaagccccagcggagaaagaacccccaggaaggactgtataacgaactccagaaagacaagatggccgaagcctacagcgagatcggcatgaagggcgagcggagaagaggcaagggccacgatggcctgtaccagggcctgagcaccgccaccaaggacacctatgacgccctgcacatgcaggccctgcctccaagaagggccaagcgatctggatctggagcaacaaacttctcactactcaaacaagcaggtgacgtggaggagaatcccgggcctactagtatggactggatttggcgcatccttttccttgtcggcgctgctaccggcgcgcattccttcgaacaagttcagcttcaacagcctggcgctgagctggtcaaacctggcgcttctgtgaagatgagctgcaaagccagcggctacgccttcagcagctactggatcaactggatgaagcagaaacccggccagggactcgaatggatcggccaaatctatcccggcgacggcaccgagaacagattcagcgtgaacttccagaaggccgccaagagcttcagcctgaagatcagcgatagccagctgggcgacgccgccatgtacttttgcgcttatagaagcgccgtgaacgcccggctgatgtttggagatggcacacagctggtggtcaagcccaacacgcgtgagcagaaactgatctcggaagaggatctggggagcggcatccagaaccctgatcctgccgtgtaccagctgcgggatagcaagagcagcgacaagagcgtgtgtctgttcaccgacttcgacagccagaccaacgtgtcccagagcaaggactccgacgtgtacatcaccgataagaccgtgctggacatgcggagcatggacttcaagagcaactccgccgtggcctggtccaacaagtccgatttcgcctgcgccaacgccttcaacaacagcattatccccgaggacacattcttcccaagccccgagagcagctgcggtacccagagttttgggttgttggaccctaaattgtgctatctgttggacggaatcctgttcatttacggagtgatcctgaccgcattgttcctgaagagaggccggaagaagctgctgtacatcttcaagcagcctttcatgcggcccgtgcagaccacccaggaagaggacggctgctcctgccggttccccgaggaagaagaaggcggctgcgagctgcgggttaagttttccagatccgcagacgcacccgcttaccaacaagggcagaaccaactctacaatgaacttaatttggggcggagggaagagtacgacgttctggacaaaaggaggggacgagatcccgagatgggcggaaagcctcagcgaaggaagaatccgcaagaggggctttataacgaactccagaaagataaaatggcagaagcctatagtgagattgggatgaagggagaaaggaggaggggtaaaggtcacgatgggttgtaccaaggattgagcacagccactaaagatacctatgatgcgctccacatgcaggccctgccgccaaga

SEQ ID NO: 3553 - DNA, 3228 bp, Artificial Sequence
  Synthetic Polynucloetide
atggccttaccagtgaccgccttgctcctgccgctggccttgctgctccacgccgccaggccggcatgccaggtccagctcgtcgagtccggcggcggcctcgtccaggccggcgactccgtcaccctctcctgcaccgcctccggccgcaccttctcctcctacgccctcgcctggttccgccagcgccccggcaaggagcgcgagttcgtcgccggcctccgctggggcggccccaccaactacgccgactccgtcaaggaccgcttcaccatctccggcgactccgccaagcacaccatgtacctccagatgaactccctcaagcccgaggacaccgccgtctactactgcggctacaaccccggcggctgggccgtcccctcccagtacgagtacgactcctggggccagggcacccaggtcaccgtctcctccggtaccggcggaggcggatctggcggcggaggtagcggtggcggaggatctgaattcgaagccgacatctaccagacacctagatacctggtcatcggcaccggcaagaaaatcaccctggaatgcagccagacaatgggccacgacaagatgtactggtatcagcaggaccccggcatggaactgcacctgatccactacagctacggcgtgaacagcaccgagaagggcgatctgtctagcgagagcaccgtgtccagaatcagaaccgagcacttcccactgacactggaaagcgccagacctagccacaccagccagtacctgtgtgcctcttctgaggccagaggactggccgagttcaccgacacacagtatttcggccctggcaccagactgaccgttctcgaggggaaaccaattcccaaccctcttctgggactggattcaaccggcagcggcgaggacctgaagaacgtgttcccacctgaggtggccgtgttcgagcctagcgaggccgagatcagccacacccagaaagccaccctcgtgtgcctggctaccggcttctaccccgaccatgtggaactgtcttggtgggtcaacggcaaagaggtgcacagcggcgtgtctaccgacccccagccactgaaagaacagcccgccctgaacgacagccggtactgcctgagcagcagactgagagtgtccgccaccttctggcagaacccccggaaccacttcagatgccaggtgcagttctacggcctgagcgagaacgacgagtggacccaggacagagccaagcccgtgacccagatcgtgtctgccgaagcctggggcagagccgattgcggatcccagagcttcggcctgctggaccccaagctgtgctacctgctggatggcatcctgttcatctacggcgtgatcctgaccgccctgttcctgaaacggggcagaaagaaactcctgtatatattcaaacaaccatttatgagaccagtacaaactactcaagaggaagatggctgtagctgccgatttccagaagaagaagaaggaggatgtgaactgagagtgaagttcagcagaagcgccgacgcccctgcctaccagcagggacagaaccaactgtacaacgagctgaacctgggcagacgggaagagtacgacgtgctggacaagcggagaggcagggaccctgagatgggcggaaagccccagcggagaaagaacccccaggaaggactgtataacgaactccagaaagacaagatggccgaagcctacagcgagatcggcatgaagggcgagcggagaagaggcaagggccacgatggcctgtaccagggcctgagcaccgccaccaaggacacctatgacgccctgcacatgcaggccctgcctccaagaagggccaagcgatctggatctggagcaacaaacttctcactactcaaacaagcaggtgacgtggaggagaatcccgggcctactagtatggactggatttggcgcatccttttccttgtcggcgctgctaccggcgcgcattccttcgaacaagttcagcttcaacagcctggcgctgagctggtcaaacctggcgcttctgtgaagatgagctgcaaagccagcggctacgccttcagcagctactggatcaactggatgaagcagaaacccggccagggactcgaatggatcggccaaatctatcccggcgacggcaccgagaacagattcagcgtgaacttccagaaggccgccaagagcttcagcctgaagatcagcgatagccagctgggcgacgccgccatgtacttttgcgcttatagaagcgccgtgaacgcccggctgatgtttggagatggcacacagctggtggtcaagcccaacacgcgtgagcagaaactgatctcggaagaggatctggggagcggcatccagaaccctgatcctgccgtgtaccagctgcgggatagcaagagcagcgacaagagcgtgtgtctgttcaccgacttcgacagccagaccaacgtgtcccagagcaaggactccgacgtgtacatcaccgataagaccgtgctggacatgcggagcatggacttcaagagcaactccgccgtggcctggtccaacaagtccgatttcgcctgcgccaacgccttcaacaacagcattatccccgaggacacattcttcccaagccccgagagcagctgcggtacccagagttttgggttgttggaccctaaattgtgctatctgttggacggaatcctgttcatttacggagtgatcctgaccgcattgttcctgaagagaggccggaagaagctgctgtacatcttcaagcagcctttcatgcggcccgtgcagaccacccaggaagaggacggctgctcctgccggttccccgaggaagaagaaggcggctgcgagctgcgggttaagttttccagatccgcagacgcacccgcttaccaacaagggcagaaccaactctacaatgaacttaatttggggcggagggaagagtacgacgttctggacaaaaggaggggacgagatcccgagatgggcggaaagcctcagcgaaggaagaatccgcaagaggggctttataacgaactccagaaagataaaatggcagaagcctatagtgagattgggatgaagggagaaaggaggaggggtaaaggtcacgatgggttgtaccaaggattgagcacagccactaaagatacctatgatgcgctccacatgcaggccctgccgccaaga

SEQ ID NO: 3554 - DNA, 2901 bp, Artificial Sequence
  Synthetic Polynucloetide
atggccttaccagtgaccgccttgctcctgccgctggccttgctgctccacgccgccaggccggcatgccaggtccagctcgtcgagtccggcggcggcctcgtccaggccggcgactccgtcaccctctcctgcaccgcctccggccgcaccttctcctcctacgccctcgcctggttccgccagcgccccggcaaggagcgcgagttcgtcgccggcctccgctggggcggccccaccaactacgccgactccgtcaaggaccgcttcaccatctccggcgactccgccaagcacaccatgtacctccagatgaactccctcaagcccgaggacaccgccgtctactactgcggctacaaccccggcggctgggccgtcccctcccagtacgagtacgactcctggggccagggcacccaggtcaccgtctcctccggtaccggcggaggcggatctggcggcggaggtagcggtggcggaggatctgaattcgaagccgacatctaccagacacctagatacctggtcatcggcaccggcaagaaaatcaccctggaatgcagccagacaatgggccacgacaagatgtactggtatcagcaggaccccggcatggaactgcacctgatccactacagctacggcgtgaacagcaccgagaagggcgatctgtctagcgagagcaccgtgtccagaatcagaaccgagcacttcccactgacactggaaagcgccagacctagccacaccagccagtacctgtgtgcctcttctgaggccagaggactggccgagttcaccgacacacagtatttcggccctggcaccagactgaccgttctcgagcagagcttcggcctgctggaccccaagctgtgctacctgctggatggcatcctgttcatctacggcgtgatcctgaccgccctgttcctgagagtgaagttcagcagaagcgccgacgcccctgcctaccagcagggacagaaccaactgtacaacgagctgaacctgggcagacgggaagagtacgacgtgctggacaagcggagaggcagggaccctgagatgggcggaaagccccagcggagaaagaacccccaggaaggactgtataacgaactccagaaagacaagatggccgaagcctacagcgagatcggcatgaagggcgagcggagaagaggcaagggccacgatggcctgtaccagggcctgagcaccgccaccaaggacacctatgacgccctgcacatgcaggccctgcctccaagaagggccaagcgatctggatctggagcaacaaacttctcactactcaaacaagcaggtgacgtggaggagaatcccgggcctactagtatggactggatttggcgcatccttttccttgtcggcgctgctaccggcgcgcattccttcgaacaagttcagcttcaacagcctggcgctgagctggtcaaacctggcgcttctgtgaagatgagctgcaaagccagcggctacgccttcagcagctactggatcaactggatgaagcagaaacccggccagggactcgaatggatcggccaaatctatcccggcgacggcaccgagaacagattcagcgtgaacttccagaaggccgccaagagcttcagcctgaagatcagcgatagccagctgggcgacgccgccatgtacttttgcgcttatagaagcgccgtgaacgcccggctgatgtttggagatggcacacagctggtggtcaagcccaacacgcgtcagagttttgggttgttggaccctaaattgtgctatctgttggacggaatcctgttcatttacggagtgatcctgaccgcattgttcctgcgggttaagttttccagatccgcagacgcacccgcttaccaacaagggcagaaccaactctacaatgaacttaatttggggcggagggaagagtacgacgttctggacaaaaggaggggacgagatcccgagatgggcggaaagcctcagcgaaggaagaatccgcaagaggggctttataacgaactccagaaagataaaatggcagaagcctatagtgagattgggatgaagggagaaaggaggaggggtaaaggtcacgatgggttgtaccaaggattgagcacagccactaaagatacctatgatgcgctccacatgcaggccctgccgccaagacgcgccaagagaagcggatctggcgtgaagcagaccctgaatttcgacctgctgaagctggctggcgacgtggaatccaacccaggcccttctagaggccatatgaccgagtacaagcccacggtgcgcctcgccacccgcgacgacgtccccagggccgtacgcaccctcgccgccgcgttcgccgactaccccgccacgcgccacaccgtcgatccggaccgccacatcgagcgggtcaccgagctgcaagaactcttcctcacgcgcgtcgggctcgacatcggcaaggtgtgggtcgcggacgacggcgccgcggtggcggtctggaccacgccggagagcgtcgaagcgggggcggtgttcgccgagatcggcccgcgcatggccgagttgagcggttcccggctggccgcgcagcaacagatggaaggcctcctggcgccgcaccggcccaaggagcccgcgtggttcctggccaccgtcggcgtctcgcccgaccaccagggcaagggtctgggcagcgccgtcgtgctccccggagtggaggcggccgagcgcgccggggtgcccgccttcctggagacctccgcgccccgcaacctccccttctacgagcggctcggcttcaccgtcaccgccgacgtcgaggtgcccgaaggaccgcgcacctggtgcatgacccgcaagcccggtgcctga

SEQ ID NO: 3555 - DNA, 2373 bp, Artificial Sequence
  Synthetic Polynucloetide
atggccttaccagtgaccgccttgctcctgccgctggccttgctgctccacgccgccaggccggcatgccaggtccagctcgtcgagtccggcggcggcctcgtccaggccggcgactccgtcaccctctcctgcaccgcctccggccgcaccttctcctcctacgccctcgcctggttccgccagcgccccggcaaggagcgcgagttcgtcgccggcctccgctggggcggccccaccaactacgccgactccgtcaaggaccgcttcaccatctccggcgactccgccaagcacaccatgtacctccagatgaactccctcaagcccgaggacaccgccgtctactactgcggctacaaccccggcggctgggccgtcccctcccagtacgagtacgactcctggggccagggcacccaggtcaccgtctcctccggtaccggcggaggcggatctggcggcggaggtagcggtggcggaggatctgaattcgaagccgacatctaccagacacctagatacctggtcatcggcaccggcaagaaaatcaccctggaatgcagccagacaatgggccacgacaagatgtactggtatcagcaggaccccggcatggaactgcacctgatccactacagctacggcgtgaacagcaccgagaagggcgatctgtctagcgagagcaccgtgtccagaatcagaaccgagcacttcccactgacactggaaagcgccagacctagccacaccagccagtacctgtgtgcctcttctgaggccagaggactggccgagttcaccgacacacagtatttcggccctggcaccagactgaccgttctcgagggacagcctaaggccaatcctaccgtgacactgttccctccaagcagcgaagaactccaggccaacaaggccacacttgtgtgcctgatctccgacttctaccctggggctgtgacagtggcttggaaggccgatggatctcctgtgaaagccggcgtggaaaccaccaagccatccaagcagagcaacaacaaatacgccgccagctcctacctgagcctgacacctgagcagtggaagtcccacagatcctacagctgccaagtgacccacgaaggcagcaccgtggaaaagacagtggcccctacagagtgcagccccatcaagaccgatgtgattacaatggaccccaaggacaactgctccaaggacgccaacgataccctgctgctccagctgaccaacaccagcgcctactacatgtacttgttgctgctgctgaagtccgtggtgtacttcgccatcatcacatgctgcctgctgcggagaaccgccttctgctgcaacggcgagaagtctagggccaagcgatctggatctggagcaacaaacttctcactactcaaacaagcaggtgacgtggaggagaatcccgggcctactagtatggactggatttggcgcatccttttccttgtcggcgctgctaccggcgcgcattccttcgaacaagttcagcttcaacagcctggcgctgagctggtcaaacctggcgcttctgtgaagatgagctgcaaagccagcggctacgccttcagcagctactggatcaactggatgaagcagaaacccggccagggactcgaatggatcggccaaatctatcccggcgacggcaccgagaacagattcagcgtgaacttccagaaggccgccaagagcttcagcctgaagatcagcgatagccagctgggcgacgccgccatgtacttttgcgcttatagaagcgccgtgaacgcccggctgatgtttggagatggcacacagctggtggtcaagcccaacacgcgtgcctctacaaagggaccctccgtgtttcctctggctcccagcagcaagtctacaagcggaggaacagccgctctgggctgcctggtcaaggattactttcccgagcctgtgaccgtgtcctggaatagcggagcactgacaagcggcgtgcacacctttccagccgtgctgcaaagcagcggcctgtactctctgagcagcgtggtcacagtgcctagctctagcctgggcacccagacctacatctgcaatgtgaaccacaagcctagcaacaccaaggtggacaagagagtggaacccaagagctgtgaagtgaaaaccgactccaccgaccacgtgaagcccaaagagacagagaacaccaagcagcccagcaagagctgccacaagcccaaggccatcgtgcacaccgagaaagtgaacatgatgagcctgaccgtgctgggcctgcggatgctgttcgccaaaaccgtggccgtgaacttcctgctgaccgccaagctgttcttcctc

SEQ ID NO: 3556 - DNA, 2307 bp, Artificial Sequence
  Synthetic Polynucloetide
atggccttaccagtgaccgccttgctcctgccgctggccttgctgctccacgccgccaggccggcatgccaggtccagctcgtcgagtccggcggcggcctcgtccaggccggcgactccgtcaccctctcctgcaccgcctccggccgcaccttctcctcctacgccctcgcctggttccgccagcgccccggcaaggagcgcgagttcgtcgccggcctccgctggggcggccccaccaactacgccgactccgtcaaggaccgcttcaccatctccggcgactccgccaagcacaccatgtacctccagatgaactccctcaagcccgaggacaccgccgtctactactgcggctacaaccccggcggctgggccgtcccctcccagtacgagtacgactcctggggccagggcacccaggtcaccgtctcctccggtaccggcggaggcggatctggcggcggaggtagcggtggcggaggatctgaattcgaagccgacatctaccagacacctagatacctggtcatcggcaccggcaagaaaatcaccctggaatgcagccagacaatgggccacgacaagatgtactggtatcagcaggaccccggcatggaactgcacctgatccactacagctacggcgtgaacagcaccgagaagggcgatctgtctagcgagagcaccgtgtccagaatcagaaccgagcacttcccactgacactggaaagcgccagacctagccacaccagccagtacctgtgtgcctcttctgaggccagaggactggccgagttcaccgacacacagtatttcggccctggcaccagactgaccgttctcgagggacagcctaaggccaatcctaccgtgacactgttccctccaagcagcgaagaactccaggccaacaaggccacacttgtgtgcctgatctccgacttctaccctggggctgtgacagtggcttggaaggccgatggatctcctgtgaaagccggcgtggaaaccaccaagccatccaagcagagcaacaacaaatacgccgccagctcctacctgagcctgacacctgagcagtggaagtcccacagatcctacagctgccaagtgacccacgaaggcagcaccgtggaaaagacagtggcccctacagagtgcagcggcagagccgattgcggcatcaccagcgccagctaccaccagggcgtgctgagcgccaccatcctgtacgagatcctgctgggcaaggccaccctgtacgccgtgctggtgtctgccctggtgctgatggctatggtcaagcggaaggacagccggggaagggccaagcgatctggatctggagcaacaaacttctcactactcaaacaagcaggtgacgtggaggagaatcccgggcctactagtatggactggatttggcgcatccttttccttgtcggcgctgctaccggcgcgcattccttcgaacaagttcagcttcaacagcctggcgctgagctggtcaaacctggcgcttctgtgaagatgagctgcaaagccagcggctacgccttcagcagctactggatcaactggatgaagcagaaacccggccagggactcgaatggatcggccaaatctatcccggcgacggcaccgagaacagattcagcgtgaacttccagaaggccgccaagagcttcagcctgaagatcagcgatagccagctgggcgacgccgccatgtacttttgcgcttatagaagcgccgtgaacgcccggctgatgtttggagatggcacacagctggtggtcaagcccaacacgcgtgcctctacaaagggaccctccgtgtttcctctggctcccagcagcaagtctacaagcggaggaacagccgctctgggctgcctggtcaaggattactttcccgagcctgtgaccgtgtcctggaatagcggagcactgacaagcggcgtgcacacctttccagccgtgctgcaaagcagcggcctgtactctctgagcagcgtggtcacagtgcctagctctagcctgggcacccagacctacatctgcaatgtgaaccacaagcctagcaacaccaaggtggacaagagagtggaacccaagagctgtatccccgaggacacattcttcccaagcagcgacgtgccctgcgacgtgaagctggtggaaaagagcttcgagacagacaccaacctgaacttccagaacctgagcgtgatcggcttcagaatcctgctgctgaaagtggccggctttaacctgctgatgaccctgcggctgtggtccagc

SEQ ID NO: 3557 - DNA, 2307 bp, Artificial Sequence
  Synthetic Polynucloetide
atggccttaccagtgaccgccttgctcctgccgctggccttgctgctccacgccgccaggccggcatgccaggtccagctcgtcgagtccggcggcggcctcgtccaggccggcgactccgtcaccctctcctgcaccgcctccggccgcaccttctcctcctacgccctcgcctggttccgccagcgccccggcaaggagcgcgagttcgtcgccggcctccgctggggcggccccaccaactacgccgactccgtcaaggaccgcttcaccatctccggcgactccgccaagcacaccatgtacctccagatgaactccctcaagcccgaggacaccgccgtctactactgcggctacaaccccggcggctgggccgtcccctcccagtacgagtacgactcctggggccagggcacccaggtcaccgtctcctccggtaccggcggaggcggatctggcggcggaggtagcggtggcggaggatctgaattcgaagccgacatctaccagacacctagatacctggtcatcggcaccggcaagaaaatcaccctggaatgcagccagacaatgggccacgacaagatgtactggtatcagcaggaccccggcatggaactgcacctgatccactacagctacggcgtgaacagcaccgagaagggcgatctgtctagcgagagcaccgtgtccagaatcagaaccgagcacttcccactgacactggaaagcgccagacctagccacaccagccagtacctgtgtgcctcttctgaggccagaggactggccgagttcaccgacacacagtatttcggccctggcaccagactgaccgttctcgagggacagcctaaggccaatcctaccgtgacactgttccctccaagcagcgaagaactccaggccaacaaggccacacttgtgtgcctgatctccgacttctaccctggggctgtgacagtggcttggaaggccgatggatctcctgtgaaagccggcgtggaaaccaccaagccatccaagcagagcaacaacaaatacgccgccagctcctacctgagcctgacacctgagcagtggaagtcccacagatcctacagctgccaagtgacccacgaaggcagcaccgtggaaaagacagtggcccctacagagtgcagcggcagagccgattgcggctttaccagcgagagctaccagcagggcgtgctgagcgccaccatcctgtacgagatcctgctgggcaaggccaccctgtacgccgtgctggtgtctgccctggtgctgatggctatggtcaagcggaaggacagccggggaagggccaagcgatctggatctggagcaacaaacttctcactactcaaacaagcaggtgacgtggaggagaatcccgggcctactagtatggactggatttggcgcatccttttccttgtcggcgctgctaccggcgcgcattccttcgaacaagttcagcttcaacagcctggcgctgagctggtcaaacctggcgcttctgtgaagatgagctgcaaagccagcggctacgccttcagcagctactggatcaactggatgaagcagaaacccggccagggactcgaatggatcggccaaatctatcccggcgacggcaccgagaacagattcagcgtgaacttccagaaggccgccaagagcttcagcctgaagatcagcgatagccagctgggcgacgccgccatgtacttttgcgcttatagaagcgccgtgaacgcccggctgatgtttggagatggcacacagctggtggtcaagcccaacacgcgtgcctctacaaagggaccctccgtgtttcctctggctcccagcagcaagtctacaagcggaggaacagccgctctgggctgcctggtcaaggattactttcccgagcctgtgaccgtgtcctggaatagcggagcactgacaagcggcgtgcacacctttccagccgtgctgcaaagcagcggcctgtactctctgagcagcgtggtcacagtgcctagctctagcctgggcacccagacctacatctgcaatgtgaaccacaagcctagcaacaccaaggtggacaagagagtggaacccaagagctgtatccccgaggacacattcttcccaagccccgagagcagctgcgacgtgaagctggtggaaaagagcttcgagacagacaccaacctgaacttccagaacctgagcgtgatcggcttcagaatcctgctgctgaaagtggccggctttaacctgctgatgaccctgcggctgtggtccagc

SEQ ID NO: 3558 - DNA, 1785 bp, Artificial Sequence
  Synthetic Polynucloetide
atggccttaccagtgaccgccttgctcctgccgctggccttgctgctccacgccgccaggccggcatgccaggtccagctcgtcgagtccggcggcggcctcgtccaggccggcgactccgtcaccctctcctgcaccgcctccggccgcaccttctcctcctacgccctcgcctggttccgccagcgccccggcaaggagcgcgagttcgtcgccggcctccgctggggcggccccaccaactacgccgactccgtcaaggaccgcttcaccatctccggcgactccgccaagcacaccatgtacctccagatgaactccctcaagcccgaggacaccgccgtctactactgcggctacaaccccggcggctgggccgtcccctcccagtacgagtacgactcctggggccagggcacccaggtcaccgtctcctccggtaccggcggaggcggatctggcggcggaggtagcggtggcggaggatctgaattcgaagccgacatctaccagacacctagatacctggtcatcggcaccggcaagaaaatcaccctggaatgcagccagacaatgggccacgacaagatgtactggtatcagcaggaccccggcatggaactgcacctgatccactacagctacggcgtgaacagcaccgagaagggcgatctgtctagcgagagcaccgtgtccagaatcagaaccgagcacttcccactgacactggaaagcgccagacctagccacaccagccagtacctgtgtgcctcttctgaggccagaggactggccgagttcaccgacacacagtatttcggccctggcaccagactgaccgttggcggaggcggaagtggaggcggaggatctggcggcggaggctctcaagttcagcttcaacagcctggcgctgagctggtcaaacctggcgcttctgtgaagatgagctgcaaagccagcggctacgccttcagcagctactggatcaactggatgaagcagaaacccggccagggactcgaatggatcggccaaatctatcccggcgacggcaccgagaacagattcagcgtgaacttccagaaggccgccaagagcttcagcctgaagatcagcgatagccagctgggcgacgccgccatgtacttttgcgcttatagaagcgccgtgaacgcccggctgatgtttggagatggcacacagctggtggtcaagcccaacacgcgtgacggtaacgaggagatgggaggaatcactcaaaccccttacaaagtctcaatttcaggaacaactgttatccttacatgtccccagtatcctggcagcgagatcctttggcagcataacgacaagaatatagggggagatgaagacgataagaatatcggatctgacgaggatcacttgagcctgaaagagttctccgagcttgaacaaagcggatattatgtgtgctatccgcgcgggtcaaagccggaagacgctaacttttacctttatctccgagccagagtgtgcgaaaattgcatggaaatggacgttatgtccgttgctacaatagttatcgtagatatatgcatcacgggtggactgcttctgctggtttattattggtccaagaatagaaaggccaaagctaaacccgtgaccagaggcgctggcgcaggcggaaggcaaaggggacaaaacaaagaacggccaccaccagtgccaaatccagattatgagcctattcggaaaggacagagggacctgtactctggcctgaatcagagaagaatc

SEQ ID NO: 3559 - DNA, 1680 bp, Artificial Sequence
  Synthetic Polynucloetide
atggccttaccagtgaccgccttgctcctgccgctggccttgctgctccacgccgccaggccggcatgccaggtccagctcgtcgagtccggcggcggcctcgtccaggccggcgactccgtcaccctctcctgcaccgcctccggccgcaccttctcctcctacgccctcgcctggttccgccagcgccccggcaaggagcgcgagttcgtcgccggcctccgctggggcggccccaccaactacgccgactccgtcaaggaccgcttcaccatctccggcgactccgccaagcacaccatgtacctccagatgaactccctcaagcccgaggacaccgccgtctactactgcggctacaaccccggcggctgggccgtcccctcccagtacgagtacgactcctggggccagggcacccaggtcaccgtctcctccggtaccggcggaggcggatctggcggcggaggtagcggtggcggaggatctgaattcgaagccgacatctaccagacacctagatacctggtcatcggcaccggcaagaaaatcaccctggaatgcagccagacaatgggccacgacaagatgtactggtatcagcaggaccccggcatggaactgcacctgatccactacagctacggcgtgaacagcaccgagaagggcgatctgtctagcgagagcaccgtgtccagaatcagaaccgagcacttcccactgacactggaaagcgccagacctagccacaccagccagtacctgtgtgcctcttctgaggccagaggactggccgagttcaccgacacacagtatttcggccctggcaccagactgaccgttggcggaggcggaagtggaggcggaggatctggcggcggaggctctcaagttcagcttcaacagcctggcgctgagctggtcaaacctggcgcttctgtgaagatgagctgcaaagccagcggctacgccttcagcagctactggatcaactggatgaagcagaaacccggccagggactcgaatggatcggccaaatctatcccggcgacggcaccgagaacagattcagcgtgaacttccagaaggccgccaagagcttcagcctgaagatcagcgatagccagctgggcgacgccgccatgtacttttgcgcttatagaagcgccgtgaacgcccggctgatgtttggagatggcacacagctggtggtcaagcccaacacgcgtttcaagatccccatcgaggaactggaagatcgggtgttcgtgaactgcaacacctctatcacctgggtggaaggcaccgtgggaacactgctgagcgacatcaccagactggacctcggcaagcggattctggaccctcggggcatctacagatgcaacggcaccgacatctacaaggacaaagaaagcaccgtgcaggtccactacagaatgtgccagtcctgcgtggaactggaccctgctacagtggccggcatcatcgtgaccgatgtgatcgctactctgctgctggctctgggagtgttctgcttcgccggacacgaaacaggcagactgtctggcgctgccgatacacaggccctgctgagaaacgaccaagtgtatcagcccctgcgcgacagagatgatgcccagtattctcacctcggcggcaactgggctagaaacaag

SEQ ID NO: 3560 - DNA, 1710 bp, Artificial Sequence
  Synthetic Polynucloetide
atggccttaccagtgaccgccttgctcctgccgctggccttgctgctccacgccgccaggccggcatgccaggtccagctcgtcgagtccggcggcggcctcgtccaggccggcgactccgtcaccctctcctgcaccgcctccggccgcaccttctcctcctacgccctcgcctggttccgccagcgccccggcaaggagcgcgagttcgtcgccggcctccgctggggcggccccaccaactacgccgactccgtcaaggaccgcttcaccatctccggcgactccgccaagcacaccatgtacctccagatgaactccctcaagcccgaggacaccgccgtctactactgcggctacaaccccggcggctgggccgtcccctcccagtacgagtacgactcctggggccagggcacccaggtcaccgtctcctccggtaccggcggaggcggatctggcggcggaggtagcggtggcggaggatctgaattcgaagccgacatctaccagacacctagatacctggtcatcggcaccggcaagaaaatcaccctggaatgcagccagacaatgggccacgacaagatgtactggtatcagcaggaccccggcatggaactgcacctgatccactacagctacggcgtgaacagcaccgagaagggcgatctgtctagcgagagcaccgtgtccagaatcagaaccgagcacttcccactgacactggaaagcgccagacctagccacaccagccagtacctgtgtgcctcttctgaggccagaggactggccgagttcaccgacacacagtatttcggccctggcaccagactgaccgttggcggaggcggaagtggaggcggaggatctggcggcggaggctctcaagttcagcttcaacagcctggcgctgagctggtcaaacctggcgcttctgtgaagatgagctgcaaagccagcggctacgccttcagcagctactggatcaactggatgaagcagaaacccggccagggactcgaatggatcggccaaatctatcccggcgacggcaccgagaacagattcagcgtgaacttccagaaggccgccaagagcttcagcctgaagatcagcgatagccagctgggcgacgccgccatgtacttttgcgcttatagaagcgccgtgaacgcccggctgatgtttggagatggcacacagctggtggtcaagcccaacacgcgtcagagcatcaagggcaaccacctggtcaaggtgtacgactaccaagaggacggcagcgtgctgctgacatgtgatgccgaggccaagaacatcacctggtttaaggacggcaagatgatcggcttcctgaccgaggacaagaagaagtggaacctgggcagcaacgctaaggaccccagaggcatgtatcagtgcaagggcagccagaacaagagcaagcccctccaggtgtactaccggatgtgccagaactgcatcgagctgaacgccgctaccatcagcggctttctgttcgccgagatcgtgtccatcttcgtgctggccgtgggcgtgtactttatcgctggacaggatggcgtgcggcagagcagagcttccgataagcaaaccctgctgcctaacgaccagctgtaccagcctctgaaggacagagaggacgaccagtacagccacctccagggcaatcagctgagaagaaac

SEQ ID NO: 3561 - DNA, 1659 bp, Artificial Sequence
  Synthetic Polynucloetide
atggccttaccagtgaccgccttgctcctgccgctggccttgctgctccacgccgccaggccggcatgccaggtccagctcgtcgagtccggcggcggcctcgtccaggccggcgactccgtcaccctctcctgcaccgcctccggccgcaccttctcctcctacgccctcgcctggttccgccagcgccccggcaaggagcgcgagttcgtcgccggcctccgctggggcggccccaccaactacgccgactccgtcaaggaccgcttcaccatctccggcgactccgccaagcacaccatgtacctccagatgaactccctcaagcccgaggacaccgccgtctactactgcggctacaaccccggcggctgggccgtcccctcccagtacgagtacgactcctggggccagggcacccaggtcaccgtctcctccggtaccggcggaggcggatctggcggcggaggtagcggtggcggaggatctgaattcgaagccgacatctaccagacacctagatacctggtcatcggcaccggcaagaaaatcaccctggaatgcagccagacaatgggccacgacaagatgtactggtatcagcaggaccccggcatggaactgcacctgatccactacagctacggcgtgaacagcaccgagaagggcgatctgtctagcgagagcaccgtgtccagaatcagaaccgagcacttcccactgacactggaaagcgccagacctagccacaccagccagtacctgtgtgcctcttctgaggccagaggactggccgagttcaccgacacacagtatttcggccctggcaccagactgaccgttggcggaggcggaagtggaggcggaggatctggcggcggaggctctcaagttcagcttcaacagcctggcgctgagctggtcaaacctggcgcttctgtgaagatgagctgcaaagccagcggctacgccttcagcagctactggatcaactggatgaagcagaaacccggccagggactcgaatggatcggccaaatctatcccggcgacggcaccgagaacagattcagcgtgaacttccagaaggccgccaagagcttcagcctgaagatcagcgatagccagctgggcgacgccgccatgtacttttgcgcttatagaagcgccgtgaacgcccggctgatgtttggagatggcacacagctggtggtcaagcccaacacgcgtcagagttttgggttgttggaccctaaattgtgctatctgttggacggaatcctgttcatttacggagtgatcctgaccgcattgttcctgcgggttaagttttccagatccgcagacgcacccgcttaccaacaagggcagaaccaactctacaatgaacttaatttggggcggagggaagagtacgacgttctggacaaaaggaggggacgagatcccgagatgggcggaaagcctcagcgaaggaagaatccgcaagaggggctttataacgaactccagaaagataaaatggcagaagcctatagtgagattgggatgaagggagaaaggaggaggggtaaaggtcacgatgggttgtaccaaggattgagcacagccactaaagatacctatgatgcgctccacatgcaggccctgccgccaaga

SEQ ID NO: 3562 - DNA, 2361 bp, Artificial Sequence
  Synthetic Polynucloetide
atggccttaccagtgaccgccttgctcctgccgctggccttgctgctccacgccgccaggccggcatgccaggtccagctcgtcgagtccggcggcggcctcgtccaggccggcgactccgtcaccctctcctgcaccgcctccggccgcaccttctcctcctacgccctcgcctggttccgccagcgccccggcaaggagcgcgagttcgtcgccggcctccgctggggcggccccaccaactacgccgactccgtcaaggaccgcttcaccatctccggcgactccgccaagcacaccatgtacctccagatgaactccctcaagcccgaggacaccgccgtctactactgcggctacaaccccggcggctgggccgtcccctcccagtacgagtacgactcctggggccagggcacccaggtcaccgtctcctccggtaccggcggaggcggatctggcggcggaggtagcggtggcggaggatctgaattcgaagccgacatctaccagacacctagatacctggtcatcggcaccggcaagaaaatcaccctggaatgcagccagacaatgggccacgacaagatgtactggtatcagcaggaccccggcatggaactgcacctgatccactacagctacggcgtgaacagcaccgagaagggcgatctgtctagcgagagcaccgtgtccagaatcagaaccgagcacttcccactgacactggaaagcgccagacctagccacaccagccagtacctgtgtgcctcttctgaggccagaggactggccgagttcaccgacacacagtatttcggccctggcaccagactgaccgttggcggaggcggaagtggaggcggaggatctggcggcggaggctctcaagttcagcttcaacagcctggcgctgagctggtcaaacctggcgcttctgtgaagatgagctgcaaagccagcggctacgccttcagcagctactggatcaactggatgaagcagaaacccggccagggactcgaatggatcggccaaatctatcccggcgacggcaccgagaacagattcagcgtgaacttccagaaggccgccaagagcttcagcctgaagatcagcgatagccagctgggcgacgccgccatgtacttttgcgcttatagaagcgccgtgaacgcccggctgatgtttggagatggcacacagctggtggtcaagcccaacacgcgtgggagcggcatccagaaccctgatcctgccgtgtaccagctgcgggatagcaagagcagcgacaagagcgtgtgtctgttcaccgacttcgacagccagaccaacgtgtcccagagcaaggactccgacgtgtacatcaccgataagaccgtgctggacatgcggagcatggacttcaagagcaactccgccgtggcctggtccaacaagtccgatttcgcctgcgccaacgccttcaacaacagcattatccccgaggacacattcttcccaagccccgagagcagctgcgacgtgaagctggtggaaaagagcttcgagacagacaccaacctgaacttccagaacctgagcgtgatcggcttcagaatcctgctgctgaaagtggccggctttaacctgctgatgaccctgcggctgtggtccagccgcgccaagagaagcggatctggcgtgaagcagaccctgaatttcgacctgctgaagctggctggcgacgtggaatccaacccaggcccttctagaggccatatgaccgagtacaagcccacggtgcgcctcgccacccgcgacgacgtccccagggccgtacgcaccctcgccgccgcgttcgccgactaccccgccacgcgccacaccgtcgatccggaccgccacatcgagcgggtcaccgagctgcaagaactcttcctcacgcgcgtcgggctcgacatcggcaaggtgtgggtcgcggacgacggcgccgcggtggcggtctggaccacgccggagagcgtcgaagcgggggcggtgttcgccgagatcggcccgcgcatggccgagttgagcggttcccggctggccgcgcagcaacagatggaaggcctcctggcgccgcaccggcccaaggagcccgcgtggttcctggccaccgtcggcgtctcgcccgaccaccagggcaagggtctgggcagcgccgtcgtgctccccggagtggaggcggccgagcgcgccggggtgcccgccttcctggagacctccgcgccccgcaacctccccttctacgagcggctcggcttcaccgtcaccgccgacgtcgaggtgcccgaaggaccgcgcacctggtgcatgacccgcaagcccggtgcctga

SEQ ID NO: 3563 - DNA, 2457 bp, Artificial Sequence
  Synthetic Polynucloetide
atggccttaccagtgaccgccttgctcctgccgctggccttgctgctccacgccgccaggccggcatgccaggtccagctcgtcgagtccggcggcggcctcgtccaggccggcgactccgtcaccctctcctgcaccgcctccggccgcaccttctcctcctacgccctcgcctggttccgccagcgccccggcaaggagcgcgagttcgtcgccggcctccgctggggcggccccaccaactacgccgactccgtcaaggaccgcttcaccatctccggcgactccgccaagcacaccatgtacctccagatgaactccctcaagcccgaggacaccgccgtctactactgcggctacaaccccggcggctgggccgtcccctcccagtacgagtacgactcctggggccagggcacccaggtcaccgtctcctccggtaccggcggaggcggatctggcggcggaggtagcggtggcggaggatctgaattcgaagccgacatctaccagacacctagatacctggtcatcggcaccggcaagaaaatcaccctggaatgcagccagacaatgggccacgacaagatgtactggtatcagcaggaccccggcatggaactgcacctgatccactacagctacggcgtgaacagcaccgagaagggcgatctgtctagcgagagcaccgtgtccagaatcagaaccgagcacttcccactgacactggaaagcgccagacctagccacaccagccagtacctgtgtgcctcttctgaggccagaggactggccgagttcaccgacacacagtatttcggccctggcaccagactgaccgttggcggaggcggaagtggaggcggaggatctggcggcggaggctctcaagttcagcttcaacagcctggcgctgagctggtcaaacctggcgcttctgtgaagatgagctgcaaagccagcggctacgccttcagcagctactggatcaactggatgaagcagaaacccggccagggactcgaatggatcggccaaatctatcccggcgacggcaccgagaacagattcagcgtgaacttccagaaggccgccaagagcttcagcctgaagatcagcgatagccagctgggcgacgccgccatgtacttttgcgcttatagaagcgccgtgaacgcccggctgatgtttggagatggcacacagctggtggtcaagcccaacctcgaggacctgaagaacgtgttcccacctgaggtggccgtgttcgagcctagcgaggccgagatcagccacacccagaaagccaccctcgtgtgcctggctaccggcttctaccccgaccatgtggaactgtcttggtgggtcaacggcaaagaggtgcacagcggcgtgtctaccgacccccagccactgaaagaacagcccgccctgaacgacagccggtactgcctgagcagcagactgagagtgtccgccaccttctggcagaacccccggaaccacttcagatgccaggtgcagttctacggcctgagcgagaacgacgagtggacccaggacagagccaagcccgtgacccagatcgtgtctgccgaagcctggggcagagccgattgcggctttaccagcgagagctaccagcagggcgtgctgagcgccaccatcctgtacgagatcctgctgggcaaggccaccctgtacgccgtgctggtgtctgccctggtgctgatggctatggtcaagcggaaggacagccggggaagggccaagcgatctggatctggagcaacaaacttctcactactcaaacaagcaggtgacgtggaggagaatcccgggcctactagaggccatatgaccgagtacaagcccacggtgcgcctcgccacccgcgacgacgtccccagggccgtacgcaccctcgccgccgcgttcgccgactaccccgccacgcgccacaccgtcgatccggaccgccacatcgagcgggtcaccgagctgcaagaactcttcctcacgcgcgtcgggctcgacatcggcaaggtgtgggtcgcggacgacggcgccgcggtggcggtctggaccacgccggagagcgtcgaagcgggggcggtgttcgccgagatcggcccgcgcatggccgagttgagcggttcccggctggccgcgcagcaacagatggaaggcctcctggcgccgcaccggcccaaggagcccgcgtggttcctggccaccgtcggcgtctcgcccgaccaccagggcaagggtctgggcagcgccgtcgtgctccccggagtggaggcggccgagcgcgccggggtgcccgccttcctggagacctccgcgccccgcaacctccccttctacgagcggctcggcttcaccgtcaccgccgacgtcgaggtgcccgaaggaccgcgcacctggtgcatgacccgcaagcccggtgcctga

SEQ ID NO: 3564 - DNA, 2607 bp, Artificial Sequence
  Synthetic Polynucloetide
atggccttaccagtgaccgccttgctcctgccgctggccttgctgctccacgccgccaggccggcatgccaggtccagctcgtcgagtccggcggcggcctcgtccaggccggcgactccgtcaccctctcctgcaccgcctccggccgcaccttctcctcctacgccctcgcctggttccgccagcgccccggcaaggagcgcgagttcgtcgccggcctccgctggggcggccccaccaactacgccgactccgtcaaggaccgcttcaccatctccggcgactccgccaagcacaccatgtacctccagatgaactccctcaagcccgaggacaccgccgtctactactgcggctacaaccccggcggctgggccgtcccctcccagtacgagtacgactcctggggccagggcacccaggtcaccgtctcctccggtaccggcggaggcggatctggcggcggaggtagcggtggcggaggatctgaattcgaagccgacatctaccagacacctagatacctggtcatcggcaccggcaagaaaatcaccctggaatgcagccagacaatgggccacgacaagatgtactggtatcagcaggaccccggcatggaactgcacctgatccactacagctacggcgtgaacagcaccgagaagggcgatctgtctagcgagagcaccgtgtccagaatcagaaccgagcacttcccactgacactggaaagcgccagacctagccacaccagccagtacctgtgtgcctcttctgaggccagaggactggccgagttcaccgacacacagtatttcggccctggcaccagactgaccgttggcggaggcggaagtggaggcggaggatctggcggcggaggctctcaagttcagcttcaacagcctggcgctgagctggtcaaacctggcgcttctgtgaagatgagctgcaaagccagcggctacgccttcagcagctactggatcaactggatgaagcagaaacccggccagggactcgaatggatcggccaaatctatcccggcgacggcaccgagaacagattcagcgtgaacttccagaaggccgccaagagcttcagcctgaagatcagcgatagccagctgggcgacgccgccatgtacttttgcgcttatagaagcgccgtgaacgcccggctgatgtttggagatggcacacagctggtggtcaagcccaacacgcgtgagcagaaactgatctcggaagaggatctggggagcggcaccccattcccttctctggcccctcccatcatgctgctggtggacggcaagcagcagatggtggtcgtgtgcctggtgctggatgtggccccacctggactggacagccccatctggtttagcgccggcaatggctctgccctggacgcctttacctacggcccaagccctgccaccgatggcacctggacaaatctggcccacctgagcctgcccagcgaggaactggcttcttgggagcctctcgtgtgccacacaggacctggcgctgagggacacagcagatccacccagcctatgcacctgtctggcgaggccagcaccgccagaacctgtcctcaggaacctctgagaggcacccctggcggagcactgtggctgggagtgctgagactgctgctgttcaagctgctgctgtttgacctgctgctgacctgctcctgtctgtgcgatcctgccggccctctgccttctcctgccaccaccacaagactgagagccctgggcagccacagactgcaccctgccacagagacaggcggcagagaggccacaagcagccctagaccccagcccagagacagaagatggggcgataccccccctggcagaaagcctggatctccagtccgcgccaagagaagcggatctggcgtgaagcagaccctgaatttcgacctgctgaagctggctggcgacgtggaatccaacccaggcccttctagatctagaggccatatgaccgagtacaagcccacggtgcgcctcgccacccgcgacgacgtccccagggccgtacgcaccctcgccgccgcgttcgccgactaccccgccacgcgccacaccgtcgatccggaccgccacatcgagcgggtcaccgagctgcaagaactcttcctcacgcgcgtcgggctcgacatcggcaaggtgtgggtcgcggacgacggcgccgcggtggcggtctggaccacgccggagagcgtcgaagcgggggcggtgttcgccgagatcggcccgcgcatggccgagttgagcggttcccggctggccgcgcagcaacagatggaaggcctcctggcgccgcaccggcccaaggagcccgcgtggttcctggccaccgtcggcgtctcgcccgaccaccagggcaagggtctgggcagcgccgtcgtgctccccggagtggaggcggccgagcgcgccggggtgcccgccttcctggagacctccgcgccccgcaacctccccttctacgagcggctcggcttcaccgtcaccgccgacgtcgaggtgcccgaaggaccgcgcacctggtgcatgacccgcaagcccggtgcctga

SEQ ID NO: 3565 - DNA, 2076 bp, Artificial Sequence
  Synthetic Polynucloetide
atggccttaccagtgaccgccttgctcctgccgctggccttgctgctccacgccgccaggccggcatgccaggtccagctcgtcgagtccggcggcggcctcgtccaggccggcgactccgtcaccctctcctgcaccgcctccggccgcaccttctcctcctacgccctcgcctggttccgccagcgccccggcaaggagcgcgagttcgtcgccggcctccgctggggcggccccaccaactacgccgactccgtcaaggaccgcttcaccatctccggcgactccgccaagcacaccatgtacctccagatgaactccctcaagcccgaggacaccgccgtctactactgcggctacaaccccggcggctgggccgtcccctcccagtacgagtacgactcctggggccagggcacccaggtcaccgtctcctccggtaccggcggaggcggatctggcggcggaggtagcggtggcggaggatctgaattcgaagccgacatctaccagacacctagatacctggtcatcggcaccggcaagaaaatcaccctggaatgcagccagacaatgggccacgacaagatgtactggtatcagcaggaccccggcatggaactgcacctgatccactacagctacggcgtgaacagcaccgagaagggcgatctgtctagcgagagcaccgtgtccagaatcagaaccgagcacttcccactgacactggaaagcgccagacctagccacaccagccagtacctgtgtgcctcttctgaggccagaggactggccgagttcaccgacacacagtatttcggccctggcaccagactgaccgttctcgaggacctgaagaacgtgttcccacctgaggtggccgtgttcgagcctagcgaggccgagatcagccacacccagaaagccaccctcgtgtgcctggctaccggcttctaccccgaccatgtggaactgtcttggtgggtcaacggcaaagaggtgcacagcggcgtgtctaccgacccccagccactgaaagaacagcccgccctgaacgacagccggtactgcctgagcagcagactgagagtgtccgccaccttctggcagaacccccggaaccacttcagatgccaggtgcagttctacggcctgagcgagaacgacgagtggacccaggacagagccaagcccgtgacccagatcgtgtctgccgaagcctggggcagagccgattgcggctttaccagcgagagctaccagcagggcgtgctgagcgccaccatcctgtacgagatcctgctgggcaaggccaccctgtacgccgtgctggtgtctgccctggtgctgatggctatggtcaagcggaaggacagccggggaagggccaagcgatctggatctggagcaacaaacttctcactactcaaacaagcaggtgacgtggaggagaatcccgggcctactagaggccatatgaccgagtacaagcccacggtgcgcctcgccacccgcgacgacgtccccagggccgtacgcaccctcgccgccgcgttcgccgactaccccgccacgcgccacaccgtcgatccggaccgccacatcgagcgggtcaccgagctgcaagaactcttcctcacgcgcgtcgggctcgacatcggcaaggtgtgggtcgcggacgacggcgccgcggtggcggtctggaccacgccggagagcgtcgaagcgggggcggtgttcgccgagatcggcccgcgcatggccgagttgagcggttcccggctggccgcgcagcaacagatggaaggcctcctggcgccgcaccggcccaaggagcccgcgtggttcctggccaccgtcggcgtctcgcccgaccaccagggcaagggtctgggcagcgccgtcgtgctccccggagtggaggcggccgagcgcgccggggtgcccgccttcctggagacctccgcgccccgcaacctccccttctacgagcggctcggcttcaccgtcaccgccgacgtcgaggtgcccgaaggaccgcgcacctggtgcatgacccgcaagcccggtgcctga

SEQ ID NO: 3566 - DNA, 1383 bp, Artificial Sequence
  Synthetic Polynucloetide
atggccttaccagtgaccgccttgctcctgccgctggccttgctgctccacgccgccaggccggcatgccaggtccagctcgtcgagtccggcggcggcctcgtccaggccggcgactccgtcaccctctcctgcaccgcctccggccgcaccttctcctcctacgccctcgcctggttccgccagcgccccggcaaggagcgcgagttcgtcgccggcctccgctggggcggccccaccaactacgccgactccgtcaaggaccgcttcaccatctccggcgactccgccaagcacaccatgtacctccagatgaactccctcaagcccgaggacaccgccgtctactactgcggctacaaccccggcggctgggccgtcccctcccagtacgagtacgactcctggggccagggcacccaggtcaccgtctcctccggtaccggcggaggcggatctggcggcggaggtagcggtggcggaggatctgaattcgaagccgacatctaccagacacctagatacctggtcatcggcaccggcaagaaaatcaccctggaatgcagccagacaatgggccacgacaagatgtactggtatcagcaggaccccggcatggaactgcacctgatccactacagctacggcgtgaacagcaccgagaagggcgatctgtctagcgagagcaccgtgtccagaatcagaaccgagcacttcccactgacactggaaagcgccagacctagccacaccagccagtacctgtgtgcctcttctgaggccagaggactggccgagttcaccgacacacagtatttcggccctggcaccagactgaccgttctcgaggacctgaagaacgtgttcccacctgaggtggccgtgttcgagcctagcgaggccgagatcagccacacccagaaagccaccctcgtgtgcctggctaccggcttctaccccgaccatgtggaactgtcttggtgggtcaacggcaaagaggtgcacagcggcgtgtctaccgacccccagccactgaaagaacagcccgccctgaacgacagccggtactgcctgagcagcagactgagagtgtccgccaccttctggcagaacccccggaaccacttcagatgccaggtgcagttctacggcctgagcgagaacgacgagtggacccaggacagagccaagcccgtgacccagatcgtgtctgccgaagcctggggcagagccgattgcggctttaccagcgagagctaccagcagggcgtgctgagcgccaccatcctgtacgagatcctgctgggcaaggccaccctgtacgccgtgctggtgtctgccctggtgctgatggctatggtcaagcggaaggacagccgggga

SEQ ID NO: 3567 - DNA, 1326 bp, Artificial Sequence
  Synthetic Polynucloetide
atggactggatttggcgcatccttttccttgtcggcgctgctaccggcgcgcattccttcgaacaagttcagcttcaacagcctggcgctgagctggtcaaacctggcgcttctgtgaagatgagctgcaaagccagcggctacgccttcagcagctactggatcaactggatgaagcagaaacccggccagggactcgaatggatcggccaaatctatcccggcgacggcaccgagaacagattcagcgtgaacttccagaaggccgccaagagcttcagcctgaagatcagcgatagccagctgggcgacgccgccatgtacttttgcgcttatagaagcgccgtgaacgcccggctgatgtttggagatggcacacagctggtggtcaagcccaacacgcgtatccagaaccctgatcctgccgtgtaccagctgcgggatagcaagagcagcgacaagagcgtgtgtctgttcaccgacttcgacagccagaccaacgtgtcccagagcaaggactccgacgtgtacatcaccgataagaccgtgctggacatgcggagcatggacttcaagagcaactccgccgtggcctggtccaacaagtccgatttcgcctgcgccaacgccttcaacaacagcattatccccgaggacacattcttcccaagccccgagagcagctgcgacgtgaagctggtggaaaagagcttcgagacagacaccaacctgaacttccagaacctgagcgtgatcggcttcagaatcctgctgctgaaagtggccggctttaacctgctgatgaccctgcggctgtggtccagccgcgccaagagaagcggatctggcgtgaagcagaccctgaatttcgacctgctgaagctggctggcgacgtggaatccaacccaggcccttctagaggccatatggccaagcctttgtctcaagaagaatccaccctcattgaaagagcaacggctacaatcaacagcatccccatctctgaagactacagcgtcgccagcgcagctctctctagcgacggccgcatcttcactggtgtcaatgtatatcattttactgggggaccttgtgcagaactcgtggtgctgggcactgctgctgctgcggcagctggcaacctgacttgtatcgtcgcgatcggaaatgagaacaggggcatcttgagcccctgcggacggtgccgacaggtgcttctcgatctgcatcctgggatcaaagccatagtgaaggacagtgatggacagccgacggcagttgggattcgtgaattgctgccctctggttatgtgtgggagggctga

SEQ ID NO: 3568 - DNA, 825 bp, Artificial Sequence
  Synthetic Polynucloetide
atggactggatttggcgcatccttttccttgtcggcgctgctaccggcgcgcattccttcgaacaagttcagcttcaacagcctggcgctgagctggtcaaacctggcgcttctgtgaagatgagctgcaaagccagcggctacgccttcagcagctactggatcaactggatgaagcagaaacccggccagggactcgaatggatcggccaaatctatcccggcgacggcaccgagaacagattcagcgtgaacttccagaaggccgccaagagcttcagcctgaagatcagcgatagccagctgggcgacgccgccatgtacttttgcgcttatagaagcgccgtgaacgcccggctgatgtttggagatggcacacagctggtggtcaagcccaacacgcgtatccagaaccctgatcctgccgtgtaccagctgcgggatagcaagagcagcgacaagagcgtgtgtctgttcaccgacttcgacagccagaccaacgtgtcccagagcaaggactccgacgtgtacatcaccgataagaccgtgctggacatgcggagcatggacttcaagagcaactccgccgtggcctggtccaacaagtccgatttcgcctgcgccaacgccttcaacaacagcattatccccgaggacacattcttcccaagccccgagagcagctgcgacgtgaagctggtggaaaagagcttcgagacagacaccaacctgaacttccagaacctgagcgtgatcggcttcagaatcctgctgctgaaagtggccggctttaacctgctgatgaccctgcggctgtggtccagc

SEQ ID NO: 3569 - DNA, 2130 bp, Artificial Sequence
  Synthetic Polynucloetide
atggccttaccagtgaccgccttgctcctgccgctggccttgctgctccacgccgccaggccggcatgccaggtccagctcgtcgagtccggcggcggcctcgtccaggccggcgactccgtcaccctctcctgcaccgcctccggccgcaccttctcctcctacgccctcgcctggttccgccagcgccccggcaaggagcgcgagttcgtcgccggcctccgctggggcggccccaccaactacgccgactccgtcaaggaccgcttcaccatctccggcgactccgccaagcacaccatgtacctccagatgaactccctcaagcccgaggacaccgccgtctactactgcggctacaaccccggcggctgggccgtcccctcccagtacgagtacgactcctggggccagggcacccaggtcaccgtctcctccggtaccggcggaggcggatctggcggcggaggtagcggtggcggaggatctgaattcgaagccgacatctaccagacacctagatacctggtcatcggcaccggcaagaaaatcaccctggaatgcagccagacaatgggccacgacaagatgtactggtatcagcaggaccccggcatggaactgcacctgatccactacagctacggcgtgaacagcaccgagaagggcgatctgtctagcgagagcaccgtgtccagaatcagaaccgagcacttcccactgacactggaaagcgccagacctagccacaccagccagtacctgtgtgcctcttctgaggccagaggactggccgagttcaccgacacacagtatttcggccctggcaccagactgaccgttctcgaggggaaaccaattcccaaccctcttctgggactggattcaaccggcagcggcgaggacctgaagaacgtgttcccacctgaggtggccgtgttcgagcctagcgaggccgagatcagccacacccagaaagccaccctcgtgtgcctggctaccggcttctaccccgaccatgtggaactgtcttggtgggtcaacggcaaagaggtgcacagcggcgtgtgtaccgacccccagccactgaaagaacagcccgccctgaacgacagccggtactgcctgagcagcagactgagagtgtccgccaccttctggcagaacccccggaaccacttcagatgccaggtgcagttctacggcctgagcgagaacgacgagtggacccaggacagagccaagcccgtgacccagatcgtgtctgccgaagcctggggcagagccgattgcggctttaccagcgagagctaccagcagggcgtgctgagcgccaccatcctgtacgagatcctgctgggcaaggccaccctgtacgccgtgctggtgtctgccctggtgctgatggctatggtcaagcggaaggacagccggggaagggccaagcgatctggatctggagcaacaaacttctcactactcaaacaagcaggtgacgtggaggagaatcccgggcctactagaggccatatgaccgagtacaagcccacggtgcgcctcgccacccgcgacgacgtccccagggccgtacgcaccctcgccgccgcgttcgccgactaccccgccacgcgccacaccgtcgatccggaccgccacatcgagcgggtcaccgagctgcaagaactcttcctcacgcgcgtcgggctcgacatcggcaaggtgtgggtcgcggacgacggcgccgcggtggcggtctggaccacgccggagagcgtcgaagcgggggcggtgttcgccgagatcggcccgcgcatggccgagttgagcggttcccggctggccgcgcagcaacagatggaaggcctcctggcgccgcaccggcccaaggagcccgcgtggttcctggccaccgtcggcgtctcgcccgaccaccagggcaagggtctgggcagcgccgtcgtgctccccggagtggaggcggccgagcgcgccggggtgcccgccttcctggagacctccgcgccccgcaacctccccttctacgagcggctcggcttcaccgtcaccgccgacgtcgaggtgcccgaaggaccgcgcacctggtgcatgacccgcaagcccggtgcctga

SEQ ID NO: 3570 - DNA, 1440 bp, Artificial Sequence
  Synthetic Polynucloetide
atggccttaccagtgaccgccttgctcctgccgctggccttgctgctccacgccgccaggccggcatgccaggtccagctcgtcgagtccggcggcggcctcgtccaggccggcgactccgtcaccctctcctgcaccgcctccggccgcaccttctcctcctacgccctcgcctggttccgccagcgccccggcaaggagcgcgagttcgtcgccggcctccgctggggcggccccaccaactacgccgactccgtcaaggaccgcttcaccatctccggcgactccgccaagcacaccatgtacctccagatgaactccctcaagcccgaggacaccgccgtctactactgcggctacaaccccggcggctgggccgtcccctcccagtacgagtacgactcctggggccagggcacccaggtcaccgtctcctccggtaccggcggaggcggatctggcggcggaggtagcggtggcggaggatctgaattcgaagccgacatctaccagacacctagatacctggtcatcggcaccggcaagaaaatcaccctggaatgcagccagacaatgggccacgacaagatgtactggtatcagcaggaccccggcatggaactgcacctgatccactacagctacggcgtgaacagcaccgagaagggcgatctgtctagcgagagcaccgtgtccagaatcagaaccgagcacttcccactgacactggaaagcgccagacctagccacaccagccagtacctgtgtgcctcttctgaggccagaggactggccgagttcaccgacacacagtatttcggccctggcaccagactgaccgttctcgaggggaaaccaattcccaaccctcttctgggactggattcaaccggcagcggcgaggacctgaagaacgtgttcccacctgaggtggccgtgttcgagcctagcgaggccgagatcagccacacccagaaagccaccctcgtgtgcctggctaccggcttctaccccgaccatgtggaactgtcttggtgggtcaacggcaaagaggtgcacagcggcgtgtgtaccgacccccagccactgaaagaacagcccgccctgaacgacagccggtactgcctgagcagcagactgagagtgtccgccaccttctggcagaacccccggaaccacttcagatgccaggtgcagttctacggcctgagcgagaacgacgagtggacccaggacagagccaagcccgtgacccagatcgtgtctgccgaagcctggggcagagccgattgcggctttaccagcgagagctaccagcagggcgtgctgagcgccaccatcctgtacgagatcctgctgggcaaggccaccctgtacgccgtgctggtgtctgccctggtgctgatggctatggtcaagcggaaggacagccggggatga

SEQ ID NO: 3571 - DNA, 1362 bp, Artificial Sequence
  Synthetic Polynucloetide
atggactggatttggcgcatccttttccttgtcggcgctgctaccggcgcgcattccttcgaacaagttcagcttcaacagcctggcgctgagctggtcaaacctggcgcttctgtgaagatgagctgcaaagccagcggctacgccttcagcagctactggatcaactggatgaagcagaaacccggccagggactcgaatggatcggccaaatctatcccggcgacggcaccgagaacagattcagcgtgaacttccagaaggccgccaagagcttcagcctgaagatcagcgatagccagctgggcgacgccgccatgtacttttgcgcttatagaagcgccgtgaacgcccggctgatgtttggagatggcacacagctggtggtcaagcccaacacgcgtgagcagaaactgatctcggaagaggatgggagcggcatccagaaccctgatcctgccgtgtaccagctgcgggatagcaagagcagcgacaagagcgtgtgtctgttcaccgacttcgacagccagaccaacgtgtcccagagcaaggactccgacgtgtacatcaccgataagtgcgtgctggacatgcggagcatggacttcaagagcaactccgccgtggcctggtccaacaagtccgatttcgcctgcgccaacgccttcaacaacagcattatccccgaggacacattcttcccaagccccgagagcagctgcgacgtgaagctggtggaaaagagcttcgagacagacaccaacctgaacttccagaacctgagcgtgatcggcttcagaatcctgctgctgaaagtggccggctttaacctgctgatgaccctgcggctgtggtccagccgcgccaagagaagcggatctggcgtgaagcagaccctgaatttcgacctgctgaagctggctggcgacgtggaatccaacccaggcccttctagaggccatatggccaagcctttgtctcaagaagaatccaccctcattgaaagagcaacggctacaatcaacagcatccccatctctgaagactacagcgtcgccagcgcagctctctctagcgacggccgcatcttcactggtgtcaatgtatatcattttactgggggaccttgtgcagaactcgtggtgctgggcactgctgctgctgcggcagctggcaacctgacttgtatcgtcgcgatcggaaatgagaacaggggcatcttgagcccctgcggacggtgccgacaggtgcttctcgatctgcatcctgggatcaaagccatagtgaaggacagtgatggacagccgacggcagttgggattcgtgaattgctgccctctggttatgtgtgggagggctga

SEQ ID NO: 3572 - DNA, 864 bp, Artificial Sequence
  Synthetic Polynucloetide
atggactggatttggcgcatccttttccttgtcggcgctgctaccggcgcgcattccttcgaacaagttcagcttcaacagcctggcgctgagctggtcaaacctggcgcttctgtgaagatgagctgcaaagccagcggctacgccttcagcagctactggatcaactggatgaagcagaaacccggccagggactcgaatggatcggccaaatctatcccggcgacggcaccgagaacagattcagcgtgaacttccagaaggccgccaagagcttcagcctgaagatcagcgatagccagctgggcgacgccgccatgtacttttgcgcttatagaagcgccgtgaacgcccggctgatgtttggagatggcacacagctggtggtcaagcccaacacgcgtgagcagaaactgatctcggaagaggatgggagcggcatccagaaccctgatcctgccgtgtaccagctgcgggatagcaagagcagcgacaagagcgtgtgtctgttcaccgacttcgacagccagaccaacgtgtcccagagcaaggactccgacgtgtacatcaccgataagtgcgtgctggacatgcggagcatggacttcaagagcaactccgccgtggcctggtccaacaagtccgatttcgcctgcgccaacgccttcaacaacagcattatccccgaggacacattcttcccaagccccgagagcagctgcgacgtgaagctggtggaaaagagcttcgagacagacaccaacctgaacttccagaacctgagcgtgatcggcttcagaatcctgctgctgaaagtggccggctttaacctgctgatgaccctgcggctgtggtccagctga

SEQ ID NO: 3573 - DNA, 2361 bp, Artificial Sequence
  Synthetic Polynucloetide
atggccttaccagtgaccgccttgctcctgccgctggccttgctgctccacgccgccaggccggcatgccaggtccagctcgtcgagtccggcggcggcctcgtccaggccggcgactccgtcaccctctcctgcaccgcctccggccgcaccttctcctcctacgccctcgcctggttccgccagcgccccggcaaggagcgcgagttcgtcgccggcctccgctggggcggccccaccaactacgccgactccgtcaaggaccgcttcaccatctccggcgactccgccaagcacaccatgtacctccagatgaactccctcaagcccgaggacaccgccgtctactactgcggctacaaccccggcggctgggccgtcccctcccagtacgagtacgactcctggggccagggcacccaggtcaccgtctcctccggtaccggcggaggcggatctggcggcggaggtagcggtggcggaggatctgaattcgaagccgacatctaccagacacctagatacctggtcatcggcaccggcaagaaaatcaccctggaatgcagccagacaatgggccacgacaagatgtactggtatcagcaggaccccggcatggaactgcacctgatccactacagctacggcgtgaacagcaccgagaagggcgatctgtctagcgagagcaccgtgtccagaatcagaaccgagcacttcccactgacactggaaagcgccagacctagccacaccagccagtacctgtgtgcctcttctgaggccagaggactggccgagttcaccgacacacagtatttcggccctggcaccagactgaccgttggcggaggcggaagtggaggcggaggatctggcggcggaggctctcaagttcagcttcaacagcctggcgctgagctggtcaaacctggcgcttctgtgaagatgagctgcaaagccagcggctacgccttcagcagctactggatcaactggatgaagcagaaacccggccagggactcgaatggatcggccaaatctatcccggcgacggcaccgagaacagattcagcgtgaacttccagaaggccgccaagagcttcagcctgaagatcagcgatagccagctgggcgacgccgccatgtacttttgcgcttatagaagcgccgtgaacgcccggctgatgtttggagatggcacacagctggtggtcaagcccaacacgcgtgggagcggcatccagaaccctgatcctgccgtgtaccagctgcgggatagcaagagcagcgacaagagcgtgtgtctgttcaccgacttcgacagccagaccaacgtgtcccagagcaaggactccgacgtgtacatcaccgataagaccgtgctggacatgcggagcatggacttcaagagcaactccgccgtggcctggtccaacaagtccgatttcgcctgcgccaacgccttcaacaacagcattatccccgaggacacattcttcccaagcagcgacgtgccctgcgacgtgaagctggtggaaaagagcttcgagacagacaccaacctgaacttccagaacctgagcgtgatcggcttcagaatcctgctgctgaaagtggccggctttaacctgctgatgaccctgcggctgtggtccagccgcgccaagagaagcggatctggcgtgaagcagaccctgaatttcgacctgctgaagctggctggcgacgtggaatccaacccaggcccttctagaggccatatgaccgagtacaagcccacggtgcgcctcgccacccgcgacgacgtccccagggccgtacgcaccctcgccgccgcgttcgccgactaccccgccacgcgccacaccgtcgatccggaccgccacatcgagcgggtcaccgagctgcaagaactcttcctcacgcgcgtcgggctcgacatcggcaaggtgtgggtcgcggacgacggcgccgcggtggcggtctggaccacgccggagagcgtcgaagcgggggcggtgttcgccgagatcggcccgcgcatggccgagttgagcggttcccggctggccgcgcagcaacagatggaaggcctcctggcgccgcaccggcccaaggagcccgcgtggttcctggccaccgtcggcgtctcgcccgaccaccagggcaagggtctgggcagcgccgtcgtgctccccggagtggaggcggccgagcgcgccggggtgcccgccttcctggagacctccgcgccccgcaacctccccttctacgagcggctcggcttcaccgtcaccgccgacgtcgaggtgcccgaaggaccgcgcacctggtgcatgacccgcaagcccggtgcctga

SEQ ID NO: 3574 - DNA, 2457 bp, Artificial Sequence
  Synthetic Polynucloetide
atggccttaccagtgaccgccttgctcctgccgctggccttgctgctccacgccgccaggccggcatgccaggtccagctcgtcgagtccggcggcggcctcgtccaggccggcgactccgtcaccctctcctgcaccgcctccggccgcaccttctcctcctacgccctcgcctggttccgccagcgccccggcaaggagcgcgagttcgtcgccggcctccgctggggcggccccaccaactacgccgactccgtcaaggaccgcttcaccatctccggcgactccgccaagcacaccatgtacctccagatgaactccctcaagcccgaggacaccgccgtctactactgcggctacaaccccggcggctgggccgtcccctcccagtacgagtacgactcctggggccagggcacccaggtcaccgtctcctccggtaccggcggaggcggatctggcggcggaggtagcggtggcggaggatctgaattcgaagccgacatctaccagacacctagatacctggtcatcggcaccggcaagaaaatcaccctggaatgcagccagacaatgggccacgacaagatgtactggtatcagcaggaccccggcatggaactgcacctgatccactacagctacggcgtgaacagcaccgagaagggcgatctgtctagcgagagcaccgtgtccagaatcagaaccgagcacttcccactgacactggaaagcgccagacctagccacaccagccagtacctgtgtgcctcttctgaggccagaggactggccgagttcaccgacacacagtatttcggccctggcaccagactgaccgttggcggaggcggaagtggaggcggaggatctggcggcggaggctctcaagttcagcttcaacagcctggcgctgagctggtcaaacctggcgcttctgtgaagatgagctgcaaagccagcggctacgccttcagcagctactggatcaactggatgaagcagaaacccggccagggactcgaatggatcggccaaatctatcccggcgacggcaccgagaacagattcagcgtgaacttccagaaggccgccaagagcttcagcctgaagatcagcgatagccagctgggcgacgccgccatgtacttttgcgcttatagaagcgccgtgaacgcccggctgatgtttggagatggcacacagctggtggtcaagcccaacctcgaggacctgaagaacgtgttcccacctgaggtggccgtgttcgagcctagcaaggccgagatcgcccacacccagaaagccaccctcgtgtgcctggctaccggcttctaccccgaccatgtggaactgtcttggtgggtcaacggcaaagaggtgcacagcggcgtgtctaccgacccccagccactgaaagaacagcccgccctgaacgacagccggtactgcctgagcagcagactgagagtgtccgccaccttctggcagaacccccggaaccacttcagatgccaggtgcagttctacggcctgagcgagaacgacgagtggacccaggacagagccaagcccgtgacccagatcgtgtctgccgaagcctggggcagagccgattgcggcatcaccagcgccagctaccaccagggcgtgctgagcgccaccatcctgtacgagatcctgctgggcaaggccaccctgtacgccgtgctggtgtctgccctggtgctgatggctatggtcaagcggaaggacagccggggaagggccaagcgatctggatctggagcaacaaacttctcactactcaaacaagcaggtgacgtggaggagaatcccgggcctactagaggccatatgaccgagtacaagcccacggtgcgcctcgccacccgcgacgacgtccccagggccgtacgcaccctcgccgccgcgttcgccgactaccccgccacgcgccacaccgtcgatccggaccgccacatcgagcgggtcaccgagctgcaagaactcttcctcacgcgcgtcgggctcgacatcggcaaggtgtgggtcgcggacgacggcgccgcggtggcggtctggaccacgccggagagcgtcgaagcgggggcggtgttcgccgagatcggcccgcgcatggccgagttgagcggttcccggctggccgcgcagcaacagatggaaggcctcctggcgccgcaccggcccaaggagcccgcgtggttcctggccaccgtcggcgtctcgcccgaccaccagggcaagggtctgggcagcgccgtcgtgctccccggagtggaggcggccgagcgcgccggggtgcccgccttcctggagacctccgcgccccgcaacctccccttctacgagcggctcggcttcaccgtcaccgccgacgtcgaggtgcccgaaggaccgcgcacctggtgcatgacccgcaagcccggtgcctga

SEQ ID NO: 3575 - DNA, 3411 bp, Artificial Sequence
  Synthetic Polynucloetide
atggccttaccagtgaccgccttgctcctgccgctggccttgctgctccacgccgccaggccggcatgccaggtccagctcgtcgagtccggcggcggcctcgtccaggccggcgactccgtcaccctctcctgcaccgcctccggccgcaccttctcctcctacgccctcgcctggttccgccagcgccccggcaaggagcgcgagttcgtcgccggcctccgctggggcggccccaccaactacgccgactccgtcaaggaccgcttcaccatctccggcgactccgccaagcacaccatgtacctccagatgaactccctcaagcccgaggacaccgccgtctactactgcggctacaaccccggcggctgggccgtcccctcccagtacgagtacgactcctggggccagggcacccaggtcaccgtctcctccggtaccggcggaggcggatctggcggcggaggtagcggtggcggaggatctgaattcgaagccgacatctaccagacacctagatacctggtcatcggcaccggcaagaaaatcaccctggaatgcagccagacaatgggccacgacaagatgtactggtatcagcaggaccccggcatggaactgcacctgatccactacagctacggcgtgaacagcaccgagaagggcgatctgtctagcgagagcaccgtgtccagaatcagaaccgagcacttcccactgacactggaaagcgccagacctagccacaccagccagtacctgtgtgcctcttctgaggccagaggactggccgagttcaccgacacacagtatttcggccctggcaccagactgaccgttctcgagatccagaaccctgatcctgccgtgtaccagctgcgggatagcaagagcagcgacaagagcgtgtgtctgttcaccgacttcgacagccagaccaacgtgtcccagagcaaggactccgacgtgtacatcaccgataagtgcgtgctggacatgcggagcatggacttcaagagcaactccgccgtggcctggtccaacaagtccgatttcgcctgcgccaacgccttcaacaacagcattatccccgaggacacattcttcccaagcagcgacgtgccctgcgacgtgaagctggtggaaaagagcttcgagacagacaccaacctgaacttccagaacctgagcgtgatcggcttcagaatcctgctgctgaaagtggccggctttaacctgctgatgaccctgcggctgtggtccagccgcgccaagagaagcggatctggcgtgaagcagaccctgaatttcgacctgctgaagctggctggcgacgtggaatccaacccaggccctactagtatggactggatttggcgcatccttttccttgtcggcgctgctaccggcgcccattccgggccccaggttcagctgcaagagtctggcggaggacttgctcaagctggcggaagcctgagactgtcttgtgccgcctctggcagaaccttcagcatgggctggtttagacaggcccctggcaaagagagagagttcgtcgccgccatcacatacagcggcggcagcccttactacgcctcttctgtcagaggccggttcaccatcagccgggacaacgccaagaacaccgtgtacctccagatgaacagcctgaagccagaggacaccgccgtgtactactgtgccgccaatccaacctacggcagcgactggaatgccgagaattggggccagggcacccaagtgacagtgtctagtggatccggcggcggaggatctggcggaggcggatctgggggcggaggctctttcgaacaagttcagcttcaacagcctggcgctgagctggtcaaacctggcgcttctgtgaagatgagctgcaaagccagcggctacgccttcagcagctactggatcaactggatgaagcagaaacccggccagggactcgaatggatcggccaaatctatcccggcgacggcaccgagaacagattcagcgtgaacttccagaaggccgccaagagcttcagcctgaagatcagcgatagccagctgggcgacgccgccatgtacttttgcgcttatagaagcgccgtgaacgcccggctgatgtttggagatggcacacagctggtggtcaagcccaacacgcgtgaggacctgaagaacgtgttcccacctgaggtggccgtgttcgagcctagcaaggccgagatcgcccacacccagaaagccaccctcgtgtgcctggctaccggcttctaccccgaccatgtggaactgtcttggtgggtcaacggcaaagaggtgcacagcggcgtgtgtaccgacccccagccactgaaagaacagcccgccctgaacgacagccggtactgcctgagcagcagactgagagtgtccgccaccttctggcagaacccccggaaccacttcagatgccaggtgcagttctacggcctgagcgagaacgacgagtggacccaggacagagccaagcccgtgacccagatcgtgtctgccgaagcctggggcagagccgattgcggcatcaccagcgccagctaccaccagggcgtgctgagcgccaccatcctgtacgagatcctgctgggcaaggccaccctgtacgccgtgctggtgtctgccctggtgctgatggctatggtcaagcggaaggacagccggggaagggccaagcgatctggatctggagcaacaaacttctcactactcaaacaagcaggtgacgtggaggagaatcccgggccttctagaggccatatgaccgagtacaagcccacggtgcgcctcgccacccgcgacgacgtccccagggccgtacgcaccctcgccgccgcgttcgccgactaccccgccacgcgccacaccgtcgatccggaccgccacatcgagcgggtcaccgagctgcaagaactcttcctcacgcgcgtcgggctcgacatcggcaaggtgtgggtcgcggacgacggcgccgcggtggcggtctggaccacgccggagagcgtcgaagcgggggcggtgttcgccgagatcggcccgcgcatggccgagttgagcggttcccggctggccgcgcagcaacagatggaaggcctcctggcgccgcaccggcccaaggagcccgcgtggttcctggccaccgtcggcgtctcgcccgaccaccagggcaagggtctgggcagcgccgtcgtgctccccggagtggaggcggccgagcgcgccggggtgcccgccttcctggagacctccgcgccccgcaacctccccttctacgagcggctcggcttcaccgtcaccgccgacgtcgaggtgcccgaaggaccgcgcacctggtgcatgacccgcaagcccggtgcctga

SEQ ID NO: 3576 - DNA, 3408 bp, Artificial Sequence
  Synthetic Polynucloetide
atggccttaccagtgaccgccttgctcctgccgctggccttgctgctccacgccgccaggccggcatgccaggtccagctcgtcgagtccggcggcggcctcgtccaggccggcgactccgtcaccctctcctgcaccgcctccggccgcaccttctcctcctacgccctcgcctggttccgccagcgccccggcaaggagcgcgagttcgtcgccggcctccgctggggcggccccaccaactacgccgactccgtcaaggaccgcttcaccatctccggcgactccgccaagcacaccatgtacctccagatgaactccctcaagcccgaggacaccgccgtctactactgcggctacaaccccggcggctgggccgtcccctcccagtacgagtacgactcctggggccagggcacccaggtcaccgtctcctccggtaccggcggaggcggatctggcggcggaggtagcggtggcggaggatctgaattcgaagccgacatctaccagacacctagatacctggtcatcggcaccggcaagaaaatcaccctggaatgcagccagacaatgggccacgacaagatgtactggtatcagcaggaccccggcatggaactgcacctgatccactacagctacggcgtgaacagcaccgagaagggcgatctgtctagcgagagcaccgtgtccagaatcagaaccgagcacttcccactgacactggaaagcgccagacctagccacaccagccagtacctgtgtgcctcttctgaggccagaggactggccgagttcaccgacacacagtatttcggccctggcaccagactgaccgttctcgaggacctgaagaacgtgttcccacctgaggtggccgtgttcgagcctagcaaggccgagatcgcccacacccagaaagccaccctcgtgtgcctggctaccggcttctaccccgaccatgtggaactgtcttggtgggtcaacggcaaagaggtgcacagcggcgtgtgtaccgacccccagccactgaaagaacagcccgccctgaacgacagccggtactgcctgagcagcagactgagagtgtccgccaccttctggcagaacccccggaaccacttcagatgccaggtgcagttctacggcctgagcgagaacgacgagtggacccaggacagagccaagcccgtgacccagatcgtgtctgccgaagcctggggcagagccgattgcggcatcaccagcgccagctaccaccagggcgtgctgagcgccaccatcctgtacgagatcctgctgggcaaggccaccctgtacgccgtgctggtgtctgccctggtgctgatggctatggtcaagcggaaggacagccggggaagggccaagcgatctggatctggagcaacaaacttctcactactcaaacaagcaggtgacgtggaggagaatcccgggcctactagtatggactggatttggcgcatccttttccttgtcggcgctgctaccggcgcccattccgggccccaggttcagctgcaagagtctggcggaggacttgctcaagctggcggaagcctgagactgtcttgtgccgcctctggcagaaccttcagcatgggctggtttagacaggcccctggcaaagagagagagttcgtcgccgccatcacatacagcggcggcagcccttactacgcctcttctgtcagaggccggttcaccatcagccgggacaacgccaagaacaccgtgtacctccagatgaacagcctgaagccagaggacaccgccgtgtactactgtgccgccaatccaacctacggcagcgactggaatgccgagaattggggccagggcacccaagtgacagtgtctagtggatccggcggcggaggatctggcggaggcggatctgggggcggaggctctttcgaacaagttcagcttcaacagcctggcgctgagctggtcaaacctggcgcttctgtgaagatgagctgcaaagccagcggctacgccttcagcagctactggatcaactggatgaagcagaaacccggccagggactcgaatggatcggccaaatctatcccggcgacggcaccgagaacagattcagcgtgaacttccagaaggccgccaagagcttcagcctgaagatcagcgatagccagctgggcgacgccgccatgtacttttgcgcttatagaagcgccgtgaacgcccggctgatgtttggagatggcacacagctggtggtcaagcccaacacgcgtatccagaaccctgatcctgccgtgtaccagctgcgggatagcaagagcagcgacaagagcgtgtgtctgttcaccgacttcgacagccagaccaacgtgtcccagagcaaggactccgacgtgtacatcaccgataagtgcgtgctggacatgcggagcatggacttcaagagcaactccgccgtggcctggtccaacaagtccgatttcgcctgcgccaacgccttcaacaacagcattatccccgaggacacattcttcccaagcagcgacgtgccctgcgacgtgaagctggtggaaaagagcttcgagacagacaccaacctgaacttccagaacctgagcgtgatcggcttcagaatcctgctgctgaaagtggccggctttaacctgctgatgaccctgcggctgtggtccagccgcgccaagagaagcggatctggcgtgaagcagaccctgaatttcgacctgctgaagctggctggcgacgtggaatccaacccaggcccttctagaggccatatgaccgagtacaagcccacggtgcgcctcgccacccgcgacgacgtccccagggccgtacgcaccctcgccgccgcgttcgccgactaccccgccacgcgccacaccgtcgatccggaccgccacatcgagcgggtcaccgagctgcaagaactcttcctcacgcgcgtcgggctcgacatcggcaaggtgtgggtcgcggacgacggcgccgcggtggcggtctggaccacgccggagagcgtcgaagcgggggcggtgttcgccgagatcggcccgcgcatggccgagttgagcggttcccggctggccgcgcagcaacagatggaaggcctcctggcgccgcaccggcccaaggagcccgcgtggttcctggccaccgtcggcgtctcgcccgaccaccagggcaagggtctgggcagcgccgtcgtgctccccggagtggaggcggccgagcgcgccggggtgcccgccttcctggagacctccgcgccccgcaacctccccttctacgagcggctcggcttcaccgtcaccgccgacgtcgaggtgcccgaaggaccgcgcacctggtgcatgacccgcaagcccggtgcctga

SEQ ID NO: 3577 - DNA, 3408 bp, Artificial Sequence
  Synthetic Polynucloetide
atggccttaccagtgaccgccttgctcctgccgctggccttgctgctccacgccgccaggccggcatgccaggtccagctcgtcgagtccggcggcggcctcgtccaggccggcgactccgtcaccctctcctgcaccgcctccggccgcaccttctcctcctacgccctcgcctggttccgccagcgccccggcaaggagcgcgagttcgtcgccggcctccgctggggcggccccaccaactacgccgactccgtcaaggaccgcttcaccatctccggcgactccgccaagcacaccatgtacctccagatgaactccctcaagcccgaggacaccgccgtctactactgcggctacaaccccggcggctgggccgtcccctcccagtacgagtacgactcctggggccagggcacccaggtcaccgtctcctccggtaccggcggaggcggatctggcggcggaggtagcggtggcggaggatctgaattcgaagccgacatctaccagacacctagatacctggtcatcggcaccggcaagaaaatcaccctggaatgcagccagacaatgggccacgacaagatgtactggtatcagcaggaccccggcatggaactgcacctgatccactacagctacggcgtgaacagcaccgagaagggcgatctgtctagcgagagcaccgtgtccagaatcagaaccgagcacttcccactgacactggaaagcgccagacctagccacaccagccagtacctgtgtgcctcttctgaggccagaggactggccgagttcaccgacacacagtatttcggccctggcaccagactgaccgttctcgaggacctgaagaacgtgttcccacctgaggtggccgtgttcgagcctagcgaggccgagatcagccacacccagaaagccaccctcgtgtgcctggctaccggcttctaccccgaccatgtggaactgtcttggtgggtcaacggcaaagaggtgcacagcggcgtgtgtaccgacccccagccactgaaagaacagcccgccctgaacgacagccggtactgcctgagcagcagactgagagtgtccgccaccttctggcagaacccccggaaccacttcagatgccaggtgcagttctacggcctgagcgagaacgacgagtggacccaggacagagccaagcccgtgacccagatcgtgtctgccgaagcctggggcagagccgattgcggctttaccagcgagagctaccagcagggcgtgctgagcgccaccatcctgtacgagatcctgctgggcaaggccaccctgtacgccgtgctggtgtctgccctggtgctgatggctatggtcaagcggaaggacagccggggaagggccaagcgatctggatctggagcaacaaacttctcactactcaaacaagcaggtgacgtggaggagaatcccgggcctactagtatggactggatttggcgcatccttttccttgtcggcgctgctaccggcgcccattccgggccccaggttcagctgcaagagtctggcggaggacttgctcaagctggcggaagcctgagactgtcttgtgccgcctctggcagaaccttcagcatgggctggtttagacaggcccctggcaaagagagagagttcgtcgccgccatcacatacagcggcggcagcccttactacgcctcttctgtcagaggccggttcaccatcagccgggacaacgccaagaacaccgtgtacctccagatgaacagcctgaagccagaggacaccgccgtgtactactgtgccgccaatccaacctacggcagcgactggaatgccgagaattggggccagggcacccaagtgacagtgtctagtggatccggcggcggaggatctggcggaggcggatctgggggcggaggctctttcgaacaagttcagcttcaacagcctggcgctgagctggtcaaacctggcgcttctgtgaagatgagctgcaaagccagcggctacgccttcagcagctactggatcaactggatgaagcagaaacccggccagggactcgaatggatcggccaaatctatcccggcgacggcaccgagaacagattcagcgtgaacttccagaaggccgccaagagcttcagcctgaagatcagcgatagccagctgggcgacgccgccatgtacttttgcgcttatagaagcgccgtgaacgcccggctgatgtttggagatggcacacagctggtggtcaagcccaacacgcgtatccagaaccctgatcctgccgtgtaccagctgcgggatagcaagagcagcgacaagagcgtgtgtctgttcaccgacttcgacagccagaccaacgtgtcccagagcaaggactccgacgtgtacatcaccgataagtgcgtgctggacatgcggagcatggacttcaagagcaactccgccgtggcctggtccaacaagtccgatttcgcctgcgccaacgccttcaacaacagcattatccccgaggacacattcttcccaagccccgagagcagctgcgacgtgaagctggtggaaaagagcttcgagacagacaccaacctgaacttccagaacctgagcgtgatcggcttcagaatcctgctgctgaaagtggccggctttaacctgctgatgaccctgcggctgtggtccagccgcgccaagagaagcggatctggcgtgaagcagaccctgaatttcgacctgctgaagctggctggcgacgtggaatccaacccaggcccttctagaggccatatgaccgagtacaagcccacggtgcgcctcgccacccgcgacgacgtccccagggccgtacgcaccctcgccgccgcgttcgccgactaccccgccacgcgccacaccgtcgatccggaccgccacatcgagcgggtcaccgagctgcaagaactcttcctcacgcgcgtcgggctcgacatcggcaaggtgtgggtcgcggacgacggcgccgcggtggcggtctggaccacgccggagagcgtcgaagcgggggcggtgttcgccgagatcggcccgcgcatggccgagttgagcggttcccggctggccgcgcagcaacagatggaaggcctcctggcgccgcaccggcccaaggagcccgcgtggttcctggccaccgtcggcgtctcgcccgaccaccagggcaagggtctgggcagcgccgtcgtgctccccggagtggaggcggccgagcgcgccggggtgcccgccttcctggagacctccgcgccccgcaacctccccttctacgagcggctcggcttcaccgtcaccgccgacgtcgaggtgcccgaaggaccgcgcacctggtgcatgacccgcaagcccggtgcctga

SEQ ID NO: 3578 - DNA, 2706 bp, Artificial Sequence
  Synthetic Polynucloetide
atggccttaccagtgaccgccttgctcctgccgctggccttgctgctccacgccgccaggccggcatgccaggtccagctcgtcgagtccggcggcggcctcgtccaggccggcgactccgtcaccctctcctgcaccgcctccggccgcaccttctcctcctacgccctcgcctggttccgccagcgccccggcaaggagcgcgagttcgtcgccggcctccgctggggcggccccaccaactacgccgactccgtcaaggaccgcttcaccatctccggcgactccgccaagcacaccatgtacctccagatgaactccctcaagcccgaggacaccgccgtctactactgcggctacaaccccggcggctgggccgtcccctcccagtacgagtacgactcctggggccagggcacccaggtcaccgtctcctccggtaccggcggaggcggatctggcggcggaggtagcggtggcggaggatctgaattcgaagccgacatctaccagacacctagatacctggtcatcggcaccggcaagaaaatcaccctggaatgcagccagacaatgggccacgacaagatgtactggtatcagcaggaccccggcatggaactgcacctgatccactacagctacggcgtgaacagcaccgagaagggcgatctgtctagcgagagcaccgtgtccagaatcagaaccgagcacttcccactgacactggaaagcgccagacctagccacaccagccagtacctgtgtgcctcttctgaggccagaggactggccgagttcaccgacacacagtatttcggccctggcaccagactgaccgttctcgaggacctgaagaacgtgttcccacctgaggtggccgtgttcgagcctagcgaggccgagatcagccacacccagaaagccaccctcgtgtgcctggctaccggcttctaccccgaccatgtggaactgtcttggtgggtcaacggcaaagaggtgcacagcggcgtgtgtaccgacccccagccactgaaagaacagcccgccctgaacgacagccggtactgcctgagcagcagactgagagtgtccgccaccttctggcagaacccccggaaccacttcagatgccaggtgcagttctacggcctgagcgagaacgacgagtggacccaggacagagccaagcccgtgacccagatcgtgtctgccgaagcctggggcagagccgattgcggctttaccagcgagagctaccagcagggcgtgctgagcgccaccatcctgtacgagatcctgctgggcaaggccaccctgtacgccgtgctggtgtctgccctggtgctgatggctatggtcaagcggaaggacagccggggaagggccaagcgatctggatctggagcaacaaacttctcactactcaaacaagcaggtgacgtggaggagaatcccgggcctactagtatggactggatttggcgcatccttttccttgtcggcgctgctaccggcgcccattccgggccccaggttcagctgcaagagtctggcggaggacttgctcaagctggcggaagcctgagactgtcttgtgccgcctctggcagaaccttcagcatgggctggtttagacaggcccctggcaaagagagagagttcgtcgccgccatcacatacagcggcggcagcccttactacgcctcttctgtcagaggccggttcaccatcagccgggacaacgccaagaacaccgtgtacctccagatgaacagcctgaagccagaggacaccgccgtgtactactgtgccgccaatccaacctacggcagcgactggaatgccgagaattggggccagggcacccaagtgacagtgtctagtggatccggcggcggaggatctggcggaggcggatctgggggcggaggctctttcgaacaagttcagcttcaacagcctggcgctgagctggtcaaacctggcgcttctgtgaagatgagctgcaaagccagcggctacgccttcagcagctactggatcaactggatgaagcagaaacccggccagggactcgaatggatcggccaaatctatcccggcgacggcaccgagaacagattcagcgtgaacttccagaaggccgccaagagcttcagcctgaagatcagcgatagccagctgggcgacgccgccatgtacttttgcgcttatagaagcgccgtgaacgcccggctgatgtttggagatggcacacagctggtggtcaagcccaacacgcgtatccagaaccctgatcctgccgtgtaccagctgcgggatagcaagagcagcgacaagagcgtgtgtctgttcaccgacttcgacagccagaccaacgtgtcccagagcaaggactccgacgtgtacatcaccgataagtgcgtgctggacatgcggagcatggacttcaagagcaactccgccgtggcctggtccaacaagtccgatttcgcctgcgccaacgccttcaacaacagcattatccccgaggacacattcttcccaagccccgagagcagctgcgacgtgaagctggtggaaaagagcttcgagacagacaccaacctgaacttccagaacctgagcgtgatcggcttcagaatcctgctgctgaaagtggccggctttaacctgctgatgaccctgcggctgtggtccagc

SEQ ID NO: 3579 - DNA, 3381 bp, Artificial Sequence
  Synthetic Polynucloetide
atggccttaccagtgaccgccttgctcctgccgctggccttgctgctccacgccgccaggccggcatgccaggtccagctcgtcgagtccggcggcggcctcgtccaggccggcgactccgtcaccctctcctgcaccgcctccggccgcaccttctcctcctacgccctcgcctggttccgccagcgccccggcaaggagcgcgagttcgtcgccggcctccgctggggcggccccaccaactacgccgactccgtcaaggaccgcttcaccatctccggcgactccgccaagcacaccatgtacctccagatgaactccctcaagcccgaggacaccgccgtctactactgcggctacaaccccggcggctgggccgtcccctcccagtacgagtacgactcctggggccagggcacccaggtcaccgtctcctccggtaccggcggaggcggatctggcggcggaggtagcggtggcggaggatctgaattcgaagccgacatctaccagacacctagatacctggtcatcggcaccggcaagaaaatcaccctggaatgcagccagacaatgggccacgacaagatgtactggtatcagcaggaccccggcatggaactgcacctgatccactacagctacggcgtgaacagcaccgagaagggcgatctgtctagcgagagcaccgtgtccagaatcagaaccgagcacttcccactgacactggaaagcgccagacctagccacaccagccagtacctgtgtgcctcttctgaggccagaggactggccgagttcaccgacacacagtatttcggccctggcaccagactgaccgttctcgaggacctgaagaacgtgttcccacctgaggtggccgtgttcgagcctagcgaggccgagatcagccacacccagaaagccaccctcgtgtgcctggctaccggcttctaccccgaccatgtggaactgtcttggtgggtcaacggcaaagaggtgcacagcggcgtgtgtaccgacccccagccactgaaagaacagcccgccctgaacgacagccggtactgcctgagcagcagactgagagtgtccgccaccttctggcagaacccccggaaccacttcagatgccaggtgcagttctacggcctgagcgagaacgacgagtggacccaggacagagccaagcccgtgacccagatcgtgtctgccgaagcctggggcagagccgattgcggctttaccagcgagagctaccagcagggcgtgctgagcgccaccatcctgtacgagatcctgctgggcaaggccaccctgtacgccgtgctggtgtctgccctggtgctgatggctatggtcaagcggaaggacagccggggaagggccaagcgatctggatctggagcaacaaacttctcactactcaaacaagcaggtgacgtggaggagaatcccgggcctactagtatggactggatttggcgcatccttttccttgtcggcgctgctaccggcgcccattccgggccccaggttcagctgcaagagtctggcggaggacttgctcaagctggcggaagcctgagactgtcttgtgccgcctctggcagaaccttcagcatgggctggtttagacaggcccctggcaaagagagagagttcgtcgccgccatcacatacagcggcggcagcccttactacgcctcttctgtcagaggccggttcaccatcagccgggacaacgccaagaacaccgtgtacctccagatgaacagcctgaagccagaggacaccgccgtgtactactgtgccgccaatccaacctacggcagcgactggaatgccgagaattggggccagggcacccaagtgacagtgtctagtggatccggcggcggaggatctggcggaggcggatctgggggcggaggctctttcgaacaagttcagcttcaacagcctggcgctgagctggtcaaacctggcgcttctgtgaagatgagctgcaaagccagcggctacgccttcagcagctactggatcaactggatgaagcagaaacccggccagggactcgaatggatcggccaaatctatcccggcgacggcaccgagaacagattcagcgtgaacttccagaaggccgccaagagcttcagcctgaagatcagcgatagccagctgggcgacgccgccatgtacttttgcgcttatagaagcgccgtgaacgcccggctgatgtttggagatggcacacagctggtggtcaagcccaacacgcgtatccagaaccctgatcctgccgtgtaccagctgcgggatagcaagagcagcgacaagagcgtgtgtctgttcaccgacttcgacagccagaccaacgtgtcccagagcaaggactccgacgtgtacatcaccgataagtgcgtgctggacatgcggagcatggacttcaagagcaactccgccgtggcctggtccaacaagtccgatttcgcctgcgccaacgccttcaacaacagcattatccccgaggacacattcttcccaagccccgagagcagctgcgacgtgaagctggtggaaaagagcttcgagacagacaccaacctgaacttccagaacctgagcgtgatcggcttcagaatcctgctgctgaaagtggccggctttaacctgctgatgaccctgcggctgtggtccagccgcgccaagagaagcggatctggcgtgaagcagaccctgaatttcgacctgctgaagctggctggcgacgtggaatccaacccaggcccttctagaggcgggatccacaccatggctacctacgaggtgctgtgcgaggtggcaagaaagctgggcaccgacgacagagaagtggtgctgttcctgctgaacgtgttcatccctcagcctacactggcccagctgatcggtgcactgagagccctgaaagaggaaggccggctgacctttcctctgctggccgaatgcctgttcagagccggaagaagggatctgctgcgggacctgctgcatctggaccccagatttctggaaagacacctggccggcaccatgagctacttcagcccttaccagctgaccgtgctgcacgttgacggcgaactgtgcgccagagatattcggagcctgatcttcctgagcaaggacaccatcggcagccggtctacccctcagacatttctgcactgggtgtactgcatggaaaacctggacctgctcggccccacagatgtggatgccctgatgtccatgctgagaagcctgagcagagtggacctccagagacaggtgcagacactgatgggactgcacctgagcggacctagccacagccagcactacagacacacccct

SEQ ID NO: 3580 - DNA, 2718 bp, Artificial Sequence
  Synthetic Polynucloetide
atggccttaccagtgaccgccttgctcctgccgctggccttgctgctccacgccgccaggccggcatgccaggtccagctcgtcgagtccggcggcggcctcgtccaggccggcgactccgtcaccctctcctgcaccgcctccggccgcaccttctcctcctacgccctcgcctggttccgccagcgccccggcaaggagcgcgagttcgtcgccggcctccgctggggcggccccaccaactacgccgactccgtcaaggaccgcttcaccatctccggcgactccgccaagcacaccatgtacctccagatgaactccctcaagcccgaggacaccgccgtctactactgcggctacaaccccggcggctgggccgtcccctcccagtacgagtacgactcctggggccagggcacccaggtcaccgtctcctccggtaccggcggaggcggatctggcggcggaggtagcggtggcggaggatctgaattcgaagccgacatctaccagacacctagatacctggtcatcggcaccggcaagaaaatcaccctggaatgcagccagacaatgggccacgacaagatgtactggtatcagcaggaccccggcatggaactgcacctgatccactacagctacggcgtgaacagcaccgagaagggcgatctgtctagcgagagcaccgtgtccagaatcagaaccgagcacttcccactgacactggaaagcgccagacctagccacaccagccagtacctgtgtgcctcttctgaggccagaggactggccgagttcaccgacacacagtatttcggccctggcaccagactgaccgttctcgagatccagaaccctgatcctgccgtgtaccagctgcgggatagcaagagcagcgacaagagcgtgtgtctgttcaccgacttcgacagccagaccaacgtgtcccagagcaaggactccgacgtgtacatcaccgataagtgcgtgctggacatgcggagcatggacttcaagagcaactccgccgtggcctggtccaacaagtccgatttcgcctgcgccaacgccttcaacaacagcattatccccgaggacacattcttcccaagccccgagagcagctgcgacgtgaagctggtggaaaagagcttcgagacagacaccaacctgaacttccagaacctgagcgtgatcggcttcagaatcctgctgctgaaagtggccggctttaacctgctgatgaccctgcggctgtggtccagccgcgccaagagaagcggatctggcgtgaagcagaccctgaatttcgacctgctgaagctggctggcgacgtggaatccaacccaggccctactagtatggactggatttggcgcatccttttccttgtcggcgctgctaccggcgcccattccgggccccaggttcagctgcaagagtctggcggaggacttgctcaagctggcggaagcctgagactgtcttgtgccgcctctggcagaaccttcagcatgggctggtttagacaggcccctggcaaagagagagagttcgtcgccgccatcacatacagcggcggcagcccttactacgcctcttctgtcagaggccggttcaccatcagccgggacaacgccaagaacaccgtgtacctccagatgaacagcctgaagccagaggacaccgccgtgtactactgtgccgccaatccaacctacggcagcgactggaatgccgagaattggggccagggcacccaagtgacagtgtctagtggatccggcggcggaggatctggcggaggcggatctgggggcggaggctctttcgaacaagttcagcttcaacagcctggcgctgagctggtcaaacctggcgcttctgtgaagatgagctgcaaagccagcggctacgccttcagcagctactggatcaactggatgaagcagaaacccggccagggactcgaatggatcggccaaatctatcccggcgacggcaccgagaacagattcagcgtgaacttccagaaggccgccaagagcttcagcctgaagatcagcgatagccagctgggcgacgccgccatgtacttttgcgcttatagaagcgccgtgaacgcccggctgatgtttggagatggcacacagctggtggtcaagcccaacacgcgtgaggacctgaagaacgtgttcccacctgaggtggccgtgttcgagcctagcgaggccgagatcagccacacccagaaagccaccctcgtgtgcctggctaccggcttctaccccgaccatgtggaactgtcttggtgggtcaacggcaaagaggtgcacagcggcgtgtgtaccgacccccagccactgaaagaacagcccgccctgaacgacagccggtactgcctgagcagcagactgagagtgtccgccaccttctggcagaacccccggaaccacttcagatgccaggtgcagttctacggcctgagcgagaacgacgagtggacccaggacagagccaagcccgtgacccagatcgtgtctgccgaagcctggggcagagccgattgcggctttaccagcgagagctaccagcagggcgtgctgagcgccaccatcctgtacgagatcctgctgggcaaggccaccctgtacgccgtgctggtgtctgccctggtgctgatggctatggtcaagcggaaggacagccgggga

SEQ ID NO: 3581 - DNA, 3384 bp, Artificial Sequence
  Synthetic Polynucloetide
atggccttaccagtgaccgccttgctcctgccgctggccttgctgctccacgccgccaggccggcatgccaggtccagctcgtcgagtccggcggcggcctcgtccaggccggcgactccgtcaccctctcctgcaccgcctccggccgcaccttctcctcctacgccctcgcctggttccgccagcgccccggcaaggagcgcgagttcgtcgccggcctccgctggggcggccccaccaactacgccgactccgtcaaggaccgcttcaccatctccggcgactccgccaagcacaccatgtacctccagatgaactccctcaagcccgaggacaccgccgtctactactgcggctacaaccccggcggctgggccgtcccctcccagtacgagtacgactcctggggccagggcacccaggtcaccgtctcctccggtaccggcggaggcggatctggcggcggaggtagcggtggcggaggatctgaattcgaagccgacatctaccagacacctagatacctggtcatcggcaccggcaagaaaatcaccctggaatgcagccagacaatgggccacgacaagatgtactggtatcagcaggaccccggcatggaactgcacctgatccactacagctacggcgtgaacagcaccgagaagggcgatctgtctagcgagagcaccgtgtccagaatcagaaccgagcacttcccactgacactggaaagcgccagacctagccacaccagccagtacctgtgtgcctcttctgaggccagaggactggccgagttcaccgacacacagtatttcggccctggcaccagactgaccgttctcgagatccagaaccctgatcctgccgtgtaccagctgcgggatagcaagagcagcgacaagagcgtgtgtctgttcaccgacttcgacagccagaccaacgtgtcccagagcaaggactccgacgtgtacatcaccgataagtgcgtgctggacatgcggagcatggacttcaagagcaactccgccgtggcctggtccaacaagtccgatttcgcctgcgccaacgccttcaacaacagcattatccccgaggacacattcttcccaagccccgagagcagctgcgacgtgaagctggtggaaaagagcttcgagacagacaccaacctgaacttccagaacctgagcgtgatcggcttcagaatcctgctgctgaaagtggccggctttaacctgctgatgaccctgcggctgtggtccagccgcgccaagagaagcggatctggcgtgaagcagaccctgaatttcgacctgctgaagctggctggcgacgtggaatccaacccaggccctactagtatggactggatttggcgcatccttttccttgtcggcgctgctaccggcgcccattccgggccccaggttcagctgcaagagtctggcggaggacttgctcaagctggcggaagcctgagactgtcttgtgccgcctctggcagaaccttcagcatgggctggtttagacaggcccctggcaaagagagagagttcgtcgccgccatcacatacagcggcggcagcccttactacgcctcttctgtcagaggccggttcaccatcagccgggacaacgccaagaacaccgtgtacctccagatgaacagcctgaagccagaggacaccgccgtgtactactgtgccgccaatccaacctacggcagcgactggaatgccgagaattggggccagggcacccaagtgacagtgtctagtggatccggcggcggaggatctggcggaggcggatctgggggcggaggctctttcgaacaagttcagcttcaacagcctggcgctgagctggtcaaacctggcgcttctgtgaagatgagctgcaaagccagcggctacgccttcagcagctactggatcaactggatgaagcagaaacccggccagggactcgaatggatcggccaaatctatcccggcgacggcaccgagaacagattcagcgtgaacttccagaaggccgccaagagcttcagcctgaagatcagcgatagccagctgggcgacgccgccatgtacttttgcgcttatagaagcgccgtgaacgcccggctgatgtttggagatggcacacagctggtggtcaagcccaacacgcgtgaggacctgaagaacgtgttcccacctgaggtggccgtgttcgagcctagcgaggccgagatcagccacacccagaaagccaccctcgtgtgcctggctaccggcttctaccccgaccatgtggaactgtcttggtgggtcaacggcaaagaggtgcacagcggcgtgtgtaccgacccccagccactgaaagaacagcccgccctgaacgacagccggtactgcctgagcagcagactgagagtgtccgccaccttctggcagaacccccggaaccacttcagatgccaggtgcagttctacggcctgagcgagaacgacgagtggacccaggacagagccaagcccgtgacccagatcgtgtctgccgaagcctggggcagagccgattgcggctttaccagcgagagctaccagcagggcgtgctgagcgccaccatcctgtacgagatcctgctgggcaaggccaccctgtacgccgtgctggtgtctgccctggtgctgatggctatggtcaagcggaaggacagccggggaagggccaagcgatctggatctggagcaacaaacttctcactactcaaacaagcaggtgacgtggaggagaatcccgggccttctagaggcgggatccacaccatggctacctacgaggtgctgtgcgaggtggcaagaaagctgggcaccgacgacagagaagtggtgctgttcctgctgaacgtgttcatccctcagcctacactggcccagctgatcggtgcactgagagccctgaaagaggaaggccggctgacctttcctctgctggccgaatgcctgttcagagccggaagaagggatctgctgcgggacctgctgcatctggaccccagatttctggaaagacacctggccggcaccatgagctacttcagcccttaccagctgaccgtgctgcacgttgacggcgaactgtgcgccagagatattcggagcctgatcttcctgagcaaggacaccatcggcagccggtctacccctcagacatttctgcactgggtgtactgcatggaaaacctggacctgctcggccccacagatgtggatgccctgatgtccatgctgagaagcctgagcagagtggacctccagagacaggtgcagacactgatgggactgcacctgagcggacctagccacagccagcactacagacacacccct

SEQ ID NO: 3582 - DNA, 3408 bp, Artificial Sequence
  Synthetic Polynucloetide
atggccttaccagtgaccgccttgctcctgccgctggccttgctgctccacgccgccaggccggcatgccaggtccagctcgtcgagtccggcggcggcctcgtccaggccggcgactccgtcaccctctcctgcaccgcctccggccgcaccttctcctcctacgccctcgcctggttccgccagcgccccggcaaggagcgcgagttcgtcgccggcctccgctggggcggccccaccaactacgccgactccgtcaaggaccgcttcaccatctccggcgactccgccaagcacaccatgtacctccagatgaactccctcaagcccgaggacaccgccgtctactactgcggctacaaccccggcggctgggccgtcccctcccagtacgagtacgactcctggggccagggcacccaggtcaccgtctcctccggtaccggcggaggcggatctggcggcggaggtagcggtggcggaggatctgaattcgaagccgacatctaccagacacctagatacctggtcatcggcaccggcaagaaaatcaccctggaatgcagccagacaatgggccacgacaagatgtactggtatcagcaggaccccggcatggaactgcacctgatccactacagctacggcgtgaacagcaccgagaagggcgatctgtctagcgagagcaccgtgtccagaatcagaaccgagcacttcccactgacactggaaagcgccagacctagccacaccagccagtacctgtgtgcctcttctgaggccagaggactggccgagttcaccgacacacagtatttcggccctggcaccagactgaccgttctcgaggacctgaagaacgtgttcccacctgaggtggccgtgttcgagcctagcgaggccgagatcagccacacccagaaagccaccctcgtgtgcctggctaccggcttctaccccgaccatgtggaactgtcttggtgggtcaacggcaaagaggtgcacagcggcgtgtctaccgacccccagccactgaaagaacagcccgccctgaacgacagccggtactgcctgagcagcagactgagagtgtccgccaccttctggcagaacccccggaaccacttcagatgccaggtgcagttctacggcctgagcgagaacgacgagtggacccaggacagagccaagcccgtgacccagatcgtgtctgccgaagcctggggcagagccgattgcggctttaccagcgagagctaccagcagggcgtgctgagcgccaccatcctgtacgagatcctgctgggcaaggccaccctgtacgccgtgctggtgtctgccctggtgctgatggctatggtcaagcggaaggacagccggggaagggccaagcgatctggatctggagcaacaaacttctcactactcaaacaagcaggtgacgtggaggagaatcccgggcctactagtatggactggatttggcgcatccttttccttgtcggcgctgctaccggcgcccattccgggccccaggttcagctgcaagagtctggcggaggacttgctcaagctggcggaagcctgagactgtcttgtgccgcctctggcagaaccttcagcatgggctggtttagacaggcccctggcaaagagagagagttcgtcgccgccatcacatacagcggcggcagcccttactacgcctcttctgtcagaggccggttcaccatcagccgggacaacgccaagaacaccgtgtacctccagatgaacagcctgaagccagaggacaccgccgtgtactactgtgccgccaatccaacctacggcagcgactggaatgccgagaattggggccagggcacccaagtgacagtgtctagtggatccggcggcggaggatctggcggaggcggatctgggggcggaggctctttcgaacaagttcagcttcaacagcctggcgctgagctggtcaaacctggcgcttctgtgaagatgagctgcaaagccagcggctacgccttcagcagctactggatcaactggatgaagcagaaacccggccagggactcgaatggatcggccaaatctatcccggcgacggcaccgagaacagattcagcgtgaacttccagaaggccgccaagagcttcagcctgaagatcagcgatagccagctgggcgacgccgccatgtacttttgcgcttatagaagcgccgtgaacgcccggctgatgtttggagatggcacacagctggtggtcaagcccaacacgcgtatccagaaccctgatcctgccgtgtaccagctgcgggatagcaagagcagcgacaagagcgtgtgtctgttcaccgacttcgacagccagaccaacgtgtcccagagcaaggactccgacgtgtacatcaccgataagaccgtgctggacatgcggagcatggacttcaagagcaactccgccgtggcctggtccaacaagtccgatttcgcctgcgccaacgccttcaacaacagcattatccccgaggacacattcttcccaagccccgagagcagctgcgacgtgaagctggtggaaaagagcttcgagacagacaccaacctgaacttccagaacctgagcgtgatcggcttcagaatcctgctgctgaaagtggccggctttaacctgctgatgaccctgcggctgtggtccagccgcgccaagagaagcggatctggcgtgaagcagaccctgaatttcgacctgctgaagctggctggcgacgtggaatccaacccaggcccttctagaggccatatgaccgagtacaagcccacggtgcgcctcgccacccgcgacgacgtccccagggccgtacgcaccctcgccgccgcgttcgccgactaccccgccacgcgccacaccgtcgatccggaccgccacatcgagcgggtcaccgagctgcaagaactcttcctcacgcgcgtcgggctcgacatcggcaaggtgtgggtcgcggacgacggcgccgcggtggcggtctggaccacgccggagagcgtcgaagcgggggcggtgttcgccgagatcggcccgcgcatggccgagttgagcggttcccggctggccgcgcagcaacagatggaaggcctcctggcgccgcaccggcccaaggagcccgcgtggttcctggccaccgtcggcgtctcgcccgaccaccagggcaagggtctgggcagcgccgtcgtgctccccggagtggaggcggccgagcgcgccggggtgcccgccttcctggagacctccgcgccccgcaacctccccttctacgagcggctcggcttcaccgtcaccgccgacgtcgaggtgcccgaaggaccgcgcacctggtgcatgacccgcaagcccggtgcctga

SEQ ID NO: 3583 - DNA, 3654 bp, Artificial Sequence
  Synthetic Polynucloetide
atggccttaccagtgaccgccttgctcctgccgctggccttgctgctccacgccgccaggccggcatgccaggtccagctcgtcgagtccggcggcggcctcgtccaggccggcgactccgtcaccctctcctgcaccgcctccggccgcaccttctcctcctacgccctcgcctggttccgccagcgccccggcaaggagcgcgagttcgtcgccggcctccgctggggcggccccaccaactacgccgactccgtcaaggaccgcttcaccatctccggcgactccgccaagcacaccatgtacctccagatgaactccctcaagcccgaggacaccgccgtctactactgcggctacaaccccggcggctgggccgtcccctcccagtacgagtacgactcctggggccagggcacccaggtcaccgtctcctccggtaccggcggaggcggatctggcggcggaggtagcggtggcggaggatctgaattcgaagccgacatctaccagacacctagatacctggtcatcggcaccggcaagaaaatcaccctggaatgcagccagacaatgggccacgacaagatgtactggtatcagcaggaccccggcatggaactgcacctgatccactacagctacggcgtgaacagcaccgagaagggcgatctgtctagcgagagcaccgtgtccagaatcagaaccgagcacttcccactgacactggaaagcgccagacctagccacaccagccagtacctgtgtgcctcttctgaggccagaggactggccgagttcaccgacacacagtatttcggccctggcaccagactgaccgttctcgaggacctgaagaacgtgttcccacctgaggtggccgtgttcgagcctagcgaggccgagatcagccacacccagaaagccaccctcgtgtgcctggctaccggcttctaccccgaccatgtggaactgtcttggtgggtcaacggcaaagaggtgcacagcggcgtgtctaccgacccccagccactgaaagaacagcccgccctgaacgacagccggtactgcctgagcagcagactgagagtgtccgccaccttctggcagaacccccggaaccacttcagatgccaggtgcagttctacggcctgagcgagaacgacgagtggacccaggacagagccaagcccgtgacccagatcgtgtctgccgaagcctggggcagagccgattgcggctttaccagcgagagctaccagcagggcgtgctgagcgccaccatcctgtacgagatcctgctgggcaaggccaccctgtacgccgtgctggtgtctgccctggtgctgatggctatggtcaagcggaaggacagccggggaagggccaagcgatctggatctggagcaacaaacttctcactactcaaacaagcaggtgacgtggaggagaatcccgggcctactagtatggactggatttggcgcatccttttccttgtcggcgctgctaccggcgcccattccgggccccaggttcagctgcaagagtctggcggaggacttgctcaagctggcggaagcctgagactgtcttgtgccgcctctggcagaaccttcagcatgggctggtttagacaggcccctggcaaagagagagagttcgtcgccgccatcacatacagcggcggcagcccttactacgcctcttctgtcagaggccggttcaccatcagccgggacaacgccaagaacaccgtgtacctccagatgaacagcctgaagccagaggacaccgccgtgtactactgtgccgccaatccaacctacggcagcgactggaatgccgagaattggggccagggcacccaagtgacagtgtctagtggatccggcggcggaggatctggcggaggcggatctgggggcggaggctctttcgaacaagttcagcttcaacagcctggcgctgagctggtcaaacctggcgcttctgtgaagatgagctgcaaagccagcggctacgccttcagcagctactggatcaactggatgaagcagaaacccggccagggactcgaatggatcggccaaatctatcccggcgacggcaccgagaacagattcagcgtgaacttccagaaggccgccaagagcttcagcctgaagatcagcgatagccagctgggcgacgccgccatgtacttttgcgcttatagaagcgccgtgaacgcccggctgatgtttggagatggcacacagctggtggtcaagcccaacacgcgtgagcagaaactgatctcggaagaggatgggagcggcaccccattcccttctctggcccctcccatcatgctgctggtggacggcaagcagcagatggtggtcgtgtgcctggtgctggatgtggccccacctggactggacagccccatctggtttagcgccggcaatggctctgccctggacgcctttacctacggcccaagccctgccaccgatggcacctggacaaatctggcccacctgagcctgcccagcgaggaactggcttcttgggagcctctcgtgtgccacacaggacctggcgctgagggacacagcagatccacccagcctatgcacctgtctggcgaggccagcaccgccagaacctgtcctcaggaacctctgagaggcacccctggcggagcactgtggctgggagtgctgagactgctgctgttcaagctgctgctgtttgacctgctgctgacctgctcctgtctgtgcgatcctgccggccctctgccttctcctgccaccaccacaagactgagagccctgggcagccacagactgcaccctgccacagagacaggcggcagagaggccacaagcagccctagaccccagcccagagacagaagatggggcgataccccccctggcagaaagcctggatctccagtccgcgccaagagaagcggatctggcgtgaagcagaccctgaatttcgacctgctgaagctggctggcgacgtggaatccaacccaggcccttctagaggccatatgaccgagtacaagcccacggtgcgcctcgccacccgcgacgacgtccccagggccgtacgcaccctcgccgccgcgttcgccgactaccccgccacgcgccacaccgtcgatccggaccgccacatcgagcgggtcaccgagctgcaagaactcttcctcacgcgcgtcgggctcgacatcggcaaggtgtgggtcgcggacgacggcgccgcggtggcggtctggaccacgccggagagcgtcgaagcgggggcggtgttcgccgagatcggcccgcgcatggccgagttgagcggttcccggctggccgcgcagcaacagatggaaggcctcctggcgccgcaccggcccaaggagcccgcgtggttcctggccaccgtcggcgtctcgcccgaccaccagggcaagggtctgggcagcgccgtcgtgctccccggagtggaggcggccgagcgcgccggggtgcccgccttcctggagacctccgcgccccgcaacctccccttctacgagcggctcggcttcaccgtcaccgccgacgtcgaggtgcccgaaggaccgcgcacctggtgcatgacccgcaagcccggtgcctga

SEQ ID NO: 3584 - DNA, 3519 bp, Artificial Sequence
  Synthetic Polynucloetide
atggccttaccagtgaccgccttgctcctgccgctggccttgctgctccacgccgccaggccggcatgccaggtccagctcgtcgagtccggcggcggcctcgtccaggccggcgactccgtcaccctctcctgcaccgcctccggccgcaccttctcctcctacgccctcgcctggttccgccagcgccccggcaaggagcgcgagttcgtcgccggcctccgctggggcggccccaccaactacgccgactccgtcaaggaccgcttcaccatctccggcgactccgccaagcacaccatgtacctccagatgaactccctcaagcccgaggacaccgccgtctactactgcggctacaaccccggcggctgggccgtcccctcccagtacgagtacgactcctggggccagggcacccaggtcaccgtctcctccggtaccggcggaggcggatctggcggcggaggtagcggtggcggaggatctgaattcgaagccgacatctaccagacacctagatacctggtcatcggcaccggcaagaaaatcaccctggaatgcagccagacaatgggccacgacaagatgtactggtatcagcaggaccccggcatggaactgcacctgatccactacagctacggcgtgaacagcaccgagaagggcgatctgtctagcgagagcaccgtgtccagaatcagaaccgagcacttcccactgacactggaaagcgccagacctagccacaccagccagtacctgtgtgcctcttctgaggccagaggactggccgagttcaccgacacacagtatttcggccctggcaccagactgaccgttctcgaggggaaaccaattcccaaccctcttctgggactggattcaaccggcagcggcgacaagcagctggacgccgacgtgtcccccaagcctaccatcttcctgccctctatcgccgagacaaagctccagaaggccggcacctacctgtgcctgctggaaaagttcttcccagatgtgattaagatccactggcaggaaaagaagtccaacaccatcctgggcagccaggaaggcaacaccatgaagaccaacgacacctacatgaagttcagctggctgaccgtgcccgagaagtccctggacaaagaacacagatgcatcgtgcggcacgaaaacaacaagaacggcgtggaccaggaaatcatcttcccacccatcaagaccgatgtgattacaatggaccccaaggacaactgctccaaggacgccaacgataccctgctgctccagctgaccaacaccagcgcctactacatgtacttgttgctgctgctgaagtccgtggtgtacttcgccatcatcacatgctgcctgctgcggagaaccgccttctgctgcaacggcgagaagtctagggccaagcgatctggatctggagcaacaaacttctcactactcaaacaagcaggtgacgtggaggagaatcccgggcctactagtatggactggatttggcgcatccttttccttgtcggcgctgctaccggcgcccattccgggccccaggttcagctgcaagagtctggcggaggacttgctcaagctggcggaagcctgagactgtcttgtgccgcctctggcagaaccttcagcatgggctggtttagacaggcccctggcaaagagagagagttcgtcgccgccatcacatacagcggcggcagcccttactacgcctcttctgtcagaggccggttcaccatcagccgggacaacgccaagaacaccgtgtacctccagatgaacagcctgaagccagaggacaccgccgtgtactactgtgccgccaatccaacctacggcagcgactggaatgccgagaattggggccagggcacccaagtgacagtgtctagtggatccggcggcggaggatctggcggaggcggatctgggggcggaggctctttcgaacaagttcagcttcaacagcctggcgctgagctggtcaaacctggcgcttctgtgaagatgagctgcaaagccagcggctacgccttcagcagctactggatcaactggatgaagcagaaacccggccagggactcgaatggatcggccaaatctatcccggcgacggcaccgagaacagattcagcgtgaacttccagaaggccgccaagagcttcagcctgaagatcagcgatagccagctgggcgacgccgccatgtacttttgcgcttatagaagcgccgtgaacgcccggctgatgtttggagatggcacacagctggtggtcaagcccaacacgcgtgagcagaaactgatctcggaagaggatgggagcggcagccagcctcacaccaagcccagcgtgttcgtgatgaagaacggcaccaacgtggcctgcctcgtgaaagagttctaccccaaggacatcaggatcaacctggtgtccagcaagaagatcaccgagttcgaccccgccatcgtgatctcccccagcggcaagtacaacgccgtgaagctggggaagtacgaggacagcaacagcgtgacctgctccgtgcagcacgacaacaagaccgtgcacagcaccgactttgaagtgaaaaccgactccaccgaccacgtgaagcccaaagagacagagaacaccaagcagcccagcaagagctgccacaagcccaaggccatcgtgcacaccgagaaagtgaacatgatgagcctgaccgtgctgggcctgcggatgctgttcgccaaaaccgtggccgtgaacttcctgctgaccgccaagctgttcttcctccgcgccaagagaagcggatctggcgtgaagcagaccctgaatttcgacctgctgaagctggctggcgacgtggaatccaacccaggcccttctagaggccatatgaccgagtacaagcccacggtgcgcctcgccacccgcgacgacgtccccagggccgtacgcaccctcgccgccgcgttcgccgactaccccgccacgcgccacaccgtcgatccggaccgccacatcgagcgggtcaccgagctgcaagaactcttcctcacgcgcgtcgggctcgacatcggcaaggtgtgggtcgcggacgacggcgccgcggtggcggtctggaccacgccggagagcgtcgaagcgggggcggtgttcgccgagatcggcccgcgcatggccgagttgagcggttcccggctggccgcgcagcaacagatggaaggcctcctggcgccgcaccggcccaaggagcccgcgtggttcctggccaccgtcggcgtctcgcccgaccaccagggcaagggtctgggcagcgccgtcgtgctccccggagtggaggcggccgagcgcgccggggtgcccgccttcctggagacctccgcgccccgcaacctccccttctacgagcggctcggcttcaccgtcaccgccgacgtcgaggtgcccgaaggaccgcgcacctggtgcatgacccgcaagcccggtgcctga

SEQ ID NO: 3585 - DNA, 2730 bp, Artificial Sequence
  Synthetic Polynucloetide
atggccttaccagtgaccgccttgctcctgccgctggccttgctgctccacgccgccaggccggcatgccaggtccagctcgtcgagtccggcggcggcctcgtccaggccggcgactccgtcaccctctcctgcaccgcctccggccgcaccttctcctcctacgccctcgcctggttccgccagcgccccggcaaggagcgcgagttcgtcgccggcctccgctggggcggccccaccaactacgccgactccgtcaaggaccgcttcaccatctccggcgactccgccaagcacaccatgtacctccagatgaactccctcaagcccgaggacaccgccgtctactactgcggctacaaccccggcggctgggccgtcccctcccagtacgagtacgactcctggggccagggcacccaggtcaccgtctcctccggtaccggcggaggcggatctggcggcggaggtagcggtggcggaggatctgaattcgaagccgacatctaccagacacctagatacctggtcatcggcaccggcaagaaaatcaccctggaatgcagccagacaatgggccacgacaagatgtactggtatcagcaggaccccggcatggaactgcacctgatccactacagctacggcgtgaacagcaccgagaagggcgatctgtctagcgagagcaccgtgtccagaatcagaaccgagcacttcccactgacactggaaagcgccagacctagccacaccagccagtacctgtgtgcctcttctgaggccagaggactggccgagttcaccgacacacagtatttcggccctggcaccagactgaccgttctcgagagccagcctcacaccaagcccagcgtgttcgtgatgaagaacggcaccaacgtggcctgcctcgtgaaagagttctaccccaaggacatcaggatcaacctggtgtccagcaagaagatcaccgagttcgaccccgccatcgtgatctcccccagcggcaagtacaacgccgtgaagctggggaagtacgaggacagcaacagcgtgacctgctccgtgcagcacgacaacaagaccgtgcacagcaccgactttgaagtgaaaaccgactccaccgaccacgtgaagcccaaagagacagagaacaccaagcagcccagcaagagctgccacaagcccaaggccatcgtgcacaccgagaaagtgaacatgatgagcctgaccgtgctgggcctgcggatgctgttcgccaaaaccgtggccgtgaacttcctgctgaccgccaagctgttcttcctcagggccaagcgatctggatctggagcaacaaacttctcactactcaaacaagcaggtgacgtggaggagaatcccgggcctactagtatggactggatttggcgcatccttttccttgtcggcgctgctaccggcgcccattccgggccccaggttcagctgcaagagtctggcggaggacttgctcaagctggcggaagcctgagactgtcttgtgccgcctctggcagaaccttcagcatgggctggtttagacaggcccctggcaaagagagagagttcgtcgccgccatcacatacagcggcggcagcccttactacgcctcttctgtcagaggccggttcaccatcagccgggacaacgccaagaacaccgtgtacctccagatgaacagcctgaagccagaggacaccgccgtgtactactgtgccgccaatccaacctacggcagcgactggaatgccgagaattggggccagggcacccaagtgacagtgtctagtggatccggcggcggaggatctggcggaggcggatctgggggcggaggctctttcgaacaagttcagcttcaacagcctggcgctgagctggtcaaacctggcgcttctgtgaagatgagctgcaaagccagcggctacgccttcagcagctactggatcaactggatgaagcagaaacccggccagggactcgaatggatcggccaaatctatcccggcgacggcaccgagaacagattcagcgtgaacttccagaaggccgccaagagcttcagcctgaagatcagcgatagccagctgggcgacgccgccatgtacttttgcgcttatagaagcgccgtgaacgcccggctgatgtttggagatggcacacagctggtggtcaagcccaacacgcgtgacaagcagctggacgccgacgtgtcccccaagcctaccatcttcctgccctctatcgccgagacaaagctccagaaggccggcacctacctgtgcctgctggaaaagttcttcccagatgtgattaagatccactggcaggaaaagaagtccaacaccatcctgggcagccaggaaggcaacaccatgaagaccaacgacacctacatgaagttcagctggctgaccgtgcccgagaagtccctggacaaagaacacagatgcatcgtgcggcacgaaaacaacaagaacggcgtggaccaggaaatcatcttcccacccatcaagaccgatgtgattacaatggaccccaaggacaactgctccaaggacgccaacgataccctgctgctccagctgaccaacaccagcgcctactacatgtacttgttgctgctgctgaagtccgtggtgtacttcgccatcatcacatgctgcctgctgcggagaaccgccttctgctgcaacggcgagaagtct

SEQ ID NO: 3586 - DNA, 3939 bp, Artificial Sequence
  Synthetic Polynucloetide
atggccttaccagtgaccgccttgctcctgccgctggccttgctgctccacgccgccaggccggcatgccaggtccagctcgtcgagtccggcggcggcctcgtccaggccggcgactccgtcaccctctcctgcaccgcctccggccgcaccttctcctcctacgccctcgcctggttccgccagcgccccggcaaggagcgcgagttcgtcgccggcctccgctggggcggccccaccaactacgccgactccgtcaaggaccgcttcaccatctccggcgactccgccaagcacaccatgtacctccagatgaactccctcaagcccgaggacaccgccgtctactactgcggctacaaccccggcggctgggccgtcccctcccagtacgagtacgactcctggggccagggcacccaggtcaccgtctcctccggtaccggcggaggcggatctggcggcggaggtagcggtggcggaggatctgaattcgaagccgacatctaccagacacctagatacctggtcatcggcaccggcaagaaaatcaccctggaatgcagccagacaatgggccacgacaagatgtactggtatcagcaggaccccggcatggaactgcacctgatccactacagctacggcgtgaacagcaccgagaagggcgatctgtctagcgagagcaccgtgtccagaatcagaaccgagcacttcccactgacactggaaagcgccagacctagccacaccagccagtacctgtgtgcctcttctgaggccagaggactggccgagttcaccgacacacagtatttcggccctggcaccagactgaccgttggacagcctaaggccaatcctaccgtgacactgttccctccaagcagcgaagaactccaggccaacaaggccacacttgtgtgcctgatctccgacttctaccctggggctgtgacagtggcttggaaggccgatggatctcctgtgaaagccggcgtggaaaccaccaagccatccaagcagagcaacaacaaatacgccgccagctcctacctgagcctgacacctgagcagtggaagtcccacagatcctacagctgccaagtgacccacgaaggcagcaccgtggaaaagacagtggcccctacagagtgcagcggatcccagagcttcggcctgctggaccccaagctgtgctacctgctggatggcatcctgttcatctacggcgtgatcctgaccgccctgttcctgagagtgaagttcagcagaagcgccgacgcccctgcctaccagcagggacagaaccaactgtacaacgagctgaacctgggcagacgggaagagtacgacgtgctggacaagcggagaggcagggaccctgagatgggcggaaagccccagcggagaaagaacccccaggaaggactgtataacgaactccagaaagacaagatggccgaagcctacagcgagatcggcatgaagggcgagcggagaagaggcaagggccacgatggcctgtaccagggcctgagcaccgccaccaaggacacctatgacgccctgcacatgcaggccctgcctccaagaagggccaagcgatctggatctggagcaacaaacttctcactactcaaacaagcaggtgacgtggaggagaatcccgggcctactagtatggactggatttggcgcatccttttccttgtcggcgctgctaccggcgcccattccgggccccaggttcagctgcaagagtctggcggaggacttgctcaagctggcggaagcctgagactgtcttgtgccgcctctggcagaaccttcagcatgggctggtttagacaggcccctggcaaagagagagagttcgtcgccgccatcacatacagcggcggcagcccttactacgcctcttctgtcagaggccggttcaccatcagccgggacaacgccaagaacaccgtgtacctccagatgaacagcctgaagccagaggacaccgccgtgtactactgtgccgccaatccaacctacggcagcgactggaatgccgagaattggggccagggcacccaagtgacagtgtctagtggatccggcggcggaggatctggcggaggcggatctgggggcggaggctctttcgaacaagttcagcttcaacagcctggcgctgagctggtcaaacctggcgcttctgtgaagatgagctgcaaagccagcggctacgccttcagcagctactggatcaactggatgaagcagaaacccggccagggactcgaatggatcggccaaatctatcccggcgacggcaccgagaacagattcagcgtgaacttccagaaggccgccaagagcttcagcctgaagatcagcgatagccagctgggcgacgccgccatgtacttttgcgcttatagaagcgccgtgaacgcccggctgatgtttggagatggcacacagctggtggtcaagcccaacgcctctacaaagggaccctccgtgtttcctctggctcccagcagcaagtctacaagcggaggaacagccgctctgggctgcctggtcaaggattactttcccgagcctgtgaccgtgtcctggaatagcggagcactgacaagcggcgtgcacacctttccagccgtgctgcaaagcagcggcctgtactctctgagcagcgtggtcacagtgcctagctctagcctgggcacccagacctacatctgcaatgtgaaccacaagcctagcaacaccaaggtggacaagagagtggaacccaagagctgtggtacccagagttttgggttgttggaccctaaattgtgctatctgttggacggaatcctgttcatttacggagtgatcctgaccgcattgttcctgcgggttaagttttccagatccgcagacgcacccgcttaccaacaagggcagaaccaactctacaatgaacttaatttggggcggagggaagagtacgacgttctggacaaaaggaggggacgagatcccgagatgggcggaaagcctcagcgaaggaagaatccgcaagaggggctttataacgaactccagaaagataaaatggcagaagcctatagtgagattgggatgaagggagaaaggaggaggggtaaaggtcacgatgggttgtaccaaggattgagcacagccactaaagatacctatgatgcgctccacatgcaggccctgccgccaagacgcgccaagagaagcggatctggcgtgaagcagaccctgaatttcgacctgctgaagctggctggcgacgtggaatccaacccaggcccttctagaggccatatgaccgagtacaagcccacggtgcgcctcgccacccgcgacgacgtccccagggccgtacgcaccctcgccgccgcgttcgccgactaccccgccacgcgccacaccgtcgatccggaccgccacatcgagcgggtcaccgagctgcaagaactcttcctcacgcgcgtcgggctcgacatcggcaaggtgtgggtcgcggacgacggcgccgcggtggcggtctggaccacgccggagagcgtcgaagcgggggcggtgttcgccgagatcggcccgcgcatggccgagttgagcggttcccggctggccgcgcagcaacagatggaaggcctcctggcgccgcaccggcccaaggagcccgcgtggttcctggccaccgtcggcgtctcgcccgaccaccagggcaagggtctgggcagcgccgtcgtgctccccggagtggaggcggccgagcgcgccggggtgcccgccttcctggagacctccgcgccccgcaacctccccttctacgagcggctcggcttcaccgtcaccgccgacgtcgaggtgcccgaaggaccgcgcacctggtgcatgacccgcaagcccggtgcctga

SEQ ID NO: 3587 - DNA, 3294 bp, Artificial Sequence
  Synthetic Polynucloetide
atggccttaccagtgaccgccttgctcctgccgctggccttgctgctccacgccgccaggccggcatgccaggtccagctcgtcgagtccggcggcggcctcgtccaggccggcgactccgtcaccctctcctgcaccgcctccggccgcaccttctcctcctacgccctcgcctggttccgccagcgccccggcaaggagcgcgagttcgtcgccggcctccgctggggcggccccaccaactacgccgactccgtcaaggaccgcttcaccatctccggcgactccgccaagcacaccatgtacctccagatgaactccctcaagcccgaggacaccgccgtctactactgcggctacaaccccggcggctgggccgtcccctcccagtacgagtacgactcctggggccagggcacccaggtcaccgtctcctccggtaccggcggaggcggatctggcggcggaggtagcggtggcggaggatctgaattcgaagccgacatctaccagacacctagatacctggtcatcggcaccggcaagaaaatcaccctggaatgcagccagacaatgggccacgacaagatgtactggtatcagcaggaccccggcatggaactgcacctgatccactacagctacggcgtgaacagcaccgagaagggcgatctgtctagcgagagcaccgtgtccagaatcagaaccgagcacttcccactgacactggaaagcgccagacctagccacaccagccagtacctgtgtgcctcttctgaggccagaggactggccgagttcaccgacacacagtatttcggccctggcaccagactgaccgttctcgaggacctgaagaacgtgttcccacctgaggtggccgtgttcgagcctagcgaggccgagatcagccacacccagaaagccaccctcgtgtgcctggctaccggcttctaccccgaccatgtggaactgtcttggtgggtcaacggcaaagaggtgcacagcggcgtgtctaccgacccccagccactgaaagaacagcccgccctgaacgacagccggtactgcctgagcagcagactgagagtgtccgccaccttctggcagaacccccggaaccacttcagatgccaggtgcagttctacggcctgagcgagaacgacgagtggacccaggacagagccaagcccgtgacccagatcgtgtctgccgaagcctggggcagagccgattgcggatcccagagcttcggcctgctggaccccaagctgtgctacctgctggatggcatcctgttcatctacggcgtgatcctgaccgccctgttcctgagagtgaagttcagcagaagcgccgacgcccctgcctaccagcagggacagaaccaactgtacaacgagctgaacctgggcagacgggaagagtacgacgtgctggacaagcggagaggcagggaccctgagatgggcggaaagccccagcggagaaagaacccccaggaaggactgtataacgaactccagaaagacaagatggccgaagcctacagcgagatcggcatgaagggcgagcggagaagaggcaagggccacgatggcctgtaccagggcctgagcaccgccaccaaggacacctatgacgccctgcacatgcaggccctgcctccaagaagggccaagcgatctggatctggagcaacaaacttctcactactcaaacaagcaggtgacgtggaggagaatcccgggcctactagtatggactggatttggcgcatccttttccttgtcggcgctgctaccggcgcccattccgggccccaggttcagctgcaagagtctggcggaggacttgctcaagctggcggaagcctgagactgtcttgtgccgcctctggcagaaccttcagcatgggctggtttagacaggcccctggcaaagagagagagttcgtcgccgccatcacatacagcggcggcagcccttactacgcctcttctgtcagaggccggttcaccatcagccgggacaacgccaagaacaccgtgtacctccagatgaacagcctgaagccagaggacaccgccgtgtactactgtgccgccaatccaacctacggcagcgactggaatgccgagaattggggccagggcacccaagtgacagtgtctagtggatccggcggcggaggatctggcggaggcggatctgggggcggaggctctttcgaacaagttcagcttcaacagcctggcgctgagctggtcaaacctggcgcttctgtgaagatgagctgcaaagccagcggctacgccttcagcagctactggatcaactggatgaagcagaaacccggccagggactcgaatggatcggccaaatctatcccggcgacggcaccgagaacagattcagcgtgaacttccagaaggccgccaagagcttcagcctgaagatcagcgatagccagctgggcgacgccgccatgtacttttgcgcttatagaagcgccgtgaacgcccggctgatgtttggagatggcacacagctggtggtcaagcccaacacgcgtatccagaaccctgatcctgccgtgtaccagctgcgggatagcaagagcagcgacaagagcgtgtgtctgttcaccgacttcgacagccagaccaacgtgtcccagagcaaggactccgacgtgtacatcaccgataagaccgtgctggacatgcggagcatggacttcaagagcaactccgccgtggcctggtccaacaagtccgatttcgcctgcgccaacgccttcaacaacagcattatccccgaggacacattcttcccaagccccgagagcagctgcggtacccagagttttgggttgttggaccctaaattgtgctatctgttggacggaatcctgttcatttacggagtgatcctgaccgcattgttcctgcgggttaagttttccagatccgcagacgcacccgcttaccaacaagggcagaaccaactctacaatgaacttaatttggggcggagggaagagtacgacgttctggacaaaaggaggggacgagatcccgagatgggcggaaagcctcagcgaaggaagaatccgcaagaggggctttataacgaactccagaaagataaaatggcagaagcctatagtgagattgggatgaagggagaaaggaggaggggtaaaggtcacgatgggttgtaccaaggattgagcacagccactaaagatacctatgatgcgctccacatgcaggccctgccgccaaga

SEQ ID NO: 3588 - DNA, 3294 bp, Artificial Sequence
  Synthetic Polynucloetide
atggccttaccagtgaccgccttgctcctgccgctggccttgctgctccacgccgccaggccggcatgccaggtccagctcgtcgagtccggcggcggcctcgtccaggccggcgactccgtcaccctctcctgcaccgcctccggccgcaccttctcctcctacgccctcgcctggttccgccagcgccccggcaaggagcgcgagttcgtcgccggcctccgctggggcggccccaccaactacgccgactccgtcaaggaccgcttcaccatctccggcgactccgccaagcacaccatgtacctccagatgaactccctcaagcccgaggacaccgccgtctactactgcggctacaaccccggcggctgggccgtcccctcccagtacgagtacgactcctggggccagggcacccaggtcaccgtctcctccggtaccggcggaggcggatctggcggcggaggtagcggtggcggaggatctgaattcgaagccgacatctaccagacacctagatacctggtcatcggcaccggcaagaaaatcaccctggaatgcagccagacaatgggccacgacaagatgtactggtatcagcaggaccccggcatggaactgcacctgatccactacagctacggcgtgaacagcaccgagaagggcgatctgtctagcgagagcaccgtgtccagaatcagaaccgagcacttcccactgacactggaaagcgccagacctagccacaccagccagtacctgtgtgcctcttctgaggccagaggactggccgagttcaccgacacacagtatttcggccctggcaccagactgaccgttctcgaggacctgaagaacgtgttcccacctgaggtggccgtgttcgagcctagcaaggccgagatcgcccacacccagaaagccaccctcgtgtgcctggctaccggcttctaccccgaccatgtggaactgtcttggtgggtcaacggcaaagaggtgcacagcggcgtgtgtaccgacccccagccactgaaagaacagcccgccctgaacgacagccggtactgcctgagcagcagactgagagtgtccgccaccttctggcagaacccccggaaccacttcagatgccaggtgcagttctacggcctgagcgagaacgacgagtggacccaggacagagccaagcccgtgacccagatcgtgtctgccgaagcctggggcagagccgattgcggatcccagagcttcggcctgctggaccccaagctgtgctacctgctggatggcatcctgttcatctacggcgtgatcctgaccgccctgttcctgagagtgaagttcagcagaagcgccgacgcccctgcctaccagcagggacagaaccaactgtacaacgagctgaacctgggcagacgggaagagtacgacgtgctggacaagcggagaggcagggaccctgagatgggcggaaagccccagcggagaaagaacccccaggaaggactgtataacgaactccagaaagacaagatggccgaagcctacagcgagatcggcatgaagggcgagcggagaagaggcaagggccacgatggcctgtaccagggcctgagcaccgccaccaaggacacctatgacgccctgcacatgcaggccctgcctccaagaagggccaagcgatctggatctggagcaacaaacttctcactactcaaacaagcaggtgacgtggaggagaatcccgggcctactagtatggactggatttggcgcatccttttccttgtcggcgctgctaccggcgcccattccgggccccaggttcagctgcaagagtctggcggaggacttgctcaagctggcggaagcctgagactgtcttgtgccgcctctggcagaaccttcagcatgggctggtttagacaggcccctggcaaagagagagagttcgtcgccgccatcacatacagcggcggcagcccttactacgcctcttctgtcagaggccggttcaccatcagccgggacaacgccaagaacaccgtgtacctccagatgaacagcctgaagccagaggacaccgccgtgtactactgtgccgccaatccaacctacggcagcgactggaatgccgagaattggggccagggcacccaagtgacagtgtctagtggatccggcggcggaggatctggcggaggcggatctgggggcggaggctctttcgaacaagttcagcttcaacagcctggcgctgagctggtcaaacctggcgcttctgtgaagatgagctgcaaagccagcggctacgccttcagcagctactggatcaactggatgaagcagaaacccggccagggactcgaatggatcggccaaatctatcccggcgacggcaccgagaacagattcagcgtgaacttccagaaggccgccaagagcttcagcctgaagatcagcgatagccagctgggcgacgccgccatgtacttttgcgcttatagaagcgccgtgaacgcccggctgatgtttggagatggcacacagctggtggtcaagcccaacacgcgtatccagaaccctgatcctgccgtgtaccagctgcgggatagcaagagcagcgacaagagcgtgtgtctgttcaccgacttcgacagccagaccaacgtgtcccagagcaaggactccgacgtgtacatcaccgataagtgcgtgctggacatgcggagcatggacttcaagagcaactccgccgtggcctggtccaacaagtccgatttcgcctgcgccaacgccttcaacaacagcattatccccgaggacacattcttcccaagcagcgacgtgccctgcggtacccagagttttgggttgttggaccctaaattgtgctatctgttggacggaatcctgttcatttacggagtgatcctgaccgcattgttcctgcgggttaagttttccagatccgcagacgcacccgcttaccaacaagggcagaaccaactctacaatgaacttaatttggggcggagggaagagtacgacgttctggacaaaaggaggggacgagatcccgagatgggcggaaagcctcagcgaaggaagaatccgcaagaggggctttataacgaactccagaaagataaaatggcagaagcctatagtgagattgggatgaagggagaaaggaggaggggtaaaggtcacgatgggttgtaccaaggattgagcacagccactaaagatacctatgatgcgctccacatgcaggccctgccgccaaga

SEQ ID NO: 3589 - DNA, 3507 bp, Artificial Sequence
  Synthetic Polynucloetide
atggccttaccagtgaccgccttgctcctgccgctggccttgctgctccacgccgccaggccggcatgccaggtccagctcgtcgagtccggcggcggcctcgtccaggccggcgactccgtcaccctctcctgcaccgcctccggccgcaccttctcctcctacgccctcgcctggttccgccagcgccccggcaaggagcgcgagttcgtcgccggcctccgctggggcggccccaccaactacgccgactccgtcaaggaccgcttcaccatctccggcgactccgccaagcacaccatgtacctccagatgaactccctcaagcccgaggacaccgccgtctactactgcggctacaaccccggcggctgggccgtcccctcccagtacgagtacgactcctggggccagggcacccaggtcaccgtctcctccggtaccggcggaggcggatctggcggcggaggtagcggtggcggaggatctgaattcgaagccgacatctaccagacacctagatacctggtcatcggcaccggcaagaaaatcaccctggaatgcagccagacaatgggccacgacaagatgtactggtatcagcaggaccccggcatggaactgcacctgatccactacagctacggcgtgaacagcaccgagaagggcgatctgtctagcgagagcaccgtgtccagaatcagaaccgagcacttcccactgacactggaaagcgccagacctagccacaccagccagtacctgtgtgcctcttctgaggccagaggactggccgagttcaccgacacacagtatttcggccctggcaccagactgaccgttctcgaggggaaaccaattcccaaccctcttctgggactggattcaaccggcagcggcgaggacctgaagaacgtgttcccacctgaggtggccgtgttcgagcctagcgaggccgagatcagccacacccagaaagccaccctcgtgtgcctggctaccggcttctaccccgaccatgtggaactgtcttggtgggtcaacggcaaagaggtgcacagcggcgtgtctaccgacccccagccactgaaagaacagcccgccctgaacgacagccggtactgcctgagcagcagactgagagtgtccgccaccttctggcagaacccccggaaccacttcagatgccaggtgcagttctacggcctgagcgagaacgacgagtggacccaggacagagccaagcccgtgacccagatcgtgtctgccgaagcctggggcagagccgattgcggatcccagagcttcggcctgctggaccccaagctgtgctacctgctggatggcatcctgttcatctacggcgtgatcctgaccgccctgttcctgagagtgaagttcagcagaagcgccgacgcccctgcctaccagcagggacagaaccaactgtacaacgagctgaacctgggcagacgggaagagtacgacgtgctggacaagcggagaggcagggaccctgagatgggcggaaagccccagcggagaaagaacccccaggaaggactgtataacgaactccagaaagacaagatggccgaagcctacagcgagatcggcatgaagggcgagcggagaagaggcaagggccacgatggcctgtaccagggcctgagcaccgccaccaaggacacctatgacgccctgcacatgcaggccctgcctccaagaagggccaagcgatctggatctggagcaacaaacttctcactactcaaacaagcaggtgacgtggaggagaatcccgggcctactagtatggactggatttggcgcatccttttccttgtcggcgctgctaccggcgcccattccgggccccaggttcagctgcaagagtctggcggaggacttgctcaagctggcggaagcctgagactgtcttgtgccgcctctggcagaaccttcagcatgggctggtttagacaggcccctggcaaagagagagagttcgtcgccgccatcacatacagcggcggcagcccttactacgcctcttctgtcagaggccggttcaccatcagccgggacaacgccaagaacaccgtgtacctccagatgaacagcctgaagccagaggacaccgccgtgtactactgtgccgccaatccaacctacggcagcgactggaatgccgagaattggggccagggcacccaagtgacagtgtctagtggatccggcggcggaggatctggcggaggcggatctgggggcggaggctctttcgaacaagttcagcttcaacagcctggcgctgagctggtcaaacctggcgcttctgtgaagatgagctgcaaagccagcggctacgccttcagcagctactggatcaactggatgaagcagaaacccggccagggactcgaatggatcggccaaatctatcccggcgacggcaccgagaacagattcagcgtgaacttccagaaggccgccaagagcttcagcctgaagatcagcgatagccagctgggcgacgccgccatgtacttttgcgcttatagaagcgccgtgaacgcccggctgatgtttggagatggcacacagctggtggtcaagcccaacacgcgtgagcagaaactgatctcggaagaggatgggagcggcatccagaaccctgatcctgccgtgtaccagctgcgggatagcaagagcagcgacaagagcgtgtgtctgttcaccgacttcgacagccagaccaacgtgtcccagagcaaggactccgacgtgtacatcaccgataagaccgtgctggacatgcggagcatggacttcaagagcaactccgccgtggcctggtccaacaagtccgatttcgcctgcgccaacgccttcaacaacagcattatccccgaggacacattcttcccaagccccgagagcagctgcggtacccagagttttgggttgttggaccctaaattgtgctatctgttggacggaatcctgttcatttacggagtgatcctgaccgcattgttcctgaggagcaagcggtcacggctgctccacagcgattacatgaatatgacaccacgaagaccgggtcctactcgcaaacactaccaaccctacgcacctccccgcgactttgcagcgtaccgatctcgggttaagttttccagatccgcagacgcacccgcttaccaacaagggcagaaccaactctacaatgaacttaatttggggcggagggaagagtacgacgttctggacaaaaggaggggacgagatcccgagatgggcggaaagcctcagcgaaggaagaatccgcaagaggggctttataacgaactccagaaagataaaatggcagaagcctatagtgagattgggatgaagggagaaaggaggaggggtaaaggtcacgatgggttgtaccaaggattgagcacagccactaaagatacctatgatgcgctccacatgcaggccctgccgccaaga

SEQ ID NO: 3590 - DNA, 3630 bp, Artificial Sequence
  Synthetic Polynucloetide
atggccttaccagtgaccgccttgctcctgccgctggccttgctgctccacgccgccaggccggcatgccaggtccagctcgtcgagtccggcggcggcctcgtccaggccggcgactccgtcaccctctcctgcaccgcctccggccgcaccttctcctcctacgccctcgcctggttccgccagcgccccggcaaggagcgcgagttcgtcgccggcctccgctggggcggccccaccaactacgccgactccgtcaaggaccgcttcaccatctccggcgactccgccaagcacaccatgtacctccagatgaactccctcaagcccgaggacaccgccgtctactactgcggctacaaccccggcggctgggccgtcccctcccagtacgagtacgactcctggggccagggcacccaggtcaccgtctcctccggtaccggcggaggcggatctggcggcggaggtagcggtggcggaggatctgaattcgaagccgacatctaccagacacctagatacctggtcatcggcaccggcaagaaaatcaccctggaatgcagccagacaatgggccacgacaagatgtactggtatcagcaggaccccggcatggaactgcacctgatccactacagctacggcgtgaacagcaccgagaagggcgatctgtctagcgagagcaccgtgtccagaatcagaaccgagcacttcccactgacactggaaagcgccagacctagccacaccagccagtacctgtgtgcctcttctgaggccagaggactggccgagttcaccgacacacagtatttcggccctggcaccagactgaccgttctcgaggggaaaccaattcccaaccctcttctgggactggattcaaccggcagcggcgaggacctgaagaacgtgttcccacctgaggtggccgtgttcgagcctagcgaggccgagatcagccacacccagaaagccaccctcgtgtgcctggctaccggcttctaccccgaccatgtggaactgtcttggtgggtcaacggcaaagaggtgcacagcggcgtgtctaccgacccccagccactgaaagaacagcccgccctgaacgacagccggtactgcctgagcagcagactgagagtgtccgccaccttctggcagaacccccggaaccacttcagatgccaggtgcagttctacggcctgagcgagaacgacgagtggacccaggacagagccaagcccgtgacccagatcgtgtctgccgaagcctggggcagagccgattgcggatcccagagcttcggcctgctggaccccaagctgtgctacctgctggatggcatcctgttcatctacggcgtgatcctgaccgccctgttcctgaggagtaagaggagcaggctcctgcacagtgactacatgaacatgactccacgccgccccggacccacccgcaagcattaccagccctatgccccaccacgcgacttcgcagcctatcgctccagagtgaagttcagcagaagcgccgacgcccctgcctaccagcagggacagaaccaactgtacaacgagctgaacctgggcagacgggaagagtacgacgtgctggacaagcggagaggcagggaccctgagatgggcggaaagccccagcggagaaagaacccccaggaaggactgtataacgaactccagaaagacaagatggccgaagcctacagcgagatcggcatgaagggcgagcggagaagaggcaagggccacgatggcctgtaccagggcctgagcaccgccaccaaggacacctatgacgccctgcacatgcaggccctgcctccaagaagggccaagcgatctggatctggagcaacaaacttctcactactcaaacaagcaggtgacgtggaggagaatcccgggcctactagtatggactggatttggcgcatccttttccttgtcggcgctgctaccggcgcccattccgggccccaggttcagctgcaagagtctggcggaggacttgctcaagctggcggaagcctgagactgtcttgtgccgcctctggcagaaccttcagcatgggctggtttagacaggcccctggcaaagagagagagttcgtcgccgccatcacatacagcggcggcagcccttactacgcctcttctgtcagaggccggttcaccatcagccgggacaacgccaagaacaccgtgtacctccagatgaacagcctgaagccagaggacaccgccgtgtactactgtgccgccaatccaacctacggcagcgactggaatgccgagaattggggccagggcacccaagtgacagtgtctagtggatccggcggcggaggatctggcggaggcggatctgggggcggaggctctttcgaacaagttcagcttcaacagcctggcgctgagctggtcaaacctggcgcttctgtgaagatgagctgcaaagccagcggctacgccttcagcagctactggatcaactggatgaagcagaaacccggccagggactcgaatggatcggccaaatctatcccggcgacggcaccgagaacagattcagcgtgaacttccagaaggccgccaagagcttcagcctgaagatcagcgatagccagctgggcgacgccgccatgtacttttgcgcttatagaagcgccgtgaacgcccggctgatgtttggagatggcacacagctggtggtcaagcccaacacgcgtgagcagaaactgatctcggaagaggatgggagcggcatccagaaccctgatcctgccgtgtaccagctgcgggatagcaagagcagcgacaagagcgtgtgtctgttcaccgacttcgacagccagaccaacgtgtcccagagcaaggactccgacgtgtacatcaccgataagaccgtgctggacatgcggagcatggacttcaagagcaactccgccgtggcctggtccaacaagtccgatttcgcctgcgccaacgccttcaacaacagcattatccccgaggacacattcttcccaagccccgagagcagctgcggtacccagagttttgggttgttggaccctaaattgtgctatctgttggacggaatcctgttcatttacggagtgatcctgaccgcattgttcctgaggagcaagcggtcacggctgctccacagcgattacatgaatatgacaccacgaagaccgggtcctactcgcaaacactaccaaccctacgcacctccccgcgactttgcagcgtaccgatctcgggttaagttttccagatccgcagacgcacccgcttaccaacaagggcagaaccaactctacaatgaacttaatttggggcggagggaagagtacgacgttctggacaaaaggaggggacgagatcccgagatgggcggaaagcctcagcgaaggaagaatccgcaagaggggctttataacgaactccagaaagataaaatggcagaagcctatagtgagattgggatgaagggagaaaggaggaggggtaaaggtcacgatgggttgtaccaaggattgagcacagccactaaagatacctatgatgcgctccacatgcaggccctgccgccaaga

SEQ ID NO: 3591 - DNA, 3513 bp, Artificial Sequence
  Synthetic Polynucloetide
atggccttaccagtgaccgccttgctcctgccgctggccttgctgctccacgccgccaggccggcatgccaggtccagctcgtcgagtccggcggcggcctcgtccaggccggcgactccgtcaccctctcctgcaccgcctccggccgcaccttctcctcctacgccctcgcctggttccgccagcgccccggcaaggagcgcgagttcgtcgccggcctccgctggggcggccccaccaactacgccgactccgtcaaggaccgcttcaccatctccggcgactccgccaagcacaccatgtacctccagatgaactccctcaagcccgaggacaccgccgtctactactgcggctacaaccccggcggctgggccgtcccctcccagtacgagtacgactcctggggccagggcacccaggtcaccgtctcctccggtaccggcggaggcggatctggcggcggaggtagcggtggcggaggatctgaattcgaagccgacatctaccagacacctagatacctggtcatcggcaccggcaagaaaatcaccctggaatgcagccagacaatgggccacgacaagatgtactggtatcagcaggaccccggcatggaactgcacctgatccactacagctacggcgtgaacagcaccgagaagggcgatctgtctagcgagagcaccgtgtccagaatcagaaccgagcacttcccactgacactggaaagcgccagacctagccacaccagccagtacctgtgtgcctcttctgaggccagaggactggccgagttcaccgacacacagtatttcggccctggcaccagactgaccgttctcgaggggaaaccaattcccaaccctcttctgggactggattcaaccggcagcggcgaggacctgaagaacgtgttcccacctgaggtggccgtgttcgagcctagcgaggccgagatcagccacacccagaaagccaccctcgtgtgcctggctaccggcttctaccccgaccatgtggaactgtcttggtgggtcaacggcaaagaggtgcacagcggcgtgtctaccgacccccagccactgaaagaacagcccgccctgaacgacagccggtactgcctgagcagcagactgagagtgtccgccaccttctggcagaacccccggaaccacttcagatgccaggtgcagttctacggcctgagcgagaacgacgagtggacccaggacagagccaagcccgtgacccagatcgtgtctgccgaagcctggggcagagccgattgcggatcccagagcttcggcctgctggaccccaagctgtgctacctgctggatggcatcctgttcatctacggcgtgatcctgaccgccctgttcctgagagtgaagttcagcagaagcgccgacgcccctgcctaccagcagggacagaaccaactgtacaacgagctgaacctgggcagacgggaagagtacgacgtgctggacaagcggagaggcagggaccctgagatgggcggaaagccccagcggagaaagaacccccaggaaggactgtataacgaactccagaaagacaagatggccgaagcctacagcgagatcggcatgaagggcgagcggagaagaggcaagggccacgatggcctgtaccagggcctgagcaccgccaccaaggacacctatgacgccctgcacatgcaggccctgcctccaagaagggccaagcgatctggatctggagcaacaaacttctcactactcaaacaagcaggtgacgtggaggagaatcccgggcctactagtatggactggatttggcgcatccttttccttgtcggcgctgctaccggcgcccattccgggccccaggttcagctgcaagagtctggcggaggacttgctcaagctggcggaagcctgagactgtcttgtgccgcctctggcagaaccttcagcatgggctggtttagacaggcccctggcaaagagagagagttcgtcgccgccatcacatacagcggcggcagcccttactacgcctcttctgtcagaggccggttcaccatcagccgggacaacgccaagaacaccgtgtacctccagatgaacagcctgaagccagaggacaccgccgtgtactactgtgccgccaatccaacctacggcagcgactggaatgccgagaattggggccagggcacccaagtgacagtgtctagtggatccggcggcggaggatctggcggaggcggatctgggggcggaggctctttcgaacaagttcagcttcaacagcctggcgctgagctggtcaaacctggcgcttctgtgaagatgagctgcaaagccagcggctacgccttcagcagctactggatcaactggatgaagcagaaacccggccagggactcgaatggatcggccaaatctatcccggcgacggcaccgagaacagattcagcgtgaacttccagaaggccgccaagagcttcagcctgaagatcagcgatagccagctgggcgacgccgccatgtacttttgcgcttatagaagcgccgtgaacgcccggctgatgtttggagatggcacacagctggtggtcaagcccaacacgcgtgagcagaaactgatctcggaagaggatctggggagcggcatccagaaccctgatcctgccgtgtaccagctgcgggatagcaagagcagcgacaagagcgtgtgtctgttcaccgacttcgacagccagaccaacgtgtcccagagcaaggactccgacgtgtacatcaccgataagaccgtgctggacatgcggagcatggacttcaagagcaactccgccgtggcctggtccaacaagtccgatttcgcctgcgccaacgccttcaacaacagcattatccccgaggacacattcttcccaagccccgagagcagctgcggtacccagagttttgggttgttggaccctaaattgtgctatctgttggacggaatcctgttcatttacggagtgatcctgaccgcattgttcctgaagagaggccggaagaagctgctgtacatcttcaagcagcctttcatgcggcccgtgcagaccacccaggaagaggacggctgctcctgccggttccccgaggaagaagaaggcggctgcgagctgcgggttaagttttccagatccgcagacgcacccgcttaccaacaagggcagaaccaactctacaatgaacttaatttggggcggagggaagagtacgacgttctggacaaaaggaggggacgagatcccgagatgggcggaaagcctcagcgaaggaagaatccgcaagaggggctttataacgaactccagaaagataaaatggcagaagcctatagtgagattgggatgaagggagaaaggaggaggggtaaaggtcacgatgggttgtaccaaggattgagcacagccactaaagatacctatgatgcgctccacatgcaggccctgccgccaaga

SEQ ID NO: 3592 - DNA, 3639 bp, Artificial Sequence
  Synthetic Polynucloetide
atggccttaccagtgaccgccttgctcctgccgctggccttgctgctccacgccgccaggccggcatgccaggtccagctcgtcgagtccggcggcggcctcgtccaggccggcgactccgtcaccctctcctgcaccgcctccggccgcaccttctcctcctacgccctcgcctggttccgccagcgccccggcaaggagcgcgagttcgtcgccggcctccgctggggcggccccaccaactacgccgactccgtcaaggaccgcttcaccatctccggcgactccgccaagcacaccatgtacctccagatgaactccctcaagcccgaggacaccgccgtctactactgcggctacaaccccggcggctgggccgtcccctcccagtacgagtacgactcctggggccagggcacccaggtcaccgtctcctccggtaccggcggaggcggatctggcggcggaggtagcggtggcggaggatctgaattcgaagccgacatctaccagacacctagatacctggtcatcggcaccggcaagaaaatcaccctggaatgcagccagacaatgggccacgacaagatgtactggtatcagcaggaccccggcatggaactgcacctgatccactacagctacggcgtgaacagcaccgagaagggcgatctgtctagcgagagcaccgtgtccagaatcagaaccgagcacttcccactgacactggaaagcgccagacctagccacaccagccagtacctgtgtgcctcttctgaggccagaggactggccgagttcaccgacacacagtatttcggccctggcaccagactgaccgttctcgaggggaaaccaattcccaaccctcttctgggactggattcaaccggcagcggcgaggacctgaagaacgtgttcccacctgaggtggccgtgttcgagcctagcgaggccgagatcagccacacccagaaagccaccctcgtgtgcctggctaccggcttctaccccgaccatgtggaactgtcttggtgggtcaacggcaaagaggtgcacagcggcgtgtctaccgacccccagccactgaaagaacagcccgccctgaacgacagccggtactgcctgagcagcagactgagagtgtccgccaccttctggcagaacccccggaaccacttcagatgccaggtgcagttctacggcctgagcgagaacgacgagtggacccaggacagagccaagcccgtgacccagatcgtgtctgccgaagcctggggcagagccgattgcggatcccagagcttcggcctgctggaccccaagctgtgctacctgctggatggcatcctgttcatctacggcgtgatcctgaccgccctgttcctgaaacggggcagaaagaaactcctgtatatattcaaacaaccatttatgagaccagtacaaactactcaagaggaagatggctgtagctgccgatttccagaagaagaagaaggaggatgtgaactgagagtgaagttcagcagaagcgccgacgcccctgcctaccagcagggacagaaccaactgtacaacgagctgaacctgggcagacgggaagagtacgacgtgctggacaagcggagaggcagggaccctgagatgggcggaaagccccagcggagaaagaacccccaggaaggactgtataacgaactccagaaagacaagatggccgaagcctacagcgagatcggcatgaagggcgagcggagaagaggcaagggccacgatggcctgtaccagggcctgagcaccgccaccaaggacacctatgacgccctgcacatgcaggccctgcctccaagaagggccaagcgatctggatctggagcaacaaacttctcactactcaaacaagcaggtgacgtggaggagaatcccgggcctactagtatggactggatttggcgcatccttttccttgtcggcgctgctaccggcgcccattccgggccccaggttcagctgcaagagtctggcggaggacttgctcaagctggcggaagcctgagactgtcttgtgccgcctctggcagaaccttcagcatgggctggtttagacaggcccctggcaaagagagagagttcgtcgccgccatcacatacagcggcggcagcccttactacgcctcttctgtcagaggccggttcaccatcagccgggacaacgccaagaacaccgtgtacctccagatgaacagcctgaagccagaggacaccgccgtgtactactgtgccgccaatccaacctacggcagcgactggaatgccgagaattggggccagggcacccaagtgacagtgtctagtggatccggcggcggaggatctggcggaggcggatctgggggcggaggctctttcgaacaagttcagcttcaacagcctggcgctgagctggtcaaacctggcgcttctgtgaagatgagctgcaaagccagcggctacgccttcagcagctactggatcaactggatgaagcagaaacccggccagggactcgaatggatcggccaaatctatcccggcgacggcaccgagaacagattcagcgtgaacttccagaaggccgccaagagcttcagcctgaagatcagcgatagccagctgggcgacgccgccatgtacttttgcgcttatagaagcgccgtgaacgcccggctgatgtttggagatggcacacagctggtggtcaagcccaacacgcgtgagcagaaactgatctcggaagaggatctggggagcggcatccagaaccctgatcctgccgtgtaccagctgcgggatagcaagagcagcgacaagagcgtgtgtctgttcaccgacttcgacagccagaccaacgtgtcccagagcaaggactccgacgtgtacatcaccgataagaccgtgctggacatgcggagcatggacttcaagagcaactccgccgtggcctggtccaacaagtccgatttcgcctgcgccaacgccttcaacaacagcattatccccgaggacacattcttcccaagccccgagagcagctgcggtacccagagttttgggttgttggaccctaaattgtgctatctgttggacggaatcctgttcatttacggagtgatcctgaccgcattgttcctgaagagaggccggaagaagctgctgtacatcttcaagcagcctttcatgcggcccgtgcagaccacccaggaagaggacggctgctcctgccggttccccgaggaagaagaaggcggctgcgagctgcgggttaagttttccagatccgcagacgcacccgcttaccaacaagggcagaaccaactctacaatgaacttaatttggggcggagggaagagtacgacgttctggacaaaaggaggggacgagatcccgagatgggcggaaagcctcagcgaaggaagaatccgcaagaggggctttataacgaactccagaaagataaaatggcagaagcctatagtgagattgggatgaagggagaaaggaggaggggtaaaggtcacgatgggttgtaccaaggattgagcacagccactaaagatacctatgatgcgctccacatgcaggccctgccgccaaga

SEQ ID NO: 3593 - DNA, 3312 bp, Artificial Sequence
  Synthetic Polynucloetide
atggccttaccagtgaccgccttgctcctgccgctggccttgctgctccacgccgccaggccggcatgccaggtccagctcgtcgagtccggcggcggcctcgtccaggccggcgactccgtcaccctctcctgcaccgcctccggccgcaccttctcctcctacgccctcgcctggttccgccagcgccccggcaaggagcgcgagttcgtcgccggcctccgctggggcggccccaccaactacgccgactccgtcaaggaccgcttcaccatctccggcgactccgccaagcacaccatgtacctccagatgaactccctcaagcccgaggacaccgccgtctactactgcggctacaaccccggcggctgggccgtcccctcccagtacgagtacgactcctggggccagggcacccaggtcaccgtctcctccggtaccggcggaggcggatctggcggcggaggtagcggtggcggaggatctgaattcgaagccgacatctaccagacacctagatacctggtcatcggcaccggcaagaaaatcaccctggaatgcagccagacaatgggccacgacaagatgtactggtatcagcaggaccccggcatggaactgcacctgatccactacagctacggcgtgaacagcaccgagaagggcgatctgtctagcgagagcaccgtgtccagaatcagaaccgagcacttcccactgacactggaaagcgccagacctagccacaccagccagtacctgtgtgcctcttctgaggccagaggactggccgagttcaccgacacacagtatttcggccctggcaccagactgaccgttctcgagcagagcttcggcctgctggaccccaagctgtgctacctgctggatggcatcctgttcatctacggcgtgatcctgaccgccctgttcctgagagtgaagttcagcagaagcgccgacgcccctgcctaccagcagggacagaaccaactgtacaacgagctgaacctgggcagacgggaagagtacgacgtgctggacaagcggagaggcagggaccctgagatgggcggaaagccccagcggagaaagaacccccaggaaggactgtataacgaactccagaaagacaagatggccgaagcctacagcgagatcggcatgaagggcgagcggagaagaggcaagggccacgatggcctgtaccagggcctgagcaccgccaccaaggacacctatgacgccctgcacatgcaggccctgcctccaagaagggccaagcgatctggatctggagcaacaaacttctcactactcaaacaagcaggtgacgtggaggagaatcccgggcctactagtatggactggatttggcgcatccttttccttgtcggcgctgctaccggcgcccattccgggccccaggttcagctgcaagagtctggcggaggacttgctcaagctggcggaagcctgagactgtcttgtgccgcctctggcagaaccttcagcatgggctggtttagacaggcccctggcaaagagagagagttcgtcgccgccatcacatacagcggcggcagcccttactacgcctcttctgtcagaggccggttcaccatcagccgggacaacgccaagaacaccgtgtacctccagatgaacagcctgaagccagaggacaccgccgtgtactactgtgccgccaatccaacctacggcagcgactggaatgccgagaattggggccagggcacccaagtgacagtgtctagtggatccggcggcggaggatctggcggaggcggatctgggggcggaggctctttcgaacaagttcagcttcaacagcctggcgctgagctggtcaaacctggcgcttctgtgaagatgagctgcaaagccagcggctacgccttcagcagctactggatcaactggatgaagcagaaacccggccagggactcgaatggatcggccaaatctatcccggcgacggcaccgagaacagattcagcgtgaacttccagaaggccgccaagagcttcagcctgaagatcagcgatagccagctgggcgacgccgccatgtacttttgcgcttatagaagcgccgtgaacgcccggctgatgtttggagatggcacacagctggtggtcaagcccaacacgcgtcagagttttgggttgttggaccctaaattgtgctatctgttggacggaatcctgttcatttacggagtgatcctgaccgcattgttcctgcgggttaagttttccagatccgcagacgcacccgcttaccaacaagggcagaaccaactctacaatgaacttaatttggggcggagggaagagtacgacgttctggacaaaaggaggggacgagatcccgagatgggcggaaagcctcagcgaaggaagaatccgcaagaggggctttataacgaactccagaaagataaaatggcagaagcctatagtgagattgggatgaagggagaaaggaggaggggtaaaggtcacgatgggttgtaccaaggattgagcacagccactaaagatacctatgatgcgctccacatgcaggccctgccgccaagacgcgccaagagaagcggatctggcgtgaagcagaccctgaatttcgacctgctgaagctggctggcgacgtggaatccaacccaggcccttctagaggccatatgaccgagtacaagcccacggtgcgcctcgccacccgcgacgacgtccccagggccgtacgcaccctcgccgccgcgttcgccgactaccccgccacgcgccacaccgtcgatccggaccgccacatcgagcgggtcaccgagctgcaagaactcttcctcacgcgcgtcgggctcgacatcggcaaggtgtgggtcgcggacgacggcgccgcggtggcggtctggaccacgccggagagcgtcgaagcgggggcggtgttcgccgagatcggcccgcgcatggccgagttgagcggttcccggctggccgcgcagcaacagatggaaggcctcctggcgccgcaccggcccaaggagcccgcgtggttcctggccaccgtcggcgtctcgcccgaccaccagggcaagggtctgggcagcgccgtcgtgctccccggagtggaggcggccgagcgcgccggggtgcccgccttcctggagacctccgcgccccgcaacctccccttctacgagcggctcggcttcaccgtcaccgccgacgtcgaggtgcccgaaggaccgcgcacctggtgcatgacccgcaagcccggtgcctga

SEQ ID NO: 3594 - DNA, 2784 bp, Artificial Sequence
  Synthetic Polynucloetide
atggccttaccagtgaccgccttgctcctgccgctggccttgctgctccacgccgccaggccggcatgccaggtccagctcgtcgagtccggcggcggcctcgtccaggccggcgactccgtcaccctctcctgcaccgcctccggccgcaccttctcctcctacgccctcgcctggttccgccagcgccccggcaaggagcgcgagttcgtcgccggcctccgctggggcggccccaccaactacgccgactccgtcaaggaccgcttcaccatctccggcgactccgccaagcacaccatgtacctccagatgaactccctcaagcccgaggacaccgccgtctactactgcggctacaaccccggcggctgggccgtcccctcccagtacgagtacgactcctggggccagggcacccaggtcaccgtctcctccggtaccggcggaggcggatctggcggcggaggtagcggtggcggaggatctgaattcgaagccgacatctaccagacacctagatacctggtcatcggcaccggcaagaaaatcaccctggaatgcagccagacaatgggccacgacaagatgtactggtatcagcaggaccccggcatggaactgcacctgatccactacagctacggcgtgaacagcaccgagaagggcgatctgtctagcgagagcaccgtgtccagaatcagaaccgagcacttcccactgacactggaaagcgccagacctagccacaccagccagtacctgtgtgcctcttctgaggccagaggactggccgagttcaccgacacacagtatttcggccctggcaccagactgaccgttctcgagggacagcctaaggccaatcctaccgtgacactgttccctccaagcagcgaagaactccaggccaacaaggccacacttgtgtgcctgatctccgacttctaccctggggctgtgacagtggcttggaaggccgatggatctcctgtgaaagccggcgtggaaaccaccaagccatccaagcagagcaacaacaaatacgccgccagctcctacctgagcctgacacctgagcagtggaagtcccacagatcctacagctgccaagtgacccacgaaggcagcaccgtggaaaagacagtggcccctacagagtgcagccccatcaagaccgatgtgattacaatggaccccaaggacaactgctccaaggacgccaacgataccctgctgctccagctgaccaacaccagcgcctactacatgtacttgttgctgctgctgaagtccgtggtgtacttcgccatcatcacatgctgcctgctgcggagaaccgccttctgctgcaacggcgagaagtctagggccaagcgatctggatctggagcaacaaacttctcactactcaaacaagcaggtgacgtggaggagaatcccgggcctactagtatggactggatttggcgcatccttttccttgtcggcgctgctaccggcgcccattccgggccccaggttcagctgcaagagtctggcggaggacttgctcaagctggcggaagcctgagactgtcttgtgccgcctctggcagaaccttcagcatgggctggtttagacaggcccctggcaaagagagagagttcgtcgccgccatcacatacagcggcggcagcccttactacgcctcttctgtcagaggccggttcaccatcagccgggacaacgccaagaacaccgtgtacctccagatgaacagcctgaagccagaggacaccgccgtgtactactgtgccgccaatccaacctacggcagcgactggaatgccgagaattggggccagggcacccaagtgacagtgtctagtggatccggcggcggaggatctggcggaggcggatctgggggcggaggctctttcgaacaagttcagcttcaacagcctggcgctgagctggtcaaacctggcgcttctgtgaagatgagctgcaaagccagcggctacgccttcagcagctactggatcaactggatgaagcagaaacccggccagggactcgaatggatcggccaaatctatcccggcgacggcaccgagaacagattcagcgtgaacttccagaaggccgccaagagcttcagcctgaagatcagcgatagccagctgggcgacgccgccatgtacttttgcgcttatagaagcgccgtgaacgcccggctgatgtttggagatggcacacagctggtggtcaagcccaacacgcgtgcctctacaaagggaccctccgtgtttcctctggctcccagcagcaagtctacaagcggaggaacagccgctctgggctgcctggtcaaggattactttcccgagcctgtgaccgtgtcctggaatagcggagcactgacaagcggcgtgcacacctttccagccgtgctgcaaagcagcggcctgtactctctgagcagcgtggtcacagtgcctagctctagcctgggcacccagacctacatctgcaatgtgaaccacaagcctagcaacaccaaggtggacaagagagtggaacccaagagctgtgaagtgaaaaccgactccaccgaccacgtgaagcccaaagagacagagaacaccaagcagcccagcaagagctgccacaagcccaaggccatcgtgcacaccgagaaagtgaacatgatgagcctgaccgtgctgggcctgcggatgctgttcgccaaaaccgtggccgtgaacttcctgctgaccgccaagctgttcttcctc

SEQ ID NO: 3595 - DNA, 2718 bp, Artificial Sequence
  Synthetic Polynucloetide
atggccttaccagtgaccgccttgctcctgccgctggccttgctgctccacgccgccaggccggcatgccaggtccagctcgtcgagtccggcggcggcctcgtccaggccggcgactccgtcaccctctcctgcaccgcctccggccgcaccttctcctcctacgccctcgcctggttccgccagcgccccggcaaggagcgcgagttcgtcgccggcctccgctggggcggccccaccaactacgccgactccgtcaaggaccgcttcaccatctccggcgactccgccaagcacaccatgtacctccagatgaactccctcaagcccgaggacaccgccgtctactactgcggctacaaccccggcggctgggccgtcccctcccagtacgagtacgactcctggggccagggcacccaggtcaccgtctcctccggtaccggcggaggcggatctggcggcggaggtagcggtggcggaggatctgaattcgaagccgacatctaccagacacctagatacctggtcatcggcaccggcaagaaaatcaccctggaatgcagccagacaatgggccacgacaagatgtactggtatcagcaggaccccggcatggaactgcacctgatccactacagctacggcgtgaacagcaccgagaagggcgatctgtctagcgagagcaccgtgtccagaatcagaaccgagcacttcccactgacactggaaagcgccagacctagccacaccagccagtacctgtgtgcctcttctgaggccagaggactggccgagttcaccgacacacagtatttcggccctggcaccagactgaccgttctcgagggacagcctaaggccaatcctaccgtgacactgttccctccaagcagcgaagaactccaggccaacaaggccacacttgtgtgcctgatctccgacttctaccctggggctgtgacagtggcttggaaggccgatggatctcctgtgaaagccggcgtggaaaccaccaagccatccaagcagagcaacaacaaatacgccgccagctcctacctgagcctgacacctgagcagtggaagtcccacagatcctacagctgccaagtgacccacgaaggcagcaccgtggaaaagacagtggcccctacagagtgcagcggcagagccgattgcggcatcaccagcgccagctaccaccagggcgtgctgagcgccaccatcctgtacgagatcctgctgggcaaggccaccctgtacgccgtgctggtgtctgccctggtgctgatggctatggtcaagcggaaggacagccggggaagggccaagcgatctggatctggagcaacaaacttctcactactcaaacaagcaggtgacgtggaggagaatcccgggcctactagtatggactggatttggcgcatccttttccttgtcggcgctgctaccggcgcccattccgggccccaggttcagctgcaagagtctggcggaggacttgctcaagctggcggaagcctgagactgtcttgtgccgcctctggcagaaccttcagcatgggctggtttagacaggcccctggcaaagagagagagttcgtcgccgccatcacatacagcggcggcagcccttactacgcctcttctgtcagaggccggttcaccatcagccgggacaacgccaagaacaccgtgtacctccagatgaacagcctgaagccagaggacaccgccgtgtactactgtgccgccaatccaacctacggcagcgactggaatgccgagaattggggccagggcacccaagtgacagtgtctagtggatccggcggcggaggatctggcggaggcggatctgggggcggaggctctttcgaacaagttcagcttcaacagcctggcgctgagctggtcaaacctggcgcttctgtgaagatgagctgcaaagccagcggctacgccttcagcagctactggatcaactggatgaagcagaaacccggccagggactcgaatggatcggccaaatctatcccggcgacggcaccgagaacagattcagcgtgaacttccagaaggccgccaagagcttcagcctgaagatcagcgatagccagctgggcgacgccgccatgtacttttgcgcttatagaagcgccgtgaacgcccggctgatgtttggagatggcacacagctggtggtcaagcccaacacgcgtgcctctacaaagggaccctccgtgtttcctctggctcccagcagcaagtctacaagcggaggaacagccgctctgggctgcctggtcaaggattactttcccgagcctgtgaccgtgtcctggaatagcggagcactgacaagcggcgtgcacacctttccagccgtgctgcaaagcagcggcctgtactctctgagcagcgtggtcacagtgcctagctctagcctgggcacccagacctacatctgcaatgtgaaccacaagcctagcaacaccaaggtggacaagagagtggaacccaagagctgtatccccgaggacacattcttcccaagcagcgacgtgccctgcgacgtgaagctggtggaaaagagcttcgagacagacaccaacctgaacttccagaacctgagcgtgatcggcttcagaatcctgctgctgaaagtggccggctttaacctgctgatgaccctgcggctgtggtccagc

SEQ ID NO: 3596 - DNA, 2718 bp, Artificial Sequence
  Synthetic Polynucloetide
atggccttaccagtgaccgccttgctcctgccgctggccttgctgctccacgccgccaggccggcatgccaggtccagctcgtcgagtccggcggcggcctcgtccaggccggcgactccgtcaccctctcctgcaccgcctccggccgcaccttctcctcctacgccctcgcctggttccgccagcgccccggcaaggagcgcgagttcgtcgccggcctccgctggggcggccccaccaactacgccgactccgtcaaggaccgcttcaccatctccggcgactccgccaagcacaccatgtacctccagatgaactccctcaagcccgaggacaccgccgtctactactgcggctacaaccccggcggctgggccgtcccctcccagtacgagtacgactcctggggccagggcacccaggtcaccgtctcctccggtaccggcggaggcggatctggcggcggaggtagcggtggcggaggatctgaattcgaagccgacatctaccagacacctagatacctggtcatcggcaccggcaagaaaatcaccctggaatgcagccagacaatgggccacgacaagatgtactggtatcagcaggaccccggcatggaactgcacctgatccactacagctacggcgtgaacagcaccgagaagggcgatctgtctagcgagagcaccgtgtccagaatcagaaccgagcacttcccactgacactggaaagcgccagacctagccacaccagccagtacctgtgtgcctcttctgaggccagaggactggccgagttcaccgacacacagtatttcggccctggcaccagactgaccgttctcgagggacagcctaaggccaatcctaccgtgacactgttccctccaagcagcgaagaactccaggccaacaaggccacacttgtgtgcctgatctccgacttctaccctggggctgtgacagtggcttggaaggccgatggatctcctgtgaaagccggcgtggaaaccaccaagccatccaagcagagcaacaacaaatacgccgccagctcctacctgagcctgacacctgagcagtggaagtcccacagatcctacagctgccaagtgacccacgaaggcagcaccgtggaaaagacagtggcccctacagagtgcagcggcagagccgattgcggctttaccagcgagagctaccagcagggcgtgctgagcgccaccatcctgtacgagatcctgctgggcaaggccaccctgtacgccgtgctggtgtctgccctggtgctgatggctatggtcaagcggaaggacagccggggaagggccaagcgatctggatctggagcaacaaacttctcactactcaaacaagcaggtgacgtggaggagaatcccgggcctactagtatggactggatttggcgcatccttttccttgtcggcgctgctaccggcgcccattccgggccccaggttcagctgcaagagtctggcggaggacttgctcaagctggcggaagcctgagactgtcttgtgccgcctctggcagaaccttcagcatgggctggtttagacaggcccctggcaaagagagagagttcgtcgccgccatcacatacagcggcggcagcccttactacgcctcttctgtcagaggccggttcaccatcagccgggacaacgccaagaacaccgtgtacctccagatgaacagcctgaagccagaggacaccgccgtgtactactgtgccgccaatccaacctacggcagcgactggaatgccgagaattggggccagggcacccaagtgacagtgtctagtggatccggcggcggaggatctggcggaggcggatctgggggcggaggctctttcgaacaagttcagcttcaacagcctggcgctgagctggtcaaacctggcgcttctgtgaagatgagctgcaaagccagcggctacgccttcagcagctactggatcaactggatgaagcagaaacccggccagggactcgaatggatcggccaaatctatcccggcgacggcaccgagaacagattcagcgtgaacttccagaaggccgccaagagcttcagcctgaagatcagcgatagccagctgggcgacgccgccatgtacttttgcgcttatagaagcgccgtgaacgcccggctgatgtttggagatggcacacagctggtggtcaagcccaacacgcgtgcctctacaaagggaccctccgtgtttcctctggctcccagcagcaagtctacaagcggaggaacagccgctctgggctgcctggtcaaggattactttcccgagcctgtgaccgtgtcctggaatagcggagcactgacaagcggcgtgcacacctttccagccgtgctgcaaagcagcggcctgtactctctgagcagcgtggtcacagtgcctagctctagcctgggcacccagacctacatctgcaatgtgaaccacaagcctagcaacaccaaggtggacaagagagtggaacccaagagctgtatccccgaggacacattcttcccaagccccgagagcagctgcgacgtgaagctggtggaaaagagcttcgagacagacaccaacctgaacttccagaacctgagcgtgatcggcttcagaatcctgctgctgaaagtggccggctttaacctgctgatgaccctgcggctgtggtccagc

SEQ ID NO: 3597 - DNA, 2418 bp, Artificial Sequence
  Synthetic Polynucloetide
atggactggatttggcgcatccttttccttgtcggcgctgctaccggcgcccattccctgttcaatcaagaggtgcagatccctctgaccgagagctactgtggcccctgtcctaagaactggatctgctacaagaacaactgctaccagttcttcgacgagagcaagaattggtacgagagccaggccagctgcatgagccagaatgccagcctgctgaaggtgtacagcaaagaggaccaggacctgctgaaactggtcaagagctaccactggatgggccttgtgcacatccccaccaatggctcttggcagtgggaggacggcagcattctgagccctaacctgctgaccatcatcgagatgcagaagggcgactgcgccctgtacgccagcagctttaagggctacatcgagaattgcagcaccccgaacacctacatctgtatgcagagaaccgttggcggaggcggaagtggaggcggaggatctggcggcggaggctctgacctctttaatcaagaagtccagattccactcaccgaatcctactgcggaccttgtccaaaaaattggatttgttataagaacaactgttatcaattctttgatgagtctaaaaattggtatgagtcccaggcttcctgcatgtctcagaacgcttctctgctgaaagtctactctaaagaagatcaggatctcctgaagctcgtcaagtcttatcattggatggggctcgtccacattcctaccaacggaagctggcaatgggaagatggctccatcctgtctccaaatctgctcacgattattgaaatgcagaaaggggattgtgctctctacgccagctccttcaagggatatattgagaactgtagcacgcccaatacttatatctgtatgcaacggaccgtgggatccggcggcggaggatctggcggaggcggatctgggggcggaggctctttcgaacaagttcagcttcaacagcctggcgctgagctggtcaaacctggcgcttctgtgaagatgagctgcaaagccagcggctacgccttcagcagctactggatcaactggatgaagcagaaacccggccagggactcgaatggatcggccaaatctatcccggcgacggcaccgagaacagattcagcgtgaacttccagaaggccgccaagagcttcagcctgaagatcagcgatagccagctgggcgacgccgccatgtacttttgcgcttatagaagcgccgtgaacgcccggctgatgtttggagatggcacacagctggtggtcaagcccaacggcggaggcggaagtggaggcggaggatctggcggcggaggctctgaagccgacatctaccagacacctagatacctggtcatcggcaccggcaagaaaatcaccctggaatgcagccagacaatgggccacgacaagatgtactggtatcagcaggaccccggcatggaactgcacctgatccactacagctacggcgtgaacagcaccgagaagggcgatctgtctagcgagagcaccgtgtccagaatcagaaccgagcacttcccactgacactggaaagcgccagacctagccacaccagccagtacctgtgtgcctcttctgaggccagaggactggccgagttcaccgacacacagtatttcggccctggcaccagactgaccgttacgcgtgagcagaaactgatctcggaagaggatctggcgaagcccaccacgacgccagcgccgcgaccaccaacaccggcgcccaccatcgcgtcgcagcccctgtccctgcgcccagaggcgtgccggccagcggcggggggcgcagtgcacacgagggggctggacttcgcctgtgacatctacatctgggcgcccttggccgggacttgtggggtccttctcctgtcactggttatcaccctttactgcaaacggggcagaaagaaactcctgtatatattcaaacaaccatttatgagaccagtacaaactactcaagaggaagatggctgtagctgccgatttccagaagaagaagaaggaggatgtgaactgagagtgaagttcagcaggagcgcagacgcccccgcgtaccagcagggccagaaccagctctataacgagctgaatctaggacgaagagaggagtacgatgttttggacaagagacgtggccgggaccctgagatggggggaaagccgagaaggaagaaccctcaggaaggcctgtacaatgaactgcagaaagataagatggcggaggcctacagtgagattgggatgaaaggcgagcgccggaggggcaaggggcacgatggcctttaccagggtctcagtacagccaccaaggacacctacgacgcccttcacatgcaggccctgccccctcgctga

SEQ ID NO: 3598 - DNA, 3483 bp, Artificial Sequence
  Synthetic Polynucloetide
atggccttaccagtgaccgccttgctcctgccgctggccttgctgctccacgccgccaggccggaagccgacatctaccagacacctagatacctggtcatcggcaccggcaagaaaatcaccctggaatgcagccagacaatgggccacgacaagatgtactggtatcagcaggaccccggcatggaactgcacctgatccactacagctacggcgtgaacagcaccgagaagggcgatctgtctagcgagagcaccgtgtccagaatcagaaccgagcacttcccactgacactggaaagcgccagacctagccacaccagccagtacctgtgtgcctcttctgaggccagaggactggccgagttcaccgacacacagtatttcggccctggcaccagactgaccgttctcgagatccagaaccctgatcctgccgtgtaccagctgcgggatagcaagagcagcgacaagagcgtgtgtctgttcaccgacttcgacagccagaccaacgtgtcccagagcaaggactccgacgtgtacatcaccgataagtgcgtgctggacatgcggagcatggacttcaagagcaactccgccgtggcctggtccaacaagtccgatttcgcctgcgccaacgccttcaacaacagcattatccccgaggacacattcttcccaagcagcgacgtgccctgcgacgtgaagctggtggaaaagagcttcgagacagacaccaacctgaacttccagaacctgagcgtgatcggcttcagaatcctgctgctgaaagtggccggctttaacctgctgatgaccctgcggctgtggtccagccgcgccaagagaagcggatctggcgtgaagcagaccctgaatttcgacctgctgaagctggctggcgacgtggaatccaacccaggccctactagtatggactggatttggcgcatccttttccttgtcggcgctgctaccggcgcccattccgggcccctgttcaatcaagaggtgcagatccctctgaccgagagctactgtggcccctgtcctaagaactggatctgctacaagaacaactgctaccagttcttcgacgagagcaagaattggtacgagagccaggccagctgcatgagccagaatgccagcctgctgaaggtgtacagcaaagaggaccaggacctgctgaaactggtcaagagctaccactggatgggccttgtgcacatccccaccaatggctcttggcagtgggaggacggcagcattctgagccctaacctgctgaccatcatcgagatgcagaagggcgactgcgccctgtacgccagcagctttaagggctacatcgagaattgcagcaccccgaacacctacatctgtatgcagagaaccgttggcggaggcggaagtggaggcggaggatctggcggcggaggctctgacctctttaatcaagaagtccagattccactcaccgaatcctactgcggaccttgtccaaaaaattggatttgttataagaacaactgttatcaattctttgatgagtctaaaaattggtatgagtcccaggcttcctgcatgtctcagaacgcttctctgctgaaagtctactctaaagaagatcaggatctcctgaagctcgtcaagtcttatcattggatggggctcgtccacattcctaccaacggaagctggcaatgggaagatggctccatcctgtctccaaatctgctcacgattattgaaatgcagaaaggggattgtgctctctacgccagctccttcaagggatatattgagaactgtagcacgcccaatacttatatctgtatgcaacggaccgtgggatccggcggcggaggatctggcggaggcggatctgggggcggaggctctttcgaacaagttcagcttcaacagcctggcgctgagctggtcaaacctggcgcttctgtgaagatgagctgcaaagccagcggctacgccttcagcagctactggatcaactggatgaagcagaaacccggccagggactcgaatggatcggccaaatctatcccggcgacggcaccgagaacagattcagcgtgaacttccagaaggccgccaagagcttcagcctgaagatcagcgatagccagctgggcgacgccgccatgtacttttgcgcttatagaagcgccgtgaacgcccggctgatgtttggagatggcacacagctggtggtcaagcccaacacgcgtgaggacctgaagaacgtgttcccacctgaggtggccgtgttcgagcctagcaaggccgagatcgcccacacccagaaagccaccctcgtgtgcctggctaccggcttctaccccgaccatgtggaactgtcttggtgggtcaacggcaaagaggtgcacagcggcgtgtgtaccgacccccagccactgaaagaacagcccgccctgaacgacagccggtactgcctgagcagcagactgagagtgtccgccaccttctggcagaacccccggaaccacttcagatgccaggtgcagttctacggcctgagcgagaacgacgagtggacccaggacagagccaagcccgtgacccagatcgtgtctgccgaagcctggggcagagccgattgcggcatcaccagcgccagctaccaccagggcgtgctgagcgccaccatcctgtacgagatcctgctgggcaaggccaccctgtacgccgtgctggtgtctgccctggtgctgatggctatggtcaagcggaaggacagccggggaagggccaagcgatctggatctggagcaacaaacttctcactactcaaacaagcaggtgacgtggaggagaatcccgggccttctagaggccatatgaccgagtacaagcccacggtgcgcctcgccacccgcgacgacgtccccagggccgtacgcaccctcgccgccgcgttcgccgactaccccgccacgcgccacaccgtcgatccggaccgccacatcgagcgggtcaccgagctgcaagaactcttcctcacgcgcgtcgggctcgacatcggcaaggtgtgggtcgcggacgacggcgccgcggtggcggtctggaccacgccggagagcgtcgaagcgggggcggtgttcgccgagatcggcccgcgcatggccgagttgagcggttcccggctggccgcgcagcaacagatggaaggcctcctggcgccgcaccggcccaaggagcccgcgtggttcctggccaccgtcggcgtctcgcccgaccaccagggcaagggtctgggcagcgccgtcgtgctccccggagtggaggcggccgagcgcgccggggtgcccgccttcctggagacctccgcgccccgcaacctccccttctacgagcggctcggcttcaccgtcaccgccgacgtcgaggtgcccgaaggaccgcgcacctggtgcatgacccgcaagcccggtgcctga

SEQ ID NO: 3599 - DNA, 3480 bp, Artificial Sequence
  Synthetic Polynucloetide
atggccttaccagtgaccgccttgctcctgccgctggccttgctgctccacgccgccaggccggaagccgacatctaccagacacctagatacctggtcatcggcaccggcaagaaaatcaccctggaatgcagccagacaatgggccacgacaagatgtactggtatcagcaggaccccggcatggaactgcacctgatccactacagctacggcgtgaacagcaccgagaagggcgatctgtctagcgagagcaccgtgtccagaatcagaaccgagcacttcccactgacactggaaagcgccagacctagccacaccagccagtacctgtgtgcctcttctgaggccagaggactggccgagttcaccgacacacagtatttcggccctggcaccagactgaccgttctcgaggacctgaagaacgtgttcccacctgaggtggccgtgttcgagcctagcaaggccgagatcgcccacacccagaaagccaccctcgtgtgcctggctaccggcttctaccccgaccatgtggaactgtcttggtgggtcaacggcaaagaggtgcacagcggcgtgtgtaccgacccccagccactgaaagaacagcccgccctgaacgacagccggtactgcctgagcagcagactgagagtgtccgccaccttctggcagaacccccggaaccacttcagatgccaggtgcagttctacggcctgagcgagaacgacgagtggacccaggacagagccaagcccgtgacccagatcgtgtctgccgaagcctggggcagagccgattgcggcatcaccagcgccagctaccaccagggcgtgctgagcgccaccatcctgtacgagatcctgctgggcaaggccaccctgtacgccgtgctggtgtctgccctggtgctgatggctatggtcaagcggaaggacagccggggaagggccaagcgatctggatctggagcaacaaacttctcactactcaaacaagcaggtgacgtggaggagaatcccgggcctactagtatggactggatttggcgcatccttttccttgtcggcgctgctaccggcgcccattccgggcccctgttcaatcaagaggtgcagatccctctgaccgagagctactgtggcccctgtcctaagaactggatctgctacaagaacaactgctaccagttcttcgacgagagcaagaattggtacgagagccaggccagctgcatgagccagaatgccagcctgctgaaggtgtacagcaaagaggaccaggacctgctgaaactggtcaagagctaccactggatgggccttgtgcacatccccaccaatggctcttggcagtgggaggacggcagcattctgagccctaacctgctgaccatcatcgagatgcagaagggcgactgcgccctgtacgccagcagctttaagggctacatcgagaattgcagcaccccgaacacctacatctgtatgcagagaaccgttggcggaggcggaagtggaggcggaggatctggcggcggaggctctgacctctttaatcaagaagtccagattccactcaccgaatcctactgcggaccttgtccaaaaaattggatttgttataagaacaactgttatcaattctttgatgagtctaaaaattggtatgagtcccaggcttcctgcatgtctcagaacgcttctctgctgaaagtctactctaaagaagatcaggatctcctgaagctcgtcaagtcttatcattggatggggctcgtccacattcctaccaacggaagctggcaatgggaagatggctccatcctgtctccaaatctgctcacgattattgaaatgcagaaaggggattgtgctctctacgccagctccttcaagggatatattgagaactgtagcacgcccaatacttatatctgtatgcaacggaccgtgggatccggcggcggaggatctggcggaggcggatctgggggcggaggctctttcgaacaagttcagcttcaacagcctggcgctgagctggtcaaacctggcgcttctgtgaagatgagctgcaaagccagcggctacgccttcagcagctactggatcaactggatgaagcagaaacccggccagggactcgaatggatcggccaaatctatcccggcgacggcaccgagaacagattcagcgtgaacttccagaaggccgccaagagcttcagcctgaagatcagcgatagccagctgggcgacgccgccatgtacttttgcgcttatagaagcgccgtgaacgcccggctgatgtttggagatggcacacagctggtggtcaagcccaacacgcgtatccagaaccctgatcctgccgtgtaccagctgcgggatagcaagagcagcgacaagagcgtgtgtctgttcaccgacttcgacagccagaccaacgtgtcccagagcaaggactccgacgtgtacatcaccgataagtgcgtgctggacatgcggagcatggacttcaagagcaactccgccgtggcctggtccaacaagtccgatttcgcctgcgccaacgccttcaacaacagcattatccccgaggacacattcttcccaagcagcgacgtgccctgcgacgtgaagctggtggaaaagagcttcgagacagacaccaacctgaacttccagaacctgagcgtgatcggcttcagaatcctgctgctgaaagtggccggctttaacctgctgatgaccctgcggctgtggtccagccgcgccaagagaagcggatctggcgtgaagcagaccctgaatttcgacctgctgaagctggctggcgacgtggaatccaacccaggcccttctagaggccatatgaccgagtacaagcccacggtgcgcctcgccacccgcgacgacgtccccagggccgtacgcaccctcgccgccgcgttcgccgactaccccgccacgcgccacaccgtcgatccggaccgccacatcgagcgggtcaccgagctgcaagaactcttcctcacgcgcgtcgggctcgacatcggcaaggtgtgggtcgcggacgacggcgccgcggtggcggtctggaccacgccggagagcgtcgaagcgggggcggtgttcgccgagatcggcccgcgcatggccgagttgagcggttcccggctggccgcgcagcaacagatggaaggcctcctggcgccgcaccggcccaaggagcccgcgtggttcctggccaccgtcggcgtctcgcccgaccaccagggcaagggtctgggcagcgccgtcgtgctccccggagtggaggcggccgagcgcgccggggtgcccgccttcctggagacctccgcgccccgcaacctccccttctacgagcggctcggcttcaccgtcaccgccgacgtcgaggtgcccgaaggaccgcgcacctggtgcatgacccgcaagcccggtgcctga

SEQ ID NO: 3600 - DNA, 3474 bp, Artificial Sequence
  Synthetic Polynucloetide
atggccttaccagtgaccgccttgctcctgccgctggccttgctgctccacgccgccaggccggaagccgacatctaccagacacctagatacctggtcatcggcaccggcaagaaaatcaccctggaatgcagccagacaatgggccacgacaagatgtactggtatcagcaggaccccggcatggaactgcacctgatccactacagctacggcgtgaacagcaccgagaagggcgatctgtctagcgagagcaccgtgtccagaatcagaaccgagcacttcccactgacactggaaagcgccagacctagccacaccagccagtacctgtgtgcctcttctgaggccagaggactggccgagttcaccgacacacagtatttcggccctggcaccagactgaccgttctcgaggacctgaagaacgtgttcccacctgaggtggccgtgttcgagcctagcgaggccgagatcagccacacccagaaagccaccctcgtgtgcctggctaccggcttctaccccgaccatgtggaactgtcttggtgggtcaacggcaaagaggtgcacagcggcgtgtgtaccgacccccagccactgaaagaacagcccgccctgaacgacagccggtactgcctgagcagcagactgagagtgtccgccaccttctggcagaacccccggaaccacttcagatgccaggtgcagttctacggcctgagcgagaacgacgagtggacccaggacagagccaagcccgtgacccagatcgtgtctgccgaagcctggggcagagccgattgcggctttaccagcgagagctaccagcagggcgtgctgagcgccaccatcctgtacgagatcctgctgggcaaggccaccctgtacgccgtgctggtgtctgccctggtgctgatggctatggtcaagcggaaggacagccggggaagggccaagcgatctggatctggagcaacaaacttctcactactcaaacaagcaggtgacgtggaggagaatcccgggcctactagtatggactggatttggcgcatccttttccttgtcggcgctgctaccggcgcccattccctgttcaatcaagaggtgcagatccctctgaccgagagctactgtggcccctgtcctaagaactggatctgctacaagaacaactgctaccagttcttcgacgagagcaagaattggtacgagagccaggccagctgcatgagccagaatgccagcctgctgaaggtgtacagcaaagaggaccaggacctgctgaaactggtcaagagctaccactggatgggccttgtgcacatccccaccaatggctcttggcagtgggaggacggcagcattctgagccctaacctgctgaccatcatcgagatgcagaagggcgactgcgccctgtacgccagcagctttaagggctacatcgagaattgcagcaccccgaacacctacatctgtatgcagagaaccgttggcggaggcggaagtggaggcggaggatctggcggcggaggctctgacctctttaatcaagaagtccagattccactcaccgaatcctactgcggaccttgtccaaaaaattggatttgttataagaacaactgttatcaattctttgatgagtctaaaaattggtatgagtcccaggcttcctgcatgtctcagaacgcttctctgctgaaagtctactctaaagaagatcaggatctcctgaagctcgtcaagtcttatcattggatggggctcgtccacattcctaccaacggaagctggcaatgggaagatggctccatcctgtctccaaatctgctcacgattattgaaatgcagaaaggggattgtgctctctacgccagctccttcaagggatatattgagaactgtagcacgcccaatacttatatctgtatgcaacggaccgtgggatccggcggcggaggatctggcggaggcggatctgggggcggaggctctttcgaacaagttcagcttcaacagcctggcgctgagctggtcaaacctggcgcttctgtgaagatgagctgcaaagccagcggctacgccttcagcagctactggatcaactggatgaagcagaaacccggccagggactcgaatggatcggccaaatctatcccggcgacggcaccgagaacagattcagcgtgaacttccagaaggccgccaagagcttcagcctgaagatcagcgatagccagctgggcgacgccgccatgtacttttgcgcttatagaagcgccgtgaacgcccggctgatgtttggagatggcacacagctggtggtcaagcccaacacgcgtatccagaaccctgatcctgccgtgtaccagctgcgggatagcaagagcagcgacaagagcgtgtgtctgttcaccgacttcgacagccagaccaacgtgtcccagagcaaggactccgacgtgtacatcaccgataagtgcgtgctggacatgcggagcatggacttcaagagcaactccgccgtggcctggtccaacaagtccgatttcgcctgcgccaacgccttcaacaacagcattatccccgaggacacattcttcccaagccccgagagcagctgcgacgtgaagctggtggaaaagagcttcgagacagacaccaacctgaacttccagaacctgagcgtgatcggcttcagaatcctgctgctgaaagtggccggctttaacctgctgatgaccctgcggctgtggtccagccgcgccaagagaagcggatctggcgtgaagcagaccctgaatttcgacctgctgaagctggctggcgacgtggaatccaacccaggcccttctagaggccatatgaccgagtacaagcccacggtgcgcctcgccacccgcgacgacgtccccagggccgtacgcaccctcgccgccgcgttcgccgactaccccgccacgcgccacaccgtcgatccggaccgccacatcgagcgggtcaccgagctgcaagaactcttcctcacgcgcgtcgggctcgacatcggcaaggtgtgggtcgcggacgacggcgccgcggtggcggtctggaccacgccggagagcgtcgaagcgggggcggtgttcgccgagatcggcccgcgcatggccgagttgagcggttcccggctggccgcgcagcaacagatggaaggcctcctggcgccgcaccggcccaaggagcccgcgtggttcctggccaccgtcggcgtctcgcccgaccaccagggcaagggtctgggcagcgccgtcgtgctccccggagtggaggcggccgagcgcgccggggtgcccgccttcctggagacctccgcgccccgcaacctccccttctacgagcggctcggcttcaccgtcaccgccgacgtcgaggtgcccgaaggaccgcgcacctggtgcatgacccgcaagcccggtgcctga

SEQ ID NO: 3601 - DNA, 2778 bp, Artificial Sequence
  Synthetic Polynucloetide
atggccttaccagtgaccgccttgctcctgccgctggccttgctgctccacgccgccaggccggaagccgacatctaccagacacctagatacctggtcatcggcaccggcaagaaaatcaccctggaatgcagccagacaatgggccacgacaagatgtactggtatcagcaggaccccggcatggaactgcacctgatccactacagctacggcgtgaacagcaccgagaagggcgatctgtctagcgagagcaccgtgtccagaatcagaaccgagcacttcccactgacactggaaagcgccagacctagccacaccagccagtacctgtgtgcctcttctgaggccagaggactggccgagttcaccgacacacagtatttcggccctggcaccagactgaccgttctcgaggacctgaagaacgtgttcccacctgaggtggccgtgttcgagcctagcgaggccgagatcagccacacccagaaagccaccctcgtgtgcctggctaccggcttctaccccgaccatgtggaactgtcttggtgggtcaacggcaaagaggtgcacagcggcgtgtgtaccgacccccagccactgaaagaacagcccgccctgaacgacagccggtactgcctgagcagcagactgagagtgtccgccaccttctggcagaacccccggaaccacttcagatgccaggtgcagttctacggcctgagcgagaacgacgagtggacccaggacagagccaagcccgtgacccagatcgtgtctgccgaagcctggggcagagccgattgcggctttaccagcgagagctaccagcagggcgtgctgagcgccaccatcctgtacgagatcctgctgggcaaggccaccctgtacgccgtgctggtgtctgccctggtgctgatggctatggtcaagcggaaggacagccggggaagggccaagcgatctggatctggagcaacaaacttctcactactcaaacaagcaggtgacgtggaggagaatcccgggcctactagtatggactggatttggcgcatccttttccttgtcggcgctgctaccggcgcccattccgggcccctgttcaatcaagaggtgcagatccctctgaccgagagctactgtggcccctgtcctaagaactggatctgctacaagaacaactgctaccagttcttcgacgagagcaagaattggtacgagagccaggccagctgcatgagccagaatgccagcctgctgaaggtgtacagcaaagaggaccaggacctgctgaaactggtcaagagctaccactggatgggccttgtgcacatccccaccaatggctcttggcagtgggaggacggcagcattctgagccctaacctgctgaccatcatcgagatgcagaagggcgactgcgccctgtacgccagcagctttaagggctacatcgagaattgcagcaccccgaacacctacatctgtatgcagagaaccgttggcggaggcggaagtggaggcggaggatctggcggcggaggctctgacctctttaatcaagaagtccagattccactcaccgaatcctactgcggaccttgtccaaaaaattggatttgttataagaacaactgttatcaattctttgatgagtctaaaaattggtatgagtcccaggcttcctgcatgtctcagaacgcttctctgctgaaagtctactctaaagaagatcaggatctcctgaagctcgtcaagtcttatcattggatggggctcgtccacattcctaccaacggaagctggcaatgggaagatggctccatcctgtctccaaatctgctcacgattattgaaatgcagaaaggggattgtgctctctacgccagctccttcaagggatatattgagaactgtagcacgcccaatacttatatctgtatgcaacggaccgtgggatccggcggcggaggatctggcggaggcggatctgggggcggaggctctttcgaacaagttcagcttcaacagcctggcgctgagctggtcaaacctggcgcttctgtgaagatgagctgcaaagccagcggctacgccttcagcagctactggatcaactggatgaagcagaaacccggccagggactcgaatggatcggccaaatctatcccggcgacggcaccgagaacagattcagcgtgaacttccagaaggccgccaagagcttcagcctgaagatcagcgatagccagctgggcgacgccgccatgtacttttgcgcttatagaagcgccgtgaacgcccggctgatgtttggagatggcacacagctggtggtcaagcccaacacgcgtatccagaaccctgatcctgccgtgtaccagctgcgggatagcaagagcagcgacaagagcgtgtgtctgttcaccgacttcgacagccagaccaacgtgtcccagagcaaggactccgacgtgtacatcaccgataagtgcgtgctggacatgcggagcatggacttcaagagcaactccgccgtggcctggtccaacaagtccgatttcgcctgcgccaacgccttcaacaacagcattatccccgaggacacattcttcccaagccccgagagcagctgcgacgtgaagctggtggaaaagagcttcgagacagacaccaacctgaacttccagaacctgagcgtgatcggcttcagaatcctgctgctgaaagtggccggctttaacctgctgatgaccctgcggctgtggtccagc

SEQ ID NO: 3602 - DNA, 3453 bp, Artificial Sequence
  Synthetic Polynucloetide
atggccttaccagtgaccgccttgctcctgccgctggccttgctgctccacgccgccaggccggaagccgacatctaccagacacctagatacctggtcatcggcaccggcaagaaaatcaccctggaatgcagccagacaatgggccacgacaagatgtactggtatcagcaggaccccggcatggaactgcacctgatccactacagctacggcgtgaacagcaccgagaagggcgatctgtctagcgagagcaccgtgtccagaatcagaaccgagcacttcccactgacactggaaagcgccagacctagccacaccagccagtacctgtgtgcctcttctgaggccagaggactggccgagttcaccgacacacagtatttcggccctggcaccagactgaccgttctcgaggacctgaagaacgtgttcccacctgaggtggccgtgttcgagcctagcgaggccgagatcagccacacccagaaagccaccctcgtgtgcctggctaccggcttctaccccgaccatgtggaactgtcttggtgggtcaacggcaaagaggtgcacagcggcgtgtgtaccgacccccagccactgaaagaacagcccgccctgaacgacagccggtactgcctgagcagcagactgagagtgtccgccaccttctggcagaacccccggaaccacttcagatgccaggtgcagttctacggcctgagcgagaacgacgagtggacccaggacagagccaagcccgtgacccagatcgtgtctgccgaagcctggggcagagccgattgcggctttaccagcgagagctaccagcagggcgtgctgagcgccaccatcctgtacgagatcctgctgggcaaggccaccctgtacgccgtgctggtgtctgccctggtgctgatggctatggtcaagcggaaggacagccggggaagggccaagcgatctggatctggagcaacaaacttctcactactcaaacaagcaggtgacgtggaggagaatcccgggcctactagtatggactggatttggcgcatccttttccttgtcggcgctgctaccggcgcccattccgggcccctgttcaatcaagaggtgcagatccctctgaccgagagctactgtggcccctgtcctaagaactggatctgctacaagaacaactgctaccagttcttcgacgagagcaagaattggtacgagagccaggccagctgcatgagccagaatgccagcctgctgaaggtgtacagcaaagaggaccaggacctgctgaaactggtcaagagctaccactggatgggccttgtgcacatccccaccaatggctcttggcagtgggaggacggcagcattctgagccctaacctgctgaccatcatcgagatgcagaagggcgactgcgccctgtacgccagcagctttaagggctacatcgagaattgcagcaccccgaacacctacatctgtatgcagagaaccgttggcggaggcggaagtggaggcggaggatctggcggcggaggctctgacctctttaatcaagaagtccagattccactcaccgaatcctactgcggaccttgtccaaaaaattggatttgttataagaacaactgttatcaattctttgatgagtctaaaaattggtatgagtcccaggcttcctgcatgtctcagaacgcttctctgctgaaagtctactctaaagaagatcaggatctcctgaagctcgtcaagtcttatcattggatggggctcgtccacattcctaccaacggaagctggcaatgggaagatggctccatcctgtctccaaatctgctcacgattattgaaatgcagaaaggggattgtgctctctacgccagctccttcaagggatatattgagaactgtagcacgcccaatacttatatctgtatgcaacggaccgtgggatccggcggcggaggatctggcggaggcggatctgggggcggaggctctttcgaacaagttcagcttcaacagcctggcgctgagctggtcaaacctggcgcttctgtgaagatgagctgcaaagccagcggctacgccttcagcagctactggatcaactggatgaagcagaaacccggccagggactcgaatggatcggccaaatctatcccggcgacggcaccgagaacagattcagcgtgaacttccagaaggccgccaagagcttcagcctgaagatcagcgatagccagctgggcgacgccgccatgtacttttgcgcttatagaagcgccgtgaacgcccggctgatgtttggagatggcacacagctggtggtcaagcccaacacgcgtatccagaaccctgatcctgccgtgtaccagctgcgggatagcaagagcagcgacaagagcgtgtgtctgttcaccgacttcgacagccagaccaacgtgtcccagagcaaggactccgacgtgtacatcaccgataagtgcgtgctggacatgcggagcatggacttcaagagcaactccgccgtggcctggtccaacaagtccgatttcgcctgcgccaacgccttcaacaacagcattatccccgaggacacattcttcccaagccccgagagcagctgcgacgtgaagctggtggaaaagagcttcgagacagacaccaacctgaacttccagaacctgagcgtgatcggcttcagaatcctgctgctgaaagtggccggctttaacctgctgatgaccctgcggctgtggtccagccgcgccaagagaagcggatctggcgtgaagcagaccctgaatttcgacctgctgaagctggctggcgacgtggaatccaacccaggcccttctagaggcgggatccacaccatggctacctacgaggtgctgtgcgaggtggcaagaaagctgggcaccgacgacagagaagtggtgctgttcctgctgaacgtgttcatccctcagcctacactggcccagctgatcggtgcactgagagccctgaaagaggaaggccggctgacctttcctctgctggccgaatgcctgttcagagccggaagaagggatctgctgcgggacctgctgcatctggaccccagatttctggaaagacacctggccggcaccatgagctacttcagcccttaccagctgaccgtgctgcacgttgacggcgaactgtgcgccagagatattcggagcctgatcttcctgagcaaggacaccatcggcagccggtctacccctcagacatttctgcactgggtgtactgcatggaaaacctggacctgctcggccccacagatgtggatgccctgatgtccatgctgagaagcctgagcagagtggacctccagagacaggtgcagacactgatgggactgcacctgagcggacctagccacagccagcactacagacacacccct

SEQ ID NO: 3603 - DNA, 2790 bp, Artificial Sequence
  Synthetic Polynucloetide
atggccttaccagtgaccgccttgctcctgccgctggccttgctgctccacgccgccaggccggaagccgacatctaccagacacctagatacctggtcatcggcaccggcaagaaaatcaccctggaatgcagccagacaatgggccacgacaagatgtactggtatcagcaggaccccggcatggaactgcacctgatccactacagctacggcgtgaacagcaccgagaagggcgatctgtctagcgagagcaccgtgtccagaatcagaaccgagcacttcccactgacactggaaagcgccagacctagccacaccagccagtacctgtgtgcctcttctgaggccagaggactggccgagttcaccgacacacagtatttcggccctggcaccagactgaccgttctcgagatccagaaccctgatcctgccgtgtaccagctgcgggatagcaagagcagcgacaagagcgtgtgtctgttcaccgacttcgacagccagaccaacgtgtcccagagcaaggactccgacgtgtacatcaccgataagtgcgtgctggacatgcggagcatggacttcaagagcaactccgccgtggcctggtccaacaagtccgatttcgcctgcgccaacgccttcaacaacagcattatccccgaggacacattcttcccaagccccgagagcagctgcgacgtgaagctggtggaaaagagcttcgagacagacaccaacctgaacttccagaacctgagcgtgatcggcttcagaatcctgctgctgaaagtggccggctttaacctgctgatgaccctgcggctgtggtccagccgcgccaagagaagcggatctggcgtgaagcagaccctgaatttcgacctgctgaagctggctggcgacgtggaatccaacccaggccctactagtatggactggatttggcgcatccttttccttgtcggcgctgctaccggcgcccattccgggcccctgttcaatcaagaggtgcagatccctctgaccgagagctactgtggcccctgtcctaagaactggatctgctacaagaacaactgctaccagttcttcgacgagagcaagaattggtacgagagccaggccagctgcatgagccagaatgccagcctgctgaaggtgtacagcaaagaggaccaggacctgctgaaactggtcaagagctaccactggatgggccttgtgcacatccccaccaatggctcttggcagtgggaggacggcagcattctgagccctaacctgctgaccatcatcgagatgcagaagggcgactgcgccctgtacgccagcagctttaagggctacatcgagaattgcagcaccccgaacacctacatctgtatgcagagaaccgttggcggaggcggaagtggaggcggaggatctggcggcggaggctctgacctctttaatcaagaagtccagattccactcaccgaatcctactgcggaccttgtccaaaaaattggatttgttataagaacaactgttatcaattctttgatgagtctaaaaattggtatgagtcccaggcttcctgcatgtctcagaacgcttctctgctgaaagtctactctaaagaagatcaggatctcctgaagctcgtcaagtcttatcattggatggggctcgtccacattcctaccaacggaagctggcaatgggaagatggctccatcctgtctccaaatctgctcacgattattgaaatgcagaaaggggattgtgctctctacgccagctccttcaagggatatattgagaactgtagcacgcccaatacttatatctgtatgcaacggaccgtgggatccggcggcggaggatctggcggaggcggatctgggggcggaggctctttcgaacaagttcagcttcaacagcctggcgctgagctggtcaaacctggcgcttctgtgaagatgagctgcaaagccagcggctacgccttcagcagctactggatcaactggatgaagcagaaacccggccagggactcgaatggatcggccaaatctatcccggcgacggcaccgagaacagattcagcgtgaacttccagaaggccgccaagagcttcagcctgaagatcagcgatagccagctgggcgacgccgccatgtacttttgcgcttatagaagcgccgtgaacgcccggctgatgtttggagatggcacacagctggtggtcaagcccaacacgcgtgaggacctgaagaacgtgttcccacctgaggtggccgtgttcgagcctagcgaggccgagatcagccacacccagaaagccaccctcgtgtgcctggctaccggcttctaccccgaccatgtggaactgtcttggtgggtcaacggcaaagaggtgcacagcggcgtgtgtaccgacccccagccactgaaagaacagcccgccctgaacgacagccggtactgcctgagcagcagactgagagtgtccgccaccttctggcagaacccccggaaccacttcagatgccaggtgcagttctacggcctgagcgagaacgacgagtggacccaggacagagccaagcccgtgacccagatcgtgtctgccgaagcctggggcagagccgattgcggctttaccagcgagagctaccagcagggcgtgctgagcgccaccatcctgtacgagatcctgctgggcaaggccaccctgtacgccgtgctggtgtctgccctggtgctgatggctatggtcaagcggaaggacagccgggga

SEQ ID NO: 3604 - DNA, 3456 bp, Artificial Sequence
  Synthetic Polynucloetide
atggccttaccagtgaccgccttgctcctgccgctggccttgctgctccacgccgccaggccggaagccgacatctaccagacacctagatacctggtcatcggcaccggcaagaaaatcaccctggaatgcagccagacaatgggccacgacaagatgtactggtatcagcaggaccccggcatggaactgcacctgatccactacagctacggcgtgaacagcaccgagaagggcgatctgtctagcgagagcaccgtgtccagaatcagaaccgagcacttcccactgacactggaaagcgccagacctagccacaccagccagtacctgtgtgcctcttctgaggccagaggactggccgagttcaccgacacacagtatttcggccctggcaccagactgaccgttctcgagatccagaaccctgatcctgccgtgtaccagctgcgggatagcaagagcagcgacaagagcgtgtgtctgttcaccgacttcgacagccagaccaacgtgtcccagagcaaggactccgacgtgtacatcaccgataagtgcgtgctggacatgcggagcatggacttcaagagcaactccgccgtggcctggtccaacaagtccgatttcgcctgcgccaacgccttcaacaacagcattatccccgaggacacattcttcccaagccccgagagcagctgcgacgtgaagctggtggaaaagagcttcgagacagacaccaacctgaacttccagaacctgagcgtgatcggcttcagaatcctgctgctgaaagtggccggctttaacctgctgatgaccctgcggctgtggtccagccgcgccaagagaagcggatctggcgtgaagcagaccctgaatttcgacctgctgaagctggctggcgacgtggaatccaacccaggccctactagtatggactggatttggcgcatccttttccttgtcggcgctgctaccggcgcccattccgggcccctgttcaatcaagaggtgcagatccctctgaccgagagctactgtggcccctgtcctaagaactggatctgctacaagaacaactgctaccagttcttcgacgagagcaagaattggtacgagagccaggccagctgcatgagccagaatgccagcctgctgaaggtgtacagcaaagaggaccaggacctgctgaaactggtcaagagctaccactggatgggccttgtgcacatccccaccaatggctcttggcagtgggaggacggcagcattctgagccctaacctgctgaccatcatcgagatgcagaagggcgactgcgccctgtacgccagcagctttaagggctacatcgagaattgcagcaccccgaacacctacatctgtatgcagagaaccgttggcggaggcggaagtggaggcggaggatctggcggcggaggctctgacctctttaatcaagaagtccagattccactcaccgaatcctactgcggaccttgtccaaaaaattggatttgttataagaacaactgttatcaattctttgatgagtctaaaaattggtatgagtcccaggcttcctgcatgtctcagaacgcttctctgctgaaagtctactctaaagaagatcaggatctcctgaagctcgtcaagtcttatcattggatggggctcgtccacattcctaccaacggaagctggcaatgggaagatggctccatcctgtctccaaatctgctcacgattattgaaatgcagaaaggggattgtgctctctacgccagctccttcaagggatatattgagaactgtagcacgcccaatacttatatctgtatgcaacggaccgtgggatccggcggcggaggatctggcggaggcggatctgggggcggaggctctttcgaacaagttcagcttcaacagcctggcgctgagctggtcaaacctggcgcttctgtgaagatgagctgcaaagccagcggctacgccttcagcagctactggatcaactggatgaagcagaaacccggccagggactcgaatggatcggccaaatctatcccggcgacggcaccgagaacagattcagcgtgaacttccagaaggccgccaagagcttcagcctgaagatcagcgatagccagctgggcgacgccgccatgtacttttgcgcttatagaagcgccgtgaacgcccggctgatgtttggagatggcacacagctggtggtcaagcccaacacgcgtgaggacctgaagaacgtgttcccacctgaggtggccgtgttcgagcctagcgaggccgagatcagccacacccagaaagccaccctcgtgtgcctggctaccggcttctaccccgaccatgtggaactgtcttggtgggtcaacggcaaagaggtgcacagcggcgtgtgtaccgacccccagccactgaaagaacagcccgccctgaacgacagccggtactgcctgagcagcagactgagagtgtccgccaccttctggcagaacccccggaaccacttcagatgccaggtgcagttctacggcctgagcgagaacgacgagtggacccaggacagagccaagcccgtgacccagatcgtgtctgccgaagcctggggcagagccgattgcggctttaccagcgagagctaccagcagggcgtgctgagcgccaccatcctgtacgagatcctgctgggcaaggccaccctgtacgccgtgctggtgtctgccctggtgctgatggctatggtcaagcggaaggacagccggggaagggccaagcgatctggatctggagcaacaaacttctcactactcaaacaagcaggtgacgtggaggagaatcccgggccttctagaggcgggatccacaccatggctacctacgaggtgctgtgcgaggtggcaagaaagctgggcaccgacgacagagaagtggtgctgttcctgctgaacgtgttcatccctcagcctacactggcccagctgatcggtgcactgagagccctgaaagaggaaggccggctgacctttcctctgctggccgaatgcctgttcagagccggaagaagggatctgctgcgggacctgctgcatctggaccccagatttctggaaagacacctggccggcaccatgagctacttcagcccttaccagctgaccgtgctgcacgttgacggcgaactgtgcgccagagatattcggagcctgatcttcctgagcaaggacaccatcggcagccggtctacccctcagacatttctgcactgggtgtactgcatggaaaacctggacctgctcggccccacagatgtggatgccctgatgtccatgctgagaagcctgagcagagtggacctccagagacaggtgcagacactgatgggactgcacctgagcggacctagccacagccagcactacagacacacccct

SEQ ID NO: 3605 - DNA, 3480 bp, Artificial Sequence
  Synthetic Polynucloetide
atggccttaccagtgaccgccttgctcctgccgctggccttgctgctccacgccgccaggccggaagccgacatctaccagacacctagatacctggtcatcggcaccggcaagaaaatcaccctggaatgcagccagacaatgggccacgacaagatgtactggtatcagcaggaccccggcatggaactgcacctgatccactacagctacggcgtgaacagcaccgagaagggcgatctgtctagcgagagcaccgtgtccagaatcagaaccgagcacttcccactgacactggaaagcgccagacctagccacaccagccagtacctgtgtgcctcttctgaggccagaggactggccgagttcaccgacacacagtatttcggccctggcaccagactgaccgttctcgaggacctgaagaacgtgttcccacctgaggtggccgtgttcgagcctagcgaggccgagatcagccacacccagaaagccaccctcgtgtgcctggctaccggcttctaccccgaccatgtggaactgtcttggtgggtcaacggcaaagaggtgcacagcggcgtgtctaccgacccccagccactgaaagaacagcccgccctgaacgacagccggtactgcctgagcagcagactgagagtgtccgccaccttctggcagaacccccggaaccacttcagatgccaggtgcagttctacggcctgagcgagaacgacgagtggacccaggacagagccaagcccgtgacccagatcgtgtctgccgaagcctggggcagagccgattgcggctttaccagcgagagctaccagcagggcgtgctgagcgccaccatcctgtacgagatcctgctgggcaaggccaccctgtacgccgtgctggtgtctgccctggtgctgatggctatggtcaagcggaaggacagccggggaagggccaagcgatctggatctggagcaacaaacttctcactactcaaacaagcaggtgacgtggaggagaatcccgggcctactagtatggactggatttggcgcatccttttccttgtcggcgctgctaccggcgcccattccgggcccctgttcaatcaagaggtgcagatccctctgaccgagagctactgtggcccctgtcctaagaactggatctgctacaagaacaactgctaccagttcttcgacgagagcaagaattggtacgagagccaggccagctgcatgagccagaatgccagcctgctgaaggtgtacagcaaagaggaccaggacctgctgaaactggtcaagagctaccactggatgggccttgtgcacatccccaccaatggctcttggcagtgggaggacggcagcattctgagccctaacctgctgaccatcatcgagatgcagaagggcgactgcgccctgtacgccagcagctttaagggctacatcgagaattgcagcaccccgaacacctacatctgtatgcagagaaccgttggcggaggcggaagtggaggcggaggatctggcggcggaggctctgacctctttaatcaagaagtccagattccactcaccgaatcctactgcggaccttgtccaaaaaattggatttgttataagaacaactgttatcaattctttgatgagtctaaaaattggtatgagtcccaggcttcctgcatgtctcagaacgcttctctgctgaaagtctactctaaagaagatcaggatctcctgaagctcgtcaagtcttatcattggatggggctcgtccacattcctaccaacggaagctggcaatgggaagatggctccatcctgtctccaaatctgctcacgattattgaaatgcagaaaggggattgtgctctctacgccagctccttcaagggatatattgagaactgtagcacgcccaatacttatatctgtatgcaacggaccgtgggatccggcggcggaggatctggcggaggcggatctgggggcggaggctctttcgaacaagttcagcttcaacagcctggcgctgagctggtcaaacctggcgcttctgtgaagatgagctgcaaagccagcggctacgccttcagcagctactggatcaactggatgaagcagaaacccggccagggactcgaatggatcggccaaatctatcccggcgacggcaccgagaacagattcagcgtgaacttccagaaggccgccaagagcttcagcctgaagatcagcgatagccagctgggcgacgccgccatgtacttttgcgcttatagaagcgccgtgaacgcccggctgatgtttggagatggcacacagctggtggtcaagcccaacacgcgtatccagaaccctgatcctgccgtgtaccagctgcgggatagcaagagcagcgacaagagcgtgtgtctgttcaccgacttcgacagccagaccaacgtgtcccagagcaaggactccgacgtgtacatcaccgataagaccgtgctggacatgcggagcatggacttcaagagcaactccgccgtggcctggtccaacaagtccgatttcgcctgcgccaacgccttcaacaacagcattatccccgaggacacattcttcccaagccccgagagcagctgcgacgtgaagctggtggaaaagagcttcgagacagacaccaacctgaacttccagaacctgagcgtgatcggcttcagaatcctgctgctgaaagtggccggctttaacctgctgatgaccctgcggctgtggtccagccgcgccaagagaagcggatctggcgtgaagcagaccctgaatttcgacctgctgaagctggctggcgacgtggaatccaacccaggcccttctagaggccatatgaccgagtacaagcccacggtgcgcctcgccacccgcgacgacgtccccagggccgtacgcaccctcgccgccgcgttcgccgactaccccgccacgcgccacaccgtcgatccggaccgccacatcgagcgggtcaccgagctgcaagaactcttcctcacgcgcgtcgggctcgacatcggcaaggtgtgggtcgcggacgacggcgccgcggtggcggtctggaccacgccggagagcgtcgaagcgggggcggtgttcgccgagatcggcccgcgcatggccgagttgagcggttcccggctggccgcgcagcaacagatggaaggcctcctggcgccgcaccggcccaaggagcccgcgtggttcctggccaccgtcggcgtctcgcccgaccaccagggcaagggtctgggcagcgccgtcgtgctccccggagtggaggcggccgagcgcgccggggtgcccgccttcctggagacctccgcgccccgcaacctccccttctacgagcggctcggcttcaccgtcaccgccgacgtcgaggtgcccgaaggaccgcgcacctggtgcatgacccgcaagcccggtgcctga

SEQ ID NO: 3606 - DNA, 3726 bp, Artificial Sequence
  Synthetic Polynucloetide
atggccttaccagtgaccgccttgctcctgccgctggccttgctgctccacgccgccaggccggaagccgacatctaccagacacctagatacctggtcatcggcaccggcaagaaaatcaccctggaatgcagccagacaatgggccacgacaagatgtactggtatcagcaggaccccggcatggaactgcacctgatccactacagctacggcgtgaacagcaccgagaagggcgatctgtctagcgagagcaccgtgtccagaatcagaaccgagcacttcccactgacactggaaagcgccagacctagccacaccagccagtacctgtgtgcctcttctgaggccagaggactggccgagttcaccgacacacagtatttcggccctggcaccagactgaccgttctcgaggacctgaagaacgtgttcccacctgaggtggccgtgttcgagcctagcgaggccgagatcagccacacccagaaagccaccctcgtgtgcctggctaccggcttctaccccgaccatgtggaactgtcttggtgggtcaacggcaaagaggtgcacagcggcgtgtctaccgacccccagccactgaaagaacagcccgccctgaacgacagccggtactgcctgagcagcagactgagagtgtccgccaccttctggcagaacccccggaaccacttcagatgccaggtgcagttctacggcctgagcgagaacgacgagtggacccaggacagagccaagcccgtgacccagatcgtgtctgccgaagcctggggcagagccgattgcggctttaccagcgagagctaccagcagggcgtgctgagcgccaccatcctgtacgagatcctgctgggcaaggccaccctgtacgccgtgctggtgtctgccctggtgctgatggctatggtcaagcggaaggacagccggggaagggccaagcgatctggatctggagcaacaaacttctcactactcaaacaagcaggtgacgtggaggagaatcccgggcctactagtatggactggatttggcgcatccttttccttgtcggcgctgctaccggcgcccattccgggcccctgttcaatcaagaggtgcagatccctctgaccgagagctactgtggcccctgtcctaagaactggatctgctacaagaacaactgctaccagttcttcgacgagagcaagaattggtacgagagccaggccagctgcatgagccagaatgccagcctgctgaaggtgtacagcaaagaggaccaggacctgctgaaactggtcaagagctaccactggatgggccttgtgcacatccccaccaatggctcttggcagtgggaggacggcagcattctgagccctaacctgctgaccatcatcgagatgcagaagggcgactgcgccctgtacgccagcagctttaagggctacatcgagaattgcagcaccccgaacacctacatctgtatgcagagaaccgttggcggaggcggaagtggaggcggaggatctggcggcggaggctctgacctctttaatcaagaagtccagattccactcaccgaatcctactgcggaccttgtccaaaaaattggatttgttataagaacaactgttatcaattctttgatgagtctaaaaattggtatgagtcccaggcttcctgcatgtctcagaacgcttctctgctgaaagtctactctaaagaagatcaggatctcctgaagctcgtcaagtcttatcattggatggggctcgtccacattcctaccaacggaagctggcaatgggaagatggctccatcctgtctccaaatctgctcacgattattgaaatgcagaaaggggattgtgctctctacgccagctccttcaagggatatattgagaactgtagcacgcccaatacttatatctgtatgcaacggaccgtgggatccggcggcggaggatctggcggaggcggatctgggggcggaggctctttcgaacaagttcagcttcaacagcctggcgctgagctggtcaaacctggcgcttctgtgaagatgagctgcaaagccagcggctacgccttcagcagctactggatcaactggatgaagcagaaacccggccagggactcgaatggatcggccaaatctatcccggcgacggcaccgagaacagattcagcgtgaacttccagaaggccgccaagagcttcagcctgaagatcagcgatagccagctgggcgacgccgccatgtacttttgcgcttatagaagcgccgtgaacgcccggctgatgtttggagatggcacacagctggtggtcaagcccaacacgcgtgagcagaaactgatctcggaagaggatgggagcggcaccccattcccttctctggcccctcccatcatgctgctggtggacggcaagcagcagatggtggtcgtgtgcctggtgctggatgtggccccacctggactggacagccccatctggtttagcgccggcaatggctctgccctggacgcctttacctacggcccaagccctgccaccgatggcacctggacaaatctggcccacctgagcctgcccagcgaggaactggcttcttgggagcctctcgtgtgccacacaggacctggcgctgagggacacagcagatccacccagcctatgcacctgtctggcgaggccagcaccgccagaacctgtcctcaggaacctctgagaggcacccctggcggagcactgtggctgggagtgctgagactgctgctgttcaagctgctgctgtttgacctgctgctgacctgctcctgtctgtgcgatcctgccggccctctgccttctcctgccaccaccacaagactgagagccctgggcagccacagactgcaccctgccacagagacaggcggcagagaggccacaagcagccctagaccccagcccagagacagaagatggggcgataccccccctggcagaaagcctggatctccagtccgcgccaagagaagcggatctggcgtgaagcagaccctgaatttcgacctgctgaagctggctggcgacgtggaatccaacccaggcccttctagaggccatatgaccgagtacaagcccacggtgcgcctcgccacccgcgacgacgtccccagggccgtacgcaccctcgccgccgcgttcgccgactaccccgccacgcgccacaccgtcgatccggaccgccacatcgagcgggtcaccgagctgcaagaactcttcctcacgcgcgtcgggctcgacatcggcaaggtgtgggtcgcggacgacggcgccgcggtggcggtctggaccacgccggagagcgtcgaagcgggggcggtgttcgccgagatcggcccgcgcatggccgagttgagcggttcccggctggccgcgcagcaacagatggaaggcctcctggcgccgcaccggcccaaggagcccgcgtggttcctggccaccgtcggcgtctcgcccgaccaccagggcaagggtctgggcagcgccgtcgtgctccccggagtggaggcggccgagcgcgccggggtgcccgccttcctggagacctccgcgccccgcaacctccccttctacgagcggctcggcttcaccgtcaccgccgacgtcgaggtgcccgaaggaccgcgcacctggtgcatgacccgcaagcccggtgcctga

SEQ ID NO: 3607 - DNA, 3591 bp, Artificial Sequence
  Synthetic Polynucloetide
atggccttaccagtgaccgccttgctcctgccgctggccttgctgctccacgccgccaggccggaagccgacatctaccagacacctagatacctggtcatcggcaccggcaagaaaatcaccctggaatgcagccagacaatgggccacgacaagatgtactggtatcagcaggaccccggcatggaactgcacctgatccactacagctacggcgtgaacagcaccgagaagggcgatctgtctagcgagagcaccgtgtccagaatcagaaccgagcacttcccactgacactggaaagcgccagacctagccacaccagccagtacctgtgtgcctcttctgaggccagaggactggccgagttcaccgacacacagtatttcggccctggcaccagactgaccgttctcgaggggaaaccaattcccaaccctcttctgggactggattcaaccggcagcggcgacaagcagctggacgccgacgtgtcccccaagcctaccatcttcctgccctctatcgccgagacaaagctccagaaggccggcacctacctgtgcctgctggaaaagttcttcccagatgtgattaagatccactggcaggaaaagaagtccaacaccatcctgggcagccaggaaggcaacaccatgaagaccaacgacacctacatgaagttcagctggctgaccgtgcccgagaagtccctggacaaagaacacagatgcatcgtgcggcacgaaaacaacaagaacggcgtggaccaggaaatcatcttcccacccatcaagaccgatgtgattacaatggaccccaaggacaactgctccaaggacgccaacgataccctgctgctccagctgaccaacaccagcgcctactacatgtacttgttgctgctgctgaagtccgtggtgtacttcgccatcatcacatgctgcctgctgcggagaaccgccttctgctgcaacggcgagaagtctagggccaagcgatctggatctggagcaacaaacttctcactactcaaacaagcaggtgacgtggaggagaatcccgggcctactagtatggactggatttggcgcatccttttccttgtcggcgctgctaccggcgcccattccgggcccctgttcaatcaagaggtgcagatccctctgaccgagagctactgtggcccctgtcctaagaactggatctgctacaagaacaactgctaccagttcttcgacgagagcaagaattggtacgagagccaggccagctgcatgagccagaatgccagcctgctgaaggtgtacagcaaagaggaccaggacctgctgaaactggtcaagagctaccactggatgggccttgtgcacatccccaccaatggctcttggcagtgggaggacggcagcattctgagccctaacctgctgaccatcatcgagatgcagaagggcgactgcgccctgtacgccagcagctttaagggctacatcgagaattgcagcaccccgaacacctacatctgtatgcagagaaccgttggcggaggcggaagtggaggcggaggatctggcggcggaggctctgacctctttaatcaagaagtccagattccactcaccgaatcctactgcggaccttgtccaaaaaattggatttgttataagaacaactgttatcaattctttgatgagtctaaaaattggtatgagtcccaggcttcctgcatgtctcagaacgcttctctgctgaaagtctactctaaagaagatcaggatctcctgaagctcgtcaagtcttatcattggatggggctcgtccacattcctaccaacggaagctggcaatgggaagatggctccatcctgtctccaaatctgctcacgattattgaaatgcagaaaggggattgtgctctctacgccagctccttcaagggatatattgagaactgtagcacgcccaatacttatatctgtatgcaacggaccgtgggatccggcggcggaggatctggcggaggcggatctgggggcggaggctctttcgaacaagttcagcttcaacagcctggcgctgagctggtcaaacctggcgcttctgtgaagatgagctgcaaagccagcggctacgccttcagcagctactggatcaactggatgaagcagaaacccggccagggactcgaatggatcggccaaatctatcccggcgacggcaccgagaacagattcagcgtgaacttccagaaggccgccaagagcttcagcctgaagatcagcgatagccagctgggcgacgccgccatgtacttttgcgcttatagaagcgccgtgaacgcccggctgatgtttggagatggcacacagctggtggtcaagcccaacacgcgtgagcagaaactgatctcggaagaggatgggagcggcagccagcctcacaccaagcccagcgtgttcgtgatgaagaacggcaccaacgtggcctgcctcgtgaaagagttctaccccaaggacatcaggatcaacctggtgtccagcaagaagatcaccgagttcgaccccgccatcgtgatctcccccagcggcaagtacaacgccgtgaagctggggaagtacgaggacagcaacagcgtgacctgctccgtgcagcacgacaacaagaccgtgcacagcaccgactttgaagtgaaaaccgactccaccgaccacgtgaagcccaaagagacagagaacaccaagcagcccagcaagagctgccacaagcccaaggccatcgtgcacaccgagaaagtgaacatgatgagcctgaccgtgctgggcctgcggatgctgttcgccaaaaccgtggccgtgaacttcctgctgaccgccaagctgttcttcctccgcgccaagagaagcggatctggcgtgaagcagaccctgaatttcgacctgctgaagctggctggcgacgtggaatccaacccaggcccttctagaggccatatgaccgagtacaagcccacggtgcgcctcgccacccgcgacgacgtccccagggccgtacgcaccctcgccgccgcgttcgccgactaccccgccacgcgccacaccgtcgatccggaccgccacatcgagcgggtcaccgagctgcaagaactcttcctcacgcgcgtcgggctcgacatcggcaaggtgtgggtcgcggacgacggcgccgcggtggcggtctggaccacgccggagagcgtcgaagcgggggcggtgttcgccgagatcggcccgcgcatggccgagttgagcggttcccggctggccgcgcagcaacagatggaaggcctcctggcgccgcaccggcccaaggagcccgcgtggttcctggccaccgtcggcgtctcgcccgaccaccagggcaagggtctgggcagcgccgtcgtgctccccggagtggaggcggccgagcgcgccggggtgcccgccttcctggagacctccgcgccccgcaacctccccttctacgagcggctcggcttcaccgtcaccgccgacgtcgaggtgcccgaaggaccgcgcacctggtgcatgacccgcaagcccggtgcctga

SEQ ID NO: 3608 - DNA, 2802 bp, Artificial Sequence
  Synthetic Polynucloetide
atggccttaccagtgaccgccttgctcctgccgctggccttgctgctccacgccgccaggccggaagccgacatctaccagacacctagatacctggtcatcggcaccggcaagaaaatcaccctggaatgcagccagacaatgggccacgacaagatgtactggtatcagcaggaccccggcatggaactgcacctgatccactacagctacggcgtgaacagcaccgagaagggcgatctgtctagcgagagcaccgtgtccagaatcagaaccgagcacttcccactgacactggaaagcgccagacctagccacaccagccagtacctgtgtgcctcttctgaggccagaggactggccgagttcaccgacacacagtatttcggccctggcaccagactgaccgttctcgagagccagcctcacaccaagcccagcgtgttcgtgatgaagaacggcaccaacgtggcctgcctcgtgaaagagttctaccccaaggacatcaggatcaacctggtgtccagcaagaagatcaccgagttcgaccccgccatcgtgatctcccccagcggcaagtacaacgccgtgaagctggggaagtacgaggacagcaacagcgtgacctgctccgtgcagcacgacaacaagaccgtgcacagcaccgactttgaagtgaaaaccgactccaccgaccacgtgaagcccaaagagacagagaacaccaagcagcccagcaagagctgccacaagcccaaggccatcgtgcacaccgagaaagtgaacatgatgagcctgaccgtgctgggcctgcggatgctgttcgccaaaaccgtggccgtgaacttcctgctgaccgccaagctgttcttcctcagggccaagcgatctggatctggagcaacaaacttctcactactcaaacaagcaggtgacgtggaggagaatcccgggcctactagtatggactggatttggcgcatccttttccttgtcggcgctgctaccggcgcccattccgggcccctgttcaatcaagaggtgcagatccctctgaccgagagctactgtggcccctgtcctaagaactggatctgctacaagaacaactgctaccagttcttcgacgagagcaagaattggtacgagagccaggccagctgcatgagccagaatgccagcctgctgaaggtgtacagcaaagaggaccaggacctgctgaaactggtcaagagctaccactggatgggccttgtgcacatccccaccaatggctcttggcagtgggaggacggcagcattctgagccctaacctgctgaccatcatcgagatgcagaagggcgactgcgccctgtacgccagcagctttaagggctacatcgagaattgcagcaccccgaacacctacatctgtatgcagagaaccgttggcggaggcggaagtggaggcggaggatctggcggcggaggctctgacctctttaatcaagaagtccagattccactcaccgaatcctactgcggaccttgtccaaaaaattggatttgttataagaacaactgttatcaattctttgatgagtctaaaaattggtatgagtcccaggcttcctgcatgtctcagaacgcttctctgctgaaagtctactctaaagaagatcaggatctcctgaagctcgtcaagtcttatcattggatggggctcgtccacattcctaccaacggaagctggcaatgggaagatggctccatcctgtctccaaatctgctcacgattattgaaatgcagaaaggggattgtgctctctacgccagctccttcaagggatatattgagaactgtagcacgcccaatacttatatctgtatgcaacggaccgtgggatccggcggcggaggatctggcggaggcggatctgggggcggaggctctttcgaacaagttcagcttcaacagcctggcgctgagctggtcaaacctggcgcttctgtgaagatgagctgcaaagccagcggctacgccttcagcagctactggatcaactggatgaagcagaaacccggccagggactcgaatggatcggccaaatctatcccggcgacggcaccgagaacagattcagcgtgaacttccagaaggccgccaagagcttcagcctgaagatcagcgatagccagctgggcgacgccgccatgtacttttgcgcttatagaagcgccgtgaacgcccggctgatgtttggagatggcacacagctggtggtcaagcccaacacgcgtgacaagcagctggacgccgacgtgtcccccaagcctaccatcttcctgccctctatcgccgagacaaagctccagaaggccggcacctacctgtgcctgctggaaaagttcttcccagatgtgattaagatccactggcaggaaaagaagtccaacaccatcctgggcagccaggaaggcaacaccatgaagaccaacgacacctacatgaagttcagctggctgaccgtgcccgagaagtccctggacaaagaacacagatgcatcgtgcggcacgaaaacaacaagaacggcgtggaccaggaaatcatcttcccacccatcaagaccgatgtgattacaatggaccccaaggacaactgctccaaggacgccaacgataccctgctgctccagctgaccaacaccagcgcctactacatgtacttgttgctgctgctgaagtccgtggtgtacttcgccatcatcacatgctgcctgctgcggagaaccgccttctgctgcaacggcgagaagtct

SEQ ID NO: 3609 - DNA, 4011 bp, Artificial Sequence
  Synthetic Polynucloetide
atggccttaccagtgaccgccttgctcctgccgctggccttgctgctccacgccgccaggccggaagccgacatctaccagacacctagatacctggtcatcggcaccggcaagaaaatcaccctggaatgcagccagacaatgggccacgacaagatgtactggtatcagcaggaccccggcatggaactgcacctgatccactacagctacggcgtgaacagcaccgagaagggcgatctgtctagcgagagcaccgtgtccagaatcagaaccgagcacttcccactgacactggaaagcgccagacctagccacaccagccagtacctgtgtgcctcttctgaggccagaggactggccgagttcaccgacacacagtatttcggccctggcaccagactgaccgttggacagcctaaggccaatcctaccgtgacactgttccctccaagcagcgaagaactccaggccaacaaggccacacttgtgtgcctgatctccgacttctaccctggggctgtgacagtggcttggaaggccgatggatctcctgtgaaagccggcgtggaaaccaccaagccatccaagcagagcaacaacaaatacgccgccagctcctacctgagcctgacacctgagcagtggaagtcccacagatcctacagctgccaagtgacccacgaaggcagcaccgtggaaaagacagtggcccctacagagtgcagcggatcccagagcttcggcctgctggaccccaagctgtgctacctgctggatggcatcctgttcatctacggcgtgatcctgaccgccctgttcctgagagtgaagttcagcagaagcgccgacgcccctgcctaccagcagggacagaaccaactgtacaacgagctgaacctgggcagacgggaagagtacgacgtgctggacaagcggagaggcagggaccctgagatgggcggaaagccccagcggagaaagaacccccaggaaggactgtataacgaactccagaaagacaagatggccgaagcctacagcgagatcggcatgaagggcgagcggagaagaggcaagggccacgatggcctgtaccagggcctgagcaccgccaccaaggacacctatgacgccctgcacatgcaggccctgcctccaagaagggccaagcgatctggatctggagcaacaaacttctcactactcaaacaagcaggtgacgtggaggagaatcccgggcctactagtatggactggatttggcgcatccttttccttgtcggcgctgctaccggcgcccattccgggcccctgttcaatcaagaggtgcagatccctctgaccgagagctactgtggcccctgtcctaagaactggatctgctacaagaacaactgctaccagttcttcgacgagagcaagaattggtacgagagccaggccagctgcatgagccagaatgccagcctgctgaaggtgtacagcaaagaggaccaggacctgctgaaactggtcaagagctaccactggatgggccttgtgcacatccccaccaatggctcttggcagtgggaggacggcagcattctgagccctaacctgctgaccatcatcgagatgcagaagggcgactgcgccctgtacgccagcagctttaagggctacatcgagaattgcagcaccccgaacacctacatctgtatgcagagaaccgttggcggaggcggaagtggaggcggaggatctggcggcggaggctctgacctctttaatcaagaagtccagattccactcaccgaatcctactgcggaccttgtccaaaaaattggatttgttataagaacaactgttatcaattctttgatgagtctaaaaattggtatgagtcccaggcttcctgcatgtctcagaacgcttctctgctgaaagtctactctaaagaagatcaggatctcctgaagctcgtcaagtcttatcattggatggggctcgtccacattcctaccaacggaagctggcaatgggaagatggctccatcctgtctccaaatctgctcacgattattgaaatgcagaaaggggattgtgctctctacgccagctccttcaagggatatattgagaactgtagcacgcccaatacttatatctgtatgcaacggaccgtgggatccggcggcggaggatctggcggaggcggatctgggggcggaggctctttcgaacaagttcagcttcaacagcctggcgctgagctggtcaaacctggcgcttctgtgaagatgagctgcaaagccagcggctacgccttcagcagctactggatcaactggatgaagcagaaacccggccagggactcgaatggatcggccaaatctatcccggcgacggcaccgagaacagattcagcgtgaacttccagaaggccgccaagagcttcagcctgaagatcagcgatagccagctgggcgacgccgccatgtacttttgcgcttatagaagcgccgtgaacgcccggctgatgtttggagatggcacacagctggtggtcaagcccaacgcctctacaaagggaccctccgtgtttcctctggctcccagcagcaagtctacaagcggaggaacagccgctctgggctgcctggtcaaggattactttcccgagcctgtgaccgtgtcctggaatagcggagcactgacaagcggcgtgcacacctttccagccgtgctgcaaagcagcggcctgtactctctgagcagcgtggtcacagtgcctagctctagcctgggcacccagacctacatctgcaatgtgaaccacaagcctagcaacaccaaggtggacaagagagtggaacccaagagctgtggtacccagagttttgggttgttggaccctaaattgtgctatctgttggacggaatcctgttcatttacggagtgatcctgaccgcattgttcctgcgggttaagttttccagatccgcagacgcacccgcttaccaacaagggcagaaccaactctacaatgaacttaatttggggcggagggaagagtacgacgttctggacaaaaggaggggacgagatcccgagatgggcggaaagcctcagcgaaggaagaatccgcaagaggggctttataacgaactccagaaagataaaatggcagaagcctatagtgagattgggatgaagggagaaaggaggaggggtaaaggtcacgatgggttgtaccaaggattgagcacagccactaaagatacctatgatgcgctccacatgcaggccctgccgccaagacgcgccaagagaagcggatctggcgtgaagcagaccctgaatttcgacctgctgaagctggctggcgacgtggaatccaacccaggcccttctagaggccatatgaccgagtacaagcccacggtgcgcctcgccacccgcgacgacgtccccagggccgtacgcaccctcgccgccgcgttcgccgactaccccgccacgcgccacaccgtcgatccggaccgccacatcgagcgggtcaccgagctgcaagaactcttcctcacgcgcgtcgggctcgacatcggcaaggtgtgggtcgcggacgacggcgccgcggtggcggtctggaccacgccggagagcgtcgaagcgggggcggtgttcgccgagatcggcccgcgcatggccgagttgagcggttcccggctggccgcgcagcaacagatggaaggcctcctggcgccgcaccggcccaaggagcccgcgtggttcctggccaccgtcggcgtctcgcccgaccaccagggcaagggtctgggcagcgccgtcgtgctccccggagtggaggcggccgagcgcgccggggtgcccgccttcctggagacctccgcgccccgcaacctccccttctacgagcggctcggcttcaccgtcaccgccgacgtcgaggtgcccgaaggaccgcgcacctggtgcatgacccgcaagcccggtgcctga

SEQ ID NO: 3610 - DNA, 3366 bp, Artificial Sequence
  Synthetic Polynucloetide
atggccttaccagtgaccgccttgctcctgccgctggccttgctgctccacgccgccaggccggaagccgacatctaccagacacctagatacctggtcatcggcaccggcaagaaaatcaccctggaatgcagccagacaatgggccacgacaagatgtactggtatcagcaggaccccggcatggaactgcacctgatccactacagctacggcgtgaacagcaccgagaagggcgatctgtctagcgagagcaccgtgtccagaatcagaaccgagcacttcccactgacactggaaagcgccagacctagccacaccagccagtacctgtgtgcctcttctgaggccagaggactggccgagttcaccgacacacagtatttcggccctggcaccagactgaccgttctcgaggacctgaagaacgtgttcccacctgaggtggccgtgttcgagcctagcgaggccgagatcagccacacccagaaagccaccctcgtgtgcctggctaccggcttctaccccgaccatgtggaactgtcttggtgggtcaacggcaaagaggtgcacagcggcgtgtctaccgacccccagccactgaaagaacagcccgccctgaacgacagccggtactgcctgagcagcagactgagagtgtccgccaccttctggcagaacccccggaaccacttcagatgccaggtgcagttctacggcctgagcgagaacgacgagtggacccaggacagagccaagcccgtgacccagatcgtgtctgccgaagcctggggcagagccgattgcggatcccagagcttcggcctgctggaccccaagctgtgctacctgctggatggcatcctgttcatctacggcgtgatcctgaccgccctgttcctgagagtgaagttcagcagaagcgccgacgcccctgcctaccagcagggacagaaccaactgtacaacgagctgaacctgggcagacgggaagagtacgacgtgctggacaagcggagaggcagggaccctgagatgggcggaaagccccagcggagaaagaacccccaggaaggactgtataacgaactccagaaagacaagatggccgaagcctacagcgagatcggcatgaagggcgagcggagaagaggcaagggccacgatggcctgtaccagggcctgagcaccgccaccaaggacacctatgacgccctgcacatgcaggccctgcctccaagaagggccaagcgatctggatctggagcaacaaacttctcactactcaaacaagcaggtgacgtggaggagaatcccgggcctactagtatggactggatttggcgcatccttttccttgtcggcgctgctaccggcgcccattccgggcccctgttcaatcaagaggtgcagatccctctgaccgagagctactgtggcccctgtcctaagaactggatctgctacaagaacaactgctaccagttcttcgacgagagcaagaattggtacgagagccaggccagctgcatgagccagaatgccagcctgctgaaggtgtacagcaaagaggaccaggacctgctgaaactggtcaagagctaccactggatgggccttgtgcacatccccaccaatggctcttggcagtgggaggacggcagcattctgagccctaacctgctgaccatcatcgagatgcagaagggcgactgcgccctgtacgccagcagctttaagggctacatcgagaattgcagcaccccgaacacctacatctgtatgcagagaaccgttggcggaggcggaagtggaggcggaggatctggcggcggaggctctgacctctttaatcaagaagtccagattccactcaccgaatcctactgcggaccttgtccaaaaaattggatttgttataagaacaactgttatcaattctttgatgagtctaaaaattggtatgagtcccaggcttcctgcatgtctcagaacgcttctctgctgaaagtctactctaaagaagatcaggatctcctgaagctcgtcaagtcttatcattggatggggctcgtccacattcctaccaacggaagctggcaatgggaagatggctccatcctgtctccaaatctgctcacgattattgaaatgcagaaaggggattgtgctctctacgccagctccttcaagggatatattgagaactgtagcacgcccaatacttatatctgtatgcaacggaccgtgggatccggcggcggaggatctggcggaggcggatctgggggcggaggctctttcgaacaagttcagcttcaacagcctggcgctgagctggtcaaacctggcgcttctgtgaagatgagctgcaaagccagcggctacgccttcagcagctactggatcaactggatgaagcagaaacccggccagggactcgaatggatcggccaaatctatcccggcgacggcaccgagaacagattcagcgtgaacttccagaaggccgccaagagcttcagcctgaagatcagcgatagccagctgggcgacgccgccatgtacttttgcgcttatagaagcgccgtgaacgcccggctgatgtttggagatggcacacagctggtggtcaagcccaacacgcgtatccagaaccctgatcctgccgtgtaccagctgcgggatagcaagagcagcgacaagagcgtgtgtctgttcaccgacttcgacagccagaccaacgtgtcccagagcaaggactccgacgtgtacatcaccgataagaccgtgctggacatgcggagcatggacttcaagagcaactccgccgtggcctggtccaacaagtccgatttcgcctgcgccaacgccttcaacaacagcattatccccgaggacacattcttcccaagccccgagagcagctgcggtacccagagttttgggttgttggaccctaaattgtgctatctgttggacggaatcctgttcatttacggagtgatcctgaccgcattgttcctgcgggttaagttttccagatccgcagacgcacccgcttaccaacaagggcagaaccaactctacaatgaacttaatttggggcggagggaagagtacgacgttctggacaaaaggaggggacgagatcccgagatgggcggaaagcctcagcgaaggaagaatccgcaagaggggctttataacgaactccagaaagataaaatggcagaagcctatagtgagattgggatgaagggagaaaggaggaggggtaaaggtcacgatgggttgtaccaaggattgagcacagccactaaagatacctatgatgcgctccacatgcaggccctgccgccaaga

SEQ ID NO: 3611 - DNA, 3366 bp, Artificial Sequence
  Synthetic Polynucloetide
atggccttaccagtgaccgccttgctcctgccgctggccttgctgctccacgccgccaggccggaagccgacatctaccagacacctagatacctggtcatcggcaccggcaagaaaatcaccctggaatgcagccagacaatgggccacgacaagatgtactggtatcagcaggaccccggcatggaactgcacctgatccactacagctacggcgtgaacagcaccgagaagggcgatctgtctagcgagagcaccgtgtccagaatcagaaccgagcacttcccactgacactggaaagcgccagacctagccacaccagccagtacctgtgtgcctcttctgaggccagaggactggccgagttcaccgacacacagtatttcggccctggcaccagactgaccgttctcgaggacctgaagaacgtgttcccacctgaggtggccgtgttcgagcctagcaaggccgagatcgcccacacccagaaagccaccctcgtgtgcctggctaccggcttctaccccgaccatgtggaactgtcttggtgggtcaacggcaaagaggtgcacagcggcgtgtgtaccgacccccagccactgaaagaacagcccgccctgaacgacagccggtactgcctgagcagcagactgagagtgtccgccaccttctggcagaacccccggaaccacttcagatgccaggtgcagttctacggcctgagcgagaacgacgagtggacccaggacagagccaagcccgtgacccagatcgtgtctgccgaagcctggggcagagccgattgcggatcccagagcttcggcctgctggaccccaagctgtgctacctgctggatggcatcctgttcatctacggcgtgatcctgaccgccctgttcctgagagtgaagttcagcagaagcgccgacgcccctgcctaccagcagggacagaaccaactgtacaacgagctgaacctgggcagacgggaagagtacgacgtgctggacaagcggagaggcagggaccctgagatgggcggaaagccccagcggagaaagaacccccaggaaggactgtataacgaactccagaaagacaagatggccgaagcctacagcgagatcggcatgaagggcgagcggagaagaggcaagggccacgatggcctgtaccagggcctgagcaccgccaccaaggacacctatgacgccctgcacatgcaggccctgcctccaagaagggccaagcgatctggatctggagcaacaaacttctcactactcaaacaagcaggtgacgtggaggagaatcccgggcctactagtatggactggatttggcgcatccttttccttgtcggcgctgctaccggcgcccattccgggcccctgttcaatcaagaggtgcagatccctctgaccgagagctactgtggcccctgtcctaagaactggatctgctacaagaacaactgctaccagttcttcgacgagagcaagaattggtacgagagccaggccagctgcatgagccagaatgccagcctgctgaaggtgtacagcaaagaggaccaggacctgctgaaactggtcaagagctaccactggatgggccttgtgcacatccccaccaatggctcttggcagtgggaggacggcagcattctgagccctaacctgctgaccatcatcgagatgcagaagggcgactgcgccctgtacgccagcagctttaagggctacatcgagaattgcagcaccccgaacacctacatctgtatgcagagaaccgttggcggaggcggaagtggaggcggaggatctggcggcggaggctctgacctctttaatcaagaagtccagattccactcaccgaatcctactgcggaccttgtccaaaaaattggatttgttataagaacaactgttatcaattctttgatgagtctaaaaattggtatgagtcccaggcttcctgcatgtctcagaacgcttctctgctgaaagtctactctaaagaagatcaggatctcctgaagctcgtcaagtcttatcattggatggggctcgtccacattcctaccaacggaagctggcaatgggaagatggctccatcctgtctccaaatctgctcacgattattgaaatgcagaaaggggattgtgctctctacgccagctccttcaagggatatattgagaactgtagcacgcccaatacttatatctgtatgcaacggaccgtgggatccggcggcggaggatctggcggaggcggatctgggggcggaggctctttcgaacaagttcagcttcaacagcctggcgctgagctggtcaaacctggcgcttctgtgaagatgagctgcaaagccagcggctacgccttcagcagctactggatcaactggatgaagcagaaacccggccagggactcgaatggatcggccaaatctatcccggcgacggcaccgagaacagattcagcgtgaacttccagaaggccgccaagagcttcagcctgaagatcagcgatagccagctgggcgacgccgccatgtacttttgcgcttatagaagcgccgtgaacgcccggctgatgtttggagatggcacacagctggtggtcaagcccaacacgcgtatccagaaccctgatcctgccgtgtaccagctgcgggatagcaagagcagcgacaagagcgtgtgtctgttcaccgacttcgacagccagaccaacgtgtcccagagcaaggactccgacgtgtacatcaccgataagtgcgtgctggacatgcggagcatggacttcaagagcaactccgccgtggcctggtccaacaagtccgatttcgcctgcgccaacgccttcaacaacagcattatccccgaggacacattcttcccaagcagcgacgtgccctgcggtacccagagttttgggttgttggaccctaaattgtgctatctgttggacggaatcctgttcatttacggagtgatcctgaccgcattgttcctgcgggttaagttttccagatccgcagacgcacccgcttaccaacaagggcagaaccaactctacaatgaacttaatttggggcggagggaagagtacgacgttctggacaaaaggaggggacgagatcccgagatgggcggaaagcctcagcgaaggaagaatccgcaagaggggctttataacgaactccagaaagataaaatggcagaagcctatagtgagattgggatgaagggagaaaggaggaggggtaaaggtcacgatgggttgtaccaaggattgagcacagccactaaagatacctatgatgcgctccacatgcaggccctgccgccaaga

SEQ ID NO: 3612 - DNA, 3579 bp, Artificial Sequence
  Synthetic Polynucloetide
atggccttaccagtgaccgccttgctcctgccgctggccttgctgctccacgccgccaggccggaagccgacatctaccagacacctagatacctggtcatcggcaccggcaagaaaatcaccctggaatgcagccagacaatgggccacgacaagatgtactggtatcagcaggaccccggcatggaactgcacctgatccactacagctacggcgtgaacagcaccgagaagggcgatctgtctagcgagagcaccgtgtccagaatcagaaccgagcacttcccactgacactggaaagcgccagacctagccacaccagccagtacctgtgtgcctcttctgaggccagaggactggccgagttcaccgacacacagtatttcggccctggcaccagactgaccgttctcgaggggaaaccaattcccaaccctcttctgggactggattcaaccggcagcggcgaggacctgaagaacgtgttcccacctgaggtggccgtgttcgagcctagcgaggccgagatcagccacacccagaaagccaccctcgtgtgcctggctaccggcttctaccccgaccatgtggaactgtcttggtgggtcaacggcaaagaggtgcacagcggcgtgtctaccgacccccagccactgaaagaacagcccgccctgaacgacagccggtactgcctgagcagcagactgagagtgtccgccaccttctggcagaacccccggaaccacttcagatgccaggtgcagttctacggcctgagcgagaacgacgagtggacccaggacagagccaagcccgtgacccagatcgtgtctgccgaagcctggggcagagccgattgcggatcccagagcttcggcctgctggaccccaagctgtgctacctgctggatggcatcctgttcatctacggcgtgatcctgaccgccctgttcctgagagtgaagttcagcagaagcgccgacgcccctgcctaccagcagggacagaaccaactgtacaacgagctgaacctgggcagacgggaagagtacgacgtgctggacaagcggagaggcagggaccctgagatgggcggaaagccccagcggagaaagaacccccaggaaggactgtataacgaactccagaaagacaagatggccgaagcctacagcgagatcggcatgaagggcgagcggagaagaggcaagggccacgatggcctgtaccagggcctgagcaccgccaccaaggacacctatgacgccctgcacatgcaggccctgcctccaagaagggccaagcgatctggatctggagcaacaaacttctcactactcaaacaagcaggtgacgtggaggagaatcccgggcctactagtatggactggatttggcgcatccttttccttgtcggcgctgctaccggcgcccattccgggcccctgttcaatcaagaggtgcagatccctctgaccgagagctactgtggcccctgtcctaagaactggatctgctacaagaacaactgctaccagttcttcgacgagagcaagaattggtacgagagccaggccagctgcatgagccagaatgccagcctgctgaaggtgtacagcaaagaggaccaggacctgctgaaactggtcaagagctaccactggatgggccttgtgcacatccccaccaatggctcttggcagtgggaggacggcagcattctgagccctaacctgctgaccatcatcgagatgcagaagggcgactgcgccctgtacgccagcagctttaagggctacatcgagaattgcagcaccccgaacacctacatctgtatgcagagaaccgttggcggaggcggaagtggaggcggaggatctggcggcggaggctctgacctctttaatcaagaagtccagattccactcaccgaatcctactgcggaccttgtccaaaaaattggatttgttataagaacaactgttatcaattctttgatgagtctaaaaattggtatgagtcccaggcttcctgcatgtctcagaacgcttctctgctgaaagtctactctaaagaagatcaggatctcctgaagctcgtcaagtcttatcattggatggggctcgtccacattcctaccaacggaagctggcaatgggaagatggctccatcctgtctccaaatctgctcacgattattgaaatgcagaaaggggattgtgctctctacgccagctccttcaagggatatattgagaactgtagcacgcccaatacttatatctgtatgcaacggaccgtgggatccggcggcggaggatctggcggaggcggatctgggggcggaggctctttcgaacaagttcagcttcaacagcctggcgctgagctggtcaaacctggcgcttctgtgaagatgagctgcaaagccagcggctacgccttcagcagctactggatcaactggatgaagcagaaacccggccagggactcgaatggatcggccaaatctatcccggcgacggcaccgagaacagattcagcgtgaacttccagaaggccgccaagagcttcagcctgaagatcagcgatagccagctgggcgacgccgccatgtacttttgcgcttatagaagcgccgtgaacgcccggctgatgtttggagatggcacacagctggtggtcaagcccaacacgcgtgagcagaaactgatctcggaagaggatgggagcggcatccagaaccctgatcctgccgtgtaccagctgcgggatagcaagagcagcgacaagagcgtgtgtctgttcaccgacttcgacagccagaccaacgtgtcccagagcaaggactccgacgtgtacatcaccgataagaccgtgctggacatgcggagcatggacttcaagagcaactccgccgtggcctggtccaacaagtccgatttcgcctgcgccaacgccttcaacaacagcattatccccgaggacacattcttcccaagccccgagagcagctgcggtacccagagttttgggttgttggaccctaaattgtgctatctgttggacggaatcctgttcatttacggagtgatcctgaccgcattgttcctgaggagcaagcggtcacggctgctccacagcgattacatgaatatgacaccacgaagaccgggtcctactcgcaaacactaccaaccctacgcacctccccgcgactttgcagcgtaccgatctcgggttaagttttccagatccgcagacgcacccgcttaccaacaagggcagaaccaactctacaatgaacttaatttggggcggagggaagagtacgacgttctggacaaaaggaggggacgagatcccgagatgggcggaaagcctcagcgaaggaagaatccgcaagaggggctttataacgaactccagaaagataaaatggcagaagcctatagtgagattgggatgaagggagaaaggaggaggggtaaaggtcacgatgggttgtaccaaggattgagcacagccactaaagatacctatgatgcgctccacatgcaggccctgccgccaaga

SEQ ID NO: 3613 - DNA, 3702 bp, Artificial Sequence
  Synthetic Polynucloetide
atggccttaccagtgaccgccttgctcctgccgctggccttgctgctccacgccgccaggccggaagccgacatctaccagacacctagatacctggtcatcggcaccggcaagaaaatcaccctggaatgcagccagacaatgggccacgacaagatgtactggtatcagcaggaccccggcatggaactgcacctgatccactacagctacggcgtgaacagcaccgagaagggcgatctgtctagcgagagcaccgtgtccagaatcagaaccgagcacttcccactgacactggaaagcgccagacctagccacaccagccagtacctgtgtgcctcttctgaggccagaggactggccgagttcaccgacacacagtatttcggccctggcaccagactgaccgttctcgaggggaaaccaattcccaaccctcttctgggactggattcaaccggcagcggcgaggacctgaagaacgtgttcccacctgaggtggccgtgttcgagcctagcgaggccgagatcagccacacccagaaagccaccctcgtgtgcctggctaccggcttctaccccgaccatgtggaactgtcttggtgggtcaacggcaaagaggtgcacagcggcgtgtctaccgacccccagccactgaaagaacagcccgccctgaacgacagccggtactgcctgagcagcagactgagagtgtccgccaccttctggcagaacccccggaaccacttcagatgccaggtgcagttctacggcctgagcgagaacgacgagtggacccaggacagagccaagcccgtgacccagatcgtgtctgccgaagcctggggcagagccgattgcggatcccagagcttcggcctgctggaccccaagctgtgctacctgctggatggcatcctgttcatctacggcgtgatcctgaccgccctgttcctgaggagtaagaggagcaggctcctgcacagtgactacatgaacatgactccacgccgccccggacccacccgcaagcattaccagccctatgccccaccacgcgacttcgcagcctatcgctccagagtgaagttcagcagaagcgccgacgcccctgcctaccagcagggacagaaccaactgtacaacgagctgaacctgggcagacgggaagagtacgacgtgctggacaagcggagaggcagggaccctgagatgggcggaaagccccagcggagaaagaacccccaggaaggactgtataacgaactccagaaagacaagatggccgaagcctacagcgagatcggcatgaagggcgagcggagaagaggcaagggccacgatggcctgtaccagggcctgagcaccgccaccaaggacacctatgacgccctgcacatgcaggccctgcctccaagaagggccaagcgatctggatctggagcaacaaacttctcactactcaaacaagcaggtgacgtggaggagaatcccgggcctactagtatggactggatttggcgcatccttttccttgtcggcgctgctaccggcgcccattccgggcccctgttcaatcaagaggtgcagatccctctgaccgagagctactgtggcccctgtcctaagaactggatctgctacaagaacaactgctaccagttcttcgacgagagcaagaattggtacgagagccaggccagctgcatgagccagaatgccagcctgctgaaggtgtacagcaaagaggaccaggacctgctgaaactggtcaagagctaccactggatgggccttgtgcacatccccaccaatggctcttggcagtgggaggacggcagcattctgagccctaacctgctgaccatcatcgagatgcagaagggcgactgcgccctgtacgccagcagctttaagggctacatcgagaattgcagcaccccgaacacctacatctgtatgcagagaaccgttggcggaggcggaagtggaggcggaggatctggcggcggaggctctgacctctttaatcaagaagtccagattccactcaccgaatcctactgcggaccttgtccaaaaaattggatttgttataagaacaactgttatcaattctttgatgagtctaaaaattggtatgagtcccaggcttcctgcatgtctcagaacgcttctctgctgaaagtctactctaaagaagatcaggatctcctgaagctcgtcaagtcttatcattggatggggctcgtccacattcctaccaacggaagctggcaatgggaagatggctccatcctgtctccaaatctgctcacgattattgaaatgcagaaaggggattgtgctctctacgccagctccttcaagggatatattgagaactgtagcacgcccaatacttatatctgtatgcaacggaccgtgggatccggcggcggaggatctggcggaggcggatctgggggcggaggctctttcgaacaagttcagcttcaacagcctggcgctgagctggtcaaacctggcgcttctgtgaagatgagctgcaaagccagcggctacgccttcagcagctactggatcaactggatgaagcagaaacccggccagggactcgaatggatcggccaaatctatcccggcgacggcaccgagaacagattcagcgtgaacttccagaaggccgccaagagcttcagcctgaagatcagcgatagccagctgggcgacgccgccatgtacttttgcgcttatagaagcgccgtgaacgcccggctgatgtttggagatggcacacagctggtggtcaagcccaacacgcgtgagcagaaactgatctcggaagaggatgggagcggcatccagaaccctgatcctgccgtgtaccagctgcgggatagcaagagcagcgacaagagcgtgtgtctgttcaccgacttcgacagccagaccaacgtgtcccagagcaaggactccgacgtgtacatcaccgataagaccgtgctggacatgcggagcatggacttcaagagcaactccgccgtggcctggtccaacaagtccgatttcgcctgcgccaacgccttcaacaacagcattatccccgaggacacattcttcccaagccccgagagcagctgcggtacccagagttttgggttgttggaccctaaattgtgctatctgttggacggaatcctgttcatttacggagtgatcctgaccgcattgttcctgaggagcaagcggtcacggctgctccacagcgattacatgaatatgacaccacgaagaccgggtcctactcgcaaacactaccaaccctacgcacctccccgcgactttgcagcgtaccgatctcgggttaagttttccagatccgcagacgcacccgcttaccaacaagggcagaaccaactctacaatgaacttaatttggggcggagggaagagtacgacgttctggacaaaaggaggggacgagatcccgagatgggcggaaagcctcagcgaaggaagaatccgcaagaggggctttataacgaactccagaaagataaaatggcagaagcctatagtgagattgggatgaagggagaaaggaggaggggtaaaggtcacgatgggttgtaccaaggattgagcacagccactaaagatacctatgatgcgctccacatgcaggccctgccgccaaga

SEQ ID NO: 3614 - DNA, 3585 bp, Artificial Sequence
  Synthetic Polynucloetide
atggccttaccagtgaccgccttgctcctgccgctggccttgctgctccacgccgccaggccggaagccgacatctaccagacacctagatacctggtcatcggcaccggcaagaaaatcaccctggaatgcagccagacaatgggccacgacaagatgtactggtatcagcaggaccccggcatggaactgcacctgatccactacagctacggcgtgaacagcaccgagaagggcgatctgtctagcgagagcaccgtgtccagaatcagaaccgagcacttcccactgacactggaaagcgccagacctagccacaccagccagtacctgtgtgcctcttctgaggccagaggactggccgagttcaccgacacacagtatttcggccctggcaccagactgaccgttctcgaggggaaaccaattcccaaccctcttctgggactggattcaaccggcagcggcgaggacctgaagaacgtgttcccacctgaggtggccgtgttcgagcctagcgaggccgagatcagccacacccagaaagccaccctcgtgtgcctggctaccggcttctaccccgaccatgtggaactgtcttggtgggtcaacggcaaagaggtgcacagcggcgtgtctaccgacccccagccactgaaagaacagcccgccctgaacgacagccggtactgcctgagcagcagactgagagtgtccgccaccttctggcagaacccccggaaccacttcagatgccaggtgcagttctacggcctgagcgagaacgacgagtggacccaggacagagccaagcccgtgacccagatcgtgtctgccgaagcctggggcagagccgattgcggatcccagagcttcggcctgctggaccccaagctgtgctacctgctggatggcatcctgttcatctacggcgtgatcctgaccgccctgttcctgagagtgaagttcagcagaagcgccgacgcccctgcctaccagcagggacagaaccaactgtacaacgagctgaacctgggcagacgggaagagtacgacgtgctggacaagcggagaggcagggaccctgagatgggcggaaagccccagcggagaaagaacccccaggaaggactgtataacgaactccagaaagacaagatggccgaagcctacagcgagatcggcatgaagggcgagcggagaagaggcaagggccacgatggcctgtaccagggcctgagcaccgccaccaaggacacctatgacgccctgcacatgcaggccctgcctccaagaagggccaagcgatctggatctggagcaacaaacttctcactactcaaacaagcaggtgacgtggaggagaatcccgggcctactagtatggactggatttggcgcatccttttccttgtcggcgctgctaccggcgcccattccgggcccctgttcaatcaagaggtgcagatccctctgaccgagagctactgtggcccctgtcctaagaactggatctgctacaagaacaactgctaccagttcttcgacgagagcaagaattggtacgagagccaggccagctgcatgagccagaatgccagcctgctgaaggtgtacagcaaagaggaccaggacctgctgaaactggtcaagagctaccactggatgggccttgtgcacatccccaccaatggctcttggcagtgggaggacggcagcattctgagccctaacctgctgaccatcatcgagatgcagaagggcgactgcgccctgtacgccagcagctttaagggctacatcgagaattgcagcaccccgaacacctacatctgtatgcagagaaccgttggcggaggcggaagtggaggcggaggatctggcggcggaggctctgacctctttaatcaagaagtccagattccactcaccgaatcctactgcggaccttgtccaaaaaattggatttgttataagaacaactgttatcaattctttgatgagtctaaaaattggtatgagtcccaggcttcctgcatgtctcagaacgcttctctgctgaaagtctactctaaagaagatcaggatctcctgaagctcgtcaagtcttatcattggatggggctcgtccacattcctaccaacggaagctggcaatgggaagatggctccatcctgtctccaaatctgctcacgattattgaaatgcagaaaggggattgtgctctctacgccagctccttcaagggatatattgagaactgtagcacgcccaatacttatatctgtatgcaacggaccgtgggatccggcggcggaggatctggcggaggcggatctgggggcggaggctctttcgaacaagttcagcttcaacagcctggcgctgagctggtcaaacctggcgcttctgtgaagatgagctgcaaagccagcggctacgccttcagcagctactggatcaactggatgaagcagaaacccggccagggactcgaatggatcggccaaatctatcccggcgacggcaccgagaacagattcagcgtgaacttccagaaggccgccaagagcttcagcctgaagatcagcgatagccagctgggcgacgccgccatgtacttttgcgcttatagaagcgccgtgaacgcccggctgatgtttggagatggcacacagctggtggtcaagcccaacacgcgtgagcagaaactgatctcggaagaggatctggggagcggcatccagaaccctgatcctgccgtgtaccagctgcgggatagcaagagcagcgacaagagcgtgtgtctgttcaccgacttcgacagccagaccaacgtgtcccagagcaaggactccgacgtgtacatcaccgataagaccgtgctggacatgcggagcatggacttcaagagcaactccgccgtggcctggtccaacaagtccgatttcgcctgcgccaacgccttcaacaacagcattatccccgaggacacattcttcccaagccccgagagcagctgcggtacccagagttttgggttgttggaccctaaattgtgctatctgttggacggaatcctgttcatttacggagtgatcctgaccgcattgttcctgaagagaggccggaagaagctgctgtacatcttcaagcagcctttcatgcggcccgtgcagaccacccaggaagaggacggctgctcctgccggttccccgaggaagaagaaggcggctgcgagctgcgggttaagttttccagatccgcagacgcacccgcttaccaacaagggcagaaccaactctacaatgaacttaatttggggcggagggaagagtacgacgttctggacaaaaggaggggacgagatcccgagatgggcggaaagcctcagcgaaggaagaatccgcaagaggggctttataacgaactccagaaagataaaatggcagaagcctatagtgagattgggatgaagggagaaaggaggaggggtaaaggtcacgatgggttgtaccaaggattgagcacagccactaaagatacctatgatgcgctccacatgcaggccctgccgccaaga

SEQ ID NO: 3615 - DNA, 3711 bp, Artificial Sequence
  Synthetic Polynucloetide
atggccttaccagtgaccgccttgctcctgccgctggccttgctgctccacgccgccaggccggaagccgacatctaccagacacctagatacctggtcatcggcaccggcaagaaaatcaccctggaatgcagccagacaatgggccacgacaagatgtactggtatcagcaggaccccggcatggaactgcacctgatccactacagctacggcgtgaacagcaccgagaagggcgatctgtctagcgagagcaccgtgtccagaatcagaaccgagcacttcccactgacactggaaagcgccagacctagccacaccagccagtacctgtgtgcctcttctgaggccagaggactggccgagttcaccgacacacagtatttcggccctggcaccagactgaccgttctcgaggggaaaccaattcccaaccctcttctgggactggattcaaccggcagcggcgaggacctgaagaacgtgttcccacctgaggtggccgtgttcgagcctagcgaggccgagatcagccacacccagaaagccaccctcgtgtgcctggctaccggcttctaccccgaccatgtggaactgtcttggtgggtcaacggcaaagaggtgcacagcggcgtgtctaccgacccccagccactgaaagaacagcccgccctgaacgacagccggtactgcctgagcagcagactgagagtgtccgccaccttctggcagaacccccggaaccacttcagatgccaggtgcagttctacggcctgagcgagaacgacgagtggacccaggacagagccaagcccgtgacccagatcgtgtctgccgaagcctggggcagagccgattgcggatcccagagcttcggcctgctggaccccaagctgtgctacctgctggatggcatcctgttcatctacggcgtgatcctgaccgccctgttcctgaaacggggcagaaagaaactcctgtatatattcaaacaaccatttatgagaccagtacaaactactcaagaggaagatggctgtagctgccgatttccagaagaagaagaaggaggatgtgaactgagagtgaagttcagcagaagcgccgacgcccctgcctaccagcagggacagaaccaactgtacaacgagctgaacctgggcagacgggaagagtacgacgtgctggacaagcggagaggcagggaccctgagatgggcggaaagccccagcggagaaagaacccccaggaaggactgtataacgaactccagaaagacaagatggccgaagcctacagcgagatcggcatgaagggcgagcggagaagaggcaagggccacgatggcctgtaccagggcctgagcaccgccaccaaggacacctatgacgccctgcacatgcaggccctgcctccaagaagggccaagcgatctggatctggagcaacaaacttctcactactcaaacaagcaggtgacgtggaggagaatcccgggcctactagtatggactggatttggcgcatccttttccttgtcggcgctgctaccggcgcccattccgggcccctgttcaatcaagaggtgcagatccctctgaccgagagctactgtggcccctgtcctaagaactggatctgctacaagaacaactgctaccagttcttcgacgagagcaagaattggtacgagagccaggccagctgcatgagccagaatgccagcctgctgaaggtgtacagcaaagaggaccaggacctgctgaaactggtcaagagctaccactggatgggccttgtgcacatccccaccaatggctcttggcagtgggaggacggcagcattctgagccctaacctgctgaccatcatcgagatgcagaagggcgactgcgccctgtacgccagcagctttaagggctacatcgagaattgcagcaccccgaacacctacatctgtatgcagagaaccgttggcggaggcggaagtggaggcggaggatctggcggcggaggctctgacctctttaatcaagaagtccagattccactcaccgaatcctactgcggaccttgtccaaaaaattggatttgttataagaacaactgttatcaattctttgatgagtctaaaaattggtatgagtcccaggcttcctgcatgtctcagaacgcttctctgctgaaagtctactctaaagaagatcaggatctcctgaagctcgtcaagtcttatcattggatggggctcgtccacattcctaccaacggaagctggcaatgggaagatggctccatcctgtctccaaatctgctcacgattattgaaatgcagaaaggggattgtgctctctacgccagctccttcaagggatatattgagaactgtagcacgcccaatacttatatctgtatgcaacggaccgtgggatccggcggcggaggatctggcggaggcggatctgggggcggaggctctttcgaacaagttcagcttcaacagcctggcgctgagctggtcaaacctggcgcttctgtgaagatgagctgcaaagccagcggctacgccttcagcagctactggatcaactggatgaagcagaaacccggccagggactcgaatggatcggccaaatctatcccggcgacggcaccgagaacagattcagcgtgaacttccagaaggccgccaagagcttcagcctgaagatcagcgatagccagctgggcgacgccgccatgtacttttgcgcttatagaagcgccgtgaacgcccggctgatgtttggagatggcacacagctggtggtcaagcccaacacgcgtgagcagaaactgatctcggaagaggatctggggagcggcatccagaaccctgatcctgccgtgtaccagctgcgggatagcaagagcagcgacaagagcgtgtgtctgttcaccgacttcgacagccagaccaacgtgtcccagagcaaggactccgacgtgtacatcaccgataagaccgtgctggacatgcggagcatggacttcaagagcaactccgccgtggcctggtccaacaagtccgatttcgcctgcgccaacgccttcaacaacagcattatccccgaggacacattcttcccaagccccgagagcagctgcggtacccagagttttgggttgttggaccctaaattgtgctatctgttggacggaatcctgttcatttacggagtgatcctgaccgcattgttcctgaagagaggccggaagaagctgctgtacatcttcaagcagcctttcatgcggcccgtgcagaccacccaggaagaggacggctgctcctgccggttccccgaggaagaagaaggcggctgcgagctgcgggttaagttttccagatccgcagacgcacccgcttaccaacaagggcagaaccaactctacaatgaacttaatttggggcggagggaagagtacgacgttctggacaaaaggaggggacgagatcccgagatgggcggaaagcctcagcgaaggaagaatccgcaagaggggctttataacgaactccagaaagataaaatggcagaagcctatagtgagattgggatgaagggagaaaggaggaggggtaaaggtcacgatgggttgtaccaaggattgagcacagccactaaagatacctatgatgcgctccacatgcaggccctgccgccaaga

SEQ ID NO: 3616 - DNA, 3384 bp, Artificial Sequence
  Synthetic Polynucloetide
atggccttaccagtgaccgccttgctcctgccgctggccttgctgctccacgccgccaggccggaagccgacatctaccagacacctagatacctggtcatcggcaccggcaagaaaatcaccctggaatgcagccagacaatgggccacgacaagatgtactggtatcagcaggaccccggcatggaactgcacctgatccactacagctacggcgtgaacagcaccgagaagggcgatctgtctagcgagagcaccgtgtccagaatcagaaccgagcacttcccactgacactggaaagcgccagacctagccacaccagccagtacctgtgtgcctcttctgaggccagaggactggccgagttcaccgacacacagtatttcggccctggcaccagactgaccgttctcgagcagagcttcggcctgctggaccccaagctgtgctacctgctggatggcatcctgttcatctacggcgtgatcctgaccgccctgttcctgagagtgaagttcagcagaagcgccgacgcccctgcctaccagcagggacagaaccaactgtacaacgagctgaacctgggcagacgggaagagtacgacgtgctggacaagcggagaggcagggaccctgagatgggcggaaagccccagcggagaaagaacccccaggaaggactgtataacgaactccagaaagacaagatggccgaagcctacagcgagatcggcatgaagggcgagcggagaagaggcaagggccacgatggcctgtaccagggcctgagcaccgccaccaaggacacctatgacgccctgcacatgcaggccctgcctccaagaagggccaagcgatctggatctggagcaacaaacttctcactactcaaacaagcaggtgacgtggaggagaatcccgggcctactagtatggactggatttggcgcatccttttccttgtcggcgctgctaccggcgcccattccgggcccctgttcaatcaagaggtgcagatccctctgaccgagagctactgtggcccctgtcctaagaactggatctgctacaagaacaactgctaccagttcttcgacgagagcaagaattggtacgagagccaggccagctgcatgagccagaatgccagcctgctgaaggtgtacagcaaagaggaccaggacctgctgaaactggtcaagagctaccactggatgggccttgtgcacatccccaccaatggctcttggcagtgggaggacggcagcattctgagccctaacctgctgaccatcatcgagatgcagaagggcgactgcgccctgtacgccagcagctttaagggctacatcgagaattgcagcaccccgaacacctacatctgtatgcagagaaccgttggcggaggcggaagtggaggcggaggatctggcggcggaggctctgacctctttaatcaagaagtccagattccactcaccgaatcctactgcggaccttgtccaaaaaattggatttgttataagaacaactgttatcaattctttgatgagtctaaaaattggtatgagtcccaggcttcctgcatgtctcagaacgcttctctgctgaaagtctactctaaagaagatcaggatctcctgaagctcgtcaagtcttatcattggatggggctcgtccacattcctaccaacggaagctggcaatgggaagatggctccatcctgtctccaaatctgctcacgattattgaaatgcagaaaggggattgtgctctctacgccagctccttcaagggatatattgagaactgtagcacgcccaatacttatatctgtatgcaacggaccgtgggatccggcggcggaggatctggcggaggcggatctgggggcggaggctctttcgaacaagttcagcttcaacagcctggcgctgagctggtcaaacctggcgcttctgtgaagatgagctgcaaagccagcggctacgccttcagcagctactggatcaactggatgaagcagaaacccggccagggactcgaatggatcggccaaatctatcccggcgacggcaccgagaacagattcagcgtgaacttccagaaggccgccaagagcttcagcctgaagatcagcgatagccagctgggcgacgccgccatgtacttttgcgcttatagaagcgccgtgaacgcccggctgatgtttggagatggcacacagctggtggtcaagcccaacacgcgtcagagttttgggttgttggaccctaaattgtgctatctgttggacggaatcctgttcatttacggagtgatcctgaccgcattgttcctgcgggttaagttttccagatccgcagacgcacccgcttaccaacaagggcagaaccaactctacaatgaacttaatttggggcggagggaagagtacgacgttctggacaaaaggaggggacgagatcccgagatgggcggaaagcctcagcgaaggaagaatccgcaagaggggctttataacgaactccagaaagataaaatggcagaagcctatagtgagattgggatgaagggagaaaggaggaggggtaaaggtcacgatgggttgtaccaaggattgagcacagccactaaagatacctatgatgcgctccacatgcaggccctgccgccaagacgcgccaagagaagcggatctggcgtgaagcagaccctgaatttcgacctgctgaagctggctggcgacgtggaatccaacccaggcccttctagaggccatatgaccgagtacaagcccacggtgcgcctcgccacccgcgacgacgtccccagggccgtacgcaccctcgccgccgcgttcgccgactaccccgccacgcgccacaccgtcgatccggaccgccacatcgagcgggtcaccgagctgcaagaactcttcctcacgcgcgtcgggctcgacatcggcaaggtgtgggtcgcggacgacggcgccgcggtggcggtctggaccacgccggagagcgtcgaagcgggggcggtgttcgccgagatcggcccgcgcatggccgagttgagcggttcccggctggccgcgcagcaacagatggaaggcctcctggcgccgcaccggcccaaggagcccgcgtggttcctggccaccgtcggcgtctcgcccgaccaccagggcaagggtctgggcagcgccgtcgtgctccccggagtggaggcggccgagcgcgccggggtgcccgccttcctggagacctccgcgccccgcaacctccccttctacgagcggctcggcttcaccgtcaccgccgacgtcgaggtgcccgaaggaccgcgcacctggtgcatgacccgcaagcccggtgcctga

SEQ ID NO: 3617 - DNA, 2856 bp, Artificial Sequence
  Synthetic Polynucloetide
atggccttaccagtgaccgccttgctcctgccgctggccttgctgctccacgccgccaggccggaagccgacatctaccagacacctagatacctggtcatcggcaccggcaagaaaatcaccctggaatgcagccagacaatgggccacgacaagatgtactggtatcagcaggaccccggcatggaactgcacctgatccactacagctacggcgtgaacagcaccgagaagggcgatctgtctagcgagagcaccgtgtccagaatcagaaccgagcacttcccactgacactggaaagcgccagacctagccacaccagccagtacctgtgtgcctcttctgaggccagaggactggccgagttcaccgacacacagtatttcggccctggcaccagactgaccgttctcgagggacagcctaaggccaatcctaccgtgacactgttccctccaagcagcgaagaactccaggccaacaaggccacacttgtgtgcctgatctccgacttctaccctggggctgtgacagtggcttggaaggccgatggatctcctgtgaaagccggcgtggaaaccaccaagccatccaagcagagcaacaacaaatacgccgccagctcctacctgagcctgacacctgagcagtggaagtcccacagatcctacagctgccaagtgacccacgaaggcagcaccgtggaaaagacagtggcccctacagagtgcagccccatcaagaccgatgtgattacaatggaccccaaggacaactgctccaaggacgccaacgataccctgctgctccagctgaccaacaccagcgcctactacatgtacttgttgctgctgctgaagtccgtggtgtacttcgccatcatcacatgctgcctgctgcggagaaccgccttctgctgcaacggcgagaagtctagggccaagcgatctggatctggagcaacaaacttctcactactcaaacaagcaggtgacgtggaggagaatcccgggcctactagtatggactggatttggcgcatccttttccttgtcggcgctgctaccggcgcccattccgggcccctgttcaatcaagaggtgcagatccctctgaccgagagctactgtggcccctgtcctaagaactggatctgctacaagaacaactgctaccagttcttcgacgagagcaagaattggtacgagagccaggccagctgcatgagccagaatgccagcctgctgaaggtgtacagcaaagaggaccaggacctgctgaaactggtcaagagctaccactggatgggccttgtgcacatccccaccaatggctcttggcagtgggaggacggcagcattctgagccctaacctgctgaccatcatcgagatgcagaagggcgactgcgccctgtacgccagcagctttaagggctacatcgagaattgcagcaccccgaacacctacatctgtatgcagagaaccgttggcggaggcggaagtggaggcggaggatctggcggcggaggctctgacctctttaatcaagaagtccagattccactcaccgaatcctactgcggaccttgtccaaaaaattggatttgttataagaacaactgttatcaattctttgatgagtctaaaaattggtatgagtcccaggcttcctgcatgtctcagaacgcttctctgctgaaagtctactctaaagaagatcaggatctcctgaagctcgtcaagtcttatcattggatggggctcgtccacattcctaccaacggaagctggcaatgggaagatggctccatcctgtctccaaatctgctcacgattattgaaatgcagaaaggggattgtgctctctacgccagctccttcaagggatatattgagaactgtagcacgcccaatacttatatctgtatgcaacggaccgtgggatccggcggcggaggatctggcggaggcggatctgggggcggaggctctttcgaacaagttcagcttcaacagcctggcgctgagctggtcaaacctggcgcttctgtgaagatgagctgcaaagccagcggctacgccttcagcagctactggatcaactggatgaagcagaaacccggccagggactcgaatggatcggccaaatctatcccggcgacggcaccgagaacagattcagcgtgaacttccagaaggccgccaagagcttcagcctgaagatcagcgatagccagctgggcgacgccgccatgtacttttgcgcttatagaagcgccgtgaacgcccggctgatgtttggagatggcacacagctggtggtcaagcccaacacgcgtgcctctacaaagggaccctccgtgtttcctctggctcccagcagcaagtctacaagcggaggaacagccgctctgggctgcctggtcaaggattactttcccgagcctgtgaccgtgtcctggaatagcggagcactgacaagcggcgtgcacacctttccagccgtgctgcaaagcagcggcctgtactctctgagcagcgtggtcacagtgcctagctctagcctgggcacccagacctacatctgcaatgtgaaccacaagcctagcaacaccaaggtggacaagagagtggaacccaagagctgtgaagtgaaaaccgactccaccgaccacgtgaagcccaaagagacagagaacaccaagcagcccagcaagagctgccacaagcccaaggccatcgtgcacaccgagaaagtgaacatgatgagcctgaccgtgctgggcctgcggatgctgttcgccaaaaccgtggccgtgaacttcctgctgaccgccaagctgttcttcctc

SEQ ID NO: 3618 - DNA, 2790 bp, Artificial Sequence
  Synthetic Polynucloetide
atggccttaccagtgaccgccttgctcctgccgctggccttgctgctccacgccgccaggccggaagccgacatctaccagacacctagatacctggtcatcggcaccggcaagaaaatcaccctggaatgcagccagacaatgggccacgacaagatgtactggtatcagcaggaccccggcatggaactgcacctgatccactacagctacggcgtgaacagcaccgagaagggcgatctgtctagcgagagcaccgtgtccagaatcagaaccgagcacttcccactgacactggaaagcgccagacctagccacaccagccagtacctgtgtgcctcttctgaggccagaggactggccgagttcaccgacacacagtatttcggccctggcaccagactgaccgttctcgagggacagcctaaggccaatcctaccgtgacactgttccctccaagcagcgaagaactccaggccaacaaggccacacttgtgtgcctgatctccgacttctaccctggggctgtgacagtggcttggaaggccgatggatctcctgtgaaagccggcgtggaaaccaccaagccatccaagcagagcaacaacaaatacgccgccagctcctacctgagcctgacacctgagcagtggaagtcccacagatcctacagctgccaagtgacccacgaaggcagcaccgtggaaaagacagtggcccctacagagtgcagcggcagagccgattgcggcatcaccagcgccagctaccaccagggcgtgctgagcgccaccatcctgtacgagatcctgctgggcaaggccaccctgtacgccgtgctggtgtctgccctggtgctgatggctatggtcaagcggaaggacagccggggaagggccaagcgatctggatctggagcaacaaacttctcactactcaaacaagcaggtgacgtggaggagaatcccgggcctactagtatggactggatttggcgcatccttttccttgtcggcgctgctaccggcgcccattccgggcccctgttcaatcaagaggtgcagatccctctgaccgagagctactgtggcccctgtcctaagaactggatctgctacaagaacaactgctaccagttcttcgacgagagcaagaattggtacgagagccaggccagctgcatgagccagaatgccagcctgctgaaggtgtacagcaaagaggaccaggacctgctgaaactggtcaagagctaccactggatgggccttgtgcacatccccaccaatggctcttggcagtgggaggacggcagcattctgagccctaacctgctgaccatcatcgagatgcagaagggcgactgcgccctgtacgccagcagctttaagggctacatcgagaattgcagcaccccgaacacctacatctgtatgcagagaaccgttggcggaggcggaagtggaggcggaggatctggcggcggaggctctgacctctttaatcaagaagtccagattccactcaccgaatcctactgcggaccttgtccaaaaaattggatttgttataagaacaactgttatcaattctttgatgagtctaaaaattggtatgagtcccaggcttcctgcatgtctcagaacgcttctctgctgaaagtctactctaaagaagatcaggatctcctgaagctcgtcaagtcttatcattggatggggctcgtccacattcctaccaacggaagctggcaatgggaagatggctccatcctgtctccaaatctgctcacgattattgaaatgcagaaaggggattgtgctctctacgccagctccttcaagggatatattgagaactgtagcacgcccaatacttatatctgtatgcaacggaccgtgggatccggcggcggaggatctggcggaggcggatctgggggcggaggctctttcgaacaagttcagcttcaacagcctggcgctgagctggtcaaacctggcgcttctgtgaagatgagctgcaaagccagcggctacgccttcagcagctactggatcaactggatgaagcagaaacccggccagggactcgaatggatcggccaaatctatcccggcgacggcaccgagaacagattcagcgtgaacttccagaaggccgccaagagcttcagcctgaagatcagcgatagccagctgggcgacgccgccatgtacttttgcgcttatagaagcgccgtgaacgcccggctgatgtttggagatggcacacagctggtggtcaagcccaacacgcgtgcctctacaaagggaccctccgtgtttcctctggctcccagcagcaagtctacaagcggaggaacagccgctctgggctgcctggtcaaggattactttcccgagcctgtgaccgtgtcctggaatagcggagcactgacaagcggcgtgcacacctttccagccgtgctgcaaagcagcggcctgtactctctgagcagcgtggtcacagtgcctagctctagcctgggcacccagacctacatctgcaatgtgaaccacaagcctagcaacaccaaggtggacaagagagtggaacccaagagctgtatccccgaggacacattcttcccaagcagcgacgtgccctgcgacgtgaagctggtggaaaagagcttcgagacagacaccaacctgaacttccagaacctgagcgtgatcggcttcagaatcctgctgctgaaagtggccggctttaacctgctgatgaccctgcggctgtggtccagc

SEQ ID NO: 3619 - DNA, 2790 bp, Artificial Sequence
  Synthetic Polynucloetide
atggccttaccagtgaccgccttgctcctgccgctggccttgctgctccacgccgccaggccggaagccgacatctaccagacacctagatacctggtcatcggcaccggcaagaaaatcaccctggaatgcagccagacaatgggccacgacaagatgtactggtatcagcaggaccccggcatggaactgcacctgatccactacagctacggcgtgaacagcaccgagaagggcgatctgtctagcgagagcaccgtgtccagaatcagaaccgagcacttcccactgacactggaaagcgccagacctagccacaccagccagtacctgtgtgcctcttctgaggccagaggactggccgagttcaccgacacacagtatttcggccctggcaccagactgaccgttctcgagggacagcctaaggccaatcctaccgtgacactgttccctccaagcagcgaagaactccaggccaacaaggccacacttgtgtgcctgatctccgacttctaccctggggctgtgacagtggcttggaaggccgatggatctcctgtgaaagccggcgtggaaaccaccaagccatccaagcagagcaacaacaaatacgccgccagctcctacctgagcctgacacctgagcagtggaagtcccacagatcctacagctgccaagtgacccacgaaggcagcaccgtggaaaagacagtggcccctacagagtgcagcggcagagccgattgcggctttaccagcgagagctaccagcagggcgtgctgagcgccaccatcctgtacgagatcctgctgggcaaggccaccctgtacgccgtgctggtgtctgccctggtgctgatggctatggtcaagcggaaggacagccggggaagggccaagcgatctggatctggagcaacaaacttctcactactcaaacaagcaggtgacgtggaggagaatcccgggcctactagtatggactggatttggcgcatccttttccttgtcggcgctgctaccggcgcccattccgggcccctgttcaatcaagaggtgcagatccctctgaccgagagctactgtggcccctgtcctaagaactggatctgctacaagaacaactgctaccagttcttcgacgagagcaagaattggtacgagagccaggccagctgcatgagccagaatgccagcctgctgaaggtgtacagcaaagaggaccaggacctgctgaaactggtcaagagctaccactggatgggccttgtgcacatccccaccaatggctcttggcagtgggaggacggcagcattctgagccctaacctgctgaccatcatcgagatgcagaagggcgactgcgccctgtacgccagcagctttaagggctacatcgagaattgcagcaccccgaacacctacatctgtatgcagagaaccgttggcggaggcggaagtggaggcggaggatctggcggcggaggctctgacctctttaatcaagaagtccagattccactcaccgaatcctactgcggaccttgtccaaaaaattggatttgttataagaacaactgttatcaattctttgatgagtctaaaaattggtatgagtcccaggcttcctgcatgtctcagaacgcttctctgctgaaagtctactctaaagaagatcaggatctcctgaagctcgtcaagtcttatcattggatggggctcgtccacattcctaccaacggaagctggcaatgggaagatggctccatcctgtctccaaatctgctcacgattattgaaatgcagaaaggggattgtgctctctacgccagctccttcaagggatatattgagaactgtagcacgcccaatacttatatctgtatgcaacggaccgtgggatccggcggcggaggatctggcggaggcggatctgggggcggaggctctttcgaacaagttcagcttcaacagcctggcgctgagctggtcaaacctggcgcttctgtgaagatgagctgcaaagccagcggctacgccttcagcagctactggatcaactggatgaagcagaaacccggccagggactcgaatggatcggccaaatctatcccggcgacggcaccgagaacagattcagcgtgaacttccagaaggccgccaagagcttcagcctgaagatcagcgatagccagctgggcgacgccgccatgtacttttgcgcttatagaagcgccgtgaacgcccggctgatgtttggagatggcacacagctggtggtcaagcccaacacgcgtgcctctacaaagggaccctccgtgtttcctctggctcccagcagcaagtctacaagcggaggaacagccgctctgggctgcctggtcaaggattactttcccgagcctgtgaccgtgtcctggaatagcggagcactgacaagcggcgtgcacacctttccagccgtgctgcaaagcagcggcctgtactctctgagcagcgtggtcacagtgcctagctctagcctgggcacccagacctacatctgcaatgtgaaccacaagcctagcaacaccaaggtggacaagagagtggaacccaagagctgtatccccgaggacacattcttcccaagccccgagagcagctgcgacgtgaagctggtggaaaagagcttcgagacagacaccaacctgaacttccagaacctgagcgtgatcggcttcagaatcctgctgctgaaagtggccggctttaacctgctgatgaccctgcggctgtggtccagc

SEQ ID NO: 3620 - DNA, 2274 bp, Artificial Sequence
  Synthetic Polynucloetide
atggactggatttggcgcatccttttccttgtcggcgctgctaccggcgcccattccctgttcaatcaagaggtgcagatccctctgaccgagagctactgtggcccctgtcctaagaactggatctgctacaagaacaactgctaccagttcttcgacgagagcaagaattggtacgagagccaggccagctgcatgagccagaatgccagcctgctgaaggtgtacagcaaagaggaccaggacctgctgaaactggtcaagagctaccactggatgggccttgtgcacatccccaccaatggctcttggcagtgggaggacggcagcattctgagccctaacctgctgaccatcatcgagatgcagaagggcgactgcgccctgtacgccagcagctttaagggctacatcgagaattgcagcaccccgaacacctacatctgtatgcagagaaccgttggcggaggcggaagtggaggcggaggatctggcggcggaggctctgacctctttaatcaagaagtccagattccactcaccgaatcctactgcggaccttgtccaaaaaattggatttgttataagaacaactgttatcaattctttgatgagtctaaaaattggtatgagtcccaggcttcctgcatgtctcagaacgcttctctgctgaaagtctactctaaagaagatcaggatctcctgaagctcgtcaagtcttatcattggatggggctcgtccacattcctaccaacggaagctggcaatgggaagatggctccatcctgtctccaaatctgctcacgattattgaaatgcagaaaggggattgtgctctctacgccagctccttcaagggatatattgagaactgtagcacgcccaatacttatatctgtatgcaacggaccgtgggatccggcggcggaggatctggcggaggcggatctgggggcggaggctctttcgaacaagttcagcttcaacagcctggcgctgagctggtcaaacctggcgcttctgtgaagatgagctgcaaagccagcggctacgccttcagcagctactggatcaactggatgaagcagaaacccggccagggactcgaatggatcggccaaatctatcccggcgacggcaccgagaacagattcagcgtgaacttccagaaggccgccaagagcttcagcctgaagatcagcgatagccagctgggcgacgccgccatgtacttttgcgcttatagaagcgccgtgaacgcccggctgatgtttggagatggcacacagctggtggtcaagcccaacggcggaggcggaagtggaggcggaggatctggcggcggaggctctgaagccgacatctaccagacacctagatacctggtcatcggcaccggcaagaaaatcaccctggaatgcagccagacaatgggccacgacaagatgtactggtatcagcaggaccccggcatggaactgcacctgatccactacagctacggcgtgaacagcaccgagaagggcgatctgtctagcgagagcaccgtgtccagaatcagaaccgagcacttcccactgacactggaaagcgccagacctagccacaccagccagtacctgtgtgcctcttctgaggccagaggactggccgagttcaccgacacacagtatttcggccctggcaccagactgaccgttacgcgtggcggaggcagcgacggtaacgaggagatgggaggaatcactcaaaccccttacaaagtctcaatttcaggaacaactgttatccttacatgtccccagtatcctggcagcgagatcctttggcagcataacgacaagaatatagggggagatgaagacgataagaatatcggatctgacgaggatcacttgagcctgaaagagttctccgagcttgaacaaagcggatattatgtgtgctatccgcgcgggtcaaagccggaagacgctaacttttacctttatctccgagccagagtgtgcgaaaattgcatggaaatggacgttatgtccgttgctacaatagttatcgtagatatatgcatcacgggtggactgcttctgctggtttattattggtccaagaatagaaaggccaaagctaaacccgtgaccagaggcgctggcgcaggcggaaggcaaaggggacaaaacaaagaacggccaccaccagtgccaaatccagattatgagcctattcggaaaggacagagggacctgtactctggcctgaatcagagaagaatc

SEQ ID NO: 3621 - DNA, 2169 bp, Artificial Sequence
  Synthetic Polynucloetide
atggactggatttggcgcatccttttccttgtcggcgctgctaccggcgcccattccctgttcaatcaagaggtgcagatccctctgaccgagagctactgtggcccctgtcctaagaactggatctgctacaagaacaactgctaccagttcttcgacgagagcaagaattggtacgagagccaggccagctgcatgagccagaatgccagcctgctgaaggtgtacagcaaagaggaccaggacctgctgaaactggtcaagagctaccactggatgggccttgtgcacatccccaccaatggctcttggcagtgggaggacggcagcattctgagccctaacctgctgaccatcatcgagatgcagaagggcgactgcgccctgtacgccagcagctttaagggctacatcgagaattgcagcaccccgaacacctacatctgtatgcagagaaccgttggcggaggcggaagtggaggcggaggatctggcggcggaggctctgacctctttaatcaagaagtccagattccactcaccgaatcctactgcggaccttgtccaaaaaattggatttgttataagaacaactgttatcaattctttgatgagtctaaaaattggtatgagtcccaggcttcctgcatgtctcagaacgcttctctgctgaaagtctactctaaagaagatcaggatctcctgaagctcgtcaagtcttatcattggatggggctcgtccacattcctaccaacggaagctggcaatgggaagatggctccatcctgtctccaaatctgctcacgattattgaaatgcagaaaggggattgtgctctctacgccagctccttcaagggatatattgagaactgtagcacgcccaatacttatatctgtatgcaacggaccgtgggatccggcggcggaggatctggcggaggcggatctgggggcggaggctctttcgaacaagttcagcttcaacagcctggcgctgagctggtcaaacctggcgcttctgtgaagatgagctgcaaagccagcggctacgccttcagcagctactggatcaactggatgaagcagaaacccggccagggactcgaatggatcggccaaatctatcccggcgacggcaccgagaacagattcagcgtgaacttccagaaggccgccaagagcttcagcctgaagatcagcgatagccagctgggcgacgccgccatgtacttttgcgcttatagaagcgccgtgaacgcccggctgatgtttggagatggcacacagctggtggtcaagcccaacggcggaggcggaagtggaggcggaggatctggcggcggaggctctgaagccgacatctaccagacacctagatacctggtcatcggcaccggcaagaaaatcaccctggaatgcagccagacaatgggccacgacaagatgtactggtatcagcaggaccccggcatggaactgcacctgatccactacagctacggcgtgaacagcaccgagaagggcgatctgtctagcgagagcaccgtgtccagaatcagaaccgagcacttcccactgacactggaaagcgccagacctagccacaccagccagtacctgtgtgcctcttctgaggccagaggactggccgagttcaccgacacacagtatttcggccctggcaccagactgaccgttacgcgtggcggaggcagcttcaagatccccatcgaggaactggaagatcgggtgttcgtgaactgcaacacctctatcacctgggtggaaggcaccgtgggaacactgctgagcgacatcaccagactggacctcggcaagcggattctggaccctcggggcatctacagatgcaacggcaccgacatctacaaggacaaagaaagcaccgtgcaggtccactacagaatgtgccagtcctgcgtggaactggaccctgctacagtggccggcatcatcgtgaccgatgtgatcgctactctgctgctggctctgggagtgttctgcttcgccggacacgaaacaggcagactgtctggcgctgccgatacacaggccctgctgagaaacgaccaagtgtatcagcccctgcgcgacagagatgatgcccagtattctcacctcggcggcaactgggctagaaacaag

SEQ ID NO: 3622 - DNA, 2199 bp, Artificial Sequence
  Synthetic Polynucloetide
atggactggatttggcgcatccttttccttgtcggcgctgctaccggcgcccattccctgttcaatcaagaggtgcagatccctctgaccgagagctactgtggcccctgtcctaagaactggatctgctacaagaacaactgctaccagttcttcgacgagagcaagaattggtacgagagccaggccagctgcatgagccagaatgccagcctgctgaaggtgtacagcaaagaggaccaggacctgctgaaactggtcaagagctaccactggatgggccttgtgcacatccccaccaatggctcttggcagtgggaggacggcagcattctgagccctaacctgctgaccatcatcgagatgcagaagggcgactgcgccctgtacgccagcagctttaagggctacatcgagaattgcagcaccccgaacacctacatctgtatgcagagaaccgttggcggaggcggaagtggaggcggaggatctggcggcggaggctctgacctctttaatcaagaagtccagattccactcaccgaatcctactgcggaccttgtccaaaaaattggatttgttataagaacaactgttatcaattctttgatgagtctaaaaattggtatgagtcccaggcttcctgcatgtctcagaacgcttctctgctgaaagtctactctaaagaagatcaggatctcctgaagctcgtcaagtcttatcattggatggggctcgtccacattcctaccaacggaagctggcaatgggaagatggctccatcctgtctccaaatctgctcacgattattgaaatgcagaaaggggattgtgctctctacgccagctccttcaagggatatattgagaactgtagcacgcccaatacttatatctgtatgcaacggaccgtgggatccggcggcggaggatctggcggaggcggatctgggggcggaggctctttcgaacaagttcagcttcaacagcctggcgctgagctggtcaaacctggcgcttctgtgaagatgagctgcaaagccagcggctacgccttcagcagctactggatcaactggatgaagcagaaacccggccagggactcgaatggatcggccaaatctatcccggcgacggcaccgagaacagattcagcgtgaacttccagaaggccgccaagagcttcagcctgaagatcagcgatagccagctgggcgacgccgccatgtacttttgcgcttatagaagcgccgtgaacgcccggctgatgtttggagatggcacacagctggtggtcaagcccaacggcggaggcggaagtggaggcggaggatctggcggcggaggctctgaagccgacatctaccagacacctagatacctggtcatcggcaccggcaagaaaatcaccctggaatgcagccagacaatgggccacgacaagatgtactggtatcagcaggaccccggcatggaactgcacctgatccactacagctacggcgtgaacagcaccgagaagggcgatctgtctagcgagagcaccgtgtccagaatcagaaccgagcacttcccactgacactggaaagcgccagacctagccacaccagccagtacctgtgtgcctcttctgaggccagaggactggccgagttcaccgacacacagtatttcggccctggcaccagactgaccgttacgcgtggcggaggcagccagagcatcaagggcaaccacctggtcaaggtgtacgactaccaagaggacggcagcgtgctgctgacatgtgatgccgaggccaagaacatcacctggtttaaggacggcaagatgatcggcttcctgaccgaggacaagaagaagtggaacctgggcagcaacgctaaggaccccagaggcatgtatcagtgcaagggcagccagaacaagagcaagcccctccaggtgtactaccggatgtgccagaactgcatcgagctgaacgccgctaccatcagcggctttctgttcgccgagatcgtgtccatcttcgtgctggccgtgggcgtgtactttatcgctggacaggatggcgtgcggcagagcagagcttccgataagcaaaccctgctgcctaacgaccagctgtaccagcctctgaaggacagagaggacgaccagtacagccacctccagggcaatcagctgagaagaaac

SEQ ID NO: 3623 - DNA, 2148 bp, Artificial Sequence
  Synthetic Polynucloetide
atggactggatttggcgcatccttttccttgtcggcgctgctaccggcgcccattccctgttcaatcaagaggtgcagatccctctgaccgagagctactgtggcccctgtcctaagaactggatctgctacaagaacaactgctaccagttcttcgacgagagcaagaattggtacgagagccaggccagctgcatgagccagaatgccagcctgctgaaggtgtacagcaaagaggaccaggacctgctgaaactggtcaagagctaccactggatgggccttgtgcacatccccaccaatggctcttggcagtgggaggacggcagcattctgagccctaacctgctgaccatcatcgagatgcagaagggcgactgcgccctgtacgccagcagctttaagggctacatcgagaattgcagcaccccgaacacctacatctgtatgcagagaaccgttggcggaggcggaagtggaggcggaggatctggcggcggaggctctgacctctttaatcaagaagtccagattccactcaccgaatcctactgcggaccttgtccaaaaaattggatttgttataagaacaactgttatcaattctttgatgagtctaaaaattggtatgagtcccaggcttcctgcatgtctcagaacgcttctctgctgaaagtctactctaaagaagatcaggatctcctgaagctcgtcaagtcttatcattggatggggctcgtccacattcctaccaacggaagctggcaatgggaagatggctccatcctgtctccaaatctgctcacgattattgaaatgcagaaaggggattgtgctctctacgccagctccttcaagggatatattgagaactgtagcacgcccaatacttatatctgtatgcaacggaccgtgggatccggcggcggaggatctggcggaggcggatctgggggcggaggctctttcgaacaagttcagcttcaacagcctggcgctgagctggtcaaacctggcgcttctgtgaagatgagctgcaaagccagcggctacgccttcagcagctactggatcaactggatgaagcagaaacccggccagggactcgaatggatcggccaaatctatcccggcgacggcaccgagaacagattcagcgtgaacttccagaaggccgccaagagcttcagcctgaagatcagcgatagccagctgggcgacgccgccatgtacttttgcgcttatagaagcgccgtgaacgcccggctgatgtttggagatggcacacagctggtggtcaagcccaacggcggaggcggaagtggaggcggaggatctggcggcggaggctctgaagccgacatctaccagacacctagatacctggtcatcggcaccggcaagaaaatcaccctggaatgcagccagacaatgggccacgacaagatgtactggtatcagcaggaccccggcatggaactgcacctgatccactacagctacggcgtgaacagcaccgagaagggcgatctgtctagcgagagcaccgtgtccagaatcagaaccgagcacttcccactgacactggaaagcgccagacctagccacaccagccagtacctgtgtgcctcttctgaggccagaggactggccgagttcaccgacacacagtatttcggccctggcaccagactgaccgttacgcgtggcggaggcagccagagttttgggttgttggaccctaaattgtgctatctgttggacggaatcctgttcatttacggagtgatcctgaccgcattgttcctgcgggttaagttttccagatccgcagacgcacccgcttaccaacaagggcagaaccaactctacaatgaacttaatttggggcggagggaagagtacgacgttctggacaaaaggaggggacgagatcccgagatgggcggaaagcctcagcgaaggaagaatccgcaagaggggctttataacgaactccagaaagataaaatggcagaagcctatagtgagattgggatgaagggagaaaggaggaggggtaaaggtcacgatgggttgtaccaaggattgagcacagccactaaagatacctatgatgcgctccacatgcaggccctgccgccaaga

SEQ ID NO: 3624 - DNA, 2241 bp, Artificial Sequence
  Synthetic Polynucloetide
atggactggatttggcgcatccttttccttgtcggcgctgctaccggcgcccattccgggcccctgttcaatcaagaggtgcagatccctctgaccgagagctactgtggcccctgtcctaagaactggatctgctacaagaacaactgctaccagttcttcgacgagagcaagaattggtacgagagccaggccagctgcatgagccagaatgccagcctgctgaaggtgtacagcaaagaggaccaggacctgctgaaactggtcaagagctaccactggatgggccttgtgcacatccccaccaatggctcttggcagtgggaggacggcagcattctgagccctaacctgctgaccatcatcgagatgcagaagggcgactgcgccctgtacgccagcagctttaagggctacatcgagaattgcagcaccccgaacacctacatctgtatgcagagaaccgttggcggaggcggaagtggaggcggaggatctggcggcggaggctctgacctctttaatcaagaagtccagattccactcaccgaatcctactgcggaccttgtccaaaaaattggatttgttataagaacaactgttatcaattctttgatgagtctaaaaattggtatgagtcccaggcttcctgcatgtctcagaacgcttctctgctgaaagtctactctaaagaagatcaggatctcctgaagctcgtcaagtcttatcattggatggggctcgtccacattcctaccaacggaagctggcaatgggaagatggctccatcctgtctccaaatctgctcacgattattgaaatgcagaaaggggattgtgctctctacgccagctccttcaagggatatattgagaactgtagcacgcccaatacttatatctgtatgcaacggaccgtgggatccggcggcggaggatctggcggaggcggatctgggggcggaggctctttcgaacaagttcagcttcaacagcctggcgctgagctggtcaaacctggcgcttctgtgaagatgagctgcaaagccagcggctacgccttcagcagctactggatcaactggatgaagcagaaacccggccagggactcgaatggatcggccaaatctatcccggcgacggcaccgagaacagattcagcgtgaacttccagaaggccgccaagagcttcagcctgaagatcagcgatagccagctgggcgacgccgccatgtacttttgcgcttatagaagcgccgtgaacgcccggctgatgtttggagatggcacacagctggtggtcaagcccaacacgcgtatccagaaccctgatcctgccgtgtaccagctgcgggatagcaagagcagcgacaagagcgtgtgtctgttcaccgacttcgacagccagaccaacgtgtcccagagcaaggactccgacgtgtacatcaccgataagaccgtgctggacatgcggagcatggacttcaagagcaactccgccgtggcctggtccaacaagtccgatttcgcctgcgccaacgccttcaacaacagcattatccccgaggacacattcttcccaagccccgagagcagctgcgacgtgaagctggtggaaaagagcttcgagacagacaccaacctgaacttccagaacctgagcgtgatcggcttcagaatcctgctgctgaaagtggccggctttaacctgctgatgaccctgcggctgtggtccagccgcgccaagagaagcggatctggcgtgaagcagaccctgaatttcgacctgctgaagctggctggcgacgtggaatccaacccaggcccttctagaggccatatggccaagcctttgtctcaagaagaatccaccctcattgaaagagcaacggctacaatcaacagcatccccatctctgaagactacagcgtcgccagcgcagctctctctagcgacggccgcatcttcactggtgtcaatgtatatcattttactgggggaccttgtgcagaactcgtggtgctgggcactgctgctgctgcggcagctggcaacctgacttgtatcgtcgcgatcggaaatgagaacaggggcatcttgagcccctgcggacggtgccgacaggtgcttctcgatctgcatcctgggatcaaagccatagtgaaggacagtgatggacagccgacggcagttgggattcgtgaattgctgccctctggttatgtgtgggagggctga

SEQ ID NO: 3625 - DNA, 1740 bp, Artificial Sequence
  Synthetic Polynucloetide
atggactggatttggcgcatccttttccttgtcggcgctgctaccggcgcccattccgggcccctgttcaatcaagaggtgcagatccctctgaccgagagctactgtggcccctgtcctaagaactggatctgctacaagaacaactgctaccagttcttcgacgagagcaagaattggtacgagagccaggccagctgcatgagccagaatgccagcctgctgaaggtgtacagcaaagaggaccaggacctgctgaaactggtcaagagctaccactggatgggccttgtgcacatccccaccaatggctcttggcagtgggaggacggcagcattctgagccctaacctgctgaccatcatcgagatgcagaagggcgactgcgccctgtacgccagcagctttaagggctacatcgagaattgcagcaccccgaacacctacatctgtatgcagagaaccgttggcggaggcggaagtggaggcggaggatctggcggcggaggctctgacctctttaatcaagaagtccagattccactcaccgaatcctactgcggaccttgtccaaaaaattggatttgttataagaacaactgttatcaattctttgatgagtctaaaaattggtatgagtcccaggcttcctgcatgtctcagaacgcttctctgctgaaagtctactctaaagaagatcaggatctcctgaagctcgtcaagtcttatcattggatggggctcgtccacattcctaccaacggaagctggcaatgggaagatggctccatcctgtctccaaatctgctcacgattattgaaatgcagaaaggggattgtgctctctacgccagctccttcaagggatatattgagaactgtagcacgcccaatacttatatctgtatgcaacggaccgtgggatccggcggcggaggatctggcggaggcggatctgggggcggaggctctttcgaacaagttcagcttcaacagcctggcgctgagctggtcaaacctggcgcttctgtgaagatgagctgcaaagccagcggctacgccttcagcagctactggatcaactggatgaagcagaaacccggccagggactcgaatggatcggccaaatctatcccggcgacggcaccgagaacagattcagcgtgaacttccagaaggccgccaagagcttcagcctgaagatcagcgatagccagctgggcgacgccgccatgtacttttgcgcttatagaagcgccgtgaacgcccggctgatgtttggagatggcacacagctggtggtcaagcccaacacgcgtatccagaaccctgatcctgccgtgtaccagctgcgggatagcaagagcagcgacaagagcgtgtgtctgttcaccgacttcgacagccagaccaacgtgtcccagagcaaggactccgacgtgtacatcaccgataagaccgtgctggacatgcggagcatggacttcaagagcaactccgccgtggcctggtccaacaagtccgatttcgcctgcgccaacgccttcaacaacagcattatccccgaggacacattcttcccaagccccgagagcagctgcgacgtgaagctggtggaaaagagcttcgagacagacaccaacctgaacttccagaacctgagcgtgatcggcttcagaatcctgctgctgaaagtggccggctttaacctgctgatgaccctgcggctgtggtccagc

SEQ ID NO: 3626 - DNA, 2277 bp, Artificial Sequence
  Synthetic Polynucloetide
atggactggatttggcgcatccttttccttgtcggcgctgctaccggcgcccattccgggcccctgttcaatcaagaggtgcagatccctctgaccgagagctactgtggcccctgtcctaagaactggatctgctacaagaacaactgctaccagttcttcgacgagagcaagaattggtacgagagccaggccagctgcatgagccagaatgccagcctgctgaaggtgtacagcaaagaggaccaggacctgctgaaactggtcaagagctaccactggatgggccttgtgcacatccccaccaatggctcttggcagtgggaggacggcagcattctgagccctaacctgctgaccatcatcgagatgcagaagggcgactgcgccctgtacgccagcagctttaagggctacatcgagaattgcagcaccccgaacacctacatctgtatgcagagaaccgttggcggaggcggaagtggaggcggaggatctggcggcggaggctctgacctctttaatcaagaagtccagattccactcaccgaatcctactgcggaccttgtccaaaaaattggatttgttataagaacaactgttatcaattctttgatgagtctaaaaattggtatgagtcccaggcttcctgcatgtctcagaacgcttctctgctgaaagtctactctaaagaagatcaggatctcctgaagctcgtcaagtcttatcattggatggggctcgtccacattcctaccaacggaagctggcaatgggaagatggctccatcctgtctccaaatctgctcacgattattgaaatgcagaaaggggattgtgctctctacgccagctccttcaagggatatattgagaactgtagcacgcccaatacttatatctgtatgcaacggaccgtgggatccggcggcggaggatctggcggaggcggatctgggggcggaggctctttcgaacaagttcagcttcaacagcctggcgctgagctggtcaaacctggcgcttctgtgaagatgagctgcaaagccagcggctacgccttcagcagctactggatcaactggatgaagcagaaacccggccagggactcgaatggatcggccaaatctatcccggcgacggcaccgagaacagattcagcgtgaacttccagaaggccgccaagagcttcagcctgaagatcagcgatagccagctgggcgacgccgccatgtacttttgcgcttatagaagcgccgtgaacgcccggctgatgtttggagatggcacacagctggtggtcaagcccaacacgcgtgagcagaaactgatctcggaagaggatgggagcggcatccagaaccctgatcctgccgtgtaccagctgcgggatagcaagagcagcgacaagagcgtgtgtctgttcaccgacttcgacagccagaccaacgtgtcccagagcaaggactccgacgtgtacatcaccgataagtgcgtgctggacatgcggagcatggacttcaagagcaactccgccgtggcctggtccaacaagtccgatttcgcctgcgccaacgccttcaacaacagcattatccccgaggacacattcttcccaagccccgagagcagctgcgacgtgaagctggtggaaaagagcttcgagacagacaccaacctgaacttccagaacctgagcgtgatcggcttcagaatcctgctgctgaaagtggccggctttaacctgctgatgaccctgcggctgtggtccagccgcgccaagagaagcggatctggcgtgaagcagaccctgaatttcgacctgctgaagctggctggcgacgtggaatccaacccaggcccttctagaggccatatggccaagcctttgtctcaagaagaatccaccctcattgaaagagcaacggctacaatcaacagcatccccatctctgaagactacagcgtcgccagcgcagctctctctagcgacggccgcatcttcactggtgtcaatgtatatcattttactgggggaccttgtgcagaactcgtggtgctgggcactgctgctgctgcggcagctggcaacctgacttgtatcgtcgcgatcggaaatgagaacaggggcatcttgagcccctgcggacggtgccgacaggtgcttctcgatctgcatcctgggatcaaagccatagtgaaggacagtgatggacagccgacggcagttgggattcgtgaattgctgccctctggttatgtgtgggagggctga

SEQ ID NO: 3627 - DNA, 1779 bp, Artificial Sequence
  Synthetic Polynucloetide
atggactggatttggcgcatccttttccttgtcggcgctgctaccggcgcccattccgggcccctgttcaatcaagaggtgcagatccctctgaccgagagctactgtggcccctgtcctaagaactggatctgctacaagaacaactgctaccagttcttcgacgagagcaagaattggtacgagagccaggccagctgcatgagccagaatgccagcctgctgaaggtgtacagcaaagaggaccaggacctgctgaaactggtcaagagctaccactggatgggccttgtgcacatccccaccaatggctcttggcagtgggaggacggcagcattctgagccctaacctgctgaccatcatcgagatgcagaagggcgactgcgccctgtacgccagcagctttaagggctacatcgagaattgcagcaccccgaacacctacatctgtatgcagagaaccgttggcggaggcggaagtggaggcggaggatctggcggcggaggctctgacctctttaatcaagaagtccagattccactcaccgaatcctactgcggaccttgtccaaaaaattggatttgttataagaacaactgttatcaattctttgatgagtctaaaaattggtatgagtcccaggcttcctgcatgtctcagaacgcttctctgctgaaagtctactctaaagaagatcaggatctcctgaagctcgtcaagtcttatcattggatggggctcgtccacattcctaccaacggaagctggcaatgggaagatggctccatcctgtctccaaatctgctcacgattattgaaatgcagaaaggggattgtgctctctacgccagctccttcaagggatatattgagaactgtagcacgcccaatacttatatctgtatgcaacggaccgtgggatccggcggcggaggatctggcggaggcggatctgggggcggaggctctttcgaacaagttcagcttcaacagcctggcgctgagctggtcaaacctggcgcttctgtgaagatgagctgcaaagccagcggctacgccttcagcagctactggatcaactggatgaagcagaaacccggccagggactcgaatggatcggccaaatctatcccggcgacggcaccgagaacagattcagcgtgaacttccagaaggccgccaagagcttcagcctgaagatcagcgatagccagctgggcgacgccgccatgtacttttgcgcttatagaagcgccgtgaacgcccggctgatgtttggagatggcacacagctggtggtcaagcccaacacgcgtgagcagaaactgatctcggaagaggatgggagcggcatccagaaccctgatcctgccgtgtaccagctgcgggatagcaagagcagcgacaagagcgtgtgtctgttcaccgacttcgacagccagaccaacgtgtcccagagcaaggactccgacgtgtacatcaccgataagtgcgtgctggacatgcggagcatggacttcaagagcaactccgccgtggcctggtccaacaagtccgatttcgcctgcgccaacgccttcaacaacagcattatccccgaggacacattcttcccaagccccgagagcagctgcgacgtgaagctggtggaaaagagcttcgagacagacaccaacctgaacttccagaacctgagcgtgatcggcttcagaatcctgctgctgaaagtggccggctttaacctgctgatgaccctgcggctgtggtccagctga

SEQ ID NO: 3628 - DNA, 1920 bp, Artificial Sequence; identical to SEQ ID NO: 3530
  Synthetic Polynucloetide

SEQ ID NO: 3629 - DNA, 1941 bp, Artificial Sequence; identical to SEQ ID NO: 3531
  Synthetic Polynucloetide

SEQ ID NO: 3630 - DNA, 3180 bp, Artificial Sequence; identical to SEQ ID NO: 3532
  Synthetic Polynucloetide

SEQ ID NO: 3631 - DNA, 3000 bp, Artificial Sequence; identical to SEQ ID NO: 3533
  Synthetic Polynucloetide

SEQ ID NO: 3632 - DNA, 2997 bp, Artificial Sequence; identical to SEQ ID NO: 3534
  Synthetic Polynucloetide

SEQ ID NO: 3633 - DNA, 2295 bp, Artificial Sequence; identical to SEQ ID NO: 3535
  Synthetic Polynucloetide

SEQ ID NO: 3634 - DNA, 2970 bp, Artificial Sequence; identical to SEQ ID NO: 3536
  Synthetic Polynucloetide

SEQ ID NO: 3635 - DNA, 2307 bp, Artificial Sequence; identical to SEQ ID NO: 3537
  Synthetic Polynucloetide

SEQ ID NO: 3636 - DNA, 2973 bp, Artificial Sequence; identical to SEQ ID NO: 3538
  Synthetic Polynucloetide

SEQ ID NO: 3637 - DNA, 3132 bp, Artificial Sequence; identical to SEQ ID NO: 3539
  Synthetic Polynucloetide

SEQ ID NO: 3638 - DNA, 3135 bp, Artificial Sequence; identical to SEQ ID NO: 3540
  Synthetic Polynucloetide

SEQ ID NO: 3639 - DNA, 2997 bp, Artificial Sequence; identical to SEQ ID NO: 3541
  Synthetic Polynucloetide

SEQ ID NO: 3640 - DNA, 3243 bp, Artificial Sequence; identical to SEQ ID NO: 3542
  Synthetic Polynucloetide

SEQ ID NO: 3641 - DNA, 3297 bp, Artificial Sequence; identical to SEQ ID NO: 3543
  Synthetic Polynucloetide

SEQ ID NO: 3642 - DNA, 3108 bp, Artificial Sequence; identical to SEQ ID NO: 3544
  Synthetic Polynucloetide

SEQ ID NO: 3643 - DNA, 2319 bp, Artificial Sequence; identical to SEQ ID NO: 3545
  Synthetic Polynucloetide

SEQ ID NO: 3644 - DNA, 3153 bp, Artificial Sequence; identical to SEQ ID NO: 3546
  Synthetic Polynucloetide

SEQ ID NO: 3645 - DNA, 3528 bp, Artificial Sequence; identical to SEQ ID NO: 3547
  Synthetic Polynucloetide

SEQ ID NO: 3646 - DNA, 2883 bp, Artificial Sequence; identical to SEQ ID NO: 3548
  Synthetic Polynucloetide

SEQ ID NO: 3647 - DNA, 2883 bp, Artificial Sequence; identical to SEQ ID NO: 3549
  Synthetic Polynucloetide

SEQ ID NO: 3648 - DNA, 3096 bp, Artificial Sequence; identical to SEQ ID NO: 3550
  Synthetic Polynucloetide

SEQ ID NO: 3649 - DNA, 3219 bp, Artificial Sequence; identical to SEQ ID NO: 3551
  Synthetic Polynucloetide

SEQ ID NO: 3650 - DNA, 3102 bp, Artificial Sequence; identical to SEQ ID NO: 3552
  Synthetic Polynucloetide

SEQ ID NO: 3651 - DNA, 3228 bp, Artificial Sequence; identical to SEQ ID NO: 3553
  Synthetic Polynucloetide

SEQ ID NO: 3652 - DNA, 2901 bp, Artificial Sequence; identical to SEQ ID NO: 3554
  Synthetic Polynucloetide

SEQ ID NO: 3653 - DNA, 2373 bp, Artificial Sequence; identical to SEQ ID NO: 3555
  Synthetic Polynucloetide

SEQ ID NO: 3654 - DNA, 2307 bp, Artificial Sequence; identical to SEQ ID NO: 3556
  Synthetic Polynucloetide

SEQ ID NO: 3655 - DNA, 2307 bp, Artificial Sequence; identical to SEQ ID NO: 3557
  Synthetic Polynucloetide

SEQ ID NO: 3656 - DNA, 1785 bp, Artificial Sequence; identical to SEQ ID NO: 3558
  Synthetic Polynucloetide

SEQ ID NO: 3657 - DNA, 1680 bp, Artificial Sequence; identical to SEQ ID NO: 3559
  Synthetic Polynucloetide

SEQ ID NO: 3658 - DNA, 1710 bp, Artificial Sequence; identical to SEQ ID NO: 3560
  Synthetic Polynucloetide

SEQ ID NO: 3659 - DNA, 1659 bp, Artificial Sequence; identical to SEQ ID NO: 3561
  Synthetic Polynucloetide

SEQ ID NO: 3660 - DNA, 2361 bp, Artificial Sequence; identical to SEQ ID NO: 3562
  Synthetic Polynucloetide

SEQ ID NO: 3661 - DNA, 2457 bp, Artificial Sequence; identical to SEQ ID NO: 3563
  Synthetic Polynucloetide

SEQ ID NO: 3662 - DNA, 2607 bp, Artificial Sequence; identical to SEQ ID NO: 3564
  Synthetic Polynucloetide

SEQ ID NO: 3663 - DNA, 2076 bp, Artificial Sequence; identical to SEQ ID NO: 3565
  Synthetic Polynucloetide

SEQ ID NO: 3664 - DNA, 1383 bp, Artificial Sequence; identical to SEQ ID NO: 3566
  Synthetic Polynucloetide

SEQ ID NO: 3665 - DNA, 1326 bp, Artificial Sequence; identical to SEQ ID NO: 3567
  Synthetic Polynucloetide

SEQ ID NO: 3666 - DNA, 825 bp, Artificial Sequence; identical to SEQ ID NO: 3568
  Synthetic Polynucloetide

SEQ ID NO: 3667 - DNA, 2130 bp, Artificial Sequence; identical to SEQ ID NO: 3569
  Synthetic Polynucloetide

SEQ ID NO: 3668 - DNA, 1440 bp, Artificial Sequence; identical to SEQ ID NO: 3570
  Synthetic Polynucloetide

SEQ ID NO: 3669 - DNA, 1362 bp, Artificial Sequence; identical to SEQ ID NO: 3571
  Synthetic Polynucloetide

SEQ ID NO: 3670 - DNA, 864 bp, Artificial Sequence; identical to SEQ ID NO: 3572
  Synthetic Polynucloetide

SEQ ID NO: 3671 - DNA, 2361 bp, Artificial Sequence; identical to SEQ ID NO: 3573
  Synthetic Polynucloetide

SEQ ID NO: 3672 - DNA, 2457 bp, Artificial Sequence; identical to SEQ ID NO: 3574
  Synthetic Polynucloetide

SEQ ID NO: 3673 - DNA, 3915 bp, Artificial Sequence
  Synthetic Polynucloetide
atggccttaccagtgaccgccttgctcctgccgctggccttgctgctccacgccgccaggccggcatgccaggtccagctcgtcgagtccggcggcggcctcgtccaggccggcgactccgtcaccctctcctgcaccgcctccggccgcaccttctcctcctacgccctcgcctggttccgccagcgccccggcaaggagcgcgagttcgtcgccggcctccgctggggcggccccaccaactacgccgactccgtcaaggaccgcttcaccatctccggcgactccgccaagcacaccatgtacctccagatgaactccctcaagcccgaggacaccgccgtctactactgcggctacaaccccggcggctgggccgtcccctcccagtacgagtacgactcctggggccagggcacccaggtcaccgtctcctccggtaccggcggaggcggatctggcggcggaggtagcggtggcggaggatctgaattcgaagccgacatctaccagacacctagatacctggtcatcggcaccggcaagaaaatcaccctggaatgcagccagacaatgggccacgacaagatgtactggtatcagcaggaccccggcatggaactgcacctgatccactacagctacggcgtgaacagcaccgagaagggcgatctgtctagcgagagcaccgtgtccagaatcagaaccgagcacttcccactgacactggaaagcgccagacctagccacaccagccagtacctgtgtgcctcttctgaggccagaggactggccgagttcaccgacacacagtatttcggccctggcaccagactgaccgttctcgagatccagaaccctgatcctgccgtgtaccagctgcgggatagcaagagcagcgacaagagcgtgtgtctgttcaccgacttcgacagccagaccaacgtgtcccagagcaaggactccgacgtgtacatcaccgataagtgcgtgctggacatgcggagcatggacttcaagagcaactccgccgtggcctggtccaacaagtccgatttcgcctgcgccaacgccttcaacaacagcattatccccgaggacacattcttcccaagcagcgacgtgccctgcgacgtgaagctggtggaaaagagcttcgagacagacaccaacctgaacttccagaacctgagcgtgatcggcttcagaatcctgctgctgaaagtggccggctttaacctgctgatgaccctgcggctgtggtccagccgcgccaagagaagcggatctggcgtgaagcagaccctgaatttcgacctgctgaagctggctggcgacgtggaatccaacccaggccctactagtatggactggatttggcgcatccttttccttgtcggcgctgctaccggcgcccattccgggcccctgttcaatcaagaggtgcagatccctctgaccgagagctactgtggcccctgtcctaagaactggatctgctacaagaacaactgctaccagttcttcgacgagagcaagaattggtacgagagccaggccagctgcatgagccagaatgccagcctgctgaaggtgtacagcaaagaggaccaggacctgctgaaactggtcaagagctaccactggatgggccttgtgcacatccccaccaatggctcttggcagtgggaggacggcagcattctgagccctaacctgctgaccatcatcgagatgcagaagggcgactgcgccctgtacgccagcagctttaagggctacatcgagaattgcagcaccccgaacacctacatctgtatgcagagaaccgttggcggaggcggaagtggaggcggaggatctggcggcggaggctctgacctctttaatcaagaagtccagattccactcaccgaatcctactgcggaccttgtccaaaaaattggatttgttataagaacaactgttatcaattctttgatgagtctaaaaattggtatgagtcccaggcttcctgcatgtctcagaacgcttctctgctgaaagtctactctaaagaagatcaggatctcctgaagctcgtcaagtcttatcattggatggggctcgtccacattcctaccaacggaagctggcaatgggaagatggctccatcctgtctccaaatctgctcacgattattgaaatgcagaaaggggattgtgctctctacgccagctccttcaagggatatattgagaactgtagcacgcccaatacttatatctgtatgcaacggaccgtgggatccggcggcggaggatctggcggaggcggatctgggggcggaggctctttcgaacaagttcagcttcaacagcctggcgctgagctggtcaaacctggcgcttctgtgaagatgagctgcaaagccagcggctacgccttcagcagctactggatcaactggatgaagcagaaacccggccagggactcgaatggatcggccaaatctatcccggcgacggcaccgagaacagattcagcgtgaacttccagaaggccgccaagagcttcagcctgaagatcagcgatagccagctgggcgacgccgccatgtacttttgcgcttatagaagcgccgtgaacgcccggctgatgtttggagatggcacacagctggtggtcaagcccaacacgcgtgaggacctgaagaacgtgttcccacctgaggtggccgtgttcgagcctagcaaggccgagatcgcccacacccagaaagccaccctcgtgtgcctggctaccggcttctaccccgaccatgtggaactgtcttggtgggtcaacggcaaagaggtgcacagcggcgtgtgtaccgacccccagccactgaaagaacagcccgccctgaacgacagccggtactgcctgagcagcagactgagagtgtccgccaccttctggcagaacccccggaaccacttcagatgccaggtgcagttctacggcctgagcgagaacgacgagtggacccaggacagagccaagcccgtgacccagatcgtgtctgccgaagcctggggcagagccgattgcggcatcaccagcgccagctaccaccagggcgtgctgagcgccaccatcctgtacgagatcctgctgggcaaggccaccctgtacgccgtgctggtgtctgccctggtgctgatggctatggtcaagcggaaggacagccggggaagggccaagcgatctggatctggagcaacaaacttctcactactcaaacaagcaggtgacgtggaggagaatcccgggccttctagaggccatatgaccgagtacaagcccacggtgcgcctcgccacccgcgacgacgtccccagggccgtacgcaccctcgccgccgcgttcgccgactaccccgccacgcgccacaccgtcgatccggaccgccacatcgagcgggtcaccgagctgcaagaactcttcctcacgcgcgtcgggctcgacatcggcaaggtgtgggtcgcggacgacggcgccgcggtggcggtctggaccacgccggagagcgtcgaagcgggggcggtgttcgccgagatcggcccgcgcatggccgagttgagcggttcccggctggccgcgcagcaacagatggaaggcctcctggcgccgcaccggcccaaggagcccgcgtggttcctggccaccgtcggcgtctcgcccgaccaccagggcaagggtctgggcagcgccgtcgtgctccccggagtggaggcggccgagcgcgccggggtgcccgccttcctggagacctccgcgccccgcaacctccccttctacgagcggctcggcttcaccgtcaccgccgacgtcgaggtgcccgaaggaccgcgcacctggtgcatgacccgcaagcccggtgcctga

SEQ ID NO: 3674 - DNA, 3912 bp, Artificial Sequence
  Synthetic Polynucloetide
atggccttaccagtgaccgccttgctcctgccgctggccttgctgctccacgccgccaggccggcatgccaggtccagctcgtcgagtccggcggcggcctcgtccaggccggcgactccgtcaccctctcctgcaccgcctccggccgcaccttctcctcctacgccctcgcctggttccgccagcgccccggcaaggagcgcgagttcgtcgccggcctccgctggggcggccccaccaactacgccgactccgtcaaggaccgcttcaccatctccggcgactccgccaagcacaccatgtacctccagatgaactccctcaagcccgaggacaccgccgtctactactgcggctacaaccccggcggctgggccgtcccctcccagtacgagtacgactcctggggccagggcacccaggtcaccgtctcctccggtaccggcggaggcggatctggcggcggaggtagcggtggcggaggatctgaattcgaagccgacatctaccagacacctagatacctggtcatcggcaccggcaagaaaatcaccctggaatgcagccagacaatgggccacgacaagatgtactggtatcagcaggaccccggcatggaactgcacctgatccactacagctacggcgtgaacagcaccgagaagggcgatctgtctagcgagagcaccgtgtccagaatcagaaccgagcacttcccactgacactggaaagcgccagacctagccacaccagccagtacctgtgtgcctcttctgaggccagaggactggccgagttcaccgacacacagtatttcggccctggcaccagactgaccgttctcgaggacctgaagaacgtgttcccacctgaggtggccgtgttcgagcctagcaaggccgagatcgcccacacccagaaagccaccctcgtgtgcctggctaccggcttctaccccgaccatgtggaactgtcttggtgggtcaacggcaaagaggtgcacagcggcgtgtgtaccgacccccagccactgaaagaacagcccgccctgaacgacagccggtactgcctgagcagcagactgagagtgtccgccaccttctggcagaacccccggaaccacttcagatgccaggtgcagttctacggcctgagcgagaacgacgagtggacccaggacagagccaagcccgtgacccagatcgtgtctgccgaagcctggggcagagccgattgcggcatcaccagcgccagctaccaccagggcgtgctgagcgccaccatcctgtacgagatcctgctgggcaaggccaccctgtacgccgtgctggtgtctgccctggtgctgatggctatggtcaagcggaaggacagccggggaagggccaagcgatctggatctggagcaacaaacttctcactactcaaacaagcaggtgacgtggaggagaatcccgggcctactagtatggactggatttggcgcatccttttccttgtcggcgctgctaccggcgcccattccgggcccctgttcaatcaagaggtgcagatccctctgaccgagagctactgtggcccctgtcctaagaactggatctgctacaagaacaactgctaccagttcttcgacgagagcaagaattggtacgagagccaggccagctgcatgagccagaatgccagcctgctgaaggtgtacagcaaagaggaccaggacctgctgaaactggtcaagagctaccactggatgggccttgtgcacatccccaccaatggctcttggcagtgggaggacggcagcattctgagccctaacctgctgaccatcatcgagatgcagaagggcgactgcgccctgtacgccagcagctttaagggctacatcgagaattgcagcaccccgaacacctacatctgtatgcagagaaccgttggcggaggcggaagtggaggcggaggatctggcggcggaggctctgacctctttaatcaagaagtccagattccactcaccgaatcctactgcggaccttgtccaaaaaattggatttgttataagaacaactgttatcaattctttgatgagtctaaaaattggtatgagtcccaggcttcctgcatgtctcagaacgcttctctgctgaaagtctactctaaagaagatcaggatctcctgaagctcgtcaagtcttatcattggatggggctcgtccacattcctaccaacggaagctggcaatgggaagatggctccatcctgtctccaaatctgctcacgattattgaaatgcagaaaggggattgtgctctctacgccagctccttcaagggatatattgagaactgtagcacgcccaatacttatatctgtatgcaacggaccgtgggatccggcggcggaggatctggcggaggcggatctgggggcggaggctctttcgaacaagttcagcttcaacagcctggcgctgagctggtcaaacctggcgcttctgtgaagatgagctgcaaagccagcggctacgccttcagcagctactggatcaactggatgaagcagaaacccggccagggactcgaatggatcggccaaatctatcccggcgacggcaccgagaacagattcagcgtgaacttccagaaggccgccaagagcttcagcctgaagatcagcgatagccagctgggcgacgccgccatgtacttttgcgcttatagaagcgccgtgaacgcccggctgatgtttggagatggcacacagctggtggtcaagcccaacacgcgtatccagaaccctgatcctgccgtgtaccagctgcgggatagcaagagcagcgacaagagcgtgtgtctgttcaccgacttcgacagccagaccaacgtgtcccagagcaaggactccgacgtgtacatcaccgataagtgcgtgctggacatgcggagcatggacttcaagagcaactccgccgtggcctggtccaacaagtccgatttcgcctgcgccaacgccttcaacaacagcattatccccgaggacacattcttcccaagcagcgacgtgccctgcgacgtgaagctggtggaaaagagcttcgagacagacaccaacctgaacttccagaacctgagcgtgatcggcttcagaatcctgctgctgaaagtggccggctttaacctgctgatgaccctgcggctgtggtccagccgcgccaagagaagcggatctggcgtgaagcagaccctgaatttcgacctgctgaagctggctggcgacgtggaatccaacccaggcccttctagaggccatatgaccgagtacaagcccacggtgcgcctcgccacccgcgacgacgtccccagggccgtacgcaccctcgccgccgcgttcgccgactaccccgccacgcgccacaccgtcgatccggaccgccacatcgagcgggtcaccgagctgcaagaactcttcctcacgcgcgtcgggctcgacatcggcaaggtgtgggtcgcggacgacggcgccgcggtggcggtctggaccacgccggagagcgtcgaagcgggggcggtgttcgccgagatcggcccgcgcatggccgagttgagcggttcccggctggccgcgcagcaacagatggaaggcctcctggcgccgcaccggcccaaggagcccgcgtggttcctggccaccgtcggcgtctcgcccgaccaccagggcaagggtctgggcagcgccgtcgtgctccccggagtggaggcggccgagcgcgccggggtgcccgccttcctggagacctccgcgccccgcaacctccccttctacgagcggctcggcttcaccgtcaccgccgacgtcgaggtgcccgaaggaccgcgcacctggtgcatgacccgcaagcccggtgcctga

SEQ ID NO: 3675 - DNA, 3906 bp, Artificial Sequence
  Synthetic Polynucloetide
atggccttaccagtgaccgccttgctcctgccgctggccttgctgctccacgccgccaggccggcatgccaggtccagctcgtcgagtccggcggcggcctcgtccaggccggcgactccgtcaccctctcctgcaccgcctccggccgcaccttctcctcctacgccctcgcctggttccgccagcgccccggcaaggagcgcgagttcgtcgccggcctccgctggggcggccccaccaactacgccgactccgtcaaggaccgcttcaccatctccggcgactccgccaagcacaccatgtacctccagatgaactccctcaagcccgaggacaccgccgtctactactgcggctacaaccccggcggctgggccgtcccctcccagtacgagtacgactcctggggccagggcacccaggtcaccgtctcctccggtaccggcggaggcggatctggcggcggaggtagcggtggcggaggatctgaattcgaagccgacatctaccagacacctagatacctggtcatcggcaccggcaagaaaatcaccctggaatgcagccagacaatgggccacgacaagatgtactggtatcagcaggaccccggcatggaactgcacctgatccactacagctacggcgtgaacagcaccgagaagggcgatctgtctagcgagagcaccgtgtccagaatcagaaccgagcacttcccactgacactggaaagcgccagacctagccacaccagccagtacctgtgtgcctcttctgaggccagaggactggccgagttcaccgacacacagtatttcggccctggcaccagactgaccgttctcgaggacctgaagaacgtgttcccacctgaggtggccgtgttcgagcctagcgaggccgagatcagccacacccagaaagccaccctcgtgtgcctggctaccggcttctaccccgaccatgtggaactgtcttggtgggtcaacggcaaagaggtgcacagcggcgtgtgtaccgacccccagccactgaaagaacagcccgccctgaacgacagccggtactgcctgagcagcagactgagagtgtccgccaccttctggcagaacccccggaaccacttcagatgccaggtgcagttctacggcctgagcgagaacgacgagtggacccaggacagagccaagcccgtgacccagatcgtgtctgccgaagcctggggcagagccgattgcggctttaccagcgagagctaccagcagggcgtgctgagcgccaccatcctgtacgagatcctgctgggcaaggccaccctgtacgccgtgctggtgtctgccctggtgctgatggctatggtcaagcggaaggacagccggggaagggccaagcgatctggatctggagcaacaaacttctcactactcaaacaagcaggtgacgtggaggagaatcccgggcctactagtatggactggatttggcgcatccttttccttgtcggcgctgctaccggcgcccattccctgttcaatcaagaggtgcagatccctctgaccgagagctactgtggcccctgtcctaagaactggatctgctacaagaacaactgctaccagttcttcgacgagagcaagaattggtacgagagccaggccagctgcatgagccagaatgccagcctgctgaaggtgtacagcaaagaggaccaggacctgctgaaactggtcaagagctaccactggatgggccttgtgcacatccccaccaatggctcttggcagtgggaggacggcagcattctgagccctaacctgctgaccatcatcgagatgcagaagggcgactgcgccctgtacgccagcagctttaagggctacatcgagaattgcagcaccccgaacacctacatctgtatgcagagaaccgttggcggaggcggaagtggaggcggaggatctggcggcggaggctctgacctctttaatcaagaagtccagattccactcaccgaatcctactgcggaccttgtccaaaaaattggatttgttataagaacaactgttatcaattctttgatgagtctaaaaattggtatgagtcccaggcttcctgcatgtctcagaacgcttctctgctgaaagtctactctaaagaagatcaggatctcctgaagctcgtcaagtcttatcattggatggggctcgtccacattcctaccaacggaagctggcaatgggaagatggctccatcctgtctccaaatctgctcacgattattgaaatgcagaaaggggattgtgctctctacgccagctccttcaagggatatattgagaactgtagcacgcccaatacttatatctgtatgcaacggaccgtgggatccggcggcggaggatctggcggaggcggatctgggggcggaggctctttcgaacaagttcagcttcaacagcctggcgctgagctggtcaaacctggcgcttctgtgaagatgagctgcaaagccagcggctacgccttcagcagctactggatcaactggatgaagcagaaacccggccagggactcgaatggatcggccaaatctatcccggcgacggcaccgagaacagattcagcgtgaacttccagaaggccgccaagagcttcagcctgaagatcagcgatagccagctgggcgacgccgccatgtacttttgcgcttatagaagcgccgtgaacgcccggctgatgtttggagatggcacacagctggtggtcaagcccaacacgcgtatccagaaccctgatcctgccgtgtaccagctgcgggatagcaagagcagcgacaagagcgtgtgtctgttcaccgacttcgacagccagaccaacgtgtcccagagcaaggactccgacgtgtacatcaccgataagtgcgtgctggacatgcggagcatggacttcaagagcaactccgccgtggcctggtccaacaagtccgatttcgcctgcgccaacgccttcaacaacagcattatccccgaggacacattcttcccaagccccgagagcagctgcgacgtgaagctggtggaaaagagcttcgagacagacaccaacctgaacttccagaacctgagcgtgatcggcttcagaatcctgctgctgaaagtggccggctttaacctgctgatgaccctgcggctgtggtccagccgcgccaagagaagcggatctggcgtgaagcagaccctgaatttcgacctgctgaagctggctggcgacgtggaatccaacccaggcccttctagaggccatatgaccgagtacaagcccacggtgcgcctcgccacccgcgacgacgtccccagggccgtacgcaccctcgccgccgcgttcgccgactaccccgccacgcgccacaccgtcgatccggaccgccacatcgagcgggtcaccgagctgcaagaactcttcctcacgcgcgtcgggctcgacatcggcaaggtgtgggtcgcggacgacggcgccgcggtggcggtctggaccacgccggagagcgtcgaagcgggggcggtgttcgccgagatcggcccgcgcatggccgagttgagcggttcccggctggccgcgcagcaacagatggaaggcctcctggcgccgcaccggcccaaggagcccgcgtggttcctggccaccgtcggcgtctcgcccgaccaccagggcaagggtctgggcagcgccgtcgtgctccccggagtggaggcggccgagcgcgccggggtgcccgccttcctggagacctccgcgccccgcaacctccccttctacgagcggctcggcttcaccgtcaccgccgacgtcgaggtgcccgaaggaccgcgcacctggtgcatgacccgcaagcccggtgcctga

SEQ ID NO: 3676 - DNA, 3210 bp, Artificial Sequence
  Synthetic Polynucloetide
atggccttaccagtgaccgccttgctcctgccgctggccttgctgctccacgccgccaggccggcatgccaggtccagctcgtcgagtccggcggcggcctcgtccaggccggcgactccgtcaccctctcctgcaccgcctccggccgcaccttctcctcctacgccctcgcctggttccgccagcgccccggcaaggagcgcgagttcgtcgccggcctccgctggggcggccccaccaactacgccgactccgtcaaggaccgcttcaccatctccggcgactccgccaagcacaccatgtacctccagatgaactccctcaagcccgaggacaccgccgtctactactgcggctacaaccccggcggctgggccgtcccctcccagtacgagtacgactcctggggccagggcacccaggtcaccgtctcctccggtaccggcggaggcggatctggcggcggaggtagcggtggcggaggatctgaattcgaagccgacatctaccagacacctagatacctggtcatcggcaccggcaagaaaatcaccctggaatgcagccagacaatgggccacgacaagatgtactggtatcagcaggaccccggcatggaactgcacctgatccactacagctacggcgtgaacagcaccgagaagggcgatctgtctagcgagagcaccgtgtccagaatcagaaccgagcacttcccactgacactggaaagcgccagacctagccacaccagccagtacctgtgtgcctcttctgaggccagaggactggccgagttcaccgacacacagtatttcggccctggcaccagactgaccgttctcgaggacctgaagaacgtgttcccacctgaggtggccgtgttcgagcctagcgaggccgagatcagccacacccagaaagccaccctcgtgtgcctggctaccggcttctaccccgaccatgtggaactgtcttggtgggtcaacggcaaagaggtgcacagcggcgtgtgtaccgacccccagccactgaaagaacagcccgccctgaacgacagccggtactgcctgagcagcagactgagagtgtccgccaccttctggcagaacccccggaaccacttcagatgccaggtgcagttctacggcctgagcgagaacgacgagtggacccaggacagagccaagcccgtgacccagatcgtgtctgccgaagcctggggcagagccgattgcggctttaccagcgagagctaccagcagggcgtgctgagcgccaccatcctgtacgagatcctgctgggcaaggccaccctgtacgccgtgctggtgtctgccctggtgctgatggctatggtcaagcggaaggacagccggggaagggccaagcgatctggatctggagcaacaaacttctcactactcaaacaagcaggtgacgtggaggagaatcccgggcctactagtatggactggatttggcgcatccttttccttgtcggcgctgctaccggcgcccattccgggcccctgttcaatcaagaggtgcagatccctctgaccgagagctactgtggcccctgtcctaagaactggatctgctacaagaacaactgctaccagttcttcgacgagagcaagaattggtacgagagccaggccagctgcatgagccagaatgccagcctgctgaaggtgtacagcaaagaggaccaggacctgctgaaactggtcaagagctaccactggatgggccttgtgcacatccccaccaatggctcttggcagtgggaggacggcagcattctgagccctaacctgctgaccatcatcgagatgcagaagggcgactgcgccctgtacgccagcagctttaagggctacatcgagaattgcagcaccccgaacacctacatctgtatgcagagaaccgttggcggaggcggaagtggaggcggaggatctggcggcggaggctctgacctctttaatcaagaagtccagattccactcaccgaatcctactgcggaccttgtccaaaaaattggatttgttataagaacaactgttatcaattctttgatgagtctaaaaattggtatgagtcccaggcttcctgcatgtctcagaacgcttctctgctgaaagtctactctaaagaagatcaggatctcctgaagctcgtcaagtcttatcattggatggggctcgtccacattcctaccaacggaagctggcaatgggaagatggctccatcctgtctccaaatctgctcacgattattgaaatgcagaaaggggattgtgctctctacgccagctccttcaagggatatattgagaactgtagcacgcccaatacttatatctgtatgcaacggaccgtgggatccggcggcggaggatctggcggaggcggatctgggggcggaggctctttcgaacaagttcagcttcaacagcctggcgctgagctggtcaaacctggcgcttctgtgaagatgagctgcaaagccagcggctacgccttcagcagctactggatcaactggatgaagcagaaacccggccagggactcgaatggatcggccaaatctatcccggcgacggcaccgagaacagattcagcgtgaacttccagaaggccgccaagagcttcagcctgaagatcagcgatagccagctgggcgacgccgccatgtacttttgcgcttatagaagcgccgtgaacgcccggctgatgtttggagatggcacacagctggtggtcaagcccaacacgcgtatccagaaccctgatcctgccgtgtaccagctgcgggatagcaagagcagcgacaagagcgtgtgtctgttcaccgacttcgacagccagaccaacgtgtcccagagcaaggactccgacgtgtacatcaccgataagtgcgtgctggacatgcggagcatggacttcaagagcaactccgccgtggcctggtccaacaagtccgatttcgcctgcgccaacgccttcaacaacagcattatccccgaggacacattcttcccaagccccgagagcagctgcgacgtgaagctggtggaaaagagcttcgagacagacaccaacctgaacttccagaacctgagcgtgatcggcttcagaatcctgctgctgaaagtggccggctttaacctgctgatgaccctgcggctgtggtccagc

SEQ ID NO: 3677 - DNA, 3885 bp, Artificial Sequence
  Synthetic Polynucloetide
atggccttaccagtgaccgccttgctcctgccgctggccttgctgctccacgccgccaggccggcatgccaggtccagctcgtcgagtccggcggcggcctcgtccaggccggcgactccgtcaccctctcctgcaccgcctccggccgcaccttctcctcctacgccctcgcctggttccgccagcgccccggcaaggagcgcgagttcgtcgccggcctccgctggggcggccccaccaactacgccgactccgtcaaggaccgcttcaccatctccggcgactccgccaagcacaccatgtacctccagatgaactccctcaagcccgaggacaccgccgtctactactgcggctacaaccccggcggctgggccgtcccctcccagtacgagtacgactcctggggccagggcacccaggtcaccgtctcctccggtaccggcggaggcggatctggcggcggaggtagcggtggcggaggatctgaattcgaagccgacatctaccagacacctagatacctggtcatcggcaccggcaagaaaatcaccctggaatgcagccagacaatgggccacgacaagatgtactggtatcagcaggaccccggcatggaactgcacctgatccactacagctacggcgtgaacagcaccgagaagggcgatctgtctagcgagagcaccgtgtccagaatcagaaccgagcacttcccactgacactggaaagcgccagacctagccacaccagccagtacctgtgtgcctcttctgaggccagaggactggccgagttcaccgacacacagtatttcggccctggcaccagactgaccgttctcgaggacctgaagaacgtgttcccacctgaggtggccgtgttcgagcctagcgaggccgagatcagccacacccagaaagccaccctcgtgtgcctggctaccggcttctaccccgaccatgtggaactgtcttggtgggtcaacggcaaagaggtgcacagcggcgtgtgtaccgacccccagccactgaaagaacagcccgccctgaacgacagccggtactgcctgagcagcagactgagagtgtccgccaccttctggcagaacccccggaaccacttcagatgccaggtgcagttctacggcctgagcgagaacgacgagtggacccaggacagagccaagcccgtgacccagatcgtgtctgccgaagcctggggcagagccgattgcggctttaccagcgagagctaccagcagggcgtgctgagcgccaccatcctgtacgagatcctgctgggcaaggccaccctgtacgccgtgctggtgtctgccctggtgctgatggctatggtcaagcggaaggacagccggggaagggccaagcgatctggatctggagcaacaaacttctcactactcaaacaagcaggtgacgtggaggagaatcccgggcctactagtatggactggatttggcgcatccttttccttgtcggcgctgctaccggcgcccattccgggcccctgttcaatcaagaggtgcagatccctctgaccgagagctactgtggcccctgtcctaagaactggatctgctacaagaacaactgctaccagttcttcgacgagagcaagaattggtacgagagccaggccagctgcatgagccagaatgccagcctgctgaaggtgtacagcaaagaggaccaggacctgctgaaactggtcaagagctaccactggatgggccttgtgcacatccccaccaatggctcttggcagtgggaggacggcagcattctgagccctaacctgctgaccatcatcgagatgcagaagggcgactgcgccctgtacgccagcagctttaagggctacatcgagaattgcagcaccccgaacacctacatctgtatgcagagaaccgttggcggaggcggaagtggaggcggaggatctggcggcggaggctctgacctctttaatcaagaagtccagattccactcaccgaatcctactgcggaccttgtccaaaaaattggatttgttataagaacaactgttatcaattctttgatgagtctaaaaattggtatgagtcccaggcttcctgcatgtctcagaacgcttctctgctgaaagtctactctaaagaagatcaggatctcctgaagctcgtcaagtcttatcattggatggggctcgtccacattcctaccaacggaagctggcaatgggaagatggctccatcctgtctccaaatctgctcacgattattgaaatgcagaaaggggattgtgctctctacgccagctccttcaagggatatattgagaactgtagcacgcccaatacttatatctgtatgcaacggaccgtgggatccggcggcggaggatctggcggaggcggatctgggggcggaggctctttcgaacaagttcagcttcaacagcctggcgctgagctggtcaaacctggcgcttctgtgaagatgagctgcaaagccagcggctacgccttcagcagctactggatcaactggatgaagcagaaacccggccagggactcgaatggatcggccaaatctatcccggcgacggcaccgagaacagattcagcgtgaacttccagaaggccgccaagagcttcagcctgaagatcagcgatagccagctgggcgacgccgccatgtacttttgcgcttatagaagcgccgtgaacgcccggctgatgtttggagatggcacacagctggtggtcaagcccaacacgcgtatccagaaccctgatcctgccgtgtaccagctgcgggatagcaagagcagcgacaagagcgtgtgtctgttcaccgacttcgacagccagaccaacgtgtcccagagcaaggactccgacgtgtacatcaccgataagtgcgtgctggacatgcggagcatggacttcaagagcaactccgccgtggcctggtccaacaagtccgatttcgcctgcgccaacgccttcaacaacagcattatccccgaggacacattcttcccaagccccgagagcagctgcgacgtgaagctggtggaaaagagcttcgagacagacaccaacctgaacttccagaacctgagcgtgatcggcttcagaatcctgctgctgaaagtggccggctttaacctgctgatgaccctgcggctgtggtccagccgcgccaagagaagcggatctggcgtgaagcagaccctgaatttcgacctgctgaagctggctggcgacgtggaatccaacccaggcccttctagaggcgggatccacaccatggctacctacgaggtgctgtgcgaggtggcaagaaagctgggcaccgacgacagagaagtggtgctgttcctgctgaacgtgttcatccctcagcctacactggcccagctgatcggtgcactgagagccctgaaagaggaaggccggctgacctttcctctgctggccgaatgcctgttcagagccggaagaagggatctgctgcgggacctgctgcatctggaccccagatttctggaaagacacctggccggcaccatgagctacttcagcccttaccagctgaccgtgctgcacgttgacggcgaactgtgcgccagagatattcggagcctgatcttcctgagcaaggacaccatcggcagccggtctacccctcagacatttctgcactgggtgtactgcatggaaaacctggacctgctcggccccacagatgtggatgccctgatgtccatgctgagaagcctgagcagagtggacctccagagacaggtgcagacactgatgggactgcacctgagcggacctagccacagccagcactacagacacacccct

SEQ ID NO: 3678 - DNA, 3222 bp, Artificial Sequence
  Synthetic Polynucloetide
atggccttaccagtgaccgccttgctcctgccgctggccttgctgctccacgccgccaggccggcatgccaggtccagctcgtcgagtccggcggcggcctcgtccaggccggcgactccgtcaccctctcctgcaccgcctccggccgcaccttctcctcctacgccctcgcctggttccgccagcgccccggcaaggagcgcgagttcgtcgccggcctccgctggggcggccccaccaactacgccgactccgtcaaggaccgcttcaccatctccggcgactccgccaagcacaccatgtacctccagatgaactccctcaagcccgaggacaccgccgtctactactgcggctacaaccccggcggctgggccgtcccctcccagtacgagtacgactcctggggccagggcacccaggtcaccgtctcctccggtaccggcggaggcggatctggcggcggaggtagcggtggcggaggatctgaattcgaagccgacatctaccagacacctagatacctggtcatcggcaccggcaagaaaatcaccctggaatgcagccagacaatgggccacgacaagatgtactggtatcagcaggaccccggcatggaactgcacctgatccactacagctacggcgtgaacagcaccgagaagggcgatctgtctagcgagagcaccgtgtccagaatcagaaccgagcacttcccactgacactggaaagcgccagacctagccacaccagccagtacctgtgtgcctcttctgaggccagaggactggccgagttcaccgacacacagtatttcggccctggcaccagactgaccgttctcgagatccagaaccctgatcctgccgtgtaccagctgcgggatagcaagagcagcgacaagagcgtgtgtctgttcaccgacttcgacagccagaccaacgtgtcccagagcaaggactccgacgtgtacatcaccgataagtgcgtgctggacatgcggagcatggacttcaagagcaactccgccgtggcctggtccaacaagtccgatttcgcctgcgccaacgccttcaacaacagcattatccccgaggacacattcttcccaagccccgagagcagctgcgacgtgaagctggtggaaaagagcttcgagacagacaccaacctgaacttccagaacctgagcgtgatcggcttcagaatcctgctgctgaaagtggccggctttaacctgctgatgaccctgcggctgtggtccagccgcgccaagagaagcggatctggcgtgaagcagaccctgaatttcgacctgctgaagctggctggcgacgtggaatccaacccaggccctactagtatggactggatttggcgcatccttttccttgtcggcgctgctaccggcgcccattccgggcccctgttcaatcaagaggtgcagatccctctgaccgagagctactgtggcccctgtcctaagaactggatctgctacaagaacaactgctaccagttcttcgacgagagcaagaattggtacgagagccaggccagctgcatgagccagaatgccagcctgctgaaggtgtacagcaaagaggaccaggacctgctgaaactggtcaagagctaccactggatgggccttgtgcacatccccaccaatggctcttggcagtgggaggacggcagcattctgagccctaacctgctgaccatcatcgagatgcagaagggcgactgcgccctgtacgccagcagctttaagggctacatcgagaattgcagcaccccgaacacctacatctgtatgcagagaaccgttggcggaggcggaagtggaggcggaggatctggcggcggaggctctgacctctttaatcaagaagtccagattccactcaccgaatcctactgcggaccttgtccaaaaaattggatttgttataagaacaactgttatcaattctttgatgagtctaaaaattggtatgagtcccaggcttcctgcatgtctcagaacgcttctctgctgaaagtctactctaaagaagatcaggatctcctgaagctcgtcaagtcttatcattggatggggctcgtccacattcctaccaacggaagctggcaatgggaagatggctccatcctgtctccaaatctgctcacgattattgaaatgcagaaaggggattgtgctctctacgccagctccttcaagggatatattgagaactgtagcacgcccaatacttatatctgtatgcaacggaccgtgggatccggcggcggaggatctggcggaggcggatctgggggcggaggctctttcgaacaagttcagcttcaacagcctggcgctgagctggtcaaacctggcgcttctgtgaagatgagctgcaaagccagcggctacgccttcagcagctactggatcaactggatgaagcagaaacccggccagggactcgaatggatcggccaaatctatcccggcgacggcaccgagaacagattcagcgtgaacttccagaaggccgccaagagcttcagcctgaagatcagcgatagccagctgggcgacgccgccatgtacttttgcgcttatagaagcgccgtgaacgcccggctgatgtttggagatggcacacagctggtggtcaagcccaacacgcgtgaggacctgaagaacgtgttcccacctgaggtggccgtgttcgagcctagcgaggccgagatcagccacacccagaaagccaccctcgtgtgcctggctaccggcttctaccccgaccatgtggaactgtcttggtgggtcaacggcaaagaggtgcacagcggcgtgtgtaccgacccccagccactgaaagaacagcccgccctgaacgacagccggtactgcctgagcagcagactgagagtgtccgccaccttctggcagaacccccggaaccacttcagatgccaggtgcagttctacggcctgagcgagaacgacgagtggacccaggacagagccaagcccgtgacccagatcgtgtctgccgaagcctggggcagagccgattgcggctttaccagcgagagctaccagcagggcgtgctgagcgccaccatcctgtacgagatcctgctgggcaaggccaccctgtacgccgtgctggtgtctgccctggtgctgatggctatggtcaagcggaaggacagccgggga

SEQ ID NO: 3679 - DNA, 3888 bp, Artificial Sequence
  Synthetic Polynucloetide
atggccttaccagtgaccgccttgctcctgccgctggccttgctgctccacgccgccaggccggcatgccaggtccagctcgtcgagtccggcggcggcctcgtccaggccggcgactccgtcaccctctcctgcaccgcctccggccgcaccttctcctcctacgccctcgcctggttccgccagcgccccggcaaggagcgcgagttcgtcgccggcctccgctggggcggccccaccaactacgccgactccgtcaaggaccgcttcaccatctccggcgactccgccaagcacaccatgtacctccagatgaactccctcaagcccgaggacaccgccgtctactactgcggctacaaccccggcggctgggccgtcccctcccagtacgagtacgactcctggggccagggcacccaggtcaccgtctcctccggtaccggcggaggcggatctggcggcggaggtagcggtggcggaggatctgaattcgaagccgacatctaccagacacctagatacctggtcatcggcaccggcaagaaaatcaccctggaatgcagccagacaatgggccacgacaagatgtactggtatcagcaggaccccggcatggaactgcacctgatccactacagctacggcgtgaacagcaccgagaagggcgatctgtctagcgagagcaccgtgtccagaatcagaaccgagcacttcccactgacactggaaagcgccagacctagccacaccagccagtacctgtgtgcctcttctgaggccagaggactggccgagttcaccgacacacagtatttcggccctggcaccagactgaccgttctcgagatccagaaccctgatcctgccgtgtaccagctgcgggatagcaagagcagcgacaagagcgtgtgtctgttcaccgacttcgacagccagaccaacgtgtcccagagcaaggactccgacgtgtacatcaccgataagtgcgtgctggacatgcggagcatggacttcaagagcaactccgccgtggcctggtccaacaagtccgatttcgcctgcgccaacgccttcaacaacagcattatccccgaggacacattcttcccaagccccgagagcagctgcgacgtgaagctggtggaaaagagcttcgagacagacaccaacctgaacttccagaacctgagcgtgatcggcttcagaatcctgctgctgaaagtggccggctttaacctgctgatgaccctgcggctgtggtccagccgcgccaagagaagcggatctggcgtgaagcagaccctgaatttcgacctgctgaagctggctggcgacgtggaatccaacccaggccctactagtatggactggatttggcgcatccttttccttgtcggcgctgctaccggcgcccattccgggcccctgttcaatcaagaggtgcagatccctctgaccgagagctactgtggcccctgtcctaagaactggatctgctacaagaacaactgctaccagttcttcgacgagagcaagaattggtacgagagccaggccagctgcatgagccagaatgccagcctgctgaaggtgtacagcaaagaggaccaggacctgctgaaactggtcaagagctaccactggatgggccttgtgcacatccccaccaatggctcttggcagtgggaggacggcagcattctgagccctaacctgctgaccatcatcgagatgcagaagggcgactgcgccctgtacgccagcagctttaagggctacatcgagaattgcagcaccccgaacacctacatctgtatgcagagaaccgttggcggaggcggaagtggaggcggaggatctggcggcggaggctctgacctctttaatcaagaagtccagattccactcaccgaatcctactgcggaccttgtccaaaaaattggatttgttataagaacaactgttatcaattctttgatgagtctaaaaattggtatgagtcccaggcttcctgcatgtctcagaacgcttctctgctgaaagtctactctaaagaagatcaggatctcctgaagctcgtcaagtcttatcattggatggggctcgtccacattcctaccaacggaagctggcaatgggaagatggctccatcctgtctccaaatctgctcacgattattgaaatgcagaaaggggattgtgctctctacgccagctccttcaagggatatattgagaactgtagcacgcccaatacttatatctgtatgcaacggaccgtgggatccggcggcggaggatctggcggaggcggatctgggggcggaggctctttcgaacaagttcagcttcaacagcctggcgctgagctggtcaaacctggcgcttctgtgaagatgagctgcaaagccagcggctacgccttcagcagctactggatcaactggatgaagcagaaacccggccagggactcgaatggatcggccaaatctatcccggcgacggcaccgagaacagattcagcgtgaacttccagaaggccgccaagagcttcagcctgaagatcagcgatagccagctgggcgacgccgccatgtacttttgcgcttatagaagcgccgtgaacgcccggctgatgtttggagatggcacacagctggtggtcaagcccaacacgcgtgaggacctgaagaacgtgttcccacctgaggtggccgtgttcgagcctagcgaggccgagatcagccacacccagaaagccaccctcgtgtgcctggctaccggcttctaccccgaccatgtggaactgtcttggtgggtcaacggcaaagaggtgcacagcggcgtgtgtaccgacccccagccactgaaagaacagcccgccctgaacgacagccggtactgcctgagcagcagactgagagtgtccgccaccttctggcagaacccccggaaccacttcagatgccaggtgcagttctacggcctgagcgagaacgacgagtggacccaggacagagccaagcccgtgacccagatcgtgtctgccgaagcctggggcagagccgattgcggctttaccagcgagagctaccagcagggcgtgctgagcgccaccatcctgtacgagatcctgctgggcaaggccaccctgtacgccgtgctggtgtctgccctggtgctgatggctatggtcaagcggaaggacagccggggaagggccaagcgatctggatctggagcaacaaacttctcactactcaaacaagcaggtgacgtggaggagaatcccgggccttctagaggcgggatccacaccatggctacctacgaggtgctgtgcgaggtggcaagaaagctgggcaccgacgacagagaagtggtgctgttcctgctgaacgtgttcatccctcagcctacactggcccagctgatcggtgcactgagagccctgaaagaggaaggccggctgacctttcctctgctggccgaatgcctgttcagagccggaagaagggatctgctgcgggacctgctgcatctggaccccagatttctggaaagacacctggccggcaccatgagctacttcagcccttaccagctgaccgtgctgcacgttgacggcgaactgtgcgccagagatattcggagcctgatcttcctgagcaaggacaccatcggcagccggtctacccctcagacatttctgcactgggtgtactgcatggaaaacctggacctgctcggccccacagatgtggatgccctgatgtccatgctgagaagcctgagcagagtggacctccagagacaggtgcagacactgatgggactgcacctgagcggacctagccacagccagcactacagacacacccct

SEQ ID NO: 3680 - DNA, 3912 bp, Artificial Sequence
  Synthetic Polynucloetide
atggccttaccagtgaccgccttgctcctgccgctggccttgctgctccacgccgccaggccggcatgccaggtccagctcgtcgagtccggcggcggcctcgtccaggccggcgactccgtcaccctctcctgcaccgcctccggccgcaccttctcctcctacgccctcgcctggttccgccagcgccccggcaaggagcgcgagttcgtcgccggcctccgctggggcggccccaccaactacgccgactccgtcaaggaccgcttcaccatctccggcgactccgccaagcacaccatgtacctccagatgaactccctcaagcccgaggacaccgccgtctactactgcggctacaaccccggcggctgggccgtcccctcccagtacgagtacgactcctggggccagggcacccaggtcaccgtctcctccggtaccggcggaggcggatctggcggcggaggtagcggtggcggaggatctgaattcgaagccgacatctaccagacacctagatacctggtcatcggcaccggcaagaaaatcaccctggaatgcagccagacaatgggccacgacaagatgtactggtatcagcaggaccccggcatggaactgcacctgatccactacagctacggcgtgaacagcaccgagaagggcgatctgtctagcgagagcaccgtgtccagaatcagaaccgagcacttcccactgacactggaaagcgccagacctagccacaccagccagtacctgtgtgcctcttctgaggccagaggactggccgagttcaccgacacacagtatttcggccctggcaccagactgaccgttctcgaggacctgaagaacgtgttcccacctgaggtggccgtgttcgagcctagcgaggccgagatcagccacacccagaaagccaccctcgtgtgcctggctaccggcttctaccccgaccatgtggaactgtcttggtgggtcaacggcaaagaggtgcacagcggcgtgtctaccgacccccagccactgaaagaacagcccgccctgaacgacagccggtactgcctgagcagcagactgagagtgtccgccaccttctggcagaacccccggaaccacttcagatgccaggtgcagttctacggcctgagcgagaacgacgagtggacccaggacagagccaagcccgtgacccagatcgtgtctgccgaagcctggggcagagccgattgcggctttaccagcgagagctaccagcagggcgtgctgagcgccaccatcctgtacgagatcctgctgggcaaggccaccctgtacgccgtgctggtgtctgccctggtgctgatggctatggtcaagcggaaggacagccggggaagggccaagcgatctggatctggagcaacaaacttctcactactcaaacaagcaggtgacgtggaggagaatcccgggcctactagtatggactggatttggcgcatccttttccttgtcggcgctgctaccggcgcccattccgggcccctgttcaatcaagaggtgcagatccctctgaccgagagctactgtggcccctgtcctaagaactggatctgctacaagaacaactgctaccagttcttcgacgagagcaagaattggtacgagagccaggccagctgcatgagccagaatgccagcctgctgaaggtgtacagcaaagaggaccaggacctgctgaaactggtcaagagctaccactggatgggccttgtgcacatccccaccaatggctcttggcagtgggaggacggcagcattctgagccctaacctgctgaccatcatcgagatgcagaagggcgactgcgccctgtacgccagcagctttaagggctacatcgagaattgcagcaccccgaacacctacatctgtatgcagagaaccgttggcggaggcggaagtggaggcggaggatctggcggcggaggctctgacctctttaatcaagaagtccagattccactcaccgaatcctactgcggaccttgtccaaaaaattggatttgttataagaacaactgttatcaattctttgatgagtctaaaaattggtatgagtcccaggcttcctgcatgtctcagaacgcttctctgctgaaagtctactctaaagaagatcaggatctcctgaagctcgtcaagtcttatcattggatggggctcgtccacattcctaccaacggaagctggcaatgggaagatggctccatcctgtctccaaatctgctcacgattattgaaatgcagaaaggggattgtgctctctacgccagctccttcaagggatatattgagaactgtagcacgcccaatacttatatctgtatgcaacggaccgtgggatccggcggcggaggatctggcggaggcggatctgggggcggaggctctttcgaacaagttcagcttcaacagcctggcgctgagctggtcaaacctggcgcttctgtgaagatgagctgcaaagccagcggctacgccttcagcagctactggatcaactggatgaagcagaaacccggccagggactcgaatggatcggccaaatctatcccggcgacggcaccgagaacagattcagcgtgaacttccagaaggccgccaagagcttcagcctgaagatcagcgatagccagctgggcgacgccgccatgtacttttgcgcttatagaagcgccgtgaacgcccggctgatgtttggagatggcacacagctggtggtcaagcccaacacgcgtatccagaaccctgatcctgccgtgtaccagctgcgggatagcaagagcagcgacaagagcgtgtgtctgttcaccgacttcgacagccagaccaacgtgtcccagagcaaggactccgacgtgtacatcaccgataagaccgtgctggacatgcggagcatggacttcaagagcaactccgccgtggcctggtccaacaagtccgatttcgcctgcgccaacgccttcaacaacagcattatccccgaggacacattcttcccaagccccgagagcagctgcgacgtgaagctggtggaaaagagcttcgagacagacaccaacctgaacttccagaacctgagcgtgatcggcttcagaatcctgctgctgaaagtggccggctttaacctgctgatgaccctgcggctgtggtccagccgcgccaagagaagcggatctggcgtgaagcagaccctgaatttcgacctgctgaagctggctggcgacgtggaatccaacccaggcccttctagaggccatatgaccgagtacaagcccacggtgcgcctcgccacccgcgacgacgtccccagggccgtacgcaccctcgccgccgcgttcgccgactaccccgccacgcgccacaccgtcgatccggaccgccacatcgagcgggtcaccgagctgcaagaactcttcctcacgcgcgtcgggctcgacatcggcaaggtgtgggtcgcggacgacggcgccgcggtggcggtctggaccacgccggagagcgtcgaagcgggggcggtgttcgccgagatcggcccgcgcatggccgagttgagcggttcccggctggccgcgcagcaacagatggaaggcctcctggcgccgcaccggcccaaggagcccgcgtggttcctggccaccgtcggcgtctcgcccgaccaccagggcaagggtctgggcagcgccgtcgtgctccccggagtggaggcggccgagcgcgccggggtgcccgccttcctggagacctccgcgccccgcaacctccccttctacgagcggctcggcttcaccgtcaccgccgacgtcgaggtgcccgaaggaccgcgcacctggtgcatgacccgcaagcccggtgcctga

SEQ ID NO: 3681 - DNA, 4158 bp, Artificial Sequence
  Synthetic Polynucloetide
atggccttaccagtgaccgccttgctcctgccgctggccttgctgctccacgccgccaggccggcatgccaggtccagctcgtcgagtccggcggcggcctcgtccaggccggcgactccgtcaccctctcctgcaccgcctccggccgcaccttctcctcctacgccctcgcctggttccgccagcgccccggcaaggagcgcgagttcgtcgccggcctccgctggggcggccccaccaactacgccgactccgtcaaggaccgcttcaccatctccggcgactccgccaagcacaccatgtacctccagatgaactccctcaagcccgaggacaccgccgtctactactgcggctacaaccccggcggctgggccgtcccctcccagtacgagtacgactcctggggccagggcacccaggtcaccgtctcctccggtaccggcggaggcggatctggcggcggaggtagcggtggcggaggatctgaattcgaagccgacatctaccagacacctagatacctggtcatcggcaccggcaagaaaatcaccctggaatgcagccagacaatgggccacgacaagatgtactggtatcagcaggaccccggcatggaactgcacctgatccactacagctacggcgtgaacagcaccgagaagggcgatctgtctagcgagagcaccgtgtccagaatcagaaccgagcacttcccactgacactggaaagcgccagacctagccacaccagccagtacctgtgtgcctcttctgaggccagaggactggccgagttcaccgacacacagtatttcggccctggcaccagactgaccgttctcgaggacctgaagaacgtgttcccacctgaggtggccgtgttcgagcctagcgaggccgagatcagccacacccagaaagccaccctcgtgtgcctggctaccggcttctaccccgaccatgtggaactgtcttggtgggtcaacggcaaagaggtgcacagcggcgtgtctaccgacccccagccactgaaagaacagcccgccctgaacgacagccggtactgcctgagcagcagactgagagtgtccgccaccttctggcagaacccccggaaccacttcagatgccaggtgcagttctacggcctgagcgagaacgacgagtggacccaggacagagccaagcccgtgacccagatcgtgtctgccgaagcctggggcagagccgattgcggctttaccagcgagagctaccagcagggcgtgctgagcgccaccatcctgtacgagatcctgctgggcaaggccaccctgtacgccgtgctggtgtctgccctggtgctgatggctatggtcaagcggaaggacagccggggaagggccaagcgatctggatctggagcaacaaacttctcactactcaaacaagcaggtgacgtggaggagaatcccgggcctactagtatggactggatttggcgcatccttttccttgtcggcgctgctaccggcgcccattccgggcccctgttcaatcaagaggtgcagatccctctgaccgagagctactgtggcccctgtcctaagaactggatctgctacaagaacaactgctaccagttcttcgacgagagcaagaattggtacgagagccaggccagctgcatgagccagaatgccagcctgctgaaggtgtacagcaaagaggaccaggacctgctgaaactggtcaagagctaccactggatgggccttgtgcacatccccaccaatggctcttggcagtgggaggacggcagcattctgagccctaacctgctgaccatcatcgagatgcagaagggcgactgcgccctgtacgccagcagctttaagggctacatcgagaattgcagcaccccgaacacctacatctgtatgcagagaaccgttggcggaggcggaagtggaggcggaggatctggcggcggaggctctgacctctttaatcaagaagtccagattccactcaccgaatcctactgcggaccttgtccaaaaaattggatttgttataagaacaactgttatcaattctttgatgagtctaaaaattggtatgagtcccaggcttcctgcatgtctcagaacgcttctctgctgaaagtctactctaaagaagatcaggatctcctgaagctcgtcaagtcttatcattggatggggctcgtccacattcctaccaacggaagctggcaatgggaagatggctccatcctgtctccaaatctgctcacgattattgaaatgcagaaaggggattgtgctctctacgccagctccttcaagggatatattgagaactgtagcacgcccaatacttatatctgtatgcaacggaccgtgggatccggcggcggaggatctggcggaggcggatctgggggcggaggctctttcgaacaagttcagcttcaacagcctggcgctgagctggtcaaacctggcgcttctgtgaagatgagctgcaaagccagcggctacgccttcagcagctactggatcaactggatgaagcagaaacccggccagggactcgaatggatcggccaaatctatcccggcgacggcaccgagaacagattcagcgtgaacttccagaaggccgccaagagcttcagcctgaagatcagcgatagccagctgggcgacgccgccatgtacttttgcgcttatagaagcgccgtgaacgcccggctgatgtttggagatggcacacagctggtggtcaagcccaacacgcgtgagcagaaactgatctcggaagaggatgggagcggcaccccattcccttctctggcccctcccatcatgctgctggtggacggcaagcagcagatggtggtcgtgtgcctggtgctggatgtggccccacctggactggacagccccatctggtttagcgccggcaatggctctgccctggacgcctttacctacggcccaagccctgccaccgatggcacctggacaaatctggcccacctgagcctgcccagcgaggaactggcttcttgggagcctctcgtgtgccacacaggacctggcgctgagggacacagcagatccacccagcctatgcacctgtctggcgaggccagcaccgccagaacctgtcctcaggaacctctgagaggcacccctggcggagcactgtggctgggagtgctgagactgctgctgttcaagctgctgctgtttgacctgctgctgacctgctcctgtctgtgcgatcctgccggccctctgccttctcctgccaccaccacaagactgagagccctgggcagccacagactgcaccctgccacagagacaggcggcagagaggccacaagcagccctagaccccagcccagagacagaagatggggcgataccccccctggcagaaagcctggatctccagtccgcgccaagagaagcggatctggcgtgaagcagaccctgaatttcgacctgctgaagctggctggcgacgtggaatccaacccaggcccttctagaggccatatgaccgagtacaagcccacggtgcgcctcgccacccgcgacgacgtccccagggccgtacgcaccctcgccgccgcgttcgccgactaccccgccacgcgccacaccgtcgatccggaccgccacatcgagcgggtcaccgagctgcaagaactcttcctcacgcgcgtcgggctcgacatcggcaaggtgtgggtcgcggacgacggcgccgcggtggcggtctggaccacgccggagagcgtcgaagcgggggcggtgttcgccgagatcggcccgcgcatggccgagttgagcggttcccggctggccgcgcagcaacagatggaaggcctcctggcgccgcaccggcccaaggagcccgcgtggttcctggccaccgtcggcgtctcgcccgaccaccagggcaagggtctgggcagcgccgtcgtgctccccggagtggaggcggccgagcgcgccggggtgcccgccttcctggagacctccgcgccccgcaacctccccttctacgagcggctcggcttcaccgtcaccgccgacgtcgaggtgcccgaaggaccgcgcacctggtgcatgacccgcaagcccggtgcctga

SEQ ID NO: 3682 - DNA, 4023 bp, Artificial Sequence
  Synthetic Polynucloetide
atggccttaccagtgaccgccttgctcctgccgctggccttgctgctccacgccgccaggccggcatgccaggtccagctcgtcgagtccggcggcggcctcgtccaggccggcgactccgtcaccctctcctgcaccgcctccggccgcaccttctcctcctacgccctcgcctggttccgccagcgccccggcaaggagcgcgagttcgtcgccggcctccgctggggcggccccaccaactacgccgactccgtcaaggaccgcttcaccatctccggcgactccgccaagcacaccatgtacctccagatgaactccctcaagcccgaggacaccgccgtctactactgcggctacaaccccggcggctgggccgtcccctcccagtacgagtacgactcctggggccagggcacccaggtcaccgtctcctccggtaccggcggaggcggatctggcggcggaggtagcggtggcggaggatctgaattcgaagccgacatctaccagacacctagatacctggtcatcggcaccggcaagaaaatcaccctggaatgcagccagacaatgggccacgacaagatgtactggtatcagcaggaccccggcatggaactgcacctgatccactacagctacggcgtgaacagcaccgagaagggcgatctgtctagcgagagcaccgtgtccagaatcagaaccgagcacttcccactgacactggaaagcgccagacctagccacaccagccagtacctgtgtgcctcttctgaggccagaggactggccgagttcaccgacacacagtatttcggccctggcaccagactgaccgttctcgaggggaaaccaattcccaaccctcttctgggactggattcaaccggcagcggcgacaagcagctggacgccgacgtgtcccccaagcctaccatcttcctgccctctatcgccgagacaaagctccagaaggccggcacctacctgtgcctgctggaaaagttcttcccagatgtgattaagatccactggcaggaaaagaagtccaacaccatcctgggcagccaggaaggcaacaccatgaagaccaacgacacctacatgaagttcagctggctgaccgtgcccgagaagtccctggacaaagaacacagatgcatcgtgcggcacgaaaacaacaagaacggcgtggaccaggaaatcatcttcccacccatcaagaccgatgtgattacaatggaccccaaggacaactgctccaaggacgccaacgataccctgctgctccagctgaccaacaccagcgcctactacatgtacttgttgctgctgctgaagtccgtggtgtacttcgccatcatcacatgctgcctgctgcggagaaccgccttctgctgcaacggcgagaagtctagggccaagcgatctggatctggagcaacaaacttctcactactcaaacaagcaggtgacgtggaggagaatcccgggcctactagtatggactggatttggcgcatccttttccttgtcggcgctgctaccggcgcccattccgggcccctgttcaatcaagaggtgcagatccctctgaccgagagctactgtggcccctgtcctaagaactggatctgctacaagaacaactgctaccagttcttcgacgagagcaagaattggtacgagagccaggccagctgcatgagccagaatgccagcctgctgaaggtgtacagcaaagaggaccaggacctgctgaaactggtcaagagctaccactggatgggccttgtgcacatccccaccaatggctcttggcagtgggaggacggcagcattctgagccctaacctgctgaccatcatcgagatgcagaagggcgactgcgccctgtacgccagcagctttaagggctacatcgagaattgcagcaccccgaacacctacatctgtatgcagagaaccgttggcggaggcggaagtggaggcggaggatctggcggcggaggctctgacctctttaatcaagaagtccagattccactcaccgaatcctactgcggaccttgtccaaaaaattggatttgttataagaacaactgttatcaattctttgatgagtctaaaaattggtatgagtcccaggcttcctgcatgtctcagaacgcttctctgctgaaagtctactctaaagaagatcaggatctcctgaagctcgtcaagtcttatcattggatggggctcgtccacattcctaccaacggaagctggcaatgggaagatggctccatcctgtctccaaatctgctcacgattattgaaatgcagaaaggggattgtgctctctacgccagctccttcaagggatatattgagaactgtagcacgcccaatacttatatctgtatgcaacggaccgtgggatccggcggcggaggatctggcggaggcggatctgggggcggaggctctttcgaacaagttcagcttcaacagcctggcgctgagctggtcaaacctggcgcttctgtgaagatgagctgcaaagccagcggctacgccttcagcagctactggatcaactggatgaagcagaaacccggccagggactcgaatggatcggccaaatctatcccggcgacggcaccgagaacagattcagcgtgaacttccagaaggccgccaagagcttcagcctgaagatcagcgatagccagctgggcgacgccgccatgtacttttgcgcttatagaagcgccgtgaacgcccggctgatgtttggagatggcacacagctggtggtcaagcccaacacgcgtgagcagaaactgatctcggaagaggatgggagcggcagccagcctcacaccaagcccagcgtgttcgtgatgaagaacggcaccaacgtggcctgcctcgtgaaagagttctaccccaaggacatcaggatcaacctggtgtccagcaagaagatcaccgagttcgaccccgccatcgtgatctcccccagcggcaagtacaacgccgtgaagctggggaagtacgaggacagcaacagcgtgacctgctccgtgcagcacgacaacaagaccgtgcacagcaccgactttgaagtgaaaaccgactccaccgaccacgtgaagcccaaagagacagagaacaccaagcagcccagcaagagctgccacaagcccaaggccatcgtgcacaccgagaaagtgaacatgatgagcctgaccgtgctgggcctgcggatgctgttcgccaaaaccgtggccgtgaacttcctgctgaccgccaagctgttcttcctccgcgccaagagaagcggatctggcgtgaagcagaccctgaatttcgacctgctgaagctggctggcgacgtggaatccaacccaggcccttctagaggccatatgaccgagtacaagcccacggtgcgcctcgccacccgcgacgacgtccccagggccgtacgcaccctcgccgccgcgttcgccgactaccccgccacgcgccacaccgtcgatccggaccgccacatcgagcgggtcaccgagctgcaagaactcttcctcacgcgcgtcgggctcgacatcggcaaggtgtgggtcgcggacgacggcgccgcggtggcggtctggaccacgccggagagcgtcgaagcgggggcggtgttcgccgagatcggcccgcgcatggccgagttgagcggttcccggctggccgcgcagcaacagatggaaggcctcctggcgccgcaccggcccaaggagcccgcgtggttcctggccaccgtcggcgtctcgcccgaccaccagggcaagggtctgggcagcgccgtcgtgctccccggagtggaggcggccgagcgcgccggggtgcccgccttcctggagacctccgcgccccgcaacctccccttctacgagcggctcggcttcaccgtcaccgccgacgtcgaggtgcccgaaggaccgcgcacctggtgcatgacccgcaagcccggtgcctga

SEQ ID NO: 3683 - DNA, 3234 bp, Artificial Sequence
  Synthetic Polynucloetide
atggccttaccagtgaccgccttgctcctgccgctggccttgctgctccacgccgccaggccggcatgccaggtccagctcgtcgagtccggcggcggcctcgtccaggccggcgactccgtcaccctctcctgcaccgcctccggccgcaccttctcctcctacgccctcgcctggttccgccagcgccccggcaaggagcgcgagttcgtcgccggcctccgctggggcggccccaccaactacgccgactccgtcaaggaccgcttcaccatctccggcgactccgccaagcacaccatgtacctccagatgaactccctcaagcccgaggacaccgccgtctactactgcggctacaaccccggcggctgggccgtcccctcccagtacgagtacgactcctggggccagggcacccaggtcaccgtctcctccggtaccggcggaggcggatctggcggcggaggtagcggtggcggaggatctgaattcgaagccgacatctaccagacacctagatacctggtcatcggcaccggcaagaaaatcaccctggaatgcagccagacaatgggccacgacaagatgtactggtatcagcaggaccccggcatggaactgcacctgatccactacagctacggcgtgaacagcaccgagaagggcgatctgtctagcgagagcaccgtgtccagaatcagaaccgagcacttcccactgacactggaaagcgccagacctagccacaccagccagtacctgtgtgcctcttctgaggccagaggactggccgagttcaccgacacacagtatttcggccctggcaccagactgaccgttctcgagagccagcctcacaccaagcccagcgtgttcgtgatgaagaacggcaccaacgtggcctgcctcgtgaaagagttctaccccaaggacatcaggatcaacctggtgtccagcaagaagatcaccgagttcgaccccgccatcgtgatctcccccagcggcaagtacaacgccgtgaagctggggaagtacgaggacagcaacagcgtgacctgctccgtgcagcacgacaacaagaccgtgcacagcaccgactttgaagtgaaaaccgactccaccgaccacgtgaagcccaaagagacagagaacaccaagcagcccagcaagagctgccacaagcccaaggccatcgtgcacaccgagaaagtgaacatgatgagcctgaccgtgctgggcctgcggatgctgttcgccaaaaccgtggccgtgaacttcctgctgaccgccaagctgttcttcctcagggccaagcgatctggatctggagcaacaaacttctcactactcaaacaagcaggtgacgtggaggagaatcccgggcctactagtatggactggatttggcgcatccttttccttgtcggcgctgctaccggcgcccattccgggcccctgttcaatcaagaggtgcagatccctctgaccgagagctactgtggcccctgtcctaagaactggatctgctacaagaacaactgctaccagttcttcgacgagagcaagaattggtacgagagccaggccagctgcatgagccagaatgccagcctgctgaaggtgtacagcaaagaggaccaggacctgctgaaactggtcaagagctaccactggatgggccttgtgcacatccccaccaatggctcttggcagtgggaggacggcagcattctgagccctaacctgctgaccatcatcgagatgcagaagggcgactgcgccctgtacgccagcagctttaagggctacatcgagaattgcagcaccccgaacacctacatctgtatgcagagaaccgttggcggaggcggaagtggaggcggaggatctggcggcggaggctctgacctctttaatcaagaagtccagattccactcaccgaatcctactgcggaccttgtccaaaaaattggatttgttataagaacaactgttatcaattctttgatgagtctaaaaattggtatgagtcccaggcttcctgcatgtctcagaacgcttctctgctgaaagtctactctaaagaagatcaggatctcctgaagctcgtcaagtcttatcattggatggggctcgtccacattcctaccaacggaagctggcaatgggaagatggctccatcctgtctccaaatctgctcacgattattgaaatgcagaaaggggattgtgctctctacgccagctccttcaagggatatattgagaactgtagcacgcccaatacttatatctgtatgcaacggaccgtgggatccggcggcggaggatctggcggaggcggatctgggggcggaggctctttcgaacaagttcagcttcaacagcctggcgctgagctggtcaaacctggcgcttctgtgaagatgagctgcaaagccagcggctacgccttcagcagctactggatcaactggatgaagcagaaacccggccagggactcgaatggatcggccaaatctatcccggcgacggcaccgagaacagattcagcgtgaacttccagaaggccgccaagagcttcagcctgaagatcagcgatagccagctgggcgacgccgccatgtacttttgcgcttatagaagcgccgtgaacgcccggctgatgtttggagatggcacacagctggtggtcaagcccaacacgcgtgacaagcagctggacgccgacgtgtcccccaagcctaccatcttcctgccctctatcgccgagacaaagctccagaaggccggcacctacctgtgcctgctggaaaagttcttcccagatgtgattaagatccactggcaggaaaagaagtccaacaccatcctgggcagccaggaaggcaacaccatgaagaccaacgacacctacatgaagttcagctggctgaccgtgcccgagaagtccctggacaaagaacacagatgcatcgtgcggcacgaaaacaacaagaacggcgtggaccaggaaatcatcttcccacccatcaagaccgatgtgattacaatggaccccaaggacaactgctccaaggacgccaacgataccctgctgctccagctgaccaacaccagcgcctactacatgtacttgttgctgctgctgaagtccgtggtgtacttcgccatcatcacatgctgcctgctgcggagaaccgccttctgctgcaacggcgagaagtct

SEQ ID NO: 3684 - DNA, 4443 bp, Artificial Sequence
  Synthetic Polynucloetide
atggccttaccagtgaccgccttgctcctgccgctggccttgctgctccacgccgccaggccggcatgccaggtccagctcgtcgagtccggcggcggcctcgtccaggccggcgactccgtcaccctctcctgcaccgcctccggccgcaccttctcctcctacgccctcgcctggttccgccagcgccccggcaaggagcgcgagttcgtcgccggcctccgctggggcggccccaccaactacgccgactccgtcaaggaccgcttcaccatctccggcgactccgccaagcacaccatgtacctccagatgaactccctcaagcccgaggacaccgccgtctactactgcggctacaaccccggcggctgggccgtcccctcccagtacgagtacgactcctggggccagggcacccaggtcaccgtctcctccggtaccggcggaggcggatctggcggcggaggtagcggtggcggaggatctgaattcgaagccgacatctaccagacacctagatacctggtcatcggcaccggcaagaaaatcaccctggaatgcagccagacaatgggccacgacaagatgtactggtatcagcaggaccccggcatggaactgcacctgatccactacagctacggcgtgaacagcaccgagaagggcgatctgtctagcgagagcaccgtgtccagaatcagaaccgagcacttcccactgacactggaaagcgccagacctagccacaccagccagtacctgtgtgcctcttctgaggccagaggactggccgagttcaccgacacacagtatttcggccctggcaccagactgaccgttggacagcctaaggccaatcctaccgtgacactgttccctccaagcagcgaagaactccaggccaacaaggccacacttgtgtgcctgatctccgacttctaccctggggctgtgacagtggcttggaaggccgatggatctcctgtgaaagccggcgtggaaaccaccaagccatccaagcagagcaacaacaaatacgccgccagctcctacctgagcctgacacctgagcagtggaagtcccacagatcctacagctgccaagtgacccacgaaggcagcaccgtggaaaagacagtggcccctacagagtgcagcggatcccagagcttcggcctgctggaccccaagctgtgctacctgctggatggcatcctgttcatctacggcgtgatcctgaccgccctgttcctgagagtgaagttcagcagaagcgccgacgcccctgcctaccagcagggacagaaccaactgtacaacgagctgaacctgggcagacgggaagagtacgacgtgctggacaagcggagaggcagggaccctgagatgggcggaaagccccagcggagaaagaacccccaggaaggactgtataacgaactccagaaagacaagatggccgaagcctacagcgagatcggcatgaagggcgagcggagaagaggcaagggccacgatggcctgtaccagggcctgagcaccgccaccaaggacacctatgacgccctgcacatgcaggccctgcctccaagaagggccaagcgatctggatctggagcaacaaacttctcactactcaaacaagcaggtgacgtggaggagaatcccgggcctactagtatggactggatttggcgcatccttttccttgtcggcgctgctaccggcgcccattccgggcccctgttcaatcaagaggtgcagatccctctgaccgagagctactgtggcccctgtcctaagaactggatctgctacaagaacaactgctaccagttcttcgacgagagcaagaattggtacgagagccaggccagctgcatgagccagaatgccagcctgctgaaggtgtacagcaaagaggaccaggacctgctgaaactggtcaagagctaccactggatgggccttgtgcacatccccaccaatggctcttggcagtgggaggacggcagcattctgagccctaacctgctgaccatcatcgagatgcagaagggcgactgcgccctgtacgccagcagctttaagggctacatcgagaattgcagcaccccgaacacctacatctgtatgcagagaaccgttggcggaggcggaagtggaggcggaggatctggcggcggaggctctgacctctttaatcaagaagtccagattccactcaccgaatcctactgcggaccttgtccaaaaaattggatttgttataagaacaactgttatcaattctttgatgagtctaaaaattggtatgagtcccaggcttcctgcatgtctcagaacgcttctctgctgaaagtctactctaaagaagatcaggatctcctgaagctcgtcaagtcttatcattggatggggctcgtccacattcctaccaacggaagctggcaatgggaagatggctccatcctgtctccaaatctgctcacgattattgaaatgcagaaaggggattgtgctctctacgccagctccttcaagggatatattgagaactgtagcacgcccaatacttatatctgtatgcaacggaccgtgggatccggcggcggaggatctggcggaggcggatctgggggcggaggctctttcgaacaagttcagcttcaacagcctggcgctgagctggtcaaacctggcgcttctgtgaagatgagctgcaaagccagcggctacgccttcagcagctactggatcaactggatgaagcagaaacccggccagggactcgaatggatcggccaaatctatcccggcgacggcaccgagaacagattcagcgtgaacttccagaaggccgccaagagcttcagcctgaagatcagcgatagccagctgggcgacgccgccatgtacttttgcgcttatagaagcgccgtgaacgcccggctgatgtttggagatggcacacagctggtggtcaagcccaacgcctctacaaagggaccctccgtgtttcctctggctcccagcagcaagtctacaagcggaggaacagccgctctgggctgcctggtcaaggattactttcccgagcctgtgaccgtgtcctggaatagcggagcactgacaagcggcgtgcacacctttccagccgtgctgcaaagcagcggcctgtactctctgagcagcgtggtcacagtgcctagctctagcctgggcacccagacctacatctgcaatgtgaaccacaagcctagcaacaccaaggtggacaagagagtggaacccaagagctgtggtacccagagttttgggttgttggaccctaaattgtgctatctgttggacggaatcctgttcatttacggagtgatcctgaccgcattgttcctgcgggttaagttttccagatccgcagacgcacccgcttaccaacaagggcagaaccaactctacaatgaacttaatttggggcggagggaagagtacgacgttctggacaaaaggaggggacgagatcccgagatgggcggaaagcctcagcgaaggaagaatccgcaagaggggctttataacgaactccagaaagataaaatggcagaagcctatagtgagattgggatgaagggagaaaggaggaggggtaaaggtcacgatgggttgtaccaaggattgagcacagccactaaagatacctatgatgcgctccacatgcaggccctgccgccaagacgcgccaagagaagcggatctggcgtgaagcagaccctgaatttcgacctgctgaagctggctggcgacgtggaatccaacccaggcccttctagaggccatatgaccgagtacaagcccacggtgcgcctcgccacccgcgacgacgtccccagggccgtacgcaccctcgccgccgcgttcgccgactaccccgccacgcgccacaccgtcgatccggaccgccacatcgagcgggtcaccgagctgcaagaactcttcctcacgcgcgtcgggctcgacatcggcaaggtgtgggtcgcggacgacggcgccgcggtggcggtctggaccacgccggagagcgtcgaagcgggggcggtgttcgccgagatcggcccgcgcatggccgagttgagcggttcccggctggccgcgcagcaacagatggaaggcctcctggcgccgcaccggcccaaggagcccgcgtggttcctggccaccgtcggcgtctcgcccgaccaccagggcaagggtctgggcagcgccgtcgtgctccccggagtggaggcggccgagcgcgccggggtgcccgccttcctggagacctccgcgccccgcaacctccccttctacgagcggctcggcttcaccgtcaccgccgacgtcgaggtgcccgaaggaccgcgcacctggtgcatgacccgcaagcccggtgcctga

SEQ ID NO: 3685 - DNA, 3798 bp, Artificial Sequence
  Synthetic Polynucloetide
atggccttaccagtgaccgccttgctcctgccgctggccttgctgctccacgccgccaggccggcatgccaggtccagctcgtcgagtccggcggcggcctcgtccaggccggcgactccgtcaccctctcctgcaccgcctccggccgcaccttctcctcctacgccctcgcctggttccgccagcgccccggcaaggagcgcgagttcgtcgccggcctccgctggggcggccccaccaactacgccgactccgtcaaggaccgcttcaccatctccggcgactccgccaagcacaccatgtacctccagatgaactccctcaagcccgaggacaccgccgtctactactgcggctacaaccccggcggctgggccgtcccctcccagtacgagtacgactcctggggccagggcacccaggtcaccgtctcctccggtaccggcggaggcggatctggcggcggaggtagcggtggcggaggatctgaattcgaagccgacatctaccagacacctagatacctggtcatcggcaccggcaagaaaatcaccctggaatgcagccagacaatgggccacgacaagatgtactggtatcagcaggaccccggcatggaactgcacctgatccactacagctacggcgtgaacagcaccgagaagggcgatctgtctagcgagagcaccgtgtccagaatcagaaccgagcacttcccactgacactggaaagcgccagacctagccacaccagccagtacctgtgtgcctcttctgaggccagaggactggccgagttcaccgacacacagtatttcggccctggcaccagactgaccgttctcgaggacctgaagaacgtgttcccacctgaggtggccgtgttcgagcctagcgaggccgagatcagccacacccagaaagccaccctcgtgtgcctggctaccggcttctaccccgaccatgtggaactgtcttggtgggtcaacggcaaagaggtgcacagcggcgtgtctaccgacccccagccactgaaagaacagcccgccctgaacgacagccggtactgcctgagcagcagactgagagtgtccgccaccttctggcagaacccccggaaccacttcagatgccaggtgcagttctacggcctgagcgagaacgacgagtggacccaggacagagccaagcccgtgacccagatcgtgtctgccgaagcctggggcagagccgattgcggatcccagagcttcggcctgctggaccccaagctgtgctacctgctggatggcatcctgttcatctacggcgtgatcctgaccgccctgttcctgagagtgaagttcagcagaagcgccgacgcccctgcctaccagcagggacagaaccaactgtacaacgagctgaacctgggcagacgggaagagtacgacgtgctggacaagcggagaggcagggaccctgagatgggcggaaagccccagcggagaaagaacccccaggaaggactgtataacgaactccagaaagacaagatggccgaagcctacagcgagatcggcatgaagggcgagcggagaagaggcaagggccacgatggcctgtaccagggcctgagcaccgccaccaaggacacctatgacgccctgcacatgcaggccctgcctccaagaagggccaagcgatctggatctggagcaacaaacttctcactactcaaacaagcaggtgacgtggaggagaatcccgggcctactagtatggactggatttggcgcatccttttccttgtcggcgctgctaccggcgcccattccgggcccctgttcaatcaagaggtgcagatccctctgaccgagagctactgtggcccctgtcctaagaactggatctgctacaagaacaactgctaccagttcttcgacgagagcaagaattggtacgagagccaggccagctgcatgagccagaatgccagcctgctgaaggtgtacagcaaagaggaccaggacctgctgaaactggtcaagagctaccactggatgggccttgtgcacatccccaccaatggctcttggcagtgggaggacggcagcattctgagccctaacctgctgaccatcatcgagatgcagaagggcgactgcgccctgtacgccagcagctttaagggctacatcgagaattgcagcaccccgaacacctacatctgtatgcagagaaccgttggcggaggcggaagtggaggcggaggatctggcggcggaggctctgacctctttaatcaagaagtccagattccactcaccgaatcctactgcggaccttgtccaaaaaattggatttgttataagaacaactgttatcaattctttgatgagtctaaaaattggtatgagtcccaggcttcctgcatgtctcagaacgcttctctgctgaaagtctactctaaagaagatcaggatctcctgaagctcgtcaagtcttatcattggatggggctcgtccacattcctaccaacggaagctggcaatgggaagatggctccatcctgtctccaaatctgctcacgattattgaaatgcagaaaggggattgtgctctctacgccagctccttcaagggatatattgagaactgtagcacgcccaatacttatatctgtatgcaacggaccgtgggatccggcggcggaggatctggcggaggcggatctgggggcggaggctctttcgaacaagttcagcttcaacagcctggcgctgagctggtcaaacctggcgcttctgtgaagatgagctgcaaagccagcggctacgccttcagcagctactggatcaactggatgaagcagaaacccggccagggactcgaatggatcggccaaatctatcccggcgacggcaccgagaacagattcagcgtgaacttccagaaggccgccaagagcttcagcctgaagatcagcgatagccagctgggcgacgccgccatgtacttttgcgcttatagaagcgccgtgaacgcccggctgatgtttggagatggcacacagctggtggtcaagcccaacacgcgtatccagaaccctgatcctgccgtgtaccagctgcgggatagcaagagcagcgacaagagcgtgtgtctgttcaccgacttcgacagccagaccaacgtgtcccagagcaaggactccgacgtgtacatcaccgataagaccgtgctggacatgcggagcatggacttcaagagcaactccgccgtggcctggtccaacaagtccgatttcgcctgcgccaacgccttcaacaacagcattatccccgaggacacattcttcccaagccccgagagcagctgcggtacccagagttttgggttgttggaccctaaattgtgctatctgttggacggaatcctgttcatttacggagtgatcctgaccgcattgttcctgcgggttaagttttccagatccgcagacgcacccgcttaccaacaagggcagaaccaactctacaatgaacttaatttggggcggagggaagagtacgacgttctggacaaaaggaggggacgagatcccgagatgggcggaaagcctcagcgaaggaagaatccgcaagaggggctttataacgaactccagaaagataaaatggcagaagcctatagtgagattgggatgaagggagaaaggaggaggggtaaaggtcacgatgggttgtaccaaggattgagcacagccactaaagatacctatgatgcgctccacatgcaggccctgccgccaaga

SEQ ID NO: 3686 - DNA, 3798 bp, Artificial Sequence
  Synthetic Polynucloetide
atggccttaccagtgaccgccttgctcctgccgctggccttgctgctccacgccgccaggccggcatgccaggtccagctcgtcgagtccggcggcggcctcgtccaggccggcgactccgtcaccctctcctgcaccgcctccggccgcaccttctcctcctacgccctcgcctggttccgccagcgccccggcaaggagcgcgagttcgtcgccggcctccgctggggcggccccaccaactacgccgactccgtcaaggaccgcttcaccatctccggcgactccgccaagcacaccatgtacctccagatgaactccctcaagcccgaggacaccgccgtctactactgcggctacaaccccggcggctgggccgtcccctcccagtacgagtacgactcctggggccagggcacccaggtcaccgtctcctccggtaccggcggaggcggatctggcggcggaggtagcggtggcggaggatctgaattcgaagccgacatctaccagacacctagatacctggtcatcggcaccggcaagaaaatcaccctggaatgcagccagacaatgggccacgacaagatgtactggtatcagcaggaccccggcatggaactgcacctgatccactacagctacggcgtgaacagcaccgagaagggcgatctgtctagcgagagcaccgtgtccagaatcagaaccgagcacttcccactgacactggaaagcgccagacctagccacaccagccagtacctgtgtgcctcttctgaggccagaggactggccgagttcaccgacacacagtatttcggccctggcaccagactgaccgttctcgaggacctgaagaacgtgttcccacctgaggtggccgtgttcgagcctagcaaggccgagatcgcccacacccagaaagccaccctcgtgtgcctggctaccggcttctaccccgaccatgtggaactgtcttggtgggtcaacggcaaagaggtgcacagcggcgtgtgtaccgacccccagccactgaaagaacagcccgccctgaacgacagccggtactgcctgagcagcagactgagagtgtccgccaccttctggcagaacccccggaaccacttcagatgccaggtgcagttctacggcctgagcgagaacgacgagtggacccaggacagagccaagcccgtgacccagatcgtgtctgccgaagcctggggcagagccgattgcggatcccagagcttcggcctgctggaccccaagctgtgctacctgctggatggcatcctgttcatctacggcgtgatcctgaccgccctgttcctgagagtgaagttcagcagaagcgccgacgcccctgcctaccagcagggacagaaccaactgtacaacgagctgaacctgggcagacgggaagagtacgacgtgctggacaagcggagaggcagggaccctgagatgggcggaaagccccagcggagaaagaacccccaggaaggactgtataacgaactccagaaagacaagatggccgaagcctacagcgagatcggcatgaagggcgagcggagaagaggcaagggccacgatggcctgtaccagggcctgagcaccgccaccaaggacacctatgacgccctgcacatgcaggccctgcctccaagaagggccaagcgatctggatctggagcaacaaacttctcactactcaaacaagcaggtgacgtggaggagaatcccgggcctactagtatggactggatttggcgcatccttttccttgtcggcgctgctaccggcgcccattccgggcccctgttcaatcaagaggtgcagatccctctgaccgagagctactgtggcccctgtcctaagaactggatctgctacaagaacaactgctaccagttcttcgacgagagcaagaattggtacgagagccaggccagctgcatgagccagaatgccagcctgctgaaggtgtacagcaaagaggaccaggacctgctgaaactggtcaagagctaccactggatgggccttgtgcacatccccaccaatggctcttggcagtgggaggacggcagcattctgagccctaacctgctgaccatcatcgagatgcagaagggcgactgcgccctgtacgccagcagctttaagggctacatcgagaattgcagcaccccgaacacctacatctgtatgcagagaaccgttggcggaggcggaagtggaggcggaggatctggcggcggaggctctgacctctttaatcaagaagtccagattccactcaccgaatcctactgcggaccttgtccaaaaaattggatttgttataagaacaactgttatcaattctttgatgagtctaaaaattggtatgagtcccaggcttcctgcatgtctcagaacgcttctctgctgaaagtctactctaaagaagatcaggatctcctgaagctcgtcaagtcttatcattggatggggctcgtccacattcctaccaacggaagctggcaatgggaagatggctccatcctgtctccaaatctgctcacgattattgaaatgcagaaaggggattgtgctctctacgccagctccttcaagggatatattgagaactgtagcacgcccaatacttatatctgtatgcaacggaccgtgggatccggcggcggaggatctggcggaggcggatctgggggcggaggctctttcgaacaagttcagcttcaacagcctggcgctgagctggtcaaacctggcgcttctgtgaagatgagctgcaaagccagcggctacgccttcagcagctactggatcaactggatgaagcagaaacccggccagggactcgaatggatcggccaaatctatcccggcgacggcaccgagaacagattcagcgtgaacttccagaaggccgccaagagcttcagcctgaagatcagcgatagccagctgggcgacgccgccatgtacttttgcgcttatagaagcgccgtgaacgcccggctgatgtttggagatggcacacagctggtggtcaagcccaacacgcgtatccagaaccctgatcctgccgtgtaccagctgcgggatagcaagagcagcgacaagagcgtgtgtctgttcaccgacttcgacagccagaccaacgtgtcccagagcaaggactccgacgtgtacatcaccgataagtgcgtgctggacatgcggagcatggacttcaagagcaactccgccgtggcctggtccaacaagtccgatttcgcctgcgccaacgccttcaacaacagcattatccccgaggacacattcttcccaagcagcgacgtgccctgcggtacccagagttttgggttgttggaccctaaattgtgctatctgttggacggaatcctgttcatttacggagtgatcctgaccgcattgttcctgcgggttaagttttccagatccgcagacgcacccgcttaccaacaagggcagaaccaactctacaatgaacttaatttggggcggagggaagagtacgacgttctggacaaaaggaggggacgagatcccgagatgggcggaaagcctcagcgaaggaagaatccgcaagaggggctttataacgaactccagaaagataaaatggcagaagcctatagtgagattgggatgaagggagaaaggaggaggggtaaaggtcacgatgggttgtaccaaggattgagcacagccactaaagatacctatgatgcgctccacatgcaggccctgccgccaaga

SEQ ID NO: 3687 - DNA, 4011 bp, Artificial Sequence
  Synthetic Polynucloetide
atggccttaccagtgaccgccttgctcctgccgctggccttgctgctccacgccgccaggccggcatgccaggtccagctcgtcgagtccggcggcggcctcgtccaggccggcgactccgtcaccctctcctgcaccgcctccggccgcaccttctcctcctacgccctcgcctggttccgccagcgccccggcaaggagcgcgagttcgtcgccggcctccgctggggcggccccaccaactacgccgactccgtcaaggaccgcttcaccatctccggcgactccgccaagcacaccatgtacctccagatgaactccctcaagcccgaggacaccgccgtctactactgcggctacaaccccggcggctgggccgtcccctcccagtacgagtacgactcctggggccagggcacccaggtcaccgtctcctccggtaccggcggaggcggatctggcggcggaggtagcggtggcggaggatctgaattcgaagccgacatctaccagacacctagatacctggtcatcggcaccggcaagaaaatcaccctggaatgcagccagacaatgggccacgacaagatgtactggtatcagcaggaccccggcatggaactgcacctgatccactacagctacggcgtgaacagcaccgagaagggcgatctgtctagcgagagcaccgtgtccagaatcagaaccgagcacttcccactgacactggaaagcgccagacctagccacaccagccagtacctgtgtgcctcttctgaggccagaggactggccgagttcaccgacacacagtatttcggccctggcaccagactgaccgttctcgaggggaaaccaattcccaaccctcttctgggactggattcaaccggcagcggcgaggacctgaagaacgtgttcccacctgaggtggccgtgttcgagcctagcgaggccgagatcagccacacccagaaagccaccctcgtgtgcctggctaccggcttctaccccgaccatgtggaactgtcttggtgggtcaacggcaaagaggtgcacagcggcgtgtctaccgacccccagccactgaaagaacagcccgccctgaacgacagccggtactgcctgagcagcagactgagagtgtccgccaccttctggcagaacccccggaaccacttcagatgccaggtgcagttctacggcctgagcgagaacgacgagtggacccaggacagagccaagcccgtgacccagatcgtgtctgccgaagcctggggcagagccgattgcggatcccagagcttcggcctgctggaccccaagctgtgctacctgctggatggcatcctgttcatctacggcgtgatcctgaccgccctgttcctgagagtgaagttcagcagaagcgccgacgcccctgcctaccagcagggacagaaccaactgtacaacgagctgaacctgggcagacgggaagagtacgacgtgctggacaagcggagaggcagggaccctgagatgggcggaaagccccagcggagaaagaacccccaggaaggactgtataacgaactccagaaagacaagatggccgaagcctacagcgagatcggcatgaagggcgagcggagaagaggcaagggccacgatggcctgtaccagggcctgagcaccgccaccaaggacacctatgacgccctgcacatgcaggccctgcctccaagaagggccaagcgatctggatctggagcaacaaacttctcactactcaaacaagcaggtgacgtggaggagaatcccgggcctactagtatggactggatttggcgcatccttttccttgtcggcgctgctaccggcgcccattccgggcccctgttcaatcaagaggtgcagatccctctgaccgagagctactgtggcccctgtcctaagaactggatctgctacaagaacaactgctaccagttcttcgacgagagcaagaattggtacgagagccaggccagctgcatgagccagaatgccagcctgctgaaggtgtacagcaaagaggaccaggacctgctgaaactggtcaagagctaccactggatgggccttgtgcacatccccaccaatggctcttggcagtgggaggacggcagcattctgagccctaacctgctgaccatcatcgagatgcagaagggcgactgcgccctgtacgccagcagctttaagggctacatcgagaattgcagcaccccgaacacctacatctgtatgcagagaaccgttggcggaggcggaagtggaggcggaggatctggcggcggaggctctgacctctttaatcaagaagtccagattccactcaccgaatcctactgcggaccttgtccaaaaaattggatttgttataagaacaactgttatcaattctttgatgagtctaaaaattggtatgagtcccaggcttcctgcatgtctcagaacgcttctctgctgaaagtctactctaaagaagatcaggatctcctgaagctcgtcaagtcttatcattggatggggctcgtccacattcctaccaacggaagctggcaatgggaagatggctccatcctgtctccaaatctgctcacgattattgaaatgcagaaaggggattgtgctctctacgccagctccttcaagggatatattgagaactgtagcacgcccaatacttatatctgtatgcaacggaccgtgggatccggcggcggaggatctggcggaggcggatctgggggcggaggctctttcgaacaagttcagcttcaacagcctggcgctgagctggtcaaacctggcgcttctgtgaagatgagctgcaaagccagcggctacgccttcagcagctactggatcaactggatgaagcagaaacccggccagggactcgaatggatcggccaaatctatcccggcgacggcaccgagaacagattcagcgtgaacttccagaaggccgccaagagcttcagcctgaagatcagcgatagccagctgggcgacgccgccatgtacttttgcgcttatagaagcgccgtgaacgcccggctgatgtttggagatggcacacagctggtggtcaagcccaacacgcgtgagcagaaactgatctcggaagaggatgggagcggcatccagaaccctgatcctgccgtgtaccagctgcgggatagcaagagcagcgacaagagcgtgtgtctgttcaccgacttcgacagccagaccaacgtgtcccagagcaaggactccgacgtgtacatcaccgataagaccgtgctggacatgcggagcatggacttcaagagcaactccgccgtggcctggtccaacaagtccgatttcgcctgcgccaacgccttcaacaacagcattatccccgaggacacattcttcccaagccccgagagcagctgcggtacccagagttttgggttgttggaccctaaattgtgctatctgttggacggaatcctgttcatttacggagtgatcctgaccgcattgttcctgaggagcaagcggtcacggctgctccacagcgattacatgaatatgacaccacgaagaccgggtcctactcgcaaacactaccaaccctacgcacctccccgcgactttgcagcgtaccgatctcgggttaagttttccagatccgcagacgcacccgcttaccaacaagggcagaaccaactctacaatgaacttaatttggggcggagggaagagtacgacgttctggacaaaaggaggggacgagatcccgagatgggcggaaagcctcagcgaaggaagaatccgcaagaggggctttataacgaactccagaaagataaaatggcagaagcctatagtgagattgggatgaagggagaaaggaggaggggtaaaggtcacgatgggttgtaccaaggattgagcacagccactaaagatacctatgatgcgctccacatgcaggccctgccgccaaga

SEQ ID NO: 3688 - DNA, 4134 bp, Artificial Sequence
  Synthetic Polynucloetide
atggccttaccagtgaccgccttgctcctgccgctggccttgctgctccacgccgccaggccggcatgccaggtccagctcgtcgagtccggcggcggcctcgtccaggccggcgactccgtcaccctctcctgcaccgcctccggccgcaccttctcctcctacgccctcgcctggttccgccagcgccccggcaaggagcgcgagttcgtcgccggcctccgctggggcggccccaccaactacgccgactccgtcaaggaccgcttcaccatctccggcgactccgccaagcacaccatgtacctccagatgaactccctcaagcccgaggacaccgccgtctactactgcggctacaaccccggcggctgggccgtcccctcccagtacgagtacgactcctggggccagggcacccaggtcaccgtctcctccggtaccggcggaggcggatctggcggcggaggtagcggtggcggaggatctgaattcgaagccgacatctaccagacacctagatacctggtcatcggcaccggcaagaaaatcaccctggaatgcagccagacaatgggccacgacaagatgtactggtatcagcaggaccccggcatggaactgcacctgatccactacagctacggcgtgaacagcaccgagaagggcgatctgtctagcgagagcaccgtgtccagaatcagaaccgagcacttcccactgacactggaaagcgccagacctagccacaccagccagtacctgtgtgcctcttctgaggccagaggactggccgagttcaccgacacacagtatttcggccctggcaccagactgaccgttctcgaggggaaaccaattcccaaccctcttctgggactggattcaaccggcagcggcgaggacctgaagaacgtgttcccacctgaggtggccgtgttcgagcctagcgaggccgagatcagccacacccagaaagccaccctcgtgtgcctggctaccggcttctaccccgaccatgtggaactgtcttggtgggtcaacggcaaagaggtgcacagcggcgtgtctaccgacccccagccactgaaagaacagcccgccctgaacgacagccggtactgcctgagcagcagactgagagtgtccgccaccttctggcagaacccccggaaccacttcagatgccaggtgcagttctacggcctgagcgagaacgacgagtggacccaggacagagccaagcccgtgacccagatcgtgtctgccgaagcctggggcagagccgattgcggatcccagagcttcggcctgctggaccccaagctgtgctacctgctggatggcatcctgttcatctacggcgtgatcctgaccgccctgttcctgaggagtaagaggagcaggctcctgcacagtgactacatgaacatgactccacgccgccccggacccacccgcaagcattaccagccctatgccccaccacgcgacttcgcagcctatcgctccagagtgaagttcagcagaagcgccgacgcccctgcctaccagcagggacagaaccaactgtacaacgagctgaacctgggcagacgggaagagtacgacgtgctggacaagcggagaggcagggaccctgagatgggcggaaagccccagcggagaaagaacccccaggaaggactgtataacgaactccagaaagacaagatggccgaagcctacagcgagatcggcatgaagggcgagcggagaagaggcaagggccacgatggcctgtaccagggcctgagcaccgccaccaaggacacctatgacgccctgcacatgcaggccctgcctccaagaagggccaagcgatctggatctggagcaacaaacttctcactactcaaacaagcaggtgacgtggaggagaatcccgggcctactagtatggactggatttggcgcatccttttccttgtcggcgctgctaccggcgcccattccgggcccctgttcaatcaagaggtgcagatccctctgaccgagagctactgtggcccctgtcctaagaactggatctgctacaagaacaactgctaccagttcttcgacgagagcaagaattggtacgagagccaggccagctgcatgagccagaatgccagcctgctgaaggtgtacagcaaagaggaccaggacctgctgaaactggtcaagagctaccactggatgggccttgtgcacatccccaccaatggctcttggcagtgggaggacggcagcattctgagccctaacctgctgaccatcatcgagatgcagaagggcgactgcgccctgtacgccagcagctttaagggctacatcgagaattgcagcaccccgaacacctacatctgtatgcagagaaccgttggcggaggcggaagtggaggcggaggatctggcggcggaggctctgacctctttaatcaagaagtccagattccactcaccgaatcctactgcggaccttgtccaaaaaattggatttgttataagaacaactgttatcaattctttgatgagtctaaaaattggtatgagtcccaggcttcctgcatgtctcagaacgcttctctgctgaaagtctactctaaagaagatcaggatctcctgaagctcgtcaagtcttatcattggatggggctcgtccacattcctaccaacggaagctggcaatgggaagatggctccatcctgtctccaaatctgctcacgattattgaaatgcagaaaggggattgtgctctctacgccagctccttcaagggatatattgagaactgtagcacgcccaatacttatatctgtatgcaacggaccgtgggatccggcggcggaggatctggcggaggcggatctgggggcggaggctctttcgaacaagttcagcttcaacagcctggcgctgagctggtcaaacctggcgcttctgtgaagatgagctgcaaagccagcggctacgccttcagcagctactggatcaactggatgaagcagaaacccggccagggactcgaatggatcggccaaatctatcccggcgacggcaccgagaacagattcagcgtgaacttccagaaggccgccaagagcttcagcctgaagatcagcgatagccagctgggcgacgccgccatgtacttttgcgcttatagaagcgccgtgaacgcccggctgatgtttggagatggcacacagctggtggtcaagcccaacacgcgtgagcagaaactgatctcggaagaggatgggagcggcatccagaaccctgatcctgccgtgtaccagctgcgggatagcaagagcagcgacaagagcgtgtgtctgttcaccgacttcgacagccagaccaacgtgtcccagagcaaggactccgacgtgtacatcaccgataagaccgtgctggacatgcggagcatggacttcaagagcaactccgccgtggcctggtccaacaagtccgatttcgcctgcgccaacgccttcaacaacagcattatccccgaggacacattcttcccaagccccgagagcagctgcggtacccagagttttgggttgttggaccctaaattgtgctatctgttggacggaatcctgttcatttacggagtgatcctgaccgcattgttcctgaggagcaagcggtcacggctgctccacagcgattacatgaatatgacaccacgaagaccgggtcctactcgcaaacactaccaaccctacgcacctccccgcgactttgcagcgtaccgatctcgggttaagttttccagatccgcagacgcacccgcttaccaacaagggcagaaccaactctacaatgaacttaatttggggcggagggaagagtacgacgttctggacaaaaggaggggacgagatcccgagatgggcggaaagcctcagcgaaggaagaatccgcaagaggggctttataacgaactccagaaagataaaatggcagaagcctatagtgagattgggatgaagggagaaaggaggaggggtaaaggtcacgatgggttgtaccaaggattgagcacagccactaaagatacctatgatgcgctccacatgcaggccctgccgccaaga

SEQ ID NO: 3689 - DNA, 4017 bp, Artificial Sequence
  Synthetic Polynucloetide
atggccttaccagtgaccgccttgctcctgccgctggccttgctgctccacgccgccaggccggcatgccaggtccagctcgtcgagtccggcggcggcctcgtccaggccggcgactccgtcaccctctcctgcaccgcctccggccgcaccttctcctcctacgccctcgcctggttccgccagcgccccggcaaggagcgcgagttcgtcgccggcctccgctggggcggccccaccaactacgccgactccgtcaaggaccgcttcaccatctccggcgactccgccaagcacaccatgtacctccagatgaactccctcaagcccgaggacaccgccgtctactactgcggctacaaccccggcggctgggccgtcccctcccagtacgagtacgactcctggggccagggcacccaggtcaccgtctcctccggtaccggcggaggcggatctggcggcggaggtagcggtggcggaggatctgaattcgaagccgacatctaccagacacctagatacctggtcatcggcaccggcaagaaaatcaccctggaatgcagccagacaatgggccacgacaagatgtactggtatcagcaggaccccggcatggaactgcacctgatccactacagctacggcgtgaacagcaccgagaagggcgatctgtctagcgagagcaccgtgtccagaatcagaaccgagcacttcccactgacactggaaagcgccagacctagccacaccagccagtacctgtgtgcctcttctgaggccagaggactggccgagttcaccgacacacagtatttcggccctggcaccagactgaccgttctcgaggggaaaccaattcccaaccctcttctgggactggattcaaccggcagcggcgaggacctgaagaacgtgttcccacctgaggtggccgtgttcgagcctagcgaggccgagatcagccacacccagaaagccaccctcgtgtgcctggctaccggcttctaccccgaccatgtggaactgtcttggtgggtcaacggcaaagaggtgcacagcggcgtgtctaccgacccccagccactgaaagaacagcccgccctgaacgacagccggtactgcctgagcagcagactgagagtgtccgccaccttctggcagaacccccggaaccacttcagatgccaggtgcagttctacggcctgagcgagaacgacgagtggacccaggacagagccaagcccgtgacccagatcgtgtctgccgaagcctggggcagagccgattgcggatcccagagcttcggcctgctggaccccaagctgtgctacctgctggatggcatcctgttcatctacggcgtgatcctgaccgccctgttcctgagagtgaagttcagcagaagcgccgacgcccctgcctaccagcagggacagaaccaactgtacaacgagctgaacctgggcagacgggaagagtacgacgtgctggacaagcggagaggcagggaccctgagatgggcggaaagccccagcggagaaagaacccccaggaaggactgtataacgaactccagaaagacaagatggccgaagcctacagcgagatcggcatgaagggcgagcggagaagaggcaagggccacgatggcctgtaccagggcctgagcaccgccaccaaggacacctatgacgccctgcacatgcaggccctgcctccaagaagggccaagcgatctggatctggagcaacaaacttctcactactcaaacaagcaggtgacgtggaggagaatcccgggcctactagtatggactggatttggcgcatccttttccttgtcggcgctgctaccggcgcccattccgggcccctgttcaatcaagaggtgcagatccctctgaccgagagctactgtggcccctgtcctaagaactggatctgctacaagaacaactgctaccagttcttcgacgagagcaagaattggtacgagagccaggccagctgcatgagccagaatgccagcctgctgaaggtgtacagcaaagaggaccaggacctgctgaaactggtcaagagctaccactggatgggccttgtgcacatccccaccaatggctcttggcagtgggaggacggcagcattctgagccctaacctgctgaccatcatcgagatgcagaagggcgactgcgccctgtacgccagcagctttaagggctacatcgagaattgcagcaccccgaacacctacatctgtatgcagagaaccgttggcggaggcggaagtggaggcggaggatctggcggcggaggctctgacctctttaatcaagaagtccagattccactcaccgaatcctactgcggaccttgtccaaaaaattggatttgttataagaacaactgttatcaattctttgatgagtctaaaaattggtatgagtcccaggcttcctgcatgtctcagaacgcttctctgctgaaagtctactctaaagaagatcaggatctcctgaagctcgtcaagtcttatcattggatggggctcgtccacattcctaccaacggaagctggcaatgggaagatggctccatcctgtctccaaatctgctcacgattattgaaatgcagaaaggggattgtgctctctacgccagctccttcaagggatatattgagaactgtagcacgcccaatacttatatctgtatgcaacggaccgtgggatccggcggcggaggatctggcggaggcggatctgggggcggaggctctttcgaacaagttcagcttcaacagcctggcgctgagctggtcaaacctggcgcttctgtgaagatgagctgcaaagccagcggctacgccttcagcagctactggatcaactggatgaagcagaaacccggccagggactcgaatggatcggccaaatctatcccggcgacggcaccgagaacagattcagcgtgaacttccagaaggccgccaagagcttcagcctgaagatcagcgatagccagctgggcgacgccgccatgtacttttgcgcttatagaagcgccgtgaacgcccggctgatgtttggagatggcacacagctggtggtcaagcccaacacgcgtgagcagaaactgatctcggaagaggatctggggagcggcatccagaaccctgatcctgccgtgtaccagctgcgggatagcaagagcagcgacaagagcgtgtgtctgttcaccgacttcgacagccagaccaacgtgtcccagagcaaggactccgacgtgtacatcaccgataagaccgtgctggacatgcggagcatggacttcaagagcaactccgccgtggcctggtccaacaagtccgatttcgcctgcgccaacgccttcaacaacagcattatccccgaggacacattcttcccaagccccgagagcagctgcggtacccagagttttgggttgttggaccctaaattgtgctatctgttggacggaatcctgttcatttacggagtgatcctgaccgcattgttcctgaagagaggccggaagaagctgctgtacatcttcaagcagcctttcatgcggcccgtgcagaccacccaggaagaggacggctgctcctgccggttccccgaggaagaagaaggcggctgcgagctgcgggttaagttttccagatccgcagacgcacccgcttaccaacaagggcagaaccaactctacaatgaacttaatttggggcggagggaagagtacgacgttctggacaaaaggaggggacgagatcccgagatgggcggaaagcctcagcgaaggaagaatccgcaagaggggctttataacgaactccagaaagataaaatggcagaagcctatagtgagattgggatgaagggagaaaggaggaggggtaaaggtcacgatgggttgtaccaaggattgagcacagccactaaagatacctatgatgcgctccacatgcaggccctgccgccaaga

SEQ ID NO: 3690 - DNA, 4143 bp, Artificial Sequence
  Synthetic Polynucloetide
atggccttaccagtgaccgccttgctcctgccgctggccttgctgctccacgccgccaggccggcatgccaggtccagctcgtcgagtccggcggcggcctcgtccaggccggcgactccgtcaccctctcctgcaccgcctccggccgcaccttctcctcctacgccctcgcctggttccgccagcgccccggcaaggagcgcgagttcgtcgccggcctccgctggggcggccccaccaactacgccgactccgtcaaggaccgcttcaccatctccggcgactccgccaagcacaccatgtacctccagatgaactccctcaagcccgaggacaccgccgtctactactgcggctacaaccccggcggctgggccgtcccctcccagtacgagtacgactcctggggccagggcacccaggtcaccgtctcctccggtaccggcggaggcggatctggcggcggaggtagcggtggcggaggatctgaattcgaagccgacatctaccagacacctagatacctggtcatcggcaccggcaagaaaatcaccctggaatgcagccagacaatgggccacgacaagatgtactggtatcagcaggaccccggcatggaactgcacctgatccactacagctacggcgtgaacagcaccgagaagggcgatctgtctagcgagagcaccgtgtccagaatcagaaccgagcacttcccactgacactggaaagcgccagacctagccacaccagccagtacctgtgtgcctcttctgaggccagaggactggccgagttcaccgacacacagtatttcggccctggcaccagactgaccgttctcgaggggaaaccaattcccaaccctcttctgggactggattcaaccggcagcggcgaggacctgaagaacgtgttcccacctgaggtggccgtgttcgagcctagcgaggccgagatcagccacacccagaaagccaccctcgtgtgcctggctaccggcttctaccccgaccatgtggaactgtcttggtgggtcaacggcaaagaggtgcacagcggcgtgtctaccgacccccagccactgaaagaacagcccgccctgaacgacagccggtactgcctgagcagcagactgagagtgtccgccaccttctggcagaacccccggaaccacttcagatgccaggtgcagttctacggcctgagcgagaacgacgagtggacccaggacagagccaagcccgtgacccagatcgtgtctgccgaagcctggggcagagccgattgcggatcccagagcttcggcctgctggaccccaagctgtgctacctgctggatggcatcctgttcatctacggcgtgatcctgaccgccctgttcctgaaacggggcagaaagaaactcctgtatatattcaaacaaccatttatgagaccagtacaaactactcaagaggaagatggctgtagctgccgatttccagaagaagaagaaggaggatgtgaactgagagtgaagttcagcagaagcgccgacgcccctgcctaccagcagggacagaaccaactgtacaacgagctgaacctgggcagacgggaagagtacgacgtgctggacaagcggagaggcagggaccctgagatgggcggaaagccccagcggagaaagaacccccaggaaggactgtataacgaactccagaaagacaagatggccgaagcctacagcgagatcggcatgaagggcgagcggagaagaggcaagggccacgatggcctgtaccagggcctgagcaccgccaccaaggacacctatgacgccctgcacatgcaggccctgcctccaagaagggccaagcgatctggatctggagcaacaaacttctcactactcaaacaagcaggtgacgtggaggagaatcccgggcctactagtatggactggatttggcgcatccttttccttgtcggcgctgctaccggcgcccattccgggcccctgttcaatcaagaggtgcagatccctctgaccgagagctactgtggcccctgtcctaagaactggatctgctacaagaacaactgctaccagttcttcgacgagagcaagaattggtacgagagccaggccagctgcatgagccagaatgccagcctgctgaaggtgtacagcaaagaggaccaggacctgctgaaactggtcaagagctaccactggatgggccttgtgcacatccccaccaatggctcttggcagtgggaggacggcagcattctgagccctaacctgctgaccatcatcgagatgcagaagggcgactgcgccctgtacgccagcagctttaagggctacatcgagaattgcagcaccccgaacacctacatctgtatgcagagaaccgttggcggaggcggaagtggaggcggaggatctggcggcggaggctctgacctctttaatcaagaagtccagattccactcaccgaatcctactgcggaccttgtccaaaaaattggatttgttataagaacaactgttatcaattctttgatgagtctaaaaattggtatgagtcccaggcttcctgcatgtctcagaacgcttctctgctgaaagtctactctaaagaagatcaggatctcctgaagctcgtcaagtcttatcattggatggggctcgtccacattcctaccaacggaagctggcaatgggaagatggctccatcctgtctccaaatctgctcacgattattgaaatgcagaaaggggattgtgctctctacgccagctccttcaagggatatattgagaactgtagcacgcccaatacttatatctgtatgcaacggaccgtgggatccggcggcggaggatctggcggaggcggatctgggggcggaggctctttcgaacaagttcagcttcaacagcctggcgctgagctggtcaaacctggcgcttctgtgaagatgagctgcaaagccagcggctacgccttcagcagctactggatcaactggatgaagcagaaacccggccagggactcgaatggatcggccaaatctatcccggcgacggcaccgagaacagattcagcgtgaacttccagaaggccgccaagagcttcagcctgaagatcagcgatagccagctgggcgacgccgccatgtacttttgcgcttatagaagcgccgtgaacgcccggctgatgtttggagatggcacacagctggtggtcaagcccaacacgcgtgagcagaaactgatctcggaagaggatctggggagcggcatccagaaccctgatcctgccgtgtaccagctgcgggatagcaagagcagcgacaagagcgtgtgtctgttcaccgacttcgacagccagaccaacgtgtcccagagcaaggactccgacgtgtacatcaccgataagaccgtgctggacatgcggagcatggacttcaagagcaactccgccgtggcctggtccaacaagtccgatttcgcctgcgccaacgccttcaacaacagcattatccccgaggacacattcttcccaagccccgagagcagctgcggtacccagagttttgggttgttggaccctaaattgtgctatctgttggacggaatcctgttcatttacggagtgatcctgaccgcattgttcctgaagagaggccggaagaagctgctgtacatcttcaagcagcctttcatgcggcccgtgcagaccacccaggaagaggacggctgctcctgccggttccccgaggaagaagaaggcggctgcgagctgcgggttaagttttccagatccgcagacgcacccgcttaccaacaagggcagaaccaactctacaatgaacttaatttggggcggagggaagagtacgacgttctggacaaaaggaggggacgagatcccgagatgggcggaaagcctcagcgaaggaagaatccgcaagaggggctttataacgaactccagaaagataaaatggcagaagcctatagtgagattgggatgaagggagaaaggaggaggggtaaaggtcacgatgggttgtaccaaggattgagcacagccactaaagatacctatgatgcgctccacatgcaggccctgccgccaaga

SEQ ID NO: 3691 - DNA, 3816 bp, Artificial Sequence
  Synthetic Polynucloetide
atggccttaccagtgaccgccttgctcctgccgctggccttgctgctccacgccgccaggccggcatgccaggtccagctcgtcgagtccggcggcggcctcgtccaggccggcgactccgtcaccctctcctgcaccgcctccggccgcaccttctcctcctacgccctcgcctggttccgccagcgccccggcaaggagcgcgagttcgtcgccggcctccgctggggcggccccaccaactacgccgactccgtcaaggaccgcttcaccatctccggcgactccgccaagcacaccatgtacctccagatgaactccctcaagcccgaggacaccgccgtctactactgcggctacaaccccggcggctgggccgtcccctcccagtacgagtacgactcctggggccagggcacccaggtcaccgtctcctccggtaccggcggaggcggatctggcggcggaggtagcggtggcggaggatctgaattcgaagccgacatctaccagacacctagatacctggtcatcggcaccggcaagaaaatcaccctggaatgcagccagacaatgggccacgacaagatgtactggtatcagcaggaccccggcatggaactgcacctgatccactacagctacggcgtgaacagcaccgagaagggcgatctgtctagcgagagcaccgtgtccagaatcagaaccgagcacttcccactgacactggaaagcgccagacctagccacaccagccagtacctgtgtgcctcttctgaggccagaggactggccgagttcaccgacacacagtatttcggccctggcaccagactgaccgttctcgagcagagcttcggcctgctggaccccaagctgtgctacctgctggatggcatcctgttcatctacggcgtgatcctgaccgccctgttcctgagagtgaagttcagcagaagcgccgacgcccctgcctaccagcagggacagaaccaactgtacaacgagctgaacctgggcagacgggaagagtacgacgtgctggacaagcggagaggcagggaccctgagatgggcggaaagccccagcggagaaagaacccccaggaaggactgtataacgaactccagaaagacaagatggccgaagcctacagcgagatcggcatgaagggcgagcggagaagaggcaagggccacgatggcctgtaccagggcctgagcaccgccaccaaggacacctatgacgccctgcacatgcaggccctgcctccaagaagggccaagcgatctggatctggagcaacaaacttctcactactcaaacaagcaggtgacgtggaggagaatcccgggcctactagtatggactggatttggcgcatccttttccttgtcggcgctgctaccggcgcccattccgggcccctgttcaatcaagaggtgcagatccctctgaccgagagctactgtggcccctgtcctaagaactggatctgctacaagaacaactgctaccagttcttcgacgagagcaagaattggtacgagagccaggccagctgcatgagccagaatgccagcctgctgaaggtgtacagcaaagaggaccaggacctgctgaaactggtcaagagctaccactggatgggccttgtgcacatccccaccaatggctcttggcagtgggaggacggcagcattctgagccctaacctgctgaccatcatcgagatgcagaagggcgactgcgccctgtacgccagcagctttaagggctacatcgagaattgcagcaccccgaacacctacatctgtatgcagagaaccgttggcggaggcggaagtggaggcggaggatctggcggcggaggctctgacctctttaatcaagaagtccagattccactcaccgaatcctactgcggaccttgtccaaaaaattggatttgttataagaacaactgttatcaattctttgatgagtctaaaaattggtatgagtcccaggcttcctgcatgtctcagaacgcttctctgctgaaagtctactctaaagaagatcaggatctcctgaagctcgtcaagtcttatcattggatggggctcgtccacattcctaccaacggaagctggcaatgggaagatggctccatcctgtctccaaatctgctcacgattattgaaatgcagaaaggggattgtgctctctacgccagctccttcaagggatatattgagaactgtagcacgcccaatacttatatctgtatgcaacggaccgtgggatccggcggcggaggatctggcggaggcggatctgggggcggaggctctttcgaacaagttcagcttcaacagcctggcgctgagctggtcaaacctggcgcttctgtgaagatgagctgcaaagccagcggctacgccttcagcagctactggatcaactggatgaagcagaaacccggccagggactcgaatggatcggccaaatctatcccggcgacggcaccgagaacagattcagcgtgaacttccagaaggccgccaagagcttcagcctgaagatcagcgatagccagctgggcgacgccgccatgtacttttgcgcttatagaagcgccgtgaacgcccggctgatgtttggagatggcacacagctggtggtcaagcccaacacgcgtcagagttttgggttgttggaccctaaattgtgctatctgttggacggaatcctgttcatttacggagtgatcctgaccgcattgttcctgcgggttaagttttccagatccgcagacgcacccgcttaccaacaagggcagaaccaactctacaatgaacttaatttggggcggagggaagagtacgacgttctggacaaaaggaggggacgagatcccgagatgggcggaaagcctcagcgaaggaagaatccgcaagaggggctttataacgaactccagaaagataaaatggcagaagcctatagtgagattgggatgaagggagaaaggaggaggggtaaaggtcacgatgggttgtaccaaggattgagcacagccactaaagatacctatgatgcgctccacatgcaggccctgccgccaagacgcgccaagagaagcggatctggcgtgaagcagaccctgaatttcgacctgctgaagctggctggcgacgtggaatccaacccaggcccttctagaggccatatgaccgagtacaagcccacggtgcgcctcgccacccgcgacgacgtccccagggccgtacgcaccctcgccgccgcgttcgccgactaccccgccacgcgccacaccgtcgatccggaccgccacatcgagcgggtcaccgagctgcaagaactcttcctcacgcgcgtcgggctcgacatcggcaaggtgtgggtcgcggacgacggcgccgcggtggcggtctggaccacgccggagagcgtcgaagcgggggcggtgttcgccgagatcggcccgcgcatggccgagttgagcggttcccggctggccgcgcagcaacagatggaaggcctcctggcgccgcaccggcccaaggagcccgcgtggttcctggccaccgtcggcgtctcgcccgaccaccagggcaagggtctgggcagcgccgtcgtgctccccggagtggaggcggccgagcgcgccggggtgcccgccttcctggagacctccgcgccccgcaacctccccttctacgagcggctcggcttcaccgtcaccgccgacgtcgaggtgcccgaaggaccgcgcacctggtgcatgacccgcaagcccggtgcctga

SEQ ID NO: 3692 - DNA, 3288 bp, Artificial Sequence
  Synthetic Polynucloetide
atggccttaccagtgaccgccttgctcctgccgctggccttgctgctccacgccgccaggccggcatgccaggtccagctcgtcgagtccggcggcggcctcgtccaggccggcgactccgtcaccctctcctgcaccgcctccggccgcaccttctcctcctacgccctcgcctggttccgccagcgccccggcaaggagcgcgagttcgtcgccggcctccgctggggcggccccaccaactacgccgactccgtcaaggaccgcttcaccatctccggcgactccgccaagcacaccatgtacctccagatgaactccctcaagcccgaggacaccgccgtctactactgcggctacaaccccggcggctgggccgtcccctcccagtacgagtacgactcctggggccagggcacccaggtcaccgtctcctccggtaccggcggaggcggatctggcggcggaggtagcggtggcggaggatctgaattcgaagccgacatctaccagacacctagatacctggtcatcggcaccggcaagaaaatcaccctggaatgcagccagacaatgggccacgacaagatgtactggtatcagcaggaccccggcatggaactgcacctgatccactacagctacggcgtgaacagcaccgagaagggcgatctgtctagcgagagcaccgtgtccagaatcagaaccgagcacttcccactgacactggaaagcgccagacctagccacaccagccagtacctgtgtgcctcttctgaggccagaggactggccgagttcaccgacacacagtatttcggccctggcaccagactgaccgttctcgagggacagcctaaggccaatcctaccgtgacactgttccctccaagcagcgaagaactccaggccaacaaggccacacttgtgtgcctgatctccgacttctaccctggggctgtgacagtggcttggaaggccgatggatctcctgtgaaagccggcgtggaaaccaccaagccatccaagcagagcaacaacaaatacgccgccagctcctacctgagcctgacacctgagcagtggaagtcccacagatcctacagctgccaagtgacccacgaaggcagcaccgtggaaaagacagtggcccctacagagtgcagccccatcaagaccgatgtgattacaatggaccccaaggacaactgctccaaggacgccaacgataccctgctgctccagctgaccaacaccagcgcctactacatgtacttgttgctgctgctgaagtccgtggtgtacttcgccatcatcacatgctgcctgctgcggagaaccgccttctgctgcaacggcgagaagtctagggccaagcgatctggatctggagcaacaaacttctcactactcaaacaagcaggtgacgtggaggagaatcccgggcctactagtatggactggatttggcgcatccttttccttgtcggcgctgctaccggcgcccattccgggcccctgttcaatcaagaggtgcagatccctctgaccgagagctactgtggcccctgtcctaagaactggatctgctacaagaacaactgctaccagttcttcgacgagagcaagaattggtacgagagccaggccagctgcatgagccagaatgccagcctgctgaaggtgtacagcaaagaggaccaggacctgctgaaactggtcaagagctaccactggatgggccttgtgcacatccccaccaatggctcttggcagtgggaggacggcagcattctgagccctaacctgctgaccatcatcgagatgcagaagggcgactgcgccctgtacgccagcagctttaagggctacatcgagaattgcagcaccccgaacacctacatctgtatgcagagaaccgttggcggaggcggaagtggaggcggaggatctggcggcggaggctctgacctctttaatcaagaagtccagattccactcaccgaatcctactgcggaccttgtccaaaaaattggatttgttataagaacaactgttatcaattctttgatgagtctaaaaattggtatgagtcccaggcttcctgcatgtctcagaacgcttctctgctgaaagtctactctaaagaagatcaggatctcctgaagctcgtcaagtcttatcattggatggggctcgtccacattcctaccaacggaagctggcaatgggaagatggctccatcctgtctccaaatctgctcacgattattgaaatgcagaaaggggattgtgctctctacgccagctccttcaagggatatattgagaactgtagcacgcccaatacttatatctgtatgcaacggaccgtgggatccggcggcggaggatctggcggaggcggatctgggggcggaggctctttcgaacaagttcagcttcaacagcctggcgctgagctggtcaaacctggcgcttctgtgaagatgagctgcaaagccagcggctacgccttcagcagctactggatcaactggatgaagcagaaacccggccagggactcgaatggatcggccaaatctatcccggcgacggcaccgagaacagattcagcgtgaacttccagaaggccgccaagagcttcagcctgaagatcagcgatagccagctgggcgacgccgccatgtacttttgcgcttatagaagcgccgtgaacgcccggctgatgtttggagatggcacacagctggtggtcaagcccaacacgcgtgcctctacaaagggaccctccgtgtttcctctggctcccagcagcaagtctacaagcggaggaacagccgctctgggctgcctggtcaaggattactttcccgagcctgtgaccgtgtcctggaatagcggagcactgacaagcggcgtgcacacctttccagccgtgctgcaaagcagcggcctgtactctctgagcagcgtggtcacagtgcctagctctagcctgggcacccagacctacatctgcaatgtgaaccacaagcctagcaacaccaaggtggacaagagagtggaacccaagagctgtgaagtgaaaaccgactccaccgaccacgtgaagcccaaagagacagagaacaccaagcagcccagcaagagctgccacaagcccaaggccatcgtgcacaccgagaaagtgaacatgatgagcctgaccgtgctgggcctgcggatgctgttcgccaaaaccgtggccgtgaacttcctgctgaccgccaagctgttcttcctc

SEQ ID NO: 3693 - DNA, 3222 bp, Artificial Sequence
  Synthetic Polynucloetide
atggccttaccagtgaccgccttgctcctgccgctggccttgctgctccacgccgccaggccggcatgccaggtccagctcgtcgagtccggcggcggcctcgtccaggccggcgactccgtcaccctctcctgcaccgcctccggccgcaccttctcctcctacgccctcgcctggttccgccagcgccccggcaaggagcgcgagttcgtcgccggcctccgctggggcggccccaccaactacgccgactccgtcaaggaccgcttcaccatctccggcgactccgccaagcacaccatgtacctccagatgaactccctcaagcccgaggacaccgccgtctactactgcggctacaaccccggcggctgggccgtcccctcccagtacgagtacgactcctggggccagggcacccaggtcaccgtctcctccggtaccggcggaggcggatctggcggcggaggtagcggtggcggaggatctgaattcgaagccgacatctaccagacacctagatacctggtcatcggcaccggcaagaaaatcaccctggaatgcagccagacaatgggccacgacaagatgtactggtatcagcaggaccccggcatggaactgcacctgatccactacagctacggcgtgaacagcaccgagaagggcgatctgtctagcgagagcaccgtgtccagaatcagaaccgagcacttcccactgacactggaaagcgccagacctagccacaccagccagtacctgtgtgcctcttctgaggccagaggactggccgagttcaccgacacacagtatttcggccctggcaccagactgaccgttctcgagggacagcctaaggccaatcctaccgtgacactgttccctccaagcagcgaagaactccaggccaacaaggccacacttgtgtgcctgatctccgacttctaccctggggctgtgacagtggcttggaaggccgatggatctcctgtgaaagccggcgtggaaaccaccaagccatccaagcagagcaacaacaaatacgccgccagctcctacctgagcctgacacctgagcagtggaagtcccacagatcctacagctgccaagtgacccacgaaggcagcaccgtggaaaagacagtggcccctacagagtgcagcggcagagccgattgcggcatcaccagcgccagctaccaccagggcgtgctgagcgccaccatcctgtacgagatcctgctgggcaaggccaccctgtacgccgtgctggtgtctgccctggtgctgatggctatggtcaagcggaaggacagccggggaagggccaagcgatctggatctggagcaacaaacttctcactactcaaacaagcaggtgacgtggaggagaatcccgggcctactagtatggactggatttggcgcatccttttccttgtcggcgctgctaccggcgcccattccgggcccctgttcaatcaagaggtgcagatccctctgaccgagagctactgtggcccctgtcctaagaactggatctgctacaagaacaactgctaccagttcttcgacgagagcaagaattggtacgagagccaggccagctgcatgagccagaatgccagcctgctgaaggtgtacagcaaagaggaccaggacctgctgaaactggtcaagagctaccactggatgggccttgtgcacatccccaccaatggctcttggcagtgggaggacggcagcattctgagccctaacctgctgaccatcatcgagatgcagaagggcgactgcgccctgtacgccagcagctttaagggctacatcgagaattgcagcaccccgaacacctacatctgtatgcagagaaccgttggcggaggcggaagtggaggcggaggatctggcggcggaggctctgacctctttaatcaagaagtccagattccactcaccgaatcctactgcggaccttgtccaaaaaattggatttgttataagaacaactgttatcaattctttgatgagtctaaaaattggtatgagtcccaggcttcctgcatgtctcagaacgcttctctgctgaaagtctactctaaagaagatcaggatctcctgaagctcgtcaagtcttatcattggatggggctcgtccacattcctaccaacggaagctggcaatgggaagatggctccatcctgtctccaaatctgctcacgattattgaaatgcagaaaggggattgtgctctctacgccagctccttcaagggatatattgagaactgtagcacgcccaatacttatatctgtatgcaacggaccgtgggatccggcggcggaggatctggcggaggcggatctgggggcggaggctctttcgaacaagttcagcttcaacagcctggcgctgagctggtcaaacctggcgcttctgtgaagatgagctgcaaagccagcggctacgccttcagcagctactggatcaactggatgaagcagaaacccggccagggactcgaatggatcggccaaatctatcccggcgacggcaccgagaacagattcagcgtgaacttccagaaggccgccaagagcttcagcctgaagatcagcgatagccagctgggcgacgccgccatgtacttttgcgcttatagaagcgccgtgaacgcccggctgatgtttggagatggcacacagctggtggtcaagcccaacacgcgtgcctctacaaagggaccctccgtgtttcctctggctcccagcagcaagtctacaagcggaggaacagccgctctgggctgcctggtcaaggattactttcccgagcctgtgaccgtgtcctggaatagcggagcactgacaagcggcgtgcacacctttccagccgtgctgcaaagcagcggcctgtactctctgagcagcgtggtcacagtgcctagctctagcctgggcacccagacctacatctgcaatgtgaaccacaagcctagcaacaccaaggtggacaagagagtggaacccaagagctgtatccccgaggacacattcttcccaagcagcgacgtgccctgcgacgtgaagctggtggaaaagagcttcgagacagacaccaacctgaacttccagaacctgagcgtgatcggcttcagaatcctgctgctgaaagtggccggctttaacctgctgatgaccctgcggctgtggtccagc

SEQ ID NO: 3694 - DNA, 3222 bp, Artificial Sequence
  Synthetic Polynucloetide
atggccttaccagtgaccgccttgctcctgccgctggccttgctgctccacgccgccaggccggcatgccaggtccagctcgtcgagtccggcggcggcctcgtccaggccggcgactccgtcaccctctcctgcaccgcctccggccgcaccttctcctcctacgccctcgcctggttccgccagcgccccggcaaggagcgcgagttcgtcgccggcctccgctggggcggccccaccaactacgccgactccgtcaaggaccgcttcaccatctccggcgactccgccaagcacaccatgtacctccagatgaactccctcaagcccgaggacaccgccgtctactactgcggctacaaccccggcggctgggccgtcccctcccagtacgagtacgactcctggggccagggcacccaggtcaccgtctcctccggtaccggcggaggcggatctggcggcggaggtagcggtggcggaggatctgaattcgaagccgacatctaccagacacctagatacctggtcatcggcaccggcaagaaaatcaccctggaatgcagccagacaatgggccacgacaagatgtactggtatcagcaggaccccggcatggaactgcacctgatccactacagctacggcgtgaacagcaccgagaagggcgatctgtctagcgagagcaccgtgtccagaatcagaaccgagcacttcccactgacactggaaagcgccagacctagccacaccagccagtacctgtgtgcctcttctgaggccagaggactggccgagttcaccgacacacagtatttcggccctggcaccagactgaccgttctcgagggacagcctaaggccaatcctaccgtgacactgttccctccaagcagcgaagaactccaggccaacaaggccacacttgtgtgcctgatctccgacttctaccctggggctgtgacagtggcttggaaggccgatggatctcctgtgaaagccggcgtggaaaccaccaagccatccaagcagagcaacaacaaatacgccgccagctcctacctgagcctgacacctgagcagtggaagtcccacagatcctacagctgccaagtgacccacgaaggcagcaccgtggaaaagacagtggcccctacagagtgcagcggcagagccgattgcggctttaccagcgagagctaccagcagggcgtgctgagcgccaccatcctgtacgagatcctgctgggcaaggccaccctgtacgccgtgctggtgtctgccctggtgctgatggctatggtcaagcggaaggacagccggggaagggccaagcgatctggatctggagcaacaaacttctcactactcaaacaagcaggtgacgtggaggagaatcccgggcctactagtatggactggatttggcgcatccttttccttgtcggcgctgctaccggcgcccattccgggcccctgttcaatcaagaggtgcagatccctctgaccgagagctactgtggcccctgtcctaagaactggatctgctacaagaacaactgctaccagttcttcgacgagagcaagaattggtacgagagccaggccagctgcatgagccagaatgccagcctgctgaaggtgtacagcaaagaggaccaggacctgctgaaactggtcaagagctaccactggatgggccttgtgcacatccccaccaatggctcttggcagtgggaggacggcagcattctgagccctaacctgctgaccatcatcgagatgcagaagggcgactgcgccctgtacgccagcagctttaagggctacatcgagaattgcagcaccccgaacacctacatctgtatgcagagaaccgttggcggaggcggaagtggaggcggaggatctggcggcggaggctctgacctctttaatcaagaagtccagattccactcaccgaatcctactgcggaccttgtccaaaaaattggatttgttataagaacaactgttatcaattctttgatgagtctaaaaattggtatgagtcccaggcttcctgcatgtctcagaacgcttctctgctgaaagtctactctaaagaagatcaggatctcctgaagctcgtcaagtcttatcattggatggggctcgtccacattcctaccaacggaagctggcaatgggaagatggctccatcctgtctccaaatctgctcacgattattgaaatgcagaaaggggattgtgctctctacgccagctccttcaagggatatattgagaactgtagcacgcccaatacttatatctgtatgcaacggaccgtgggatccggcggcggaggatctggcggaggcggatctgggggcggaggctctttcgaacaagttcagcttcaacagcctggcgctgagctggtcaaacctggcgcttctgtgaagatgagctgcaaagccagcggctacgccttcagcagctactggatcaactggatgaagcagaaacccggccagggactcgaatggatcggccaaatctatcccggcgacggcaccgagaacagattcagcgtgaacttccagaaggccgccaagagcttcagcctgaagatcagcgatagccagctgggcgacgccgccatgtacttttgcgcttatagaagcgccgtgaacgcccggctgatgtttggagatggcacacagctggtggtcaagcccaacacgcgtgcctctacaaagggaccctccgtgtttcctctggctcccagcagcaagtctacaagcggaggaacagccgctctgggctgcctggtcaaggattactttcccgagcctgtgaccgtgtcctggaatagcggagcactgacaagcggcgtgcacacctttccagccgtgctgcaaagcagcggcctgtactctctgagcagcgtggtcacagtgcctagctctagcctgggcacccagacctacatctgcaatgtgaaccacaagcctagcaacaccaaggtggacaagagagtggaacccaagagctgtatccccgaggacacattcttcccaagccccgagagcagctgcgacgtgaagctggtggaaaagagcttcgagacagacaccaacctgaacttccagaacctgagcgtgatcggcttcagaatcctgctgctgaaagtggccggctttaacctgctgatgaccctgcggctgtggtccagc

SEQ ID NO: 3695 - DNA, 1719 bp, Artificial Sequence
  Synthetic Polynucloetide
atggactggatttggcgcatccttttccttgtcggcgctgctaccggcgcccattccgggcccatggaccccgacctggaaatcagagccgccttcctgcggcagagaaacacagccctgagaacagaggtggccgagctggaacaagaggtgcagcggctggaaaacgaggtgtcccagtacgagacaagatacggccctctcggaggcggaaaaggatccggcggcggaggatctggcggaggcggatctgggggcggaggctctttcgaacaagttcagcttcaacagcctggcgctgagctggtcaaacctggcgcttctgtgaagatgagctgcaaagccagcggctacgccttcagcagctactggatcaactggatgaagcagaaacccggccagggactcgaatggatcggccaaatctatcccggcgacggcaccgagaacagattcagcgtgaacttccagaaggccgccaagagcttcagcctgaagatcagcgatagccagctgggcgacgccgccatgtacttttgcgcttatagaagcgccgtgaacgcccggctgatgtttggagatggcacacagctggtggtcaagcccaacggcggaggcggaagtggaggcggaggatctggcggcggaggctctgaagccgacatctaccagacacctagatacctggtcatcggcaccggcaagaaaatcaccctggaatgcagccagacaatgggccacgacaagatgtactggtatcagcaggaccccggcatggaactgcacctgatccactacagctacggcgtgaacagcaccgagaagggcgatctgtctagcgagagcaccgtgtccagaatcagaaccgagcacttcccactgacactggaaagcgccagacctagccacaccagccagtacctgtgtgcctcttctgaggccagaggactggccgagttcaccgacacacagtatttcggccctggcaccagactgaccgttacgcgtgagcagaaactgatctcggaagaggatctggcgaagcccaccacgacgccagcgccgcgaccaccaacaccggcgcccaccatcgcgtcgcagcccctgtccctgcgcccagaggcgtgccggccagcggcggggggcgcagtgcacacgagggggctggacttcgcctgtgacatctacatctgggcgcccttggccgggacttgtggggtccttctcctgtcactggttatcaccctttactgcaaacggggcagaaagaaactcctgtatatattcaaacaaccatttatgagaccagtacaaactactcaagaggaagatggctgtagctgccgatttccagaagaagaagaaggaggatgtgaactgagagtgaagttcagcaggagcgcagacgcccccgcgtaccagcagggccagaaccagctctataacgagctgaatctaggacgaagagaggagtacgatgttttggacaagagacgtggccgggaccctgagatggggggaaagccgagaaggaagaaccctcaggaaggcctgtacaatgaactgcagaaagataagatggcggaggcctacagtgagattgggatgaaaggcgagcgccggaggggcaaggggcacgatggcctttaccagggtctcagtacagccaccaaggacacctacgacgcccttcacatgcaggccctgccccctcgctga

SEQ ID NO: 3696 - DNA, 2778 bp, Artificial Sequence
  Synthetic Polynucloetide
atggccttaccagtgaccgccttgctcctgccgctggccttgctgctccacgccgccaggccggaagccgacatctaccagacacctagatacctggtcatcggcaccggcaagaaaatcaccctggaatgcagccagacaatgggccacgacaagatgtactggtatcagcaggaccccggcatggaactgcacctgatccactacagctacggcgtgaacagcaccgagaagggcgatctgtctagcgagagcaccgtgtccagaatcagaaccgagcacttcccactgacactggaaagcgccagacctagccacaccagccagtacctgtgtgcctcttctgaggccagaggactggccgagttcaccgacacacagtatttcggccctggcaccagactgaccgttctcgagatccagaaccctgatcctgccgtgtaccagctgcgggatagcaagagcagcgacaagagcgtgtgtctgttcaccgacttcgacagccagaccaacgtgtcccagagcaaggactccgacgtgtacatcaccgataagtgcgtgctggacatgcggagcatggacttcaagagcaactccgccgtggcctggtccaacaagtccgatttcgcctgcgccaacgccttcaacaacagcattatccccgaggacacattcttcccaagcagcgacgtgccctgcgacgtgaagctggtggaaaagagcttcgagacagacaccaacctgaacttccagaacctgagcgtgatcggcttcagaatcctgctgctgaaagtggccggctttaacctgctgatgaccctgcggctgtggtccagccgcgccaagagaagcggatctggcgtgaagcagaccctgaatttcgacctgctgaagctggctggcgacgtggaatccaacccaggccctactagtatggactggatttggcgcatccttttccttgtcggcgctgctaccggcgcccattccgggcccatggaccccgacctggaaatcagagccgccttcctgcggcagagaaacacagccctgagaacagaggtggccgagctggaacaagaggtgcagcggctggaaaacgaggtgtcccagtacgagacaagatacggccctctcggaggcggaaaaggatccggcggcggaggatctggcggaggcggatctgggggcggaggctctttcgaacaagttcagcttcaacagcctggcgctgagctggtcaaacctggcgcttctgtgaagatgagctgcaaagccagcggctacgccttcagcagctactggatcaactggatgaagcagaaacccggccagggactcgaatggatcggccaaatctatcccggcgacggcaccgagaacagattcagcgtgaacttccagaaggccgccaagagcttcagcctgaagatcagcgatagccagctgggcgacgccgccatgtacttttgcgcttatagaagcgccgtgaacgcccggctgatgtttggagatggcacacagctggtggtcaagcccaacacgcgtgaggacctgaagaacgtgttcccacctgaggtggccgtgttcgagcctagcaaggccgagatcgcccacacccagaaagccaccctcgtgtgcctggctaccggcttctaccccgaccatgtggaactgtcttggtgggtcaacggcaaagaggtgcacagcggcgtgtgtaccgacccccagccactgaaagaacagcccgccctgaacgacagccggtactgcctgagcagcagactgagagtgtccgccaccttctggcagaacccccggaaccacttcagatgccaggtgcagttctacggcctgagcgagaacgacgagtggacccaggacagagccaagcccgtgacccagatcgtgtctgccgaagcctggggcagagccgattgcggcatcaccagcgccagctaccaccagggcgtgctgagcgccaccatcctgtacgagatcctgctgggcaaggccaccctgtacgccgtgctggtgtctgccctggtgctgatggctatggtcaagcggaaggacagccggggaagggccaagcgatctggatctggagcaacaaacttctcactactcaaacaagcaggtgacgtggaggagaatcccgggccttctagaggccatatgaccgagtacaagcccacggtgcgcctcgccacccgcgacgacgtccccagggccgtacgcaccctcgccgccgcgttcgccgactaccccgccacgcgccacaccgtcgatccggaccgccacatcgagcgggtcaccgagctgcaagaactcttcctcacgcgcgtcgggctcgacatcggcaaggtgtgggtcgcggacgacggcgccgcggtggcggtctggaccacgccggagagcgtcgaagcgggggcggtgttcgccgagatcggcccgcgcatggccgagttgagcggttcccggctggccgcgcagcaacagatggaaggcctcctggcgccgcaccggcccaaggagcccgcgtggttcctggccaccgtcggcgtctcgcccgaccaccagggcaagggtctgggcagcgccgtcgtgctccccggagtggaggcggccgagcgcgccggggtgcccgccttcctggagacctccgcgccccgcaacctccccttctacgagcggctcggcttcaccgtcaccgccgacgtcgaggtgcccgaaggaccgcgcacctggtgcatgacccgcaagcccggtgcctga

SEQ ID NO: 3697 - DNA, 2775 bp, Artificial Sequence
  Synthetic Polynucloetide
atggccttaccagtgaccgccttgctcctgccgctggccttgctgctccacgccgccaggccggaagccgacatctaccagacacctagatacctggtcatcggcaccggcaagaaaatcaccctggaatgcagccagacaatgggccacgacaagatgtactggtatcagcaggaccccggcatggaactgcacctgatccactacagctacggcgtgaacagcaccgagaagggcgatctgtctagcgagagcaccgtgtccagaatcagaaccgagcacttcccactgacactggaaagcgccagacctagccacaccagccagtacctgtgtgcctcttctgaggccagaggactggccgagttcaccgacacacagtatttcggccctggcaccagactgaccgttctcgaggacctgaagaacgtgttcccacctgaggtggccgtgttcgagcctagcaaggccgagatcgcccacacccagaaagccaccctcgtgtgcctggctaccggcttctaccccgaccatgtggaactgtcttggtgggtcaacggcaaagaggtgcacagcggcgtgtgtaccgacccccagccactgaaagaacagcccgccctgaacgacagccggtactgcctgagcagcagactgagagtgtccgccaccttctggcagaacccccggaaccacttcagatgccaggtgcagttctacggcctgagcgagaacgacgagtggacccaggacagagccaagcccgtgacccagatcgtgtctgccgaagcctggggcagagccgattgcggcatcaccagcgccagctaccaccagggcgtgctgagcgccaccatcctgtacgagatcctgctgggcaaggccaccctgtacgccgtgctggtgtctgccctggtgctgatggctatggtcaagcggaaggacagccggggaagggccaagcgatctggatctggagcaacaaacttctcactactcaaacaagcaggtgacgtggaggagaatcccgggcctactagtatggactggatttggcgcatccttttccttgtcggcgctgctaccggcgcccattccgggcccatggaccccgacctggaaatcagagccgccttcctgcggcagagaaacacagccctgagaacagaggtggccgagctggaacaagaggtgcagcggctggaaaacgaggtgtcccagtacgagacaagatacggccctctcggaggcggaaaaggatccggcggcggaggatctggcggaggcggatctgggggcggaggctctttcgaacaagttcagcttcaacagcctggcgctgagctggtcaaacctggcgcttctgtgaagatgagctgcaaagccagcggctacgccttcagcagctactggatcaactggatgaagcagaaacccggccagggactcgaatggatcggccaaatctatcccggcgacggcaccgagaacagattcagcgtgaacttccagaaggccgccaagagcttcagcctgaagatcagcgatagccagctgggcgacgccgccatgtacttttgcgcttatagaagcgccgtgaacgcccggctgatgtttggagatggcacacagctggtggtcaagcccaacacgcgtatccagaaccctgatcctgccgtgtaccagctgcgggatagcaagagcagcgacaagagcgtgtgtctgttcaccgacttcgacagccagaccaacgtgtcccagagcaaggactccgacgtgtacatcaccgataagtgcgtgctggacatgcggagcatggacttcaagagcaactccgccgtggcctggtccaacaagtccgatttcgcctgcgccaacgccttcaacaacagcattatccccgaggacacattcttcccaagcagcgacgtgccctgcgacgtgaagctggtggaaaagagcttcgagacagacaccaacctgaacttccagaacctgagcgtgatcggcttcagaatcctgctgctgaaagtggccggctttaacctgctgatgaccctgcggctgtggtccagccgcgccaagagaagcggatctggcgtgaagcagaccctgaatttcgacctgctgaagctggctggcgacgtggaatccaacccaggcccttctagaggccatatgaccgagtacaagcccacggtgcgcctcgccacccgcgacgacgtccccagggccgtacgcaccctcgccgccgcgttcgccgactaccccgccacgcgccacaccgtcgatccggaccgccacatcgagcgggtcaccgagctgcaagaactcttcctcacgcgcgtcgggctcgacatcggcaaggtgtgggtcgcggacgacggcgccgcggtggcggtctggaccacgccggagagcgtcgaagcgggggcggtgttcgccgagatcggcccgcgcatggccgagttgagcggttcccggctggccgcgcagcaacagatggaaggcctcctggcgccgcaccggcccaaggagcccgcgtggttcctggccaccgtcggcgtctcgcccgaccaccagggcaagggtctgggcagcgccgtcgtgctccccggagtggaggcggccgagcgcgccggggtgcccgccttcctggagacctccgcgccccgcaacctccccttctacgagcggctcggcttcaccgtcaccgccgacgtcgaggtgcccgaaggaccgcgcacctggtgcatgacccgcaagcccggtgcctga

SEQ ID NO: 3698 - DNA, 2775 bp, Artificial Sequence
  Synthetic Polynucloetide
atggccttaccagtgaccgccttgctcctgccgctggccttgctgctccacgccgccaggccggaagccgacatctaccagacacctagatacctggtcatcggcaccggcaagaaaatcaccctggaatgcagccagacaatgggccacgacaagatgtactggtatcagcaggaccccggcatggaactgcacctgatccactacagctacggcgtgaacagcaccgagaagggcgatctgtctagcgagagcaccgtgtccagaatcagaaccgagcacttcccactgacactggaaagcgccagacctagccacaccagccagtacctgtgtgcctcttctgaggccagaggactggccgagttcaccgacacacagtatttcggccctggcaccagactgaccgttctcgaggacctgaagaacgtgttcccacctgaggtggccgtgttcgagcctagcgaggccgagatcagccacacccagaaagccaccctcgtgtgcctggctaccggcttctaccccgaccatgtggaactgtcttggtgggtcaacggcaaagaggtgcacagcggcgtgtgtaccgacccccagccactgaaagaacagcccgccctgaacgacagccggtactgcctgagcagcagactgagagtgtccgccaccttctggcagaacccccggaaccacttcagatgccaggtgcagttctacggcctgagcgagaacgacgagtggacccaggacagagccaagcccgtgacccagatcgtgtctgccgaagcctggggcagagccgattgcggctttaccagcgagagctaccagcagggcgtgctgagcgccaccatcctgtacgagatcctgctgggcaaggccaccctgtacgccgtgctggtgtctgccctggtgctgatggctatggtcaagcggaaggacagccggggaagggccaagcgatctggatctggagcaacaaacttctcactactcaaacaagcaggtgacgtggaggagaatcccgggcctactagtatggactggatttggcgcatccttttccttgtcggcgctgctaccggcgcccattccgggcccatggaccccgacctggaaatcagagccgccttcctgcggcagagaaacacagccctgagaacagaggtggccgagctggaacaagaggtgcagcggctggaaaacgaggtgtcccagtacgagacaagatacggccctctcggaggcggaaaaggatccggcggcggaggatctggcggaggcggatctgggggcggaggctctttcgaacaagttcagcttcaacagcctggcgctgagctggtcaaacctggcgcttctgtgaagatgagctgcaaagccagcggctacgccttcagcagctactggatcaactggatgaagcagaaacccggccagggactcgaatggatcggccaaatctatcccggcgacggcaccgagaacagattcagcgtgaacttccagaaggccgccaagagcttcagcctgaagatcagcgatagccagctgggcgacgccgccatgtacttttgcgcttatagaagcgccgtgaacgcccggctgatgtttggagatggcacacagctggtggtcaagcccaacacgcgtatccagaaccctgatcctgccgtgtaccagctgcgggatagcaagagcagcgacaagagcgtgtgtctgttcaccgacttcgacagccagaccaacgtgtcccagagcaaggactccgacgtgtacatcaccgataagtgcgtgctggacatgcggagcatggacttcaagagcaactccgccgtggcctggtccaacaagtccgatttcgcctgcgccaacgccttcaacaacagcattatccccgaggacacattcttcccaagccccgagagcagctgcgacgtgaagctggtggaaaagagcttcgagacagacaccaacctgaacttccagaacctgagcgtgatcggcttcagaatcctgctgctgaaagtggccggctttaacctgctgatgaccctgcggctgtggtccagccgcgccaagagaagcggatctggcgtgaagcagaccctgaatttcgacctgctgaagctggctggcgacgtggaatccaacccaggcccttctagaggccatatgaccgagtacaagcccacggtgcgcctcgccacccgcgacgacgtccccagggccgtacgcaccctcgccgccgcgttcgccgactaccccgccacgcgccacaccgtcgatccggaccgccacatcgagcgggtcaccgagctgcaagaactcttcctcacgcgcgtcgggctcgacatcggcaaggtgtgggtcgcggacgacggcgccgcggtggcggtctggaccacgccggagagcgtcgaagcgggggcggtgttcgccgagatcggcccgcgcatggccgagttgagcggttcccggctggccgcgcagcaacagatggaaggcctcctggcgccgcaccggcccaaggagcccgcgtggttcctggccaccgtcggcgtctcgcccgaccaccagggcaagggtctgggcagcgccgtcgtgctccccggagtggaggcggccgagcgcgccggggtgcccgccttcctggagacctccgcgccccgcaacctccccttctacgagcggctcggcttcaccgtcaccgccgacgtcgaggtgcccgaaggaccgcgcacctggtgcatgacccgcaagcccggtgcctga

SEQ ID NO: 3699 - DNA, 2073 bp, Artificial Sequence
  Synthetic Polynucloetide
atggccttaccagtgaccgccttgctcctgccgctggccttgctgctccacgccgccaggccggaagccgacatctaccagacacctagatacctggtcatcggcaccggcaagaaaatcaccctggaatgcagccagacaatgggccacgacaagatgtactggtatcagcaggaccccggcatggaactgcacctgatccactacagctacggcgtgaacagcaccgagaagggcgatctgtctagcgagagcaccgtgtccagaatcagaaccgagcacttcccactgacactggaaagcgccagacctagccacaccagccagtacctgtgtgcctcttctgaggccagaggactggccgagttcaccgacacacagtatttcggccctggcaccagactgaccgttctcgaggacctgaagaacgtgttcccacctgaggtggccgtgttcgagcctagcgaggccgagatcagccacacccagaaagccaccctcgtgtgcctggctaccggcttctaccccgaccatgtggaactgtcttggtgggtcaacggcaaagaggtgcacagcggcgtgtgtaccgacccccagccactgaaagaacagcccgccctgaacgacagccggtactgcctgagcagcagactgagagtgtccgccaccttctggcagaacccccggaaccacttcagatgccaggtgcagttctacggcctgagcgagaacgacgagtggacccaggacagagccaagcccgtgacccagatcgtgtctgccgaagcctggggcagagccgattgcggctttaccagcgagagctaccagcagggcgtgctgagcgccaccatcctgtacgagatcctgctgggcaaggccaccctgtacgccgtgctggtgtctgccctggtgctgatggctatggtcaagcggaaggacagccggggaagggccaagcgatctggatctggagcaacaaacttctcactactcaaacaagcaggtgacgtggaggagaatcccgggcctactagtatggactggatttggcgcatccttttccttgtcggcgctgctaccggcgcccattccgggcccatggaccccgacctggaaatcagagccgccttcctgcggcagagaaacacagccctgagaacagaggtggccgagctggaacaagaggtgcagcggctggaaaacgaggtgtcccagtacgagacaagatacggccctctcggaggcggaaaaggatccggcggcggaggatctggcggaggcggatctgggggcggaggctctttcgaacaagttcagcttcaacagcctggcgctgagctggtcaaacctggcgcttctgtgaagatgagctgcaaagccagcggctacgccttcagcagctactggatcaactggatgaagcagaaacccggccagggactcgaatggatcggccaaatctatcccggcgacggcaccgagaacagattcagcgtgaacttccagaaggccgccaagagcttcagcctgaagatcagcgatagccagctgggcgacgccgccatgtacttttgcgcttatagaagcgccgtgaacgcccggctgatgtttggagatggcacacagctggtggtcaagcccaacacgcgtatccagaaccctgatcctgccgtgtaccagctgcgggatagcaagagcagcgacaagagcgtgtgtctgttcaccgacttcgacagccagaccaacgtgtcccagagcaaggactccgacgtgtacatcaccgataagtgcgtgctggacatgcggagcatggacttcaagagcaactccgccgtggcctggtccaacaagtccgatttcgcctgcgccaacgccttcaacaacagcattatccccgaggacacattcttcccaagccccgagagcagctgcgacgtgaagctggtggaaaagagcttcgagacagacaccaacctgaacttccagaacctgagcgtgatcggcttcagaatcctgctgctgaaagtggccggctttaacctgctgatgaccctgcggctgtggtccagc

SEQ ID NO: 3700 - DNA, 2748 bp, Artificial Sequence
  Synthetic Polynucloetide
atggccttaccagtgaccgccttgctcctgccgctggccttgctgctccacgccgccaggccggaagccgacatctaccagacacctagatacctggtcatcggcaccggcaagaaaatcaccctggaatgcagccagacaatgggccacgacaagatgtactggtatcagcaggaccccggcatggaactgcacctgatccactacagctacggcgtgaacagcaccgagaagggcgatctgtctagcgagagcaccgtgtccagaatcagaaccgagcacttcccactgacactggaaagcgccagacctagccacaccagccagtacctgtgtgcctcttctgaggccagaggactggccgagttcaccgacacacagtatttcggccctggcaccagactgaccgttctcgaggacctgaagaacgtgttcccacctgaggtggccgtgttcgagcctagcgaggccgagatcagccacacccagaaagccaccctcgtgtgcctggctaccggcttctaccccgaccatgtggaactgtcttggtgggtcaacggcaaagaggtgcacagcggcgtgtgtaccgacccccagccactgaaagaacagcccgccctgaacgacagccggtactgcctgagcagcagactgagagtgtccgccaccttctggcagaacccccggaaccacttcagatgccaggtgcagttctacggcctgagcgagaacgacgagtggacccaggacagagccaagcccgtgacccagatcgtgtctgccgaagcctggggcagagccgattgcggctttaccagcgagagctaccagcagggcgtgctgagcgccaccatcctgtacgagatcctgctgggcaaggccaccctgtacgccgtgctggtgtctgccctggtgctgatggctatggtcaagcggaaggacagccggggaagggccaagcgatctggatctggagcaacaaacttctcactactcaaacaagcaggtgacgtggaggagaatcccgggcctactagtatggactggatttggcgcatccttttccttgtcggcgctgctaccggcgcccattccgggcccatggaccccgacctggaaatcagagccgccttcctgcggcagagaaacacagccctgagaacagaggtggccgagctggaacaagaggtgcagcggctggaaaacgaggtgtcccagtacgagacaagatacggccctctcggaggcggaaaaggatccggcggcggaggatctggcggaggcggatctgggggcggaggctctttcgaacaagttcagcttcaacagcctggcgctgagctggtcaaacctggcgcttctgtgaagatgagctgcaaagccagcggctacgccttcagcagctactggatcaactggatgaagcagaaacccggccagggactcgaatggatcggccaaatctatcccggcgacggcaccgagaacagattcagcgtgaacttccagaaggccgccaagagcttcagcctgaagatcagcgatagccagctgggcgacgccgccatgtacttttgcgcttatagaagcgccgtgaacgcccggctgatgtttggagatggcacacagctggtggtcaagcccaacacgcgtatccagaaccctgatcctgccgtgtaccagctgcgggatagcaagagcagcgacaagagcgtgtgtctgttcaccgacttcgacagccagaccaacgtgtcccagagcaaggactccgacgtgtacatcaccgataagtgcgtgctggacatgcggagcatggacttcaagagcaactccgccgtggcctggtccaacaagtccgatttcgcctgcgccaacgccttcaacaacagcattatccccgaggacacattcttcccaagccccgagagcagctgcgacgtgaagctggtggaaaagagcttcgagacagacaccaacctgaacttccagaacctgagcgtgatcggcttcagaatcctgctgctgaaagtggccggctttaacctgctgatgaccctgcggctgtggtccagccgcgccaagagaagcggatctggcgtgaagcagaccctgaatttcgacctgctgaagctggctggcgacgtggaatccaacccaggcccttctagaggcgggatccacaccatggctacctacgaggtgctgtgcgaggtggcaagaaagctgggcaccgacgacagagaagtggtgctgttcctgctgaacgtgttcatccctcagcctacactggcccagctgatcggtgcactgagagccctgaaagaggaaggccggctgacctttcctctgctggccgaatgcctgttcagagccggaagaagggatctgctgcgggacctgctgcatctggaccccagatttctggaaagacacctggccggcaccatgagctacttcagcccttaccagctgaccgtgctgcacgttgacggcgaactgtgcgccagagatattcggagcctgatcttcctgagcaaggacaccatcggcagccggtctacccctcagacatttctgcactgggtgtactgcatggaaaacctggacctgctcggccccacagatgtggatgccctgatgtccatgctgagaagcctgagcagagtggacctccagagacaggtgcagacactgatgggactgcacctgagcggacctagccacagccagcactacagacacacccct

SEQ ID NO: 3701 - DNA, 2085 bp, Artificial Sequence
  Synthetic Polynucloetide
atggccttaccagtgaccgccttgctcctgccgctggccttgctgctccacgccgccaggccggaagccgacatctaccagacacctagatacctggtcatcggcaccggcaagaaaatcaccctggaatgcagccagacaatgggccacgacaagatgtactggtatcagcaggaccccggcatggaactgcacctgatccactacagctacggcgtgaacagcaccgagaagggcgatctgtctagcgagagcaccgtgtccagaatcagaaccgagcacttcccactgacactggaaagcgccagacctagccacaccagccagtacctgtgtgcctcttctgaggccagaggactggccgagttcaccgacacacagtatttcggccctggcaccagactgaccgttctcgagatccagaaccctgatcctgccgtgtaccagctgcgggatagcaagagcagcgacaagagcgtgtgtctgttcaccgacttcgacagccagaccaacgtgtcccagagcaaggactccgacgtgtacatcaccgataagtgcgtgctggacatgcggagcatggacttcaagagcaactccgccgtggcctggtccaacaagtccgatttcgcctgcgccaacgccttcaacaacagcattatccccgaggacacattcttcccaagccccgagagcagctgcgacgtgaagctggtggaaaagagcttcgagacagacaccaacctgaacttccagaacctgagcgtgatcggcttcagaatcctgctgctgaaagtggccggctttaacctgctgatgaccctgcggctgtggtccagccgcgccaagagaagcggatctggcgtgaagcagaccctgaatttcgacctgctgaagctggctggcgacgtggaatccaacccaggccctactagtatggactggatttggcgcatccttttccttgtcggcgctgctaccggcgcccattccgggcccatggaccccgacctggaaatcagagccgccttcctgcggcagagaaacacagccctgagaacagaggtggccgagctggaacaagaggtgcagcggctggaaaacgaggtgtcccagtacgagacaagatacggccctctcggaggcggaaaaggatccggcggcggaggatctggcggaggcggatctgggggcggaggctctttcgaacaagttcagcttcaacagcctggcgctgagctggtcaaacctggcgcttctgtgaagatgagctgcaaagccagcggctacgccttcagcagctactggatcaactggatgaagcagaaacccggccagggactcgaatggatcggccaaatctatcccggcgacggcaccgagaacagattcagcgtgaacttccagaaggccgccaagagcttcagcctgaagatcagcgatagccagctgggcgacgccgccatgtacttttgcgcttatagaagcgccgtgaacgcccggctgatgtttggagatggcacacagctggtggtcaagcccaacacgcgtgaggacctgaagaacgtgttcccacctgaggtggccgtgttcgagcctagcgaggccgagatcagccacacccagaaagccaccctcgtgtgcctggctaccggcttctaccccgaccatgtggaactgtcttggtgggtcaacggcaaagaggtgcacagcggcgtgtgtaccgacccccagccactgaaagaacagcccgccctgaacgacagccggtactgcctgagcagcagactgagagtgtccgccaccttctggcagaacccccggaaccacttcagatgccaggtgcagttctacggcctgagcgagaacgacgagtggacccaggacagagccaagcccgtgacccagatcgtgtctgccgaagcctggggcagagccgattgcggctttaccagcgagagctaccagcagggcgtgctgagcgccaccatcctgtacgagatcctgctgggcaaggccaccctgtacgccgtgctggtgtctgccctggtgctgatggctatggtcaagcggaaggacagccgggga

SEQ ID NO: 3702 - DNA, 2751 bp, Artificial Sequence
  Synthetic Polynucloetide
atggccttaccagtgaccgccttgctcctgccgctggccttgctgctccacgccgccaggccggaagccgacatctaccagacacctagatacctggtcatcggcaccggcaagaaaatcaccctggaatgcagccagacaatgggccacgacaagatgtactggtatcagcaggaccccggcatggaactgcacctgatccactacagctacggcgtgaacagcaccgagaagggcgatctgtctagcgagagcaccgtgtccagaatcagaaccgagcacttcccactgacactggaaagcgccagacctagccacaccagccagtacctgtgtgcctcttctgaggccagaggactggccgagttcaccgacacacagtatttcggccctggcaccagactgaccgttctcgagatccagaaccctgatcctgccgtgtaccagctgcgggatagcaagagcagcgacaagagcgtgtgtctgttcaccgacttcgacagccagaccaacgtgtcccagagcaaggactccgacgtgtacatcaccgataagtgcgtgctggacatgcggagcatggacttcaagagcaactccgccgtggcctggtccaacaagtccgatttcgcctgcgccaacgccttcaacaacagcattatccccgaggacacattcttcccaagccccgagagcagctgcgacgtgaagctggtggaaaagagcttcgagacagacaccaacctgaacttccagaacctgagcgtgatcggcttcagaatcctgctgctgaaagtggccggctttaacctgctgatgaccctgcggctgtggtccagccgcgccaagagaagcggatctggcgtgaagcagaccctgaatttcgacctgctgaagctggctggcgacgtggaatccaacccaggccctactagtatggactggatttggcgcatccttttccttgtcggcgctgctaccggcgcccattccgggcccatggaccccgacctggaaatcagagccgccttcctgcggcagagaaacacagccctgagaacagaggtggccgagctggaacaagaggtgcagcggctggaaaacgaggtgtcccagtacgagacaagatacggccctctcggaggcggaaaaggatccggcggcggaggatctggcggaggcggatctgggggcggaggctctttcgaacaagttcagcttcaacagcctggcgctgagctggtcaaacctggcgcttctgtgaagatgagctgcaaagccagcggctacgccttcagcagctactggatcaactggatgaagcagaaacccggccagggactcgaatggatcggccaaatctatcccggcgacggcaccgagaacagattcagcgtgaacttccagaaggccgccaagagcttcagcctgaagatcagcgatagccagctgggcgacgccgccatgtacttttgcgcttatagaagcgccgtgaacgcccggctgatgtttggagatggcacacagctggtggtcaagcccaacacgcgtgaggacctgaagaacgtgttcccacctgaggtggccgtgttcgagcctagcgaggccgagatcagccacacccagaaagccaccctcgtgtgcctggctaccggcttctaccccgaccatgtggaactgtcttggtgggtcaacggcaaagaggtgcacagcggcgtgtgtaccgacccccagccactgaaagaacagcccgccctgaacgacagccggtactgcctgagcagcagactgagagtgtccgccaccttctggcagaacccccggaaccacttcagatgccaggtgcagttctacggcctgagcgagaacgacgagtggacccaggacagagccaagcccgtgacccagatcgtgtctgccgaagcctggggcagagccgattgcggctttaccagcgagagctaccagcagggcgtgctgagcgccaccatcctgtacgagatcctgctgggcaaggccaccctgtacgccgtgctggtgtctgccctggtgctgatggctatggtcaagcggaaggacagccggggaagggccaagcgatctggatctggagcaacaaacttctcactactcaaacaagcaggtgacgtggaggagaatcccgggccttctagaggcgggatccacaccatggctacctacgaggtgctgtgcgaggtggcaagaaagctgggcaccgacgacagagaagtggtgctgttcctgctgaacgtgttcatccctcagcctacactggcccagctgatcggtgcactgagagccctgaaagaggaaggccggctgacctttcctctgctggccgaatgcctgttcagagccggaagaagggatctgctgcgggacctgctgcatctggaccccagatttctggaaagacacctggccggcaccatgagctacttcagcccttaccagctgaccgtgctgcacgttgacggcgaactgtgcgccagagatattcggagcctgatcttcctgagcaaggacaccatcggcagccggtctacccctcagacatttctgcactgggtgtactgcatggaaaacctggacctgctcggccccacagatgtggatgccctgatgtccatgctgagaagcctgagcagagtggacctccagagacaggtgcagacactgatgggactgcacctgagcggacctagccacagccagcactacagacacacccct

SEQ ID NO: 3703 - DNA, 2775 bp, Artificial Sequence
  Synthetic Polynucloetide
atggccttaccagtgaccgccttgctcctgccgctggccttgctgctccacgccgccaggccggaagccgacatctaccagacacctagatacctggtcatcggcaccggcaagaaaatcaccctggaatgcagccagacaatgggccacgacaagatgtactggtatcagcaggaccccggcatggaactgcacctgatccactacagctacggcgtgaacagcaccgagaagggcgatctgtctagcgagagcaccgtgtccagaatcagaaccgagcacttcccactgacactggaaagcgccagacctagccacaccagccagtacctgtgtgcctcttctgaggccagaggactggccgagttcaccgacacacagtatttcggccctggcaccagactgaccgttctcgaggacctgaagaacgtgttcccacctgaggtggccgtgttcgagcctagcgaggccgagatcagccacacccagaaagccaccctcgtgtgcctggctaccggcttctaccccgaccatgtggaactgtcttggtgggtcaacggcaaagaggtgcacagcggcgtgtctaccgacccccagccactgaaagaacagcccgccctgaacgacagccggtactgcctgagcagcagactgagagtgtccgccaccttctggcagaacccccggaaccacttcagatgccaggtgcagttctacggcctgagcgagaacgacgagtggacccaggacagagccaagcccgtgacccagatcgtgtctgccgaagcctggggcagagccgattgcggctttaccagcgagagctaccagcagggcgtgctgagcgccaccatcctgtacgagatcctgctgggcaaggccaccctgtacgccgtgctggtgtctgccctggtgctgatggctatggtcaagcggaaggacagccggggaagggccaagcgatctggatctggagcaacaaacttctcactactcaaacaagcaggtgacgtggaggagaatcccgggcctactagtatggactggatttggcgcatccttttccttgtcggcgctgctaccggcgcccattccgggcccatggaccccgacctggaaatcagagccgccttcctgcggcagagaaacacagccctgagaacagaggtggccgagctggaacaagaggtgcagcggctggaaaacgaggtgtcccagtacgagacaagatacggccctctcggaggcggaaaaggatccggcggcggaggatctggcggaggcggatctgggggcggaggctctttcgaacaagttcagcttcaacagcctggcgctgagctggtcaaacctggcgcttctgtgaagatgagctgcaaagccagcggctacgccttcagcagctactggatcaactggatgaagcagaaacccggccagggactcgaatggatcggccaaatctatcccggcgacggcaccgagaacagattcagcgtgaacttccagaaggccgccaagagcttcagcctgaagatcagcgatagccagctgggcgacgccgccatgtacttttgcgcttatagaagcgccgtgaacgcccggctgatgtttggagatggcacacagctggtggtcaagcccaacacgcgtatccagaaccctgatcctgccgtgtaccagctgcgggatagcaagagcagcgacaagagcgtgtgtctgttcaccgacttcgacagccagaccaacgtgtcccagagcaaggactccgacgtgtacatcaccgataagaccgtgctggacatgcggagcatggacttcaagagcaactccgccgtggcctggtccaacaagtccgatttcgcctgcgccaacgccttcaacaacagcattatccccgaggacacattcttcccaagccccgagagcagctgcgacgtgaagctggtggaaaagagcttcgagacagacaccaacctgaacttccagaacctgagcgtgatcggcttcagaatcctgctgctgaaagtggccggctttaacctgctgatgaccctgcggctgtggtccagccgcgccaagagaagcggatctggcgtgaagcagaccctgaatttcgacctgctgaagctggctggcgacgtggaatccaacccaggcccttctagaggccatatgaccgagtacaagcccacggtgcgcctcgccacccgcgacgacgtccccagggccgtacgcaccctcgccgccgcgttcgccgactaccccgccacgcgccacaccgtcgatccggaccgccacatcgagcgggtcaccgagctgcaagaactcttcctcacgcgcgtcgggctcgacatcggcaaggtgtgggtcgcggacgacggcgccgcggtggcggtctggaccacgccggagagcgtcgaagcgggggcggtgttcgccgagatcggcccgcgcatggccgagttgagcggttcccggctggccgcgcagcaacagatggaaggcctcctggcgccgcaccggcccaaggagcccgcgtggttcctggccaccgtcggcgtctcgcccgaccaccagggcaagggtctgggcagcgccgtcgtgctccccggagtggaggcggccgagcgcgccggggtgcccgccttcctggagacctccgcgccccgcaacctccccttctacgagcggctcggcttcaccgtcaccgccgacgtcgaggtgcccgaaggaccgcgcacctggtgcatgacccgcaagcccggtgcctga

SEQ ID NO: 3704 - DNA, 3021 bp, Artificial Sequence
  Synthetic Polynucloetide
atggccttaccagtgaccgccttgctcctgccgctggccttgctgctccacgccgccaggccggaagccgacatctaccagacacctagatacctggtcatcggcaccggcaagaaaatcaccctggaatgcagccagacaatgggccacgacaagatgtactggtatcagcaggaccccggcatggaactgcacctgatccactacagctacggcgtgaacagcaccgagaagggcgatctgtctagcgagagcaccgtgtccagaatcagaaccgagcacttcccactgacactggaaagcgccagacctagccacaccagccagtacctgtgtgcctcttctgaggccagaggactggccgagttcaccgacacacagtatttcggccctggcaccagactgaccgttctcgaggacctgaagaacgtgttcccacctgaggtggccgtgttcgagcctagcgaggccgagatcagccacacccagaaagccaccctcgtgtgcctggctaccggcttctaccccgaccatgtggaactgtcttggtgggtcaacggcaaagaggtgcacagcggcgtgtctaccgacccccagccactgaaagaacagcccgccctgaacgacagccggtactgcctgagcagcagactgagagtgtccgccaccttctggcagaacccccggaaccacttcagatgccaggtgcagttctacggcctgagcgagaacgacgagtggacccaggacagagccaagcccgtgacccagatcgtgtctgccgaagcctggggcagagccgattgcggctttaccagcgagagctaccagcagggcgtgctgagcgccaccatcctgtacgagatcctgctgggcaaggccaccctgtacgccgtgctggtgtctgccctggtgctgatggctatggtcaagcggaaggacagccggggaagggccaagcgatctggatctggagcaacaaacttctcactactcaaacaagcaggtgacgtggaggagaatcccgggcctactagtatggactggatttggcgcatccttttccttgtcggcgctgctaccggcgcccattccgggcccatggaccccgacctggaaatcagagccgccttcctgcggcagagaaacacagccctgagaacagaggtggccgagctggaacaagaggtgcagcggctggaaaacgaggtgtcccagtacgagacaagatacggccctctcggaggcggaaaaggatccggcggcggaggatctggcggaggcggatctgggggcggaggctctttcgaacaagttcagcttcaacagcctggcgctgagctggtcaaacctggcgcttctgtgaagatgagctgcaaagccagcggctacgccttcagcagctactggatcaactggatgaagcagaaacccggccagggactcgaatggatcggccaaatctatcccggcgacggcaccgagaacagattcagcgtgaacttccagaaggccgccaagagcttcagcctgaagatcagcgatagccagctgggcgacgccgccatgtacttttgcgcttatagaagcgccgtgaacgcccggctgatgtttggagatggcacacagctggtggtcaagcccaacacgcgtgagcagaaactgatctcggaagaggatgggagcggcaccccattcccttctctggcccctcccatcatgctgctggtggacggcaagcagcagatggtggtcgtgtgcctggtgctggatgtggccccacctggactggacagccccatctggtttagcgccggcaatggctctgccctggacgcctttacctacggcccaagccctgccaccgatggcacctggacaaatctggcccacctgagcctgcccagcgaggaactggcttcttgggagcctctcgtgtgccacacaggacctggcgctgagggacacagcagatccacccagcctatgcacctgtctggcgaggccagcaccgccagaacctgtcctcaggaacctctgagaggcacccctggcggagcactgtggctgggagtgctgagactgctgctgttcaagctgctgctgtttgacctgctgctgacctgctcctgtctgtgcgatcctgccggccctctgccttctcctgccaccaccacaagactgagagccctgggcagccacagactgcaccctgccacagagacaggcggcagagaggccacaagcagccctagaccccagcccagagacagaagatggggcgataccccccctggcagaaagcctggatctccagtccgcgccaagagaagcggatctggcgtgaagcagaccctgaatttcgacctgctgaagctggctggcgacgtggaatccaacccaggcccttctagaggccatatgaccgagtacaagcccacggtgcgcctcgccacccgcgacgacgtccccagggccgtacgcaccctcgccgccgcgttcgccgactaccccgccacgcgccacaccgtcgatccggaccgccacatcgagcgggtcaccgagctgcaagaactcttcctcacgcgcgtcgggctcgacatcggcaaggtgtgggtcgcggacgacggcgccgcggtggcggtctggaccacgccggagagcgtcgaagcgggggcggtgttcgccgagatcggcccgcgcatggccgagttgagcggttcccggctggccgcgcagcaacagatggaaggcctcctggcgccgcaccggcccaaggagcccgcgtggttcctggccaccgtcggcgtctcgcccgaccaccagggcaagggtctgggcagcgccgtcgtgctccccggagtggaggcggccgagcgcgccggggtgcccgccttcctggagacctccgcgccccgcaacctccccttctacgagcggctcggcttcaccgtcaccgccgacgtcgaggtgcccgaaggaccgcgcacctggtgcatgacccgcaagcccggtgcctga

SEQ ID NO: 3705 - DNA, 2886 bp, Artificial Sequence
  Synthetic Polynucloetide
atggccttaccagtgaccgccttgctcctgccgctggccttgctgctccacgccgccaggccggaagccgacatctaccagacacctagatacctggtcatcggcaccggcaagaaaatcaccctggaatgcagccagacaatgggccacgacaagatgtactggtatcagcaggaccccggcatggaactgcacctgatccactacagctacggcgtgaacagcaccgagaagggcgatctgtctagcgagagcaccgtgtccagaatcagaaccgagcacttcccactgacactggaaagcgccagacctagccacaccagccagtacctgtgtgcctcttctgaggccagaggactggccgagttcaccgacacacagtatttcggccctggcaccagactgaccgttctcgaggggaaaccaattcccaaccctcttctgggactggattcaaccggcagcggcgacaagcagctggacgccgacgtgtcccccaagcctaccatcttcctgccctctatcgccgagacaaagctccagaaggccggcacctacctgtgcctgctggaaaagttcttcccagatgtgattaagatccactggcaggaaaagaagtccaacaccatcctgggcagccaggaaggcaacaccatgaagaccaacgacacctacatgaagttcagctggctgaccgtgcccgagaagtccctggacaaagaacacagatgcatcgtgcggcacgaaaacaacaagaacggcgtggaccaggaaatcatcttcccacccatcaagaccgatgtgattacaatggaccccaaggacaactgctccaaggacgccaacgataccctgctgctccagctgaccaacaccagcgcctactacatgtacttgttgctgctgctgaagtccgtggtgtacttcgccatcatcacatgctgcctgctgcggagaaccgccttctgctgcaacggcgagaagtctagggccaagcgatctggatctggagcaacaaacttctcactactcaaacaagcaggtgacgtggaggagaatcccgggcctactagtatggactggatttggcgcatccttttccttgtcggcgctgctaccggcgcccattccgggcccatggaccccgacctggaaatcagagccgccttcctgcggcagagaaacacagccctgagaacagaggtggccgagctggaacaagaggtgcagcggctggaaaacgaggtgtcccagtacgagacaagatacggccctctcggaggcggaaaaggatccggcggcggaggatctggcggaggcggatctgggggcggaggctctttcgaacaagttcagcttcaacagcctggcgctgagctggtcaaacctggcgcttctgtgaagatgagctgcaaagccagcggctacgccttcagcagctactggatcaactggatgaagcagaaacccggccagggactcgaatggatcggccaaatctatcccggcgacggcaccgagaacagattcagcgtgaacttccagaaggccgccaagagcttcagcctgaagatcagcgatagccagctgggcgacgccgccatgtacttttgcgcttatagaagcgccgtgaacgcccggctgatgtttggagatggcacacagctggtggtcaagcccaacacgcgtgagcagaaactgatctcggaagaggatgggagcggcagccagcctcacaccaagcccagcgtgttcgtgatgaagaacggcaccaacgtggcctgcctcgtgaaagagttctaccccaaggacatcaggatcaacctggtgtccagcaagaagatcaccgagttcgaccccgccatcgtgatctcccccagcggcaagtacaacgccgtgaagctggggaagtacgaggacagcaacagcgtgacctgctccgtgcagcacgacaacaagaccgtgcacagcaccgactttgaagtgaaaaccgactccaccgaccacgtgaagcccaaagagacagagaacaccaagcagcccagcaagagctgccacaagcccaaggccatcgtgcacaccgagaaagtgaacatgatgagcctgaccgtgctgggcctgcggatgctgttcgccaaaaccgtggccgtgaacttcctgctgaccgccaagctgttcttcctccgcgccaagagaagcggatctggcgtgaagcagaccctgaatttcgacctgctgaagctggctggcgacgtggaatccaacccaggcccttctagaggccatatgaccgagtacaagcccacggtgcgcctcgccacccgcgacgacgtccccagggccgtacgcaccctcgccgccgcgttcgccgactaccccgccacgcgccacaccgtcgatccggaccgccacatcgagcgggtcaccgagctgcaagaactcttcctcacgcgcgtcgggctcgacatcggcaaggtgtgggtcgcggacgacggcgccgcggtggcggtctggaccacgccggagagcgtcgaagcgggggcggtgttcgccgagatcggcccgcgcatggccgagttgagcggttcccggctggccgcgcagcaacagatggaaggcctcctggcgccgcaccggcccaaggagcccgcgtggttcctggccaccgtcggcgtctcgcccgaccaccagggcaagggtctgggcagcgccgtcgtgctccccggagtggaggcggccgagcgcgccggggtgcccgccttcctggagacctccgcgccccgcaacctccccttctacgagcggctcggcttcaccgtcaccgccgacgtcgaggtgcccgaaggaccgcgcacctggtgcatgacccgcaagcccggtgcctga

SEQ ID NO: 3706 - DNA, 2097 bp, Artificial Sequence
  Synthetic Polynucloetide
atggccttaccagtgaccgccttgctcctgccgctggccttgctgctccacgccgccaggccggaagccgacatctaccagacacctagatacctggtcatcggcaccggcaagaaaatcaccctggaatgcagccagacaatgggccacgacaagatgtactggtatcagcaggaccccggcatggaactgcacctgatccactacagctacggcgtgaacagcaccgagaagggcgatctgtctagcgagagcaccgtgtccagaatcagaaccgagcacttcccactgacactggaaagcgccagacctagccacaccagccagtacctgtgtgcctcttctgaggccagaggactggccgagttcaccgacacacagtatttcggccctggcaccagactgaccgttctcgagagccagcctcacaccaagcccagcgtgttcgtgatgaagaacggcaccaacgtggcctgcctcgtgaaagagttctaccccaaggacatcaggatcaacctggtgtccagcaagaagatcaccgagttcgaccccgccatcgtgatctcccccagcggcaagtacaacgccgtgaagctggggaagtacgaggacagcaacagcgtgacctgctccgtgcagcacgacaacaagaccgtgcacagcaccgactttgaagtgaaaaccgactccaccgaccacgtgaagcccaaagagacagagaacaccaagcagcccagcaagagctgccacaagcccaaggccatcgtgcacaccgagaaagtgaacatgatgagcctgaccgtgctgggcctgcggatgctgttcgccaaaaccgtggccgtgaacttcctgctgaccgccaagctgttcttcctcagggccaagcgatctggatctggagcaacaaacttctcactactcaaacaagcaggtgacgtggaggagaatcccgggcctactagtatggactggatttggcgcatccttttccttgtcggcgctgctaccggcgcccattccgggcccatggaccccgacctggaaatcagagccgccttcctgcggcagagaaacacagccctgagaacagaggtggccgagctggaacaagaggtgcagcggctggaaaacgaggtgtcccagtacgagacaagatacggccctctcggaggcggaaaaggatccggcggcggaggatctggcggaggcggatctgggggcggaggctctttcgaacaagttcagcttcaacagcctggcgctgagctggtcaaacctggcgcttctgtgaagatgagctgcaaagccagcggctacgccttcagcagctactggatcaactggatgaagcagaaacccggccagggactcgaatggatcggccaaatctatcccggcgacggcaccgagaacagattcagcgtgaacttccagaaggccgccaagagcttcagcctgaagatcagcgatagccagctgggcgacgccgccatgtacttttgcgcttatagaagcgccgtgaacgcccggctgatgtttggagatggcacacagctggtggtcaagcccaacacgcgtgacaagcagctggacgccgacgtgtcccccaagcctaccatcttcctgccctctatcgccgagacaaagctccagaaggccggcacctacctgtgcctgctggaaaagttcttcccagatgtgattaagatccactggcaggaaaagaagtccaacaccatcctgggcagccaggaaggcaacaccatgaagaccaacgacacctacatgaagttcagctggctgaccgtgcccgagaagtccctggacaaagaacacagatgcatcgtgcggcacgaaaacaacaagaacggcgtggaccaggaaatcatcttcccacccatcaagaccgatgtgattacaatggaccccaaggacaactgctccaaggacgccaacgataccctgctgctccagctgaccaacaccagcgcctactacatgtacttgttgctgctgctgaagtccgtggtgtacttcgccatcatcacatgctgcctgctgcggagaaccgccttctgctgcaacggcgagaagtct

SEQ ID NO: 3707 - DNA, 3306 bp, Artificial Sequence
  Synthetic Polynucloetide
atggccttaccagtgaccgccttgctcctgccgctggccttgctgctccacgccgccaggccggaagccgacatctaccagacacctagatacctggtcatcggcaccggcaagaaaatcaccctggaatgcagccagacaatgggccacgacaagatgtactggtatcagcaggaccccggcatggaactgcacctgatccactacagctacggcgtgaacagcaccgagaagggcgatctgtctagcgagagcaccgtgtccagaatcagaaccgagcacttcccactgacactggaaagcgccagacctagccacaccagccagtacctgtgtgcctcttctgaggccagaggactggccgagttcaccgacacacagtatttcggccctggcaccagactgaccgttggacagcctaaggccaatcctaccgtgacactgttccctccaagcagcgaagaactccaggccaacaaggccacacttgtgtgcctgatctccgacttctaccctggggctgtgacagtggcttggaaggccgatggatctcctgtgaaagccggcgtggaaaccaccaagccatccaagcagagcaacaacaaatacgccgccagctcctacctgagcctgacacctgagcagtggaagtcccacagatcctacagctgccaagtgacccacgaaggcagcaccgtggaaaagacagtggcccctacagagtgcagcggatcccagagcttcggcctgctggaccccaagctgtgctacctgctggatggcatcctgttcatctacggcgtgatcctgaccgccctgttcctgagagtgaagttcagcagaagcgccgacgcccctgcctaccagcagggacagaaccaactgtacaacgagctgaacctgggcagacgggaagagtacgacgtgctggacaagcggagaggcagggaccctgagatgggcggaaagccccagcggagaaagaacccccaggaaggactgtataacgaactccagaaagacaagatggccgaagcctacagcgagatcggcatgaagggcgagcggagaagaggcaagggccacgatggcctgtaccagggcctgagcaccgccaccaaggacacctatgacgccctgcacatgcaggccctgcctccaagaagggccaagcgatctggatctggagcaacaaacttctcactactcaaacaagcaggtgacgtggaggagaatcccgggcctactagtatggactggatttggcgcatccttttccttgtcggcgctgctaccggcgcccattccgggcccatggaccccgacctggaaatcagagccgccttcctgcggcagagaaacacagccctgagaacagaggtggccgagctggaacaagaggtgcagcggctggaaaacgaggtgtcccagtacgagacaagatacggccctctcggaggcggaaaaggatccggcggcggaggatctggcggaggcggatctgggggcggaggctctttcgaacaagttcagcttcaacagcctggcgctgagctggtcaaacctggcgcttctgtgaagatgagctgcaaagccagcggctacgccttcagcagctactggatcaactggatgaagcagaaacccggccagggactcgaatggatcggccaaatctatcccggcgacggcaccgagaacagattcagcgtgaacttccagaaggccgccaagagcttcagcctgaagatcagcgatagccagctgggcgacgccgccatgtacttttgcgcttatagaagcgccgtgaacgcccggctgatgtttggagatggcacacagctggtggtcaagcccaacgcctctacaaagggaccctccgtgtttcctctggctcccagcagcaagtctacaagcggaggaacagccgctctgggctgcctggtcaaggattactttcccgagcctgtgaccgtgtcctggaatagcggagcactgacaagcggcgtgcacacctttccagccgtgctgcaaagcagcggcctgtactctctgagcagcgtggtcacagtgcctagctctagcctgggcacccagacctacatctgcaatgtgaaccacaagcctagcaacaccaaggtggacaagagagtggaacccaagagctgtggtacccagagttttgggttgttggaccctaaattgtgctatctgttggacggaatcctgttcatttacggagtgatcctgaccgcattgttcctgcgggttaagttttccagatccgcagacgcacccgcttaccaacaagggcagaaccaactctacaatgaacttaatttggggcggagggaagagtacgacgttctggacaaaaggaggggacgagatcccgagatgggcggaaagcctcagcgaaggaagaatccgcaagaggggctttataacgaactccagaaagataaaatggcagaagcctatagtgagattgggatgaagggagaaaggaggaggggtaaaggtcacgatgggttgtaccaaggattgagcacagccactaaagatacctatgatgcgctccacatgcaggccctgccgccaagacgcgccaagagaagcggatctggcgtgaagcagaccctgaatttcgacctgctgaagctggctggcgacgtggaatccaacccaggcccttctagaggccatatgaccgagtacaagcccacggtgcgcctcgccacccgcgacgacgtccccagggccgtacgcaccctcgccgccgcgttcgccgactaccccgccacgcgccacaccgtcgatccggaccgccacatcgagcgggtcaccgagctgcaagaactcttcctcacgcgcgtcgggctcgacatcggcaaggtgtgggtcgcggacgacggcgccgcggtggcggtctggaccacgccggagagcgtcgaagcgggggcggtgttcgccgagatcggcccgcgcatggccgagttgagcggttcccggctggccgcgcagcaacagatggaaggcctcctggcgccgcaccggcccaaggagcccgcgtggttcctggccaccgtcggcgtctcgcccgaccaccagggcaagggtctgggcagcgccgtcgtgctccccggagtggaggcggccgagcgcgccggggtgcccgccttcctggagacctccgcgccccgcaacctccccttctacgagcggctcggcttcaccgtcaccgccgacgtcgaggtgcccgaaggaccgcgcacctggtgcatgacccgcaagcccggtgcctga

SEQ ID NO: 3708 - DNA, 2661 bp, Artificial Sequence
  Synthetic Polynucloetide
atggccttaccagtgaccgccttgctcctgccgctggccttgctgctccacgccgccaggccggaagccgacatctaccagacacctagatacctggtcatcggcaccggcaagaaaatcaccctggaatgcagccagacaatgggccacgacaagatgtactggtatcagcaggaccccggcatggaactgcacctgatccactacagctacggcgtgaacagcaccgagaagggcgatctgtctagcgagagcaccgtgtccagaatcagaaccgagcacttcccactgacactggaaagcgccagacctagccacaccagccagtacctgtgtgcctcttctgaggccagaggactggccgagttcaccgacacacagtatttcggccctggcaccagactgaccgttctcgaggacctgaagaacgtgttcccacctgaggtggccgtgttcgagcctagcgaggccgagatcagccacacccagaaagccaccctcgtgtgcctggctaccggcttctaccccgaccatgtggaactgtcttggtgggtcaacggcaaagaggtgcacagcggcgtgtctaccgacccccagccactgaaagaacagcccgccctgaacgacagccggtactgcctgagcagcagactgagagtgtccgccaccttctggcagaacccccggaaccacttcagatgccaggtgcagttctacggcctgagcgagaacgacgagtggacccaggacagagccaagcccgtgacccagatcgtgtctgccgaagcctggggcagagccgattgcggatcccagagcttcggcctgctggaccccaagctgtgctacctgctggatggcatcctgttcatctacggcgtgatcctgaccgccctgttcctgagagtgaagttcagcagaagcgccgacgcccctgcctaccagcagggacagaaccaactgtacaacgagctgaacctgggcagacgggaagagtacgacgtgctggacaagcggagaggcagggaccctgagatgggcggaaagccccagcggagaaagaacccccaggaaggactgtataacgaactccagaaagacaagatggccgaagcctacagcgagatcggcatgaagggcgagcggagaagaggcaagggccacgatggcctgtaccagggcctgagcaccgccaccaaggacacctatgacgccctgcacatgcaggccctgcctccaagaagggccaagcgatctggatctggagcaacaaacttctcactactcaaacaagcaggtgacgtggaggagaatcccgggcctactagtatggactggatttggcgcatccttttccttgtcggcgctgctaccggcgcccattccgggcccatggaccccgacctggaaatcagagccgccttcctgcggcagagaaacacagccctgagaacagaggtggccgagctggaacaagaggtgcagcggctggaaaacgaggtgtcccagtacgagacaagatacggccctctcggaggcggaaaaggatccggcggcggaggatctggcggaggcggatctgggggcggaggctctttcgaacaagttcagcttcaacagcctggcgctgagctggtcaaacctggcgcttctgtgaagatgagctgcaaagccagcggctacgccttcagcagctactggatcaactggatgaagcagaaacccggccagggactcgaatggatcggccaaatctatcccggcgacggcaccgagaacagattcagcgtgaacttccagaaggccgccaagagcttcagcctgaagatcagcgatagccagctgggcgacgccgccatgtacttttgcgcttatagaagcgccgtgaacgcccggctgatgtttggagatggcacacagctggtggtcaagcccaacacgcgtatccagaaccctgatcctgccgtgtaccagctgcgggatagcaagagcagcgacaagagcgtgtgtctgttcaccgacttcgacagccagaccaacgtgtcccagagcaaggactccgacgtgtacatcaccgataagaccgtgctggacatgcggagcatggacttcaagagcaactccgccgtggcctggtccaacaagtccgatttcgcctgcgccaacgccttcaacaacagcattatccccgaggacacattcttcccaagccccgagagcagctgcggtacccagagttttgggttgttggaccctaaattgtgctatctgttggacggaatcctgttcatttacggagtgatcctgaccgcattgttcctgcgggttaagttttccagatccgcagacgcacccgcttaccaacaagggcagaaccaactctacaatgaacttaatttggggcggagggaagagtacgacgttctggacaaaaggaggggacgagatcccgagatgggcggaaagcctcagcgaaggaagaatccgcaagaggggctttataacgaactccagaaagataaaatggcagaagcctatagtgagattgggatgaagggagaaaggaggaggggtaaaggtcacgatgggttgtaccaaggattgagcacagccactaaagatacctatgatgcgctccacatgcaggccctgccgccaaga

SEQ ID NO: 3709 - DNA, 2661 bp, Artificial Sequence
  Synthetic Polynucloetide
atggccttaccagtgaccgccttgctcctgccgctggccttgctgctccacgccgccaggccggaagccgacatctaccagacacctagatacctggtcatcggcaccggcaagaaaatcaccctggaatgcagccagacaatgggccacgacaagatgtactggtatcagcaggaccccggcatggaactgcacctgatccactacagctacggcgtgaacagcaccgagaagggcgatctgtctagcgagagcaccgtgtccagaatcagaaccgagcacttcccactgacactggaaagcgccagacctagccacaccagccagtacctgtgtgcctcttctgaggccagaggactggccgagttcaccgacacacagtatttcggccctggcaccagactgaccgttctcgaggacctgaagaacgtgttcccacctgaggtggccgtgttcgagcctagcaaggccgagatcgcccacacccagaaagccaccctcgtgtgcctggctaccggcttctaccccgaccatgtggaactgtcttggtgggtcaacggcaaagaggtgcacagcggcgtgtgtaccgacccccagccactgaaagaacagcccgccctgaacgacagccggtactgcctgagcagcagactgagagtgtccgccaccttctggcagaacccccggaaccacttcagatgccaggtgcagttctacggcctgagcgagaacgacgagtggacccaggacagagccaagcccgtgacccagatcgtgtctgccgaagcctggggcagagccgattgcggatcccagagcttcggcctgctggaccccaagctgtgctacctgctggatggcatcctgttcatctacggcgtgatcctgaccgccctgttcctgagagtgaagttcagcagaagcgccgacgcccctgcctaccagcagggacagaaccaactgtacaacgagctgaacctgggcagacgggaagagtacgacgtgctggacaagcggagaggcagggaccctgagatgggcggaaagccccagcggagaaagaacccccaggaaggactgtataacgaactccagaaagacaagatggccgaagcctacagcgagatcggcatgaagggcgagcggagaagaggcaagggccacgatggcctgtaccagggcctgagcaccgccaccaaggacacctatgacgccctgcacatgcaggccctgcctccaagaagggccaagcgatctggatctggagcaacaaacttctcactactcaaacaagcaggtgacgtggaggagaatcccgggcctactagtatggactggatttggcgcatccttttccttgtcggcgctgctaccggcgcccattccgggcccatggaccccgacctggaaatcagagccgccttcctgcggcagagaaacacagccctgagaacagaggtggccgagctggaacaagaggtgcagcggctggaaaacgaggtgtcccagtacgagacaagatacggccctctcggaggcggaaaaggatccggcggcggaggatctggcggaggcggatctgggggcggaggctctttcgaacaagttcagcttcaacagcctggcgctgagctggtcaaacctggcgcttctgtgaagatgagctgcaaagccagcggctacgccttcagcagctactggatcaactggatgaagcagaaacccggccagggactcgaatggatcggccaaatctatcccggcgacggcaccgagaacagattcagcgtgaacttccagaaggccgccaagagcttcagcctgaagatcagcgatagccagctgggcgacgccgccatgtacttttgcgcttatagaagcgccgtgaacgcccggctgatgtttggagatggcacacagctggtggtcaagcccaacacgcgtatccagaaccctgatcctgccgtgtaccagctgcgggatagcaagagcagcgacaagagcgtgtgtctgttcaccgacttcgacagccagaccaacgtgtcccagagcaaggactccgacgtgtacatcaccgataagtgcgtgctggacatgcggagcatggacttcaagagcaactccgccgtggcctggtccaacaagtccgatttcgcctgcgccaacgccttcaacaacagcattatccccgaggacacattcttcccaagcagcgacgtgccctgcggtacccagagttttgggttgttggaccctaaattgtgctatctgttggacggaatcctgttcatttacggagtgatcctgaccgcattgttcctgcgggttaagttttccagatccgcagacgcacccgcttaccaacaagggcagaaccaactctacaatgaacttaatttggggcggagggaagagtacgacgttctggacaaaaggaggggacgagatcccgagatgggcggaaagcctcagcgaaggaagaatccgcaagaggggctttataacgaactccagaaagataaaatggcagaagcctatagtgagattgggatgaagggagaaaggaggaggggtaaaggtcacgatgggttgtaccaaggattgagcacagccactaaagatacctatgatgcgctccacatgcaggccctgccgccaaga

SEQ ID NO: 3710 - DNA, 2874 bp, Artificial Sequence
  Synthetic Polynucloetide
atggccttaccagtgaccgccttgctcctgccgctggccttgctgctccacgccgccaggccggaagccgacatctaccagacacctagatacctggtcatcggcaccggcaagaaaatcaccctggaatgcagccagacaatgggccacgacaagatgtactggtatcagcaggaccccggcatggaactgcacctgatccactacagctacggcgtgaacagcaccgagaagggcgatctgtctagcgagagcaccgtgtccagaatcagaaccgagcacttcccactgacactggaaagcgccagacctagccacaccagccagtacctgtgtgcctcttctgaggccagaggactggccgagttcaccgacacacagtatttcggccctggcaccagactgaccgttctcgaggggaaaccaattcccaaccctcttctgggactggattcaaccggcagcggcgaggacctgaagaacgtgttcccacctgaggtggccgtgttcgagcctagcgaggccgagatcagccacacccagaaagccaccctcgtgtgcctggctaccggcttctaccccgaccatgtggaactgtcttggtgggtcaacggcaaagaggtgcacagcggcgtgtctaccgacccccagccactgaaagaacagcccgccctgaacgacagccggtactgcctgagcagcagactgagagtgtccgccaccttctggcagaacccccggaaccacttcagatgccaggtgcagttctacggcctgagcgagaacgacgagtggacccaggacagagccaagcccgtgacccagatcgtgtctgccgaagcctggggcagagccgattgcggatcccagagcttcggcctgctggaccccaagctgtgctacctgctggatggcatcctgttcatctacggcgtgatcctgaccgccctgttcctgagagtgaagttcagcagaagcgccgacgcccctgcctaccagcagggacagaaccaactgtacaacgagctgaacctgggcagacgggaagagtacgacgtgctggacaagcggagaggcagggaccctgagatgggcggaaagccccagcggagaaagaacccccaggaaggactgtataacgaactccagaaagacaagatggccgaagcctacagcgagatcggcatgaagggcgagcggagaagaggcaagggccacgatggcctgtaccagggcctgagcaccgccaccaaggacacctatgacgccctgcacatgcaggccctgcctccaagaagggccaagcgatctggatctggagcaacaaacttctcactactcaaacaagcaggtgacgtggaggagaatcccgggcctactagtatggactggatttggcgcatccttttccttgtcggcgctgctaccggcgcccattccgggcccatggaccccgacctggaaatcagagccgccttcctgcggcagagaaacacagccctgagaacagaggtggccgagctggaacaagaggtgcagcggctggaaaacgaggtgtcccagtacgagacaagatacggccctctcggaggcggaaaaggatccggcggcggaggatctggcggaggcggatctgggggcggaggctctttcgaacaagttcagcttcaacagcctggcgctgagctggtcaaacctggcgcttctgtgaagatgagctgcaaagccagcggctacgccttcagcagctactggatcaactggatgaagcagaaacccggccagggactcgaatggatcggccaaatctatcccggcgacggcaccgagaacagattcagcgtgaacttccagaaggccgccaagagcttcagcctgaagatcagcgatagccagctgggcgacgccgccatgtacttttgcgcttatagaagcgccgtgaacgcccggctgatgtttggagatggcacacagctggtggtcaagcccaacacgcgtgagcagaaactgatctcggaagaggatgggagcggcatccagaaccctgatcctgccgtgtaccagctgcgggatagcaagagcagcgacaagagcgtgtgtctgttcaccgacttcgacagccagaccaacgtgtcccagagcaaggactccgacgtgtacatcaccgataagaccgtgctggacatgcggagcatggacttcaagagcaactccgccgtggcctggtccaacaagtccgatttcgcctgcgccaacgccttcaacaacagcattatccccgaggacacattcttcccaagccccgagagcagctgcggtacccagagttttgggttgttggaccctaaattgtgctatctgttggacggaatcctgttcatttacggagtgatcctgaccgcattgttcctgaggagcaagcggtcacggctgctccacagcgattacatgaatatgacaccacgaagaccgggtcctactcgcaaacactaccaaccctacgcacctccccgcgactttgcagcgtaccgatctcgggttaagttttccagatccgcagacgcacccgcttaccaacaagggcagaaccaactctacaatgaacttaatttggggcggagggaagagtacgacgttctggacaaaaggaggggacgagatcccgagatgggcggaaagcctcagcgaaggaagaatccgcaagaggggctttataacgaactccagaaagataaaatggcagaagcctatagtgagattgggatgaagggagaaaggaggaggggtaaaggtcacgatgggttgtaccaaggattgagcacagccactaaagatacctatgatgcgctccacatgcaggccctgccgccaaga

SEQ ID NO: 3711 - DNA, 2997 bp, Artificial Sequence
  Synthetic Polynucloetide
atggccttaccagtgaccgccttgctcctgccgctggccttgctgctccacgccgccaggccggaagccgacatctaccagacacctagatacctggtcatcggcaccggcaagaaaatcaccctggaatgcagccagacaatgggccacgacaagatgtactggtatcagcaggaccccggcatggaactgcacctgatccactacagctacggcgtgaacagcaccgagaagggcgatctgtctagcgagagcaccgtgtccagaatcagaaccgagcacttcccactgacactggaaagcgccagacctagccacaccagccagtacctgtgtgcctcttctgaggccagaggactggccgagttcaccgacacacagtatttcggccctggcaccagactgaccgttctcgaggggaaaccaattcccaaccctcttctgggactggattcaaccggcagcggcgaggacctgaagaacgtgttcccacctgaggtggccgtgttcgagcctagcgaggccgagatcagccacacccagaaagccaccctcgtgtgcctggctaccggcttctaccccgaccatgtggaactgtcttggtgggtcaacggcaaagaggtgcacagcggcgtgtctaccgacccccagccactgaaagaacagcccgccctgaacgacagccggtactgcctgagcagcagactgagagtgtccgccaccttctggcagaacccccggaaccacttcagatgccaggtgcagttctacggcctgagcgagaacgacgagtggacccaggacagagccaagcccgtgacccagatcgtgtctgccgaagcctggggcagagccgattgcggatcccagagcttcggcctgctggaccccaagctgtgctacctgctggatggcatcctgttcatctacggcgtgatcctgaccgccctgttcctgaggagtaagaggagcaggctcctgcacagtgactacatgaacatgactccacgccgccccggacccacccgcaagcattaccagccctatgccccaccacgcgacttcgcagcctatcgctccagagtgaagttcagcagaagcgccgacgcccctgcctaccagcagggacagaaccaactgtacaacgagctgaacctgggcagacgggaagagtacgacgtgctggacaagcggagaggcagggaccctgagatgggcggaaagccccagcggagaaagaacccccaggaaggactgtataacgaactccagaaagacaagatggccgaagcctacagcgagatcggcatgaagggcgagcggagaagaggcaagggccacgatggcctgtaccagggcctgagcaccgccaccaaggacacctatgacgccctgcacatgcaggccctgcctccaagaagggccaagcgatctggatctggagcaacaaacttctcactactcaaacaagcaggtgacgtggaggagaatcccgggcctactagtatggactggatttggcgcatccttttccttgtcggcgctgctaccggcgcccattccgggcccatggaccccgacctggaaatcagagccgccttcctgcggcagagaaacacagccctgagaacagaggtggccgagctggaacaagaggtgcagcggctggaaaacgaggtgtcccagtacgagacaagatacggccctctcggaggcggaaaaggatccggcggcggaggatctggcggaggcggatctgggggcggaggctctttcgaacaagttcagcttcaacagcctggcgctgagctggtcaaacctggcgcttctgtgaagatgagctgcaaagccagcggctacgccttcagcagctactggatcaactggatgaagcagaaacccggccagggactcgaatggatcggccaaatctatcccggcgacggcaccgagaacagattcagcgtgaacttccagaaggccgccaagagcttcagcctgaagatcagcgatagccagctgggcgacgccgccatgtacttttgcgcttatagaagcgccgtgaacgcccggctgatgtttggagatggcacacagctggtggtcaagcccaacacgcgtgagcagaaactgatctcggaagaggatgggagcggcatccagaaccctgatcctgccgtgtaccagctgcgggatagcaagagcagcgacaagagcgtgtgtctgttcaccgacttcgacagccagaccaacgtgtcccagagcaaggactccgacgtgtacatcaccgataagaccgtgctggacatgcggagcatggacttcaagagcaactccgccgtggcctggtccaacaagtccgatttcgcctgcgccaacgccttcaacaacagcattatccccgaggacacattcttcccaagccccgagagcagctgcggtacccagagttttgggttgttggaccctaaattgtgctatctgttggacggaatcctgttcatttacggagtgatcctgaccgcattgttcctgaggagcaagcggtcacggctgctccacagcgattacatgaatatgacaccacgaagaccgggtcctactcgcaaacactaccaaccctacgcacctccccgcgactttgcagcgtaccgatctcgggttaagttttccagatccgcagacgcacccgcttaccaacaagggcagaaccaactctacaatgaacttaatttggggcggagggaagagtacgacgttctggacaaaaggaggggacgagatcccgagatgggcggaaagcctcagcgaaggaagaatccgcaagaggggctttataacgaactccagaaagataaaatggcagaagcctatagtgagattgggatgaagggagaaaggaggaggggtaaaggtcacgatgggttgtaccaaggattgagcacagccactaaagatacctatgatgcgctccacatgcaggccctgccgccaaga

SEQ ID NO: 3712 - DNA, 2880 bp, Artificial Sequence
  Synthetic Polynucloetide
atggccttaccagtgaccgccttgctcctgccgctggccttgctgctccacgccgccaggccggaagccgacatctaccagacacctagatacctggtcatcggcaccggcaagaaaatcaccctggaatgcagccagacaatgggccacgacaagatgtactggtatcagcaggaccccggcatggaactgcacctgatccactacagctacggcgtgaacagcaccgagaagggcgatctgtctagcgagagcaccgtgtccagaatcagaaccgagcacttcccactgacactggaaagcgccagacctagccacaccagccagtacctgtgtgcctcttctgaggccagaggactggccgagttcaccgacacacagtatttcggccctggcaccagactgaccgttctcgaggggaaaccaattcccaaccctcttctgggactggattcaaccggcagcggcgaggacctgaagaacgtgttcccacctgaggtggccgtgttcgagcctagcgaggccgagatcagccacacccagaaagccaccctcgtgtgcctggctaccggcttctaccccgaccatgtggaactgtcttggtgggtcaacggcaaagaggtgcacagcggcgtgtctaccgacccccagccactgaaagaacagcccgccctgaacgacagccggtactgcctgagcagcagactgagagtgtccgccaccttctggcagaacccccggaaccacttcagatgccaggtgcagttctacggcctgagcgagaacgacgagtggacccaggacagagccaagcccgtgacccagatcgtgtctgccgaagcctggggcagagccgattgcggatcccagagcttcggcctgctggaccccaagctgtgctacctgctggatggcatcctgttcatctacggcgtgatcctgaccgccctgttcctgagagtgaagttcagcagaagcgccgacgcccctgcctaccagcagggacagaaccaactgtacaacgagctgaacctgggcagacgggaagagtacgacgtgctggacaagcggagaggcagggaccctgagatgggcggaaagccccagcggagaaagaacccccaggaaggactgtataacgaactccagaaagacaagatggccgaagcctacagcgagatcggcatgaagggcgagcggagaagaggcaagggccacgatggcctgtaccagggcctgagcaccgccaccaaggacacctatgacgccctgcacatgcaggccctgcctccaagaagggccaagcgatctggatctggagcaacaaacttctcactactcaaacaagcaggtgacgtggaggagaatcccgggcctactagtatggactggatttggcgcatccttttccttgtcggcgctgctaccggcgcccattccgggcccatggaccccgacctggaaatcagagccgccttcctgcggcagagaaacacagccctgagaacagaggtggccgagctggaacaagaggtgcagcggctggaaaacgaggtgtcccagtacgagacaagatacggccctctcggaggcggaaaaggatccggcggcggaggatctggcggaggcggatctgggggcggaggctctttcgaacaagttcagcttcaacagcctggcgctgagctggtcaaacctggcgcttctgtgaagatgagctgcaaagccagcggctacgccttcagcagctactggatcaactggatgaagcagaaacccggccagggactcgaatggatcggccaaatctatcccggcgacggcaccgagaacagattcagcgtgaacttccagaaggccgccaagagcttcagcctgaagatcagcgatagccagctgggcgacgccgccatgtacttttgcgcttatagaagcgccgtgaacgcccggctgatgtttggagatggcacacagctggtggtcaagcccaacacgcgtgagcagaaactgatctcggaagaggatctggggagcggcatccagaaccctgatcctgccgtgtaccagctgcgggatagcaagagcagcgacaagagcgtgtgtctgttcaccgacttcgacagccagaccaacgtgtcccagagcaaggactccgacgtgtacatcaccgataagaccgtgctggacatgcggagcatggacttcaagagcaactccgccgtggcctggtccaacaagtccgatttcgcctgcgccaacgccttcaacaacagcattatccccgaggacacattcttcccaagccccgagagcagctgcggtacccagagttttgggttgttggaccctaaattgtgctatctgttggacggaatcctgttcatttacggagtgatcctgaccgcattgttcctgaagagaggccggaagaagctgctgtacatcttcaagcagcctttcatgcggcccgtgcagaccacccaggaagaggacggctgctcctgccggttccccgaggaagaagaaggcggctgcgagctgcgggttaagttttccagatccgcagacgcacccgcttaccaacaagggcagaaccaactctacaatgaacttaatttggggcggagggaagagtacgacgttctggacaaaaggaggggacgagatcccgagatgggcggaaagcctcagcgaaggaagaatccgcaagaggggctttataacgaactccagaaagataaaatggcagaagcctatagtgagattgggatgaagggagaaaggaggaggggtaaaggtcacgatgggttgtaccaaggattgagcacagccactaaagatacctatgatgcgctccacatgcaggccctgccgccaaga

SEQ ID NO: 3713 - DNA, 3006 bp, Artificial Sequence
  Synthetic Polynucloetide
atggccttaccagtgaccgccttgctcctgccgctggccttgctgctccacgccgccaggccggaagccgacatctaccagacacctagatacctggtcatcggcaccggcaagaaaatcaccctggaatgcagccagacaatgggccacgacaagatgtactggtatcagcaggaccccggcatggaactgcacctgatccactacagctacggcgtgaacagcaccgagaagggcgatctgtctagcgagagcaccgtgtccagaatcagaaccgagcacttcccactgacactggaaagcgccagacctagccacaccagccagtacctgtgtgcctcttctgaggccagaggactggccgagttcaccgacacacagtatttcggccctggcaccagactgaccgttctcgaggggaaaccaattcccaaccctcttctgggactggattcaaccggcagcggcgaggacctgaagaacgtgttcccacctgaggtggccgtgttcgagcctagcgaggccgagatcagccacacccagaaagccaccctcgtgtgcctggctaccggcttctaccccgaccatgtggaactgtcttggtgggtcaacggcaaagaggtgcacagcggcgtgtctaccgacccccagccactgaaagaacagcccgccctgaacgacagccggtactgcctgagcagcagactgagagtgtccgccaccttctggcagaacccccggaaccacttcagatgccaggtgcagttctacggcctgagcgagaacgacgagtggacccaggacagagccaagcccgtgacccagatcgtgtctgccgaagcctggggcagagccgattgcggatcccagagcttcggcctgctggaccccaagctgtgctacctgctggatggcatcctgttcatctacggcgtgatcctgaccgccctgttcctgaaacggggcagaaagaaactcctgtatatattcaaacaaccatttatgagaccagtacaaactactcaagaggaagatggctgtagctgccgatttccagaagaagaagaaggaggatgtgaactgagagtgaagttcagcagaagcgccgacgcccctgcctaccagcagggacagaaccaactgtacaacgagctgaacctgggcagacgggaagagtacgacgtgctggacaagcggagaggcagggaccctgagatgggcggaaagccccagcggagaaagaacccccaggaaggactgtataacgaactccagaaagacaagatggccgaagcctacagcgagatcggcatgaagggcgagcggagaagaggcaagggccacgatggcctgtaccagggcctgagcaccgccaccaaggacacctatgacgccctgcacatgcaggccctgcctccaagaagggccaagcgatctggatctggagcaacaaacttctcactactcaaacaagcaggtgacgtggaggagaatcccgggcctactagtatggactggatttggcgcatccttttccttgtcggcgctgctaccggcgcccattccgggcccatggaccccgacctggaaatcagagccgccttcctgcggcagagaaacacagccctgagaacagaggtggccgagctggaacaagaggtgcagcggctggaaaacgaggtgtcccagtacgagacaagatacggccctctcggaggcggaaaaggatccggcggcggaggatctggcggaggcggatctgggggcggaggctctttcgaacaagttcagcttcaacagcctggcgctgagctggtcaaacctggcgcttctgtgaagatgagctgcaaagccagcggctacgccttcagcagctactggatcaactggatgaagcagaaacccggccagggactcgaatggatcggccaaatctatcccggcgacggcaccgagaacagattcagcgtgaacttccagaaggccgccaagagcttcagcctgaagatcagcgatagccagctgggcgacgccgccatgtacttttgcgcttatagaagcgccgtgaacgcccggctgatgtttggagatggcacacagctggtggtcaagcccaacacgcgtgagcagaaactgatctcggaagaggatctggggagcggcatccagaaccctgatcctgccgtgtaccagctgcgggatagcaagagcagcgacaagagcgtgtgtctgttcaccgacttcgacagccagaccaacgtgtcccagagcaaggactccgacgtgtacatcaccgataagaccgtgctggacatgcggagcatggacttcaagagcaactccgccgtggcctggtccaacaagtccgatttcgcctgcgccaacgccttcaacaacagcattatccccgaggacacattcttcccaagccccgagagcagctgcggtacccagagttttgggttgttggaccctaaattgtgctatctgttggacggaatcctgttcatttacggagtgatcctgaccgcattgttcctgaagagaggccggaagaagctgctgtacatcttcaagcagcctttcatgcggcccgtgcagaccacccaggaagaggacggctgctcctgccggttccccgaggaagaagaaggcggctgcgagctgcgggttaagttttccagatccgcagacgcacccgcttaccaacaagggcagaaccaactctacaatgaacttaatttggggcggagggaagagtacgacgttctggacaaaaggaggggacgagatcccgagatgggcggaaagcctcagcgaaggaagaatccgcaagaggggctttataacgaactccagaaagataaaatggcagaagcctatagtgagattgggatgaagggagaaaggaggaggggtaaaggtcacgatgggttgtaccaaggattgagcacagccactaaagatacctatgatgcgctccacatgcaggccctgccgccaaga

SEQ ID NO: 3714 - DNA, 2679 bp, Artificial Sequence
  Synthetic Polynucloetide
atggccttaccagtgaccgccttgctcctgccgctggccttgctgctccacgccgccaggccggaagccgacatctaccagacacctagatacctggtcatcggcaccggcaagaaaatcaccctggaatgcagccagacaatgggccacgacaagatgtactggtatcagcaggaccccggcatggaactgcacctgatccactacagctacggcgtgaacagcaccgagaagggcgatctgtctagcgagagcaccgtgtccagaatcagaaccgagcacttcccactgacactggaaagcgccagacctagccacaccagccagtacctgtgtgcctcttctgaggccagaggactggccgagttcaccgacacacagtatttcggccctggcaccagactgaccgttctcgagcagagcttcggcctgctggaccccaagctgtgctacctgctggatggcatcctgttcatctacggcgtgatcctgaccgccctgttcctgagagtgaagttcagcagaagcgccgacgcccctgcctaccagcagggacagaaccaactgtacaacgagctgaacctgggcagacgggaagagtacgacgtgctggacaagcggagaggcagggaccctgagatgggcggaaagccccagcggagaaagaacccccaggaaggactgtataacgaactccagaaagacaagatggccgaagcctacagcgagatcggcatgaagggcgagcggagaagaggcaagggccacgatggcctgtaccagggcctgagcaccgccaccaaggacacctatgacgccctgcacatgcaggccctgcctccaagaagggccaagcgatctggatctggagcaacaaacttctcactactcaaacaagcaggtgacgtggaggagaatcccgggcctactagtatggactggatttggcgcatccttttccttgtcggcgctgctaccggcgcccattccgggcccatggaccccgacctggaaatcagagccgccttcctgcggcagagaaacacagccctgagaacagaggtggccgagctggaacaagaggtgcagcggctggaaaacgaggtgtcccagtacgagacaagatacggccctctcggaggcggaaaaggatccggcggcggaggatctggcggaggcggatctgggggcggaggctctttcgaacaagttcagcttcaacagcctggcgctgagctggtcaaacctggcgcttctgtgaagatgagctgcaaagccagcggctacgccttcagcagctactggatcaactggatgaagcagaaacccggccagggactcgaatggatcggccaaatctatcccggcgacggcaccgagaacagattcagcgtgaacttccagaaggccgccaagagcttcagcctgaagatcagcgatagccagctgggcgacgccgccatgtacttttgcgcttatagaagcgccgtgaacgcccggctgatgtttggagatggcacacagctggtggtcaagcccaacacgcgtcagagttttgggttgttggaccctaaattgtgctatctgttggacggaatcctgttcatttacggagtgatcctgaccgcattgttcctgcgggttaagttttccagatccgcagacgcacccgcttaccaacaagggcagaaccaactctacaatgaacttaatttggggcggagggaagagtacgacgttctggacaaaaggaggggacgagatcccgagatgggcggaaagcctcagcgaaggaagaatccgcaagaggggctttataacgaactccagaaagataaaatggcagaagcctatagtgagattgggatgaagggagaaaggaggaggggtaaaggtcacgatgggttgtaccaaggattgagcacagccactaaagatacctatgatgcgctccacatgcaggccctgccgccaagacgcgccaagagaagcggatctggcgtgaagcagaccctgaatttcgacctgctgaagctggctggcgacgtggaatccaacccaggcccttctagaggccatatgaccgagtacaagcccacggtgcgcctcgccacccgcgacgacgtccccagggccgtacgcaccctcgccgccgcgttcgccgactaccccgccacgcgccacaccgtcgatccggaccgccacatcgagcgggtcaccgagctgcaagaactcttcctcacgcgcgtcgggctcgacatcggcaaggtgtgggtcgcggacgacggcgccgcggtggcggtctggaccacgccggagagcgtcgaagcgggggcggtgttcgccgagatcggcccgcgcatggccgagttgagcggttcccggctggccgcgcagcaacagatggaaggcctcctggcgccgcaccggcccaaggagcccgcgtggttcctggccaccgtcggcgtctcgcccgaccaccagggcaagggtctgggcagcgccgtcgtgctccccggagtggaggcggccgagcgcgccggggtgcccgccttcctggagacctccgcgccccgcaacctccccttctacgagcggctcggcttcaccgtcaccgccgacgtcgaggtgcccgaaggaccgcgcacctggtgcatgacccgcaagcccggtgcctga

SEQ ID NO: 3715 - DNA, 2151 bp, Artificial Sequence
  Synthetic Polynucloetide
atggccttaccagtgaccgccttgctcctgccgctggccttgctgctccacgccgccaggccggaagccgacatctaccagacacctagatacctggtcatcggcaccggcaagaaaatcaccctggaatgcagccagacaatgggccacgacaagatgtactggtatcagcaggaccccggcatggaactgcacctgatccactacagctacggcgtgaacagcaccgagaagggcgatctgtctagcgagagcaccgtgtccagaatcagaaccgagcacttcccactgacactggaaagcgccagacctagccacaccagccagtacctgtgtgcctcttctgaggccagaggactggccgagttcaccgacacacagtatttcggccctggcaccagactgaccgttctcgagggacagcctaaggccaatcctaccgtgacactgttccctccaagcagcgaagaactccaggccaacaaggccacacttgtgtgcctgatctccgacttctaccctggggctgtgacagtggcttggaaggccgatggatctcctgtgaaagccggcgtggaaaccaccaagccatccaagcagagcaacaacaaatacgccgccagctcctacctgagcctgacacctgagcagtggaagtcccacagatcctacagctgccaagtgacccacgaaggcagcaccgtggaaaagacagtggcccctacagagtgcagccccatcaagaccgatgtgattacaatggaccccaaggacaactgctccaaggacgccaacgataccctgctgctccagctgaccaacaccagcgcctactacatgtacttgttgctgctgctgaagtccgtggtgtacttcgccatcatcacatgctgcctgctgcggagaaccgccttctgctgcaacggcgagaagtctagggccaagcgatctggatctggagcaacaaacttctcactactcaaacaagcaggtgacgtggaggagaatcccgggcctactagtatggactggatttggcgcatccttttccttgtcggcgctgctaccggcgcccattccgggcccatggaccccgacctggaaatcagagccgccttcctgcggcagagaaacacagccctgagaacagaggtggccgagctggaacaagaggtgcagcggctggaaaacgaggtgtcccagtacgagacaagatacggccctctcggaggcggaaaaggatccggcggcggaggatctggcggaggcggatctgggggcggaggctctttcgaacaagttcagcttcaacagcctggcgctgagctggtcaaacctggcgcttctgtgaagatgagctgcaaagccagcggctacgccttcagcagctactggatcaactggatgaagcagaaacccggccagggactcgaatggatcggccaaatctatcccggcgacggcaccgagaacagattcagcgtgaacttccagaaggccgccaagagcttcagcctgaagatcagcgatagccagctgggcgacgccgccatgtacttttgcgcttatagaagcgccgtgaacgcccggctgatgtttggagatggcacacagctggtggtcaagcccaacacgcgtgcctctacaaagggaccctccgtgtttcctctggctcccagcagcaagtctacaagcggaggaacagccgctctgggctgcctggtcaaggattactttcccgagcctgtgaccgtgtcctggaatagcggagcactgacaagcggcgtgcacacctttccagccgtgctgcaaagcagcggcctgtactctctgagcagcgtggtcacagtgcctagctctagcctgggcacccagacctacatctgcaatgtgaaccacaagcctagcaacaccaaggtggacaagagagtggaacccaagagctgtgaagtgaaaaccgactccaccgaccacgtgaagcccaaagagacagagaacaccaagcagcccagcaagagctgccacaagcccaaggccatcgtgcacaccgagaaagtgaacatgatgagcctgaccgtgctgggcctgcggatgctgttcgccaaaaccgtggccgtgaacttcctgctgaccgccaagctgttcttcctc

SEQ ID NO: 3716 - DNA, 2085 bp, Artificial Sequence
  Synthetic Polynucloetide
atggccttaccagtgaccgccttgctcctgccgctggccttgctgctccacgccgccaggccggaagccgacatctaccagacacctagatacctggtcatcggcaccggcaagaaaatcaccctggaatgcagccagacaatgggccacgacaagatgtactggtatcagcaggaccccggcatggaactgcacctgatccactacagctacggcgtgaacagcaccgagaagggcgatctgtctagcgagagcaccgtgtccagaatcagaaccgagcacttcccactgacactggaaagcgccagacctagccacaccagccagtacctgtgtgcctcttctgaggccagaggactggccgagttcaccgacacacagtatttcggccctggcaccagactgaccgttctcgagggacagcctaaggccaatcctaccgtgacactgttccctccaagcagcgaagaactccaggccaacaaggccacacttgtgtgcctgatctccgacttctaccctggggctgtgacagtggcttggaaggccgatggatctcctgtgaaagccggcgtggaaaccaccaagccatccaagcagagcaacaacaaatacgccgccagctcctacctgagcctgacacctgagcagtggaagtcccacagatcctacagctgccaagtgacccacgaaggcagcaccgtggaaaagacagtggcccctacagagtgcagcggcagagccgattgcggcatcaccagcgccagctaccaccagggcgtgctgagcgccaccatcctgtacgagatcctgctgggcaaggccaccctgtacgccgtgctggtgtctgccctggtgctgatggctatggtcaagcggaaggacagccggggaagggccaagcgatctggatctggagcaacaaacttctcactactcaaacaagcaggtgacgtggaggagaatcccgggcctactagtatggactggatttggcgcatccttttccttgtcggcgctgctaccggcgcccattccgggcccatggaccccgacctggaaatcagagccgccttcctgcggcagagaaacacagccctgagaacagaggtggccgagctggaacaagaggtgcagcggctggaaaacgaggtgtcccagtacgagacaagatacggccctctcggaggcggaaaaggatccggcggcggaggatctggcggaggcggatctgggggcggaggctctttcgaacaagttcagcttcaacagcctggcgctgagctggtcaaacctggcgcttctgtgaagatgagctgcaaagccagcggctacgccttcagcagctactggatcaactggatgaagcagaaacccggccagggactcgaatggatcggccaaatctatcccggcgacggcaccgagaacagattcagcgtgaacttccagaaggccgccaagagcttcagcctgaagatcagcgatagccagctgggcgacgccgccatgtacttttgcgcttatagaagcgccgtgaacgcccggctgatgtttggagatggcacacagctggtggtcaagcccaacacgcgtgcctctacaaagggaccctccgtgtttcctctggctcccagcagcaagtctacaagcggaggaacagccgctctgggctgcctggtcaaggattactttcccgagcctgtgaccgtgtcctggaatagcggagcactgacaagcggcgtgcacacctttccagccgtgctgcaaagcagcggcctgtactctctgagcagcgtggtcacagtgcctagctctagcctgggcacccagacctacatctgcaatgtgaaccacaagcctagcaacaccaaggtggacaagagagtggaacccaagagctgtatccccgaggacacattcttcccaagcagcgacgtgccctgcgacgtgaagctggtggaaaagagcttcgagacagacaccaacctgaacttccagaacctgagcgtgatcggcttcagaatcctgctgctgaaagtggccggctttaacctgctgatgaccctgcggctgtggtccagc

SEQ ID NO: 3717 - DNA, 2085 bp, Artificial Sequence
  Synthetic Polynucloetide
atggccttaccagtgaccgccttgctcctgccgctggccttgctgctccacgccgccaggccggaagccgacatctaccagacacctagatacctggtcatcggcaccggcaagaaaatcaccctggaatgcagccagacaatgggccacgacaagatgtactggtatcagcaggaccccggcatggaactgcacctgatccactacagctacggcgtgaacagcaccgagaagggcgatctgtctagcgagagcaccgtgtccagaatcagaaccgagcacttcccactgacactggaaagcgccagacctagccacaccagccagtacctgtgtgcctcttctgaggccagaggactggccgagttcaccgacacacagtatttcggccctggcaccagactgaccgttctcgagggacagcctaaggccaatcctaccgtgacactgttccctccaagcagcgaagaactccaggccaacaaggccacacttgtgtgcctgatctccgacttctaccctggggctgtgacagtggcttggaaggccgatggatctcctgtgaaagccggcgtggaaaccaccaagccatccaagcagagcaacaacaaatacgccgccagctcctacctgagcctgacacctgagcagtggaagtcccacagatcctacagctgccaagtgacccacgaaggcagcaccgtggaaaagacagtggcccctacagagtgcagcggcagagccgattgcggctttaccagcgagagctaccagcagggcgtgctgagcgccaccatcctgtacgagatcctgctgggcaaggccaccctgtacgccgtgctggtgtctgccctggtgctgatggctatggtcaagcggaaggacagccggggaagggccaagcgatctggatctggagcaacaaacttctcactactcaaacaagcaggtgacgtggaggagaatcccgggcctactagtatggactggatttggcgcatccttttccttgtcggcgctgctaccggcgcccattccgggcccatggaccccgacctggaaatcagagccgccttcctgcggcagagaaacacagccctgagaacagaggtggccgagctggaacaagaggtgcagcggctggaaaacgaggtgtcccagtacgagacaagatacggccctctcggaggcggaaaaggatccggcggcggaggatctggcggaggcggatctgggggcggaggctctttcgaacaagttcagcttcaacagcctggcgctgagctggtcaaacctggcgcttctgtgaagatgagctgcaaagccagcggctacgccttcagcagctactggatcaactggatgaagcagaaacccggccagggactcgaatggatcggccaaatctatcccggcgacggcaccgagaacagattcagcgtgaacttccagaaggccgccaagagcttcagcctgaagatcagcgatagccagctgggcgacgccgccatgtacttttgcgcttatagaagcgccgtgaacgcccggctgatgtttggagatggcacacagctggtggtcaagcccaacacgcgtgcctctacaaagggaccctccgtgtttcctctggctcccagcagcaagtctacaagcggaggaacagccgctctgggctgcctggtcaaggattactttcccgagcctgtgaccgtgtcctggaatagcggagcactgacaagcggcgtgcacacctttccagccgtgctgcaaagcagcggcctgtactctctgagcagcgtggtcacagtgcctagctctagcctgggcacccagacctacatctgcaatgtgaaccacaagcctagcaacaccaaggtggacaagagagtggaacccaagagctgtatccccgaggacacattcttcccaagccccgagagcagctgcgacgtgaagctggtggaaaagagcttcgagacagacaccaacctgaacttccagaacctgagcgtgatcggcttcagaatcctgctgctgaaagtggccggctttaacctgctgatgaccctgcggctgtggtccagc

SEQ ID NO: 3718 - DNA, 1575 bp, Artificial Sequence
  Synthetic Polynucloetide
atggactggatttggcgcatccttttccttgtcggcgctgctaccggcgcccattccgggcccatggaccccgacctggaaatcagagccgccttcctgcggcagagaaacacagccctgagaacagaggtggccgagctggaacaagaggtgcagcggctggaaaacgaggtgtcccagtacgagacaagatacggccctctcggaggcggaaaaggatccggcggcggaggatctggcggaggcggatctgggggcggaggctctttcgaacaagttcagcttcaacagcctggcgctgagctggtcaaacctggcgcttctgtgaagatgagctgcaaagccagcggctacgccttcagcagctactggatcaactggatgaagcagaaacccggccagggactcgaatggatcggccaaatctatcccggcgacggcaccgagaacagattcagcgtgaacttccagaaggccgccaagagcttcagcctgaagatcagcgatagccagctgggcgacgccgccatgtacttttgcgcttatagaagcgccgtgaacgcccggctgatgtttggagatggcacacagctggtggtcaagcccaacggcggaggcggaagtggaggcggaggatctggcggcggaggctctgaagccgacatctaccagacacctagatacctggtcatcggcaccggcaagaaaatcaccctggaatgcagccagacaatgggccacgacaagatgtactggtatcagcaggaccccggcatggaactgcacctgatccactacagctacggcgtgaacagcaccgagaagggcgatctgtctagcgagagcaccgtgtccagaatcagaaccgagcacttcccactgacactggaaagcgccagacctagccacaccagccagtacctgtgtgcctcttctgaggccagaggactggccgagttcaccgacacacagtatttcggccctggcaccagactgaccgttacgcgtggcggaggcagcgacggtaacgaggagatgggaggaatcactcaaaccccttacaaagtctcaatttcaggaacaactgttatccttacatgtccccagtatcctggcagcgagatcctttggcagcataacgacaagaatatagggggagatgaagacgataagaatatcggatctgacgaggatcacttgagcctgaaagagttctccgagcttgaacaaagcggatattatgtgtgctatccgcgcgggtcaaagccggaagacgctaacttttacctttatctccgagccagagtgtgcgaaaattgcatggaaatggacgttatgtccgttgctacaatagttatcgtagatatatgcatcacgggtggactgcttctgctggtttattattggtccaagaatagaaaggccaaagctaaacccgtgaccagaggcgctggcgcaggcggaaggcaaaggggacaaaacaaagaacggccaccaccagtgccaaatccagattatgagcctattcggaaaggacagagggacctgtactctggcctgaatcagagaagaatc

SEQ ID NO: 3719 - DNA, 1470 bp, Artificial Sequence
  Synthetic Polynucloetide
atggactggatttggcgcatccttttccttgtcggcgctgctaccggcgcccattccgggcccatggaccccgacctggaaatcagagccgccttcctgcggcagagaaacacagccctgagaacagaggtggccgagctggaacaagaggtgcagcggctggaaaacgaggtgtcccagtacgagacaagatacggccctctcggaggcggaaaaggatccggcggcggaggatctggcggaggcggatctgggggcggaggctctttcgaacaagttcagcttcaacagcctggcgctgagctggtcaaacctggcgcttctgtgaagatgagctgcaaagccagcggctacgccttcagcagctactggatcaactggatgaagcagaaacccggccagggactcgaatggatcggccaaatctatcccggcgacggcaccgagaacagattcagcgtgaacttccagaaggccgccaagagcttcagcctgaagatcagcgatagccagctgggcgacgccgccatgtacttttgcgcttatagaagcgccgtgaacgcccggctgatgtttggagatggcacacagctggtggtcaagcccaacggcggaggcggaagtggaggcggaggatctggcggcggaggctctgaagccgacatctaccagacacctagatacctggtcatcggcaccggcaagaaaatcaccctggaatgcagccagacaatgggccacgacaagatgtactggtatcagcaggaccccggcatggaactgcacctgatccactacagctacggcgtgaacagcaccgagaagggcgatctgtctagcgagagcaccgtgtccagaatcagaaccgagcacttcccactgacactggaaagcgccagacctagccacaccagccagtacctgtgtgcctcttctgaggccagaggactggccgagttcaccgacacacagtatttcggccctggcaccagactgaccgttacgcgtggcggaggcagcttcaagatccccatcgaggaactggaagatcgggtgttcgtgaactgcaacacctctatcacctgggtggaaggcaccgtgggaacactgctgagcgacatcaccagactggacctcggcaagcggattctggaccctcggggcatctacagatgcaacggcaccgacatctacaaggacaaagaaagcaccgtgcaggtccactacagaatgtgccagtcctgcgtggaactggaccctgctacagtggccggcatcatcgtgaccgatgtgatcgctactctgctgctggctctgggagtgttctgcttcgccggacacgaaacaggcagactgtctggcgctgccgatacacaggccctgctgagaaacgaccaagtgtatcagcccctgcgcgacagagatgatgcccagtattctcacctcggcggcaactgggctagaaacaag

SEQ ID NO: 3720 - DNA, 1500 bp, Artificial Sequence
  Synthetic Polynucloetide
atggactggatttggcgcatccttttccttgtcggcgctgctaccggcgcccattccgggcccatggaccccgacctggaaatcagagccgccttcctgcggcagagaaacacagccctgagaacagaggtggccgagctggaacaagaggtgcagcggctggaaaacgaggtgtcccagtacgagacaagatacggccctctcggaggcggaaaaggatccggcggcggaggatctggcggaggcggatctgggggcggaggctctttcgaacaagttcagcttcaacagcctggcgctgagctggtcaaacctggcgcttctgtgaagatgagctgcaaagccagcggctacgccttcagcagctactggatcaactggatgaagcagaaacccggccagggactcgaatggatcggccaaatctatcccggcgacggcaccgagaacagattcagcgtgaacttccagaaggccgccaagagcttcagcctgaagatcagcgatagccagctgggcgacgccgccatgtacttttgcgcttatagaagcgccgtgaacgcccggctgatgtttggagatggcacacagctggtggtcaagcccaacggcggaggcggaagtggaggcggaggatctggcggcggaggctctgaagccgacatctaccagacacctagatacctggtcatcggcaccggcaagaaaatcaccctggaatgcagccagacaatgggccacgacaagatgtactggtatcagcaggaccccggcatggaactgcacctgatccactacagctacggcgtgaacagcaccgagaagggcgatctgtctagcgagagcaccgtgtccagaatcagaaccgagcacttcccactgacactggaaagcgccagacctagccacaccagccagtacctgtgtgcctcttctgaggccagaggactggccgagttcaccgacacacagtatttcggccctggcaccagactgaccgttacgcgtggcggaggcagccagagcatcaagggcaaccacctggtcaaggtgtacgactaccaagaggacggcagcgtgctgctgacatgtgatgccgaggccaagaacatcacctggtttaaggacggcaagatgatcggcttcctgaccgaggacaagaagaagtggaacctgggcagcaacgctaaggaccccagaggcatgtatcagtgcaagggcagccagaacaagagcaagcccctccaggtgtactaccggatgtgccagaactgcatcgagctgaacgccgctaccatcagcggctttctgttcgccgagatcgtgtccatcttcgtgctggccgtgggcgtgtactttatcgctggacaggatggcgtgcggcagagcagagcttccgataagcaaaccctgctgcctaacgaccagctgtaccagcctctgaaggacagagaggacgaccagtacagccacctccagggcaatcagctgagaagaaac

SEQ ID NO: 3721 - DNA, 1449 bp, Artificial Sequence
  Synthetic Polynucloetide
atggactggatttggcgcatccttttccttgtcggcgctgctaccggcgcccattccgggcccatggaccccgacctggaaatcagagccgccttcctgcggcagagaaacacagccctgagaacagaggtggccgagctggaacaagaggtgcagcggctggaaaacgaggtgtcccagtacgagacaagatacggccctctcggaggcggaaaaggatccggcggcggaggatctggcggaggcggatctgggggcggaggctctttcgaacaagttcagcttcaacagcctggcgctgagctggtcaaacctggcgcttctgtgaagatgagctgcaaagccagcggctacgccttcagcagctactggatcaactggatgaagcagaaacccggccagggactcgaatggatcggccaaatctatcccggcgacggcaccgagaacagattcagcgtgaacttccagaaggccgccaagagcttcagcctgaagatcagcgatagccagctgggcgacgccgccatgtacttttgcgcttatagaagcgccgtgaacgcccggctgatgtttggagatggcacacagctggtggtcaagcccaacggcggaggcggaagtggaggcggaggatctggcggcggaggctctgaagccgacatctaccagacacctagatacctggtcatcggcaccggcaagaaaatcaccctggaatgcagccagacaatgggccacgacaagatgtactggtatcagcaggaccccggcatggaactgcacctgatccactacagctacggcgtgaacagcaccgagaagggcgatctgtctagcgagagcaccgtgtccagaatcagaaccgagcacttcccactgacactggaaagcgccagacctagccacaccagccagtacctgtgtgcctcttctgaggccagaggactggccgagttcaccgacacacagtatttcggccctggcaccagactgaccgttacgcgtggcggaggcagccagagttttgggttgttggaccctaaattgtgctatctgttggacggaatcctgttcatttacggagtgatcctgaccgcattgttcctgcgggttaagttttccagatccgcagacgcacccgcttaccaacaagggcagaaccaactctacaatgaacttaatttggggcggagggaagagtacgacgttctggacaaaaggaggggacgagatcccgagatgggcggaaagcctcagcgaaggaagaatccgcaagaggggctttataacgaactccagaaagataaaatggcagaagcctatagtgagattgggatgaagggagaaaggaggaggggtaaaggtcacgatgggttgtaccaaggattgagcacagccactaaagatacctatgatgcgctccacatgcaggccctgccgccaaga

SEQ ID NO: 3722 - DNA, 1536 bp, Artificial Sequence
  Synthetic Polynucloetide
atggactggatttggcgcatccttttccttgtcggcgctgctaccggcgcccattccgggcccatggaccccgacctggaaatcagagccgccttcctgcggcagagaaacacagccctgagaacagaggtggccgagctggaacaagaggtgcagcggctggaaaacgaggtgtcccagtacgagacaagatacggccctctcggaggcggaaaaggatccggcggcggaggatctggcggaggcggatctgggggcggaggctctttcgaacaagttcagcttcaacagcctggcgctgagctggtcaaacctggcgcttctgtgaagatgagctgcaaagccagcggctacgccttcagcagctactggatcaactggatgaagcagaaacccggccagggactcgaatggatcggccaaatctatcccggcgacggcaccgagaacagattcagcgtgaacttccagaaggccgccaagagcttcagcctgaagatcagcgatagccagctgggcgacgccgccatgtacttttgcgcttatagaagcgccgtgaacgcccggctgatgtttggagatggcacacagctggtggtcaagcccaacacgcgtatccagaaccctgatcctgccgtgtaccagctgcgggatagcaagagcagcgacaagagcgtgtgtctgttcaccgacttcgacagccagaccaacgtgtcccagagcaaggactccgacgtgtacatcaccgataagaccgtgctggacatgcggagcatggacttcaagagcaactccgccgtggcctggtccaacaagtccgatttcgcctgcgccaacgccttcaacaacagcattatccccgaggacacattcttcccaagccccgagagcagctgcgacgtgaagctggtggaaaagagcttcgagacagacaccaacctgaacttccagaacctgagcgtgatcggcttcagaatcctgctgctgaaagtggccggctttaacctgctgatgaccctgcggctgtggtccagccgcgccaagagaagcggatctggcgtgaagcagaccctgaatttcgacctgctgaagctggctggcgacgtggaatccaacccaggcccttctagaggccatatggccaagcctttgtctcaagaagaatccaccctcattgaaagagcaacggctacaatcaacagcatccccatctctgaagactacagcgtcgccagcgcagctctctctagcgacggccgcatcttcactggtgtcaatgtatatcattttactgggggaccttgtgcagaactcgtggtgctgggcactgctgctgctgcggcagctggcaacctgacttgtatcgtcgcgatcggaaatgagaacaggggcatcttgagcccctgcggacggtgccgacaggtgcttctcgatctgcatcctgggatcaaagccatagtgaaggacagtgatggacagccgacggcagttgggattcgtgaattgctgccctctggttatgtgtgggagggctga

SEQ ID NO: 3723 - DNA, 1035 bp, Artificial Sequence
  Synthetic Polynucloetide
atggactggatttggcgcatccttttccttgtcggcgctgctaccggcgcccattccgggcccatggaccccgacctggaaatcagagccgccttcctgcggcagagaaacacagccctgagaacagaggtggccgagctggaacaagaggtgcagcggctggaaaacgaggtgtcccagtacgagacaagatacggccctctcggaggcggaaaaggatccggcggcggaggatctggcggaggcggatctgggggcggaggctctttcgaacaagttcagcttcaacagcctggcgctgagctggtcaaacctggcgcttctgtgaagatgagctgcaaagccagcggctacgccttcagcagctactggatcaactggatgaagcagaaacccggccagggactcgaatggatcggccaaatctatcccggcgacggcaccgagaacagattcagcgtgaacttccagaaggccgccaagagcttcagcctgaagatcagcgatagccagctgggcgacgccgccatgtacttttgcgcttatagaagcgccgtgaacgcccggctgatgtttggagatggcacacagctggtggtcaagcccaacacgcgtatccagaaccctgatcctgccgtgtaccagctgcgggatagcaagagcagcgacaagagcgtgtgtctgttcaccgacttcgacagccagaccaacgtgtcccagagcaaggactccgacgtgtacatcaccgataagaccgtgctggacatgcggagcatggacttcaagagcaactccgccgtggcctggtccaacaagtccgatttcgcctgcgccaacgccttcaacaacagcattatccccgaggacacattcttcccaagccccgagagcagctgcgacgtgaagctggtggaaaagagcttcgagacagacaccaacctgaacttccagaacctgagcgtgatcggcttcagaatcctgctgctgaaagtggccggctttaacctgctgatgaccctgcggctgtggtccagc

SEQ ID NO: 3724 - DNA, 1572 bp, Artificial Sequence
  Synthetic Polynucloetide
atggactggatttggcgcatccttttccttgtcggcgctgctaccggcgcccattccgggcccatggaccccgacctggaaatcagagccgccttcctgcggcagagaaacacagccctgagaacagaggtggccgagctggaacaagaggtgcagcggctggaaaacgaggtgtcccagtacgagacaagatacggccctctcggaggcggaaaaggatccggcggcggaggatctggcggaggcggatctgggggcggaggctctttcgaacaagttcagcttcaacagcctggcgctgagctggtcaaacctggcgcttctgtgaagatgagctgcaaagccagcggctacgccttcagcagctactggatcaactggatgaagcagaaacccggccagggactcgaatggatcggccaaatctatcccggcgacggcaccgagaacagattcagcgtgaacttccagaaggccgccaagagcttcagcctgaagatcagcgatagccagctgggcgacgccgccatgtacttttgcgcttatagaagcgccgtgaacgcccggctgatgtttggagatggcacacagctggtggtcaagcccaacacgcgtgagcagaaactgatctcggaagaggatgggagcggcatccagaaccctgatcctgccgtgtaccagctgcgggatagcaagagcagcgacaagagcgtgtgtctgttcaccgacttcgacagccagaccaacgtgtcccagagcaaggactccgacgtgtacatcaccgataagtgcgtgctggacatgcggagcatggacttcaagagcaactccgccgtggcctggtccaacaagtccgatttcgcctgcgccaacgccttcaacaacagcattatccccgaggacacattcttcccaagccccgagagcagctgcgacgtgaagctggtggaaaagagcttcgagacagacaccaacctgaacttccagaacctgagcgtgatcggcttcagaatcctgctgctgaaagtggccggctttaacctgctgatgaccctgcggctgtggtccagccgcgccaagagaagcggatctggcgtgaagcagaccctgaatttcgacctgctgaagctggctggcgacgtggaatccaacccaggcccttctagaggccatatggccaagcctttgtctcaagaagaatccaccctcattgaaagagcaacggctacaatcaacagcatccccatctctgaagactacagcgtcgccagcgcagctctctctagcgacggccgcatcttcactggtgtcaatgtatatcattttactgggggaccttgtgcagaactcgtggtgctgggcactgctgctgctgcggcagctggcaacctgacttgtatcgtcgcgatcggaaatgagaacaggggcatcttgagcccctgcggacggtgccgacaggtgcttctcgatctgcatcctgggatcaaagccatagtgaaggacagtgatggacagccgacggcagttgggattcgtgaattgctgccctctggttatgtgtgggagggctga

SEQ ID NO: 3725 - DNA, 1074 bp, Artificial Sequence
  Synthetic Polynucloetide
atggactggatttggcgcatccttttccttgtcggcgctgctaccggcgcccattccgggcccatggaccccgacctggaaatcagagccgccttcctgcggcagagaaacacagccctgagaacagaggtggccgagctggaacaagaggtgcagcggctggaaaacgaggtgtcccagtacgagacaagatacggccctctcggaggcggaaaaggatccggcggcggaggatctggcggaggcggatctgggggcggaggctctttcgaacaagttcagcttcaacagcctggcgctgagctggtcaaacctggcgcttctgtgaagatgagctgcaaagccagcggctacgccttcagcagctactggatcaactggatgaagcagaaacccggccagggactcgaatggatcggccaaatctatcccggcgacggcaccgagaacagattcagcgtgaacttccagaaggccgccaagagcttcagcctgaagatcagcgatagccagctgggcgacgccgccatgtacttttgcgcttatagaagcgccgtgaacgcccggctgatgtttggagatggcacacagctggtggtcaagcccaacacgcgtgagcagaaactgatctcggaagaggatgggagcggcatccagaaccctgatcctgccgtgtaccagctgcgggatagcaagagcagcgacaagagcgtgtgtctgttcaccgacttcgacagccagaccaacgtgtcccagagcaaggactccgacgtgtacatcaccgataagtgcgtgctggacatgcggagcatggacttcaagagcaactccgccgtggcctggtccaacaagtccgatttcgcctgcgccaacgccttcaacaacagcattatccccgaggacacattcttcccaagccccgagagcagctgcgacgtgaagctggtggaaaagagcttcgagacagacaccaacctgaacttccagaacctgagcgtgatcggcttcagaatcctgctgctgaaagtggccggctttaacctgctgatgaccctgcggctgtggtccagctga

SEQ ID NO: 3726 - DNA, 1920 bp, Artificial Sequence; identical to SEQ ID NO: 3530
  Synthetic Polynucloetide

SEQ ID NO: 3727 - DNA, 1941 bp, Artificial Sequence; identical to SEQ ID NO: 3531
  Synthetic Polynucloetide

SEQ ID NO: 3728 - DNA, 3180 bp, Artificial Sequence; identical to SEQ ID NO: 3532
  Synthetic Polynucloetide

SEQ ID NO: 3729 - DNA, 3000 bp, Artificial Sequence; identical to SEQ ID NO: 3533
  Synthetic Polynucloetide

SEQ ID NO: 3730 - DNA, 2997 bp, Artificial Sequence; identical to SEQ ID NO: 3534
  Synthetic Polynucloetide

SEQ ID NO: 3731 - DNA, 2295 bp, Artificial Sequence; identical to SEQ ID NO: 3535
  Synthetic Polynucloetide

SEQ ID NO: 3732 - DNA, 2970 bp, Artificial Sequence; identical to SEQ ID NO: 3536
  Synthetic Polynucloetide

SEQ ID NO: 3733 - DNA, 2307 bp, Artificial Sequence; identical to SEQ ID NO: 3537
  Synthetic Polynucloetide

SEQ ID NO: 3734 - DNA, 2973 bp, Artificial Sequence; identical to SEQ ID NO: 3538
  Synthetic Polynucloetide

SEQ ID NO: 3735 - DNA, 3132 bp, Artificial Sequence; identical to SEQ ID NO: 3539
  Synthetic Polynucloetide

SEQ ID NO: 3736 - DNA, 3135 bp, Artificial Sequence; identical to SEQ ID NO: 3540
  Synthetic Polynucloetide

SEQ ID NO: 3737 - DNA, 2997 bp, Artificial Sequence; identical to SEQ ID NO: 3541
  Synthetic Polynucloetide

SEQ ID NO: 3738 - DNA, 3243 bp, Artificial Sequence; identical to SEQ ID NO: 3542
  Synthetic Polynucloetide

SEQ ID NO: 3739 - DNA, 3297 bp, Artificial Sequence; identical to SEQ ID NO: 3543
  Synthetic Polynucloetide

SEQ ID NO: 3740 - DNA, 3108 bp, Artificial Sequence; identical to SEQ ID NO: 3544
  Synthetic Polynucloetide

SEQ ID NO: 3741 - DNA, 2319 bp, Artificial Sequence; identical to SEQ ID NO: 3545
  Synthetic Polynucloetide

SEQ ID NO: 3742 - DNA, 3153 bp, Artificial Sequence; identical to SEQ ID NO: 3546
  Synthetic Polynucloetide

SEQ ID NO: 3743 - DNA, 3528 bp, Artificial Sequence; identical to SEQ ID NO: 3547
  Synthetic Polynucloetide

SEQ ID NO: 3744 - DNA, 2883 bp, Artificial Sequence; identical to SEQ ID NO: 3548
  Synthetic Polynucloetide

SEQ ID NO: 3745 - DNA, 2883 bp, Artificial Sequence; identical to SEQ ID NO: 3549
  Synthetic Polynucloetide

SEQ ID NO: 3746 - DNA, 3096 bp, Artificial Sequence; identical to SEQ ID NO: 3550
  Synthetic Polynucloetide

SEQ ID NO: 3747 - DNA, 3219 bp, Artificial Sequence; identical to SEQ ID NO: 3551
  Synthetic Polynucloetide

SEQ ID NO: 3748 - DNA, 3102 bp, Artificial Sequence; identical to SEQ ID NO: 3552
  Synthetic Polynucloetide

SEQ ID NO: 3749 - DNA, 3228 bp, Artificial Sequence; identical to SEQ ID NO: 3553
  Synthetic Polynucloetide

SEQ ID NO: 3750 - DNA, 2901 bp, Artificial Sequence; identical to SEQ ID NO: 3554
  Synthetic Polynucloetide

SEQ ID NO: 3751 - DNA, 2373 bp, Artificial Sequence; identical to SEQ ID NO: 3555
  Synthetic Polynucloetide

SEQ ID NO: 3752 - DNA, 2307 bp, Artificial Sequence; identical to SEQ ID NO: 3556
  Synthetic Polynucloetide

SEQ ID NO: 3753 - DNA, 2307 bp, Artificial Sequence; identical to SEQ ID NO: 3557
  Synthetic Polynucloetide

SEQ ID NO: 3754 - DNA, 1785 bp, Artificial Sequence; identical to SEQ ID NO: 3558
  Synthetic Polynucloetide

SEQ ID NO: 3755 - DNA, 1680 bp, Artificial Sequence; identical to SEQ ID NO: 3559
  Synthetic Polynucloetide

SEQ ID NO: 3756 - DNA, 1710 bp, Artificial Sequence; identical to SEQ ID NO: 3560
  Synthetic Polynucloetide

SEQ ID NO: 3757 - DNA, 1659 bp, Artificial Sequence; identical to SEQ ID NO: 3561
  Synthetic Polynucloetide

SEQ ID NO: 3758 - DNA, 2361 bp, Artificial Sequence; identical to SEQ ID NO: 3562
  Synthetic Polynucloetide

SEQ ID NO: 3759 - DNA, 2457 bp, Artificial Sequence; identical to SEQ ID NO: 3563
  Synthetic Polynucloetide

SEQ ID NO: 3760 - DNA, 2607 bp, Artificial Sequence; identical to SEQ ID NO: 3564
  Synthetic Polynucloetide

SEQ ID NO: 3761 - DNA, 2076 bp, Artificial Sequence; identical to SEQ ID NO: 3565
  Synthetic Polynucloetide

SEQ ID NO: 3762 - DNA, 1383 bp, Artificial Sequence; identical to SEQ ID NO: 3566
  Synthetic Polynucloetide

SEQ ID NO: 3763 - DNA, 1326 bp, Artificial Sequence; identical to SEQ ID NO: 3567
  Synthetic Polynucloetide

SEQ ID NO: 3764 - DNA, 825 bp, Artificial Sequence; identical to SEQ ID NO: 3568
  Synthetic Polynucloetide

SEQ ID NO: 3765 - DNA, 2130 bp, Artificial Sequence; identical to SEQ ID NO: 3569
  Synthetic Polynucloetide

SEQ ID NO: 3766 - DNA, 1440 bp, Artificial Sequence; identical to SEQ ID NO: 3570
  Synthetic Polynucloetide

SEQ ID NO: 3767 - DNA, 1362 bp, Artificial Sequence; identical to SEQ ID NO: 3571
  Synthetic Polynucloetide

SEQ ID NO: 3768 - DNA, 864 bp, Artificial Sequence; identical to SEQ ID NO: 3572
  Synthetic Polynucloetide

SEQ ID NO: 3769 - DNA, 2361 bp, Artificial Sequence; identical to SEQ ID NO: 3573
  Synthetic Polynucloetide

SEQ ID NO: 3770 - DNA, 2457 bp, Artificial Sequence; identical to SEQ ID NO: 3574
  Synthetic Polynucloetide

SEQ ID NO: 3771 - DNA, 3210 bp, Artificial Sequence
  Synthetic Polynucloetide
atggccttaccagtgaccgccttgctcctgccgctggccttgctgctccacgccgccaggccggcatgccaggtccagctcgtcgagtccggcggcggcctcgtccaggccggcgactccgtcaccctctcctgcaccgcctccggccgcaccttctcctcctacgccctcgcctggttccgccagcgccccggcaaggagcgcgagttcgtcgccggcctccgctggggcggccccaccaactacgccgactccgtcaaggaccgcttcaccatctccggcgactccgccaagcacaccatgtacctccagatgaactccctcaagcccgaggacaccgccgtctactactgcggctacaaccccggcggctgggccgtcccctcccagtacgagtacgactcctggggccagggcacccaggtcaccgtctcctccggtaccggcggaggcggatctggcggcggaggtagcggtggcggaggatctgaattcgaagccgacatctaccagacacctagatacctggtcatcggcaccggcaagaaaatcaccctggaatgcagccagacaatgggccacgacaagatgtactggtatcagcaggaccccggcatggaactgcacctgatccactacagctacggcgtgaacagcaccgagaagggcgatctgtctagcgagagcaccgtgtccagaatcagaaccgagcacttcccactgacactggaaagcgccagacctagccacaccagccagtacctgtgtgcctcttctgaggccagaggactggccgagttcaccgacacacagtatttcggccctggcaccagactgaccgttctcgagatccagaaccctgatcctgccgtgtaccagctgcgggatagcaagagcagcgacaagagcgtgtgtctgttcaccgacttcgacagccagaccaacgtgtcccagagcaaggactccgacgtgtacatcaccgataagtgcgtgctggacatgcggagcatggacttcaagagcaactccgccgtggcctggtccaacaagtccgatttcgcctgcgccaacgccttcaacaacagcattatccccgaggacacattcttcccaagcagcgacgtgccctgcgacgtgaagctggtggaaaagagcttcgagacagacaccaacctgaacttccagaacctgagcgtgatcggcttcagaatcctgctgctgaaagtggccggctttaacctgctgatgaccctgcggctgtggtccagccgcgccaagagaagcggatctggcgtgaagcagaccctgaatttcgacctgctgaagctggctggcgacgtggaatccaacccaggccctactagtatggactggatttggcgcatccttttccttgtcggcgctgctaccggcgcccattccgggcccatggaccccgacctggaaatcagagccgccttcctgcggcagagaaacacagccctgagaacagaggtggccgagctggaacaagaggtgcagcggctggaaaacgaggtgtcccagtacgagacaagatacggccctctcggaggcggaaaaggatccggcggcggaggatctggcggaggcggatctgggggcggaggctctttcgaacaagttcagcttcaacagcctggcgctgagctggtcaaacctggcgcttctgtgaagatgagctgcaaagccagcggctacgccttcagcagctactggatcaactggatgaagcagaaacccggccagggactcgaatggatcggccaaatctatcccggcgacggcaccgagaacagattcagcgtgaacttccagaaggccgccaagagcttcagcctgaagatcagcgatagccagctgggcgacgccgccatgtacttttgcgcttatagaagcgccgtgaacgcccggctgatgtttggagatggcacacagctggtggtcaagcccaacacgcgtgaggacctgaagaacgtgttcccacctgaggtggccgtgttcgagcctagcaaggccgagatcgcccacacccagaaagccaccctcgtgtgcctggctaccggcttctaccccgaccatgtggaactgtcttggtgggtcaacggcaaagaggtgcacagcggcgtgtgtaccgacccccagccactgaaagaacagcccgccctgaacgacagccggtactgcctgagcagcagactgagagtgtccgccaccttctggcagaacccccggaaccacttcagatgccaggtgcagttctacggcctgagcgagaacgacgagtggacccaggacagagccaagcccgtgacccagatcgtgtctgccgaagcctggggcagagccgattgcggcatcaccagcgccagctaccaccagggcgtgctgagcgccaccatcctgtacgagatcctgctgggcaaggccaccctgtacgccgtgctggtgtctgccctggtgctgatggctatggtcaagcggaaggacagccggggaagggccaagcgatctggatctggagcaacaaacttctcactactcaaacaagcaggtgacgtggaggagaatcccgggccttctagaggccatatgaccgagtacaagcccacggtgcgcctcgccacccgcgacgacgtccccagggccgtacgcaccctcgccgccgcgttcgccgactaccccgccacgcgccacaccgtcgatccggaccgccacatcgagcgggtcaccgagctgcaagaactcttcctcacgcgcgtcgggctcgacatcggcaaggtgtgggtcgcggacgacggcgccgcggtggcggtctggaccacgccggagagcgtcgaagcgggggcggtgttcgccgagatcggcccgcgcatggccgagttgagcggttcccggctggccgcgcagcaacagatggaaggcctcctggcgccgcaccggcccaaggagcccgcgtggttcctggccaccgtcggcgtctcgcccgaccaccagggcaagggtctgggcagcgccgtcgtgctccccggagtggaggcggccgagcgcgccggggtgcccgccttcctggagacctccgcgccccgcaacctccccttctacgagcggctcggcttcaccgtcaccgccgacgtcgaggtgcccgaaggaccgcgcacctggtgcatgacccgcaagcccggtgcctga

SEQ ID NO: 3772 - DNA, 3207 bp, Artificial Sequence
  Synthetic Polynucloetide
atggccttaccagtgaccgccttgctcctgccgctggccttgctgctccacgccgccaggccggcatgccaggtccagctcgtcgagtccggcggcggcctcgtccaggccggcgactccgtcaccctctcctgcaccgcctccggccgcaccttctcctcctacgccctcgcctggttccgccagcgccccggcaaggagcgcgagttcgtcgccggcctccgctggggcggccccaccaactacgccgactccgtcaaggaccgcttcaccatctccggcgactccgccaagcacaccatgtacctccagatgaactccctcaagcccgaggacaccgccgtctactactgcggctacaaccccggcggctgggccgtcccctcccagtacgagtacgactcctggggccagggcacccaggtcaccgtctcctccggtaccggcggaggcggatctggcggcggaggtagcggtggcggaggatctgaattcgaagccgacatctaccagacacctagatacctggtcatcggcaccggcaagaaaatcaccctggaatgcagccagacaatgggccacgacaagatgtactggtatcagcaggaccccggcatggaactgcacctgatccactacagctacggcgtgaacagcaccgagaagggcgatctgtctagcgagagcaccgtgtccagaatcagaaccgagcacttcccactgacactggaaagcgccagacctagccacaccagccagtacctgtgtgcctcttctgaggccagaggactggccgagttcaccgacacacagtatttcggccctggcaccagactgaccgttctcgaggacctgaagaacgtgttcccacctgaggtggccgtgttcgagcctagcaaggccgagatcgcccacacccagaaagccaccctcgtgtgcctggctaccggcttctaccccgaccatgtggaactgtcttggtgggtcaacggcaaagaggtgcacagcggcgtgtgtaccgacccccagccactgaaagaacagcccgccctgaacgacagccggtactgcctgagcagcagactgagagtgtccgccaccttctggcagaacccccggaaccacttcagatgccaggtgcagttctacggcctgagcgagaacgacgagtggacccaggacagagccaagcccgtgacccagatcgtgtctgccgaagcctggggcagagccgattgcggcatcaccagcgccagctaccaccagggcgtgctgagcgccaccatcctgtacgagatcctgctgggcaaggccaccctgtacgccgtgctggtgtctgccctggtgctgatggctatggtcaagcggaaggacagccggggaagggccaagcgatctggatctggagcaacaaacttctcactactcaaacaagcaggtgacgtggaggagaatcccgggcctactagtatggactggatttggcgcatccttttccttgtcggcgctgctaccggcgcccattccgggcccatggaccccgacctggaaatcagagccgccttcctgcggcagagaaacacagccctgagaacagaggtggccgagctggaacaagaggtgcagcggctggaaaacgaggtgtcccagtacgagacaagatacggccctctcggaggcggaaaaggatccggcggcggaggatctggcggaggcggatctgggggcggaggctctttcgaacaagttcagcttcaacagcctggcgctgagctggtcaaacctggcgcttctgtgaagatgagctgcaaagccagcggctacgccttcagcagctactggatcaactggatgaagcagaaacccggccagggactcgaatggatcggccaaatctatcccggcgacggcaccgagaacagattcagcgtgaacttccagaaggccgccaagagcttcagcctgaagatcagcgatagccagctgggcgacgccgccatgtacttttgcgcttatagaagcgccgtgaacgcccggctgatgtttggagatggcacacagctggtggtcaagcccaacacgcgtatccagaaccctgatcctgccgtgtaccagctgcgggatagcaagagcagcgacaagagcgtgtgtctgttcaccgacttcgacagccagaccaacgtgtcccagagcaaggactccgacgtgtacatcaccgataagtgcgtgctggacatgcggagcatggacttcaagagcaactccgccgtggcctggtccaacaagtccgatttcgcctgcgccaacgccttcaacaacagcattatccccgaggacacattcttcccaagcagcgacgtgccctgcgacgtgaagctggtggaaaagagcttcgagacagacaccaacctgaacttccagaacctgagcgtgatcggcttcagaatcctgctgctgaaagtggccggctttaacctgctgatgaccctgcggctgtggtccagccgcgccaagagaagcggatctggcgtgaagcagaccctgaatttcgacctgctgaagctggctggcgacgtggaatccaacccaggcccttctagaggccatatgaccgagtacaagcccacggtgcgcctcgccacccgcgacgacgtccccagggccgtacgcaccctcgccgccgcgttcgccgactaccccgccacgcgccacaccgtcgatccggaccgccacatcgagcgggtcaccgagctgcaagaactcttcctcacgcgcgtcgggctcgacatcggcaaggtgtgggtcgcggacgacggcgccgcggtggcggtctggaccacgccggagagcgtcgaagcgggggcggtgttcgccgagatcggcccgcgcatggccgagttgagcggttcccggctggccgcgcagcaacagatggaaggcctcctggcgccgcaccggcccaaggagcccgcgtggttcctggccaccgtcggcgtctcgcccgaccaccagggcaagggtctgggcagcgccgtcgtgctccccggagtggaggcggccgagcgcgccggggtgcccgccttcctggagacctccgcgccccgcaacctccccttctacgagcggctcggcttcaccgtcaccgccgacgtcgaggtgcccgaaggaccgcgcacctggtgcatgacccgcaagcccggtgcctga

SEQ ID NO: 3773 - DNA, 3207 bp, Artificial Sequence
  Synthetic Polynucloetide
atggccttaccagtgaccgccttgctcctgccgctggccttgctgctccacgccgccaggccggcatgccaggtccagctcgtcgagtccggcggcggcctcgtccaggccggcgactccgtcaccctctcctgcaccgcctccggccgcaccttctcctcctacgccctcgcctggttccgccagcgccccggcaaggagcgcgagttcgtcgccggcctccgctggggcggccccaccaactacgccgactccgtcaaggaccgcttcaccatctccggcgactccgccaagcacaccatgtacctccagatgaactccctcaagcccgaggacaccgccgtctactactgcggctacaaccccggcggctgggccgtcccctcccagtacgagtacgactcctggggccagggcacccaggtcaccgtctcctccggtaccggcggaggcggatctggcggcggaggtagcggtggcggaggatctgaattcgaagccgacatctaccagacacctagatacctggtcatcggcaccggcaagaaaatcaccctggaatgcagccagacaatgggccacgacaagatgtactggtatcagcaggaccccggcatggaactgcacctgatccactacagctacggcgtgaacagcaccgagaagggcgatctgtctagcgagagcaccgtgtccagaatcagaaccgagcacttcccactgacactggaaagcgccagacctagccacaccagccagtacctgtgtgcctcttctgaggccagaggactggccgagttcaccgacacacagtatttcggccctggcaccagactgaccgttctcgaggacctgaagaacgtgttcccacctgaggtggccgtgttcgagcctagcgaggccgagatcagccacacccagaaagccaccctcgtgtgcctggctaccggcttctaccccgaccatgtggaactgtcttggtgggtcaacggcaaagaggtgcacagcggcgtgtgtaccgacccccagccactgaaagaacagcccgccctgaacgacagccggtactgcctgagcagcagactgagagtgtccgccaccttctggcagaacccccggaaccacttcagatgccaggtgcagttctacggcctgagcgagaacgacgagtggacccaggacagagccaagcccgtgacccagatcgtgtctgccgaagcctggggcagagccgattgcggctttaccagcgagagctaccagcagggcgtgctgagcgccaccatcctgtacgagatcctgctgggcaaggccaccctgtacgccgtgctggtgtctgccctggtgctgatggctatggtcaagcggaaggacagccggggaagggccaagcgatctggatctggagcaacaaacttctcactactcaaacaagcaggtgacgtggaggagaatcccgggcctactagtatggactggatttggcgcatccttttccttgtcggcgctgctaccggcgcccattccgggcccatggaccccgacctggaaatcagagccgccttcctgcggcagagaaacacagccctgagaacagaggtggccgagctggaacaagaggtgcagcggctggaaaacgaggtgtcccagtacgagacaagatacggccctctcggaggcggaaaaggatccggcggcggaggatctggcggaggcggatctgggggcggaggctctttcgaacaagttcagcttcaacagcctggcgctgagctggtcaaacctggcgcttctgtgaagatgagctgcaaagccagcggctacgccttcagcagctactggatcaactggatgaagcagaaacccggccagggactcgaatggatcggccaaatctatcccggcgacggcaccgagaacagattcagcgtgaacttccagaaggccgccaagagcttcagcctgaagatcagcgatagccagctgggcgacgccgccatgtacttttgcgcttatagaagcgccgtgaacgcccggctgatgtttggagatggcacacagctggtggtcaagcccaacacgcgtatccagaaccctgatcctgccgtgtaccagctgcgggatagcaagagcagcgacaagagcgtgtgtctgttcaccgacttcgacagccagaccaacgtgtcccagagcaaggactccgacgtgtacatcaccgataagtgcgtgctggacatgcggagcatggacttcaagagcaactccgccgtggcctggtccaacaagtccgatttcgcctgcgccaacgccttcaacaacagcattatccccgaggacacattcttcccaagccccgagagcagctgcgacgtgaagctggtggaaaagagcttcgagacagacaccaacctgaacttccagaacctgagcgtgatcggcttcagaatcctgctgctgaaagtggccggctttaacctgctgatgaccctgcggctgtggtccagccgcgccaagagaagcggatctggcgtgaagcagaccctgaatttcgacctgctgaagctggctggcgacgtggaatccaacccaggcccttctagaggccatatgaccgagtacaagcccacggtgcgcctcgccacccgcgacgacgtccccagggccgtacgcaccctcgccgccgcgttcgccgactaccccgccacgcgccacaccgtcgatccggaccgccacatcgagcgggtcaccgagctgcaagaactcttcctcacgcgcgtcgggctcgacatcggcaaggtgtgggtcgcggacgacggcgccgcggtggcggtctggaccacgccggagagcgtcgaagcgggggcggtgttcgccgagatcggcccgcgcatggccgagttgagcggttcccggctggccgcgcagcaacagatggaaggcctcctggcgccgcaccggcccaaggagcccgcgtggttcctggccaccgtcggcgtctcgcccgaccaccagggcaagggtctgggcagcgccgtcgtgctccccggagtggaggcggccgagcgcgccggggtgcccgccttcctggagacctccgcgccccgcaacctccccttctacgagcggctcggcttcaccgtcaccgccgacgtcgaggtgcccgaaggaccgcgcacctggtgcatgacccgcaagcccggtgcctga

SEQ ID NO: 3774 - DNA, 2505 bp, Artificial Sequence
  Synthetic Polynucloetide
atggccttaccagtgaccgccttgctcctgccgctggccttgctgctccacgccgccaggccggcatgccaggtccagctcgtcgagtccggcggcggcctcgtccaggccggcgactccgtcaccctctcctgcaccgcctccggccgcaccttctcctcctacgccctcgcctggttccgccagcgccccggcaaggagcgcgagttcgtcgccggcctccgctggggcggccccaccaactacgccgactccgtcaaggaccgcttcaccatctccggcgactccgccaagcacaccatgtacctccagatgaactccctcaagcccgaggacaccgccgtctactactgcggctacaaccccggcggctgggccgtcccctcccagtacgagtacgactcctggggccagggcacccaggtcaccgtctcctccggtaccggcggaggcggatctggcggcggaggtagcggtggcggaggatctgaattcgaagccgacatctaccagacacctagatacctggtcatcggcaccggcaagaaaatcaccctggaatgcagccagacaatgggccacgacaagatgtactggtatcagcaggaccccggcatggaactgcacctgatccactacagctacggcgtgaacagcaccgagaagggcgatctgtctagcgagagcaccgtgtccagaatcagaaccgagcacttcccactgacactggaaagcgccagacctagccacaccagccagtacctgtgtgcctcttctgaggccagaggactggccgagttcaccgacacacagtatttcggccctggcaccagactgaccgttctcgaggacctgaagaacgtgttcccacctgaggtggccgtgttcgagcctagcgaggccgagatcagccacacccagaaagccaccctcgtgtgcctggctaccggcttctaccccgaccatgtggaactgtcttggtgggtcaacggcaaagaggtgcacagcggcgtgtgtaccgacccccagccactgaaagaacagcccgccctgaacgacagccggtactgcctgagcagcagactgagagtgtccgccaccttctggcagaacccccggaaccacttcagatgccaggtgcagttctacggcctgagcgagaacgacgagtggacccaggacagagccaagcccgtgacccagatcgtgtctgccgaagcctggggcagagccgattgcggctttaccagcgagagctaccagcagggcgtgctgagcgccaccatcctgtacgagatcctgctgggcaaggccaccctgtacgccgtgctggtgtctgccctggtgctgatggctatggtcaagcggaaggacagccggggaagggccaagcgatctggatctggagcaacaaacttctcactactcaaacaagcaggtgacgtggaggagaatcccgggcctactagtatggactggatttggcgcatccttttccttgtcggcgctgctaccggcgcccattccgggcccatggaccccgacctggaaatcagagccgccttcctgcggcagagaaacacagccctgagaacagaggtggccgagctggaacaagaggtgcagcggctggaaaacgaggtgtcccagtacgagacaagatacggccctctcggaggcggaaaaggatccggcggcggaggatctggcggaggcggatctgggggcggaggctctttcgaacaagttcagcttcaacagcctggcgctgagctggtcaaacctggcgcttctgtgaagatgagctgcaaagccagcggctacgccttcagcagctactggatcaactggatgaagcagaaacccggccagggactcgaatggatcggccaaatctatcccggcgacggcaccgagaacagattcagcgtgaacttccagaaggccgccaagagcttcagcctgaagatcagcgatagccagctgggcgacgccgccatgtacttttgcgcttatagaagcgccgtgaacgcccggctgatgtttggagatggcacacagctggtggtcaagcccaacacgcgtatccagaaccctgatcctgccgtgtaccagctgcgggatagcaagagcagcgacaagagcgtgtgtctgttcaccgacttcgacagccagaccaacgtgtcccagagcaaggactccgacgtgtacatcaccgataagtgcgtgctggacatgcggagcatggacttcaagagcaactccgccgtggcctggtccaacaagtccgatttcgcctgcgccaacgccttcaacaacagcattatccccgaggacacattcttcccaagccccgagagcagctgcgacgtgaagctggtggaaaagagcttcgagacagacaccaacctgaacttccagaacctgagcgtgatcggcttcagaatcctgctgctgaaagtggccggctttaacctgctgatgaccctgcggctgtggtccagc

SEQ ID NO: 3775 - DNA, 3180 bp, Artificial Sequence
  Synthetic Polynucloetide
atggccttaccagtgaccgccttgctcctgccgctggccttgctgctccacgccgccaggccggcatgccaggtccagctcgtcgagtccggcggcggcctcgtccaggccggcgactccgtcaccctctcctgcaccgcctccggccgcaccttctcctcctacgccctcgcctggttccgccagcgccccggcaaggagcgcgagttcgtcgccggcctccgctggggcggccccaccaactacgccgactccgtcaaggaccgcttcaccatctccggcgactccgccaagcacaccatgtacctccagatgaactccctcaagcccgaggacaccgccgtctactactgcggctacaaccccggcggctgggccgtcccctcccagtacgagtacgactcctggggccagggcacccaggtcaccgtctcctccggtaccggcggaggcggatctggcggcggaggtagcggtggcggaggatctgaattcgaagccgacatctaccagacacctagatacctggtcatcggcaccggcaagaaaatcaccctggaatgcagccagacaatgggccacgacaagatgtactggtatcagcaggaccccggcatggaactgcacctgatccactacagctacggcgtgaacagcaccgagaagggcgatctgtctagcgagagcaccgtgtccagaatcagaaccgagcacttcccactgacactggaaagcgccagacctagccacaccagccagtacctgtgtgcctcttctgaggccagaggactggccgagttcaccgacacacagtatttcggccctggcaccagactgaccgttctcgaggacctgaagaacgtgttcccacctgaggtggccgtgttcgagcctagcgaggccgagatcagccacacccagaaagccaccctcgtgtgcctggctaccggcttctaccccgaccatgtggaactgtcttggtgggtcaacggcaaagaggtgcacagcggcgtgtgtaccgacccccagccactgaaagaacagcccgccctgaacgacagccggtactgcctgagcagcagactgagagtgtccgccaccttctggcagaacccccggaaccacttcagatgccaggtgcagttctacggcctgagcgagaacgacgagtggacccaggacagagccaagcccgtgacccagatcgtgtctgccgaagcctggggcagagccgattgcggctttaccagcgagagctaccagcagggcgtgctgagcgccaccatcctgtacgagatcctgctgggcaaggccaccctgtacgccgtgctggtgtctgccctggtgctgatggctatggtcaagcggaaggacagccggggaagggccaagcgatctggatctggagcaacaaacttctcactactcaaacaagcaggtgacgtggaggagaatcccgggcctactagtatggactggatttggcgcatccttttccttgtcggcgctgctaccggcgcccattccgggcccatggaccccgacctggaaatcagagccgccttcctgcggcagagaaacacagccctgagaacagaggtggccgagctggaacaagaggtgcagcggctggaaaacgaggtgtcccagtacgagacaagatacggccctctcggaggcggaaaaggatccggcggcggaggatctggcggaggcggatctgggggcggaggctctttcgaacaagttcagcttcaacagcctggcgctgagctggtcaaacctggcgcttctgtgaagatgagctgcaaagccagcggctacgccttcagcagctactggatcaactggatgaagcagaaacccggccagggactcgaatggatcggccaaatctatcccggcgacggcaccgagaacagattcagcgtgaacttccagaaggccgccaagagcttcagcctgaagatcagcgatagccagctgggcgacgccgccatgtacttttgcgcttatagaagcgccgtgaacgcccggctgatgtttggagatggcacacagctggtggtcaagcccaacacgcgtatccagaaccctgatcctgccgtgtaccagctgcgggatagcaagagcagcgacaagagcgtgtgtctgttcaccgacttcgacagccagaccaacgtgtcccagagcaaggactccgacgtgtacatcaccgataagtgcgtgctggacatgcggagcatggacttcaagagcaactccgccgtggcctggtccaacaagtccgatttcgcctgcgccaacgccttcaacaacagcattatccccgaggacacattcttcccaagccccgagagcagctgcgacgtgaagctggtggaaaagagcttcgagacagacaccaacctgaacttccagaacctgagcgtgatcggcttcagaatcctgctgctgaaagtggccggctttaacctgctgatgaccctgcggctgtggtccagccgcgccaagagaagcggatctggcgtgaagcagaccctgaatttcgacctgctgaagctggctggcgacgtggaatccaacccaggcccttctagaggcgggatccacaccatggctacctacgaggtgctgtgcgaggtggcaagaaagctgggcaccgacgacagagaagtggtgctgttcctgctgaacgtgttcatccctcagcctacactggcccagctgatcggtgcactgagagccctgaaagaggaaggccggctgacctttcctctgctggccgaatgcctgttcagagccggaagaagggatctgctgcgggacctgctgcatctggaccccagatttctggaaagacacctggccggcaccatgagctacttcagcccttaccagctgaccgtgctgcacgttgacggcgaactgtgcgccagagatattcggagcctgatcttcctgagcaaggacaccatcggcagccggtctacccctcagacatttctgcactgggtgtactgcatggaaaacctggacctgctcggccccacagatgtggatgccctgatgtccatgctgagaagcctgagcagagtggacctccagagacaggtgcagacactgatgggactgcacctgagcggacctagccacagccagcactacagacacacccct

SEQ ID NO: 3776 - DNA, 2517 bp, Artificial Sequence
  Synthetic Polynucloetide
atggccttaccagtgaccgccttgctcctgccgctggccttgctgctccacgccgccaggccggcatgccaggtccagctcgtcgagtccggcggcggcctcgtccaggccggcgactccgtcaccctctcctgcaccgcctccggccgcaccttctcctcctacgccctcgcctggttccgccagcgccccggcaaggagcgcgagttcgtcgccggcctccgctggggcggccccaccaactacgccgactccgtcaaggaccgcttcaccatctccggcgactccgccaagcacaccatgtacctccagatgaactccctcaagcccgaggacaccgccgtctactactgcggctacaaccccggcggctgggccgtcccctcccagtacgagtacgactcctggggccagggcacccaggtcaccgtctcctccggtaccggcggaggcggatctggcggcggaggtagcggtggcggaggatctgaattcgaagccgacatctaccagacacctagatacctggtcatcggcaccggcaagaaaatcaccctggaatgcagccagacaatgggccacgacaagatgtactggtatcagcaggaccccggcatggaactgcacctgatccactacagctacggcgtgaacagcaccgagaagggcgatctgtctagcgagagcaccgtgtccagaatcagaaccgagcacttcccactgacactggaaagcgccagacctagccacaccagccagtacctgtgtgcctcttctgaggccagaggactggccgagttcaccgacacacagtatttcggccctggcaccagactgaccgttctcgagatccagaaccctgatcctgccgtgtaccagctgcgggatagcaagagcagcgacaagagcgtgtgtctgttcaccgacttcgacagccagaccaacgtgtcccagagcaaggactccgacgtgtacatcaccgataagtgcgtgctggacatgcggagcatggacttcaagagcaactccgccgtggcctggtccaacaagtccgatttcgcctgcgccaacgccttcaacaacagcattatccccgaggacacattcttcccaagccccgagagcagctgcgacgtgaagctggtggaaaagagcttcgagacagacaccaacctgaacttccagaacctgagcgtgatcggcttcagaatcctgctgctgaaagtggccggctttaacctgctgatgaccctgcggctgtggtccagccgcgccaagagaagcggatctggcgtgaagcagaccctgaatttcgacctgctgaagctggctggcgacgtggaatccaacccaggccctactagtatggactggatttggcgcatccttttccttgtcggcgctgctaccggcgcccattccgggcccatggaccccgacctggaaatcagagccgccttcctgcggcagagaaacacagccctgagaacagaggtggccgagctggaacaagaggtgcagcggctggaaaacgaggtgtcccagtacgagacaagatacggccctctcggaggcggaaaaggatccggcggcggaggatctggcggaggcggatctgggggcggaggctctttcgaacaagttcagcttcaacagcctggcgctgagctggtcaaacctggcgcttctgtgaagatgagctgcaaagccagcggctacgccttcagcagctactggatcaactggatgaagcagaaacccggccagggactcgaatggatcggccaaatctatcccggcgacggcaccgagaacagattcagcgtgaacttccagaaggccgccaagagcttcagcctgaagatcagcgatagccagctgggcgacgccgccatgtacttttgcgcttatagaagcgccgtgaacgcccggctgatgtttggagatggcacacagctggtggtcaagcccaacacgcgtgaggacctgaagaacgtgttcccacctgaggtggccgtgttcgagcctagcgaggccgagatcagccacacccagaaagccaccctcgtgtgcctggctaccggcttctaccccgaccatgtggaactgtcttggtgggtcaacggcaaagaggtgcacagcggcgtgtgtaccgacccccagccactgaaagaacagcccgccctgaacgacagccggtactgcctgagcagcagactgagagtgtccgccaccttctggcagaacccccggaaccacttcagatgccaggtgcagttctacggcctgagcgagaacgacgagtggacccaggacagagccaagcccgtgacccagatcgtgtctgccgaagcctggggcagagccgattgcggctttaccagcgagagctaccagcagggcgtgctgagcgccaccatcctgtacgagatcctgctgggcaaggccaccctgtacgccgtgctggtgtctgccctggtgctgatggctatggtcaagcggaaggacagccgggga

SEQ ID NO: 3777 - DNA, 3183 bp, Artificial Sequence
  Synthetic Polynucloetide
atggccttaccagtgaccgccttgctcctgccgctggccttgctgctccacgccgccaggccggcatgccaggtccagctcgtcgagtccggcggcggcctcgtccaggccggcgactccgtcaccctctcctgcaccgcctccggccgcaccttctcctcctacgccctcgcctggttccgccagcgccccggcaaggagcgcgagttcgtcgccggcctccgctggggcggccccaccaactacgccgactccgtcaaggaccgcttcaccatctccggcgactccgccaagcacaccatgtacctccagatgaactccctcaagcccgaggacaccgccgtctactactgcggctacaaccccggcggctgggccgtcccctcccagtacgagtacgactcctggggccagggcacccaggtcaccgtctcctccggtaccggcggaggcggatctggcggcggaggtagcggtggcggaggatctgaattcgaagccgacatctaccagacacctagatacctggtcatcggcaccggcaagaaaatcaccctggaatgcagccagacaatgggccacgacaagatgtactggtatcagcaggaccccggcatggaactgcacctgatccactacagctacggcgtgaacagcaccgagaagggcgatctgtctagcgagagcaccgtgtccagaatcagaaccgagcacttcccactgacactggaaagcgccagacctagccacaccagccagtacctgtgtgcctcttctgaggccagaggactggccgagttcaccgacacacagtatttcggccctggcaccagactgaccgttctcgagatccagaaccctgatcctgccgtgtaccagctgcgggatagcaagagcagcgacaagagcgtgtgtctgttcaccgacttcgacagccagaccaacgtgtcccagagcaaggactccgacgtgtacatcaccgataagtgcgtgctggacatgcggagcatggacttcaagagcaactccgccgtggcctggtccaacaagtccgatttcgcctgcgccaacgccttcaacaacagcattatccccgaggacacattcttcccaagccccgagagcagctgcgacgtgaagctggtggaaaagagcttcgagacagacaccaacctgaacttccagaacctgagcgtgatcggcttcagaatcctgctgctgaaagtggccggctttaacctgctgatgaccctgcggctgtggtccagccgcgccaagagaagcggatctggcgtgaagcagaccctgaatttcgacctgctgaagctggctggcgacgtggaatccaacccaggccctactagtatggactggatttggcgcatccttttccttgtcggcgctgctaccggcgcccattccgggcccatggaccccgacctggaaatcagagccgccttcctgcggcagagaaacacagccctgagaacagaggtggccgagctggaacaagaggtgcagcggctggaaaacgaggtgtcccagtacgagacaagatacggccctctcggaggcggaaaaggatccggcggcggaggatctggcggaggcggatctgggggcggaggctctttcgaacaagttcagcttcaacagcctggcgctgagctggtcaaacctggcgcttctgtgaagatgagctgcaaagccagcggctacgccttcagcagctactggatcaactggatgaagcagaaacccggccagggactcgaatggatcggccaaatctatcccggcgacggcaccgagaacagattcagcgtgaacttccagaaggccgccaagagcttcagcctgaagatcagcgatagccagctgggcgacgccgccatgtacttttgcgcttatagaagcgccgtgaacgcccggctgatgtttggagatggcacacagctggtggtcaagcccaacacgcgtgaggacctgaagaacgtgttcccacctgaggtggccgtgttcgagcctagcgaggccgagatcagccacacccagaaagccaccctcgtgtgcctggctaccggcttctaccccgaccatgtggaactgtcttggtgggtcaacggcaaagaggtgcacagcggcgtgtgtaccgacccccagccactgaaagaacagcccgccctgaacgacagccggtactgcctgagcagcagactgagagtgtccgccaccttctggcagaacccccggaaccacttcagatgccaggtgcagttctacggcctgagcgagaacgacgagtggacccaggacagagccaagcccgtgacccagatcgtgtctgccgaagcctggggcagagccgattgcggctttaccagcgagagctaccagcagggcgtgctgagcgccaccatcctgtacgagatcctgctgggcaaggccaccctgtacgccgtgctggtgtctgccctggtgctgatggctatggtcaagcggaaggacagccggggaagggccaagcgatctggatctggagcaacaaacttctcactactcaaacaagcaggtgacgtggaggagaatcccgggccttctagaggcgggatccacaccatggctacctacgaggtgctgtgcgaggtggcaagaaagctgggcaccgacgacagagaagtggtgctgttcctgctgaacgtgttcatccctcagcctacactggcccagctgatcggtgcactgagagccctgaaagaggaaggccggctgacctttcctctgctggccgaatgcctgttcagagccggaagaagggatctgctgcgggacctgctgcatctggaccccagatttctggaaagacacctggccggcaccatgagctacttcagcccttaccagctgaccgtgctgcacgttgacggcgaactgtgcgccagagatattcggagcctgatcttcctgagcaaggacaccatcggcagccggtctacccctcagacatttctgcactgggtgtactgcatggaaaacctggacctgctcggccccacagatgtggatgccctgatgtccatgctgagaagcctgagcagagtggacctccagagacaggtgcagacactgatgggactgcacctgagcggacctagccacagccagcactacagacacacccct

SEQ ID NO: 3778 - DNA, 3207 bp, Artificial Sequence
  Synthetic Polynucloetide
atggccttaccagtgaccgccttgctcctgccgctggccttgctgctccacgccgccaggccggcatgccaggtccagctcgtcgagtccggcggcggcctcgtccaggccggcgactccgtcaccctctcctgcaccgcctccggccgcaccttctcctcctacgccctcgcctggttccgccagcgccccggcaaggagcgcgagttcgtcgccggcctccgctggggcggccccaccaactacgccgactccgtcaaggaccgcttcaccatctccggcgactccgccaagcacaccatgtacctccagatgaactccctcaagcccgaggacaccgccgtctactactgcggctacaaccccggcggctgggccgtcccctcccagtacgagtacgactcctggggccagggcacccaggtcaccgtctcctccggtaccggcggaggcggatctggcggcggaggtagcggtggcggaggatctgaattcgaagccgacatctaccagacacctagatacctggtcatcggcaccggcaagaaaatcaccctggaatgcagccagacaatgggccacgacaagatgtactggtatcagcaggaccccggcatggaactgcacctgatccactacagctacggcgtgaacagcaccgagaagggcgatctgtctagcgagagcaccgtgtccagaatcagaaccgagcacttcccactgacactggaaagcgccagacctagccacaccagccagtacctgtgtgcctcttctgaggccagaggactggccgagttcaccgacacacagtatttcggccctggcaccagactgaccgttctcgaggacctgaagaacgtgttcccacctgaggtggccgtgttcgagcctagcgaggccgagatcagccacacccagaaagccaccctcgtgtgcctggctaccggcttctaccccgaccatgtggaactgtcttggtgggtcaacggcaaagaggtgcacagcggcgtgtctaccgacccccagccactgaaagaacagcccgccctgaacgacagccggtactgcctgagcagcagactgagagtgtccgccaccttctggcagaacccccggaaccacttcagatgccaggtgcagttctacggcctgagcgagaacgacgagtggacccaggacagagccaagcccgtgacccagatcgtgtctgccgaagcctggggcagagccgattgcggctttaccagcgagagctaccagcagggcgtgctgagcgccaccatcctgtacgagatcctgctgggcaaggccaccctgtacgccgtgctggtgtctgccctggtgctgatggctatggtcaagcggaaggacagccggggaagggccaagcgatctggatctggagcaacaaacttctcactactcaaacaagcaggtgacgtggaggagaatcccgggcctactagtatggactggatttggcgcatccttttccttgtcggcgctgctaccggcgcccattccgggcccatggaccccgacctggaaatcagagccgccttcctgcggcagagaaacacagccctgagaacagaggtggccgagctggaacaagaggtgcagcggctggaaaacgaggtgtcccagtacgagacaagatacggccctctcggaggcggaaaaggatccggcggcggaggatctggcggaggcggatctgggggcggaggctctttcgaacaagttcagcttcaacagcctggcgctgagctggtcaaacctggcgcttctgtgaagatgagctgcaaagccagcggctacgccttcagcagctactggatcaactggatgaagcagaaacccggccagggactcgaatggatcggccaaatctatcccggcgacggcaccgagaacagattcagcgtgaacttccagaaggccgccaagagcttcagcctgaagatcagcgatagccagctgggcgacgccgccatgtacttttgcgcttatagaagcgccgtgaacgcccggctgatgtttggagatggcacacagctggtggtcaagcccaacacgcgtatccagaaccctgatcctgccgtgtaccagctgcgggatagcaagagcagcgacaagagcgtgtgtctgttcaccgacttcgacagccagaccaacgtgtcccagagcaaggactccgacgtgtacatcaccgataagaccgtgctggacatgcggagcatggacttcaagagcaactccgccgtggcctggtccaacaagtccgatttcgcctgcgccaacgccttcaacaacagcattatccccgaggacacattcttcccaagccccgagagcagctgcgacgtgaagctggtggaaaagagcttcgagacagacaccaacctgaacttccagaacctgagcgtgatcggcttcagaatcctgctgctgaaagtggccggctttaacctgctgatgaccctgcggctgtggtccagccgcgccaagagaagcggatctggcgtgaagcagaccctgaatttcgacctgctgaagctggctggcgacgtggaatccaacccaggcccttctagaggccatatgaccgagtacaagcccacggtgcgcctcgccacccgcgacgacgtccccagggccgtacgcaccctcgccgccgcgttcgccgactaccccgccacgcgccacaccgtcgatccggaccgccacatcgagcgggtcaccgagctgcaagaactcttcctcacgcgcgtcgggctcgacatcggcaaggtgtgggtcgcggacgacggcgccgcggtggcggtctggaccacgccggagagcgtcgaagcgggggcggtgttcgccgagatcggcccgcgcatggccgagttgagcggttcccggctggccgcgcagcaacagatggaaggcctcctggcgccgcaccggcccaaggagcccgcgtggttcctggccaccgtcggcgtctcgcccgaccaccagggcaagggtctgggcagcgccgtcgtgctccccggagtggaggcggccgagcgcgccggggtgcccgccttcctggagacctccgcgccccgcaacctccccttctacgagcggctcggcttcaccgtcaccgccgacgtcgaggtgcccgaaggaccgcgcacctggtgcatgacccgcaagcccggtgcctga

SEQ ID NO: 3779 - DNA, 3453 bp, Artificial Sequence
  Synthetic Polynucloetide
atggccttaccagtgaccgccttgctcctgccgctggccttgctgctccacgccgccaggccggcatgccaggtccagctcgtcgagtccggcggcggcctcgtccaggccggcgactccgtcaccctctcctgcaccgcctccggccgcaccttctcctcctacgccctcgcctggttccgccagcgccccggcaaggagcgcgagttcgtcgccggcctccgctggggcggccccaccaactacgccgactccgtcaaggaccgcttcaccatctccggcgactccgccaagcacaccatgtacctccagatgaactccctcaagcccgaggacaccgccgtctactactgcggctacaaccccggcggctgggccgtcccctcccagtacgagtacgactcctggggccagggcacccaggtcaccgtctcctccggtaccggcggaggcggatctggcggcggaggtagcggtggcggaggatctgaattcgaagccgacatctaccagacacctagatacctggtcatcggcaccggcaagaaaatcaccctggaatgcagccagacaatgggccacgacaagatgtactggtatcagcaggaccccggcatggaactgcacctgatccactacagctacggcgtgaacagcaccgagaagggcgatctgtctagcgagagcaccgtgtccagaatcagaaccgagcacttcccactgacactggaaagcgccagacctagccacaccagccagtacctgtgtgcctcttctgaggccagaggactggccgagttcaccgacacacagtatttcggccctggcaccagactgaccgttctcgaggacctgaagaacgtgttcccacctgaggtggccgtgttcgagcctagcgaggccgagatcagccacacccagaaagccaccctcgtgtgcctggctaccggcttctaccccgaccatgtggaactgtcttggtgggtcaacggcaaagaggtgcacagcggcgtgtctaccgacccccagccactgaaagaacagcccgccctgaacgacagccggtactgcctgagcagcagactgagagtgtccgccaccttctggcagaacccccggaaccacttcagatgccaggtgcagttctacggcctgagcgagaacgacgagtggacccaggacagagccaagcccgtgacccagatcgtgtctgccgaagcctggggcagagccgattgcggctttaccagcgagagctaccagcagggcgtgctgagcgccaccatcctgtacgagatcctgctgggcaaggccaccctgtacgccgtgctggtgtctgccctggtgctgatggctatggtcaagcggaaggacagccggggaagggccaagcgatctggatctggagcaacaaacttctcactactcaaacaagcaggtgacgtggaggagaatcccgggcctactagtatggactggatttggcgcatccttttccttgtcggcgctgctaccggcgcccattccgggcccatggaccccgacctggaaatcagagccgccttcctgcggcagagaaacacagccctgagaacagaggtggccgagctggaacaagaggtgcagcggctggaaaacgaggtgtcccagtacgagacaagatacggccctctcggaggcggaaaaggatccggcggcggaggatctggcggaggcggatctgggggcggaggctctttcgaacaagttcagcttcaacagcctggcgctgagctggtcaaacctggcgcttctgtgaagatgagctgcaaagccagcggctacgccttcagcagctactggatcaactggatgaagcagaaacccggccagggactcgaatggatcggccaaatctatcccggcgacggcaccgagaacagattcagcgtgaacttccagaaggccgccaagagcttcagcctgaagatcagcgatagccagctgggcgacgccgccatgtacttttgcgcttatagaagcgccgtgaacgcccggctgatgtttggagatggcacacagctggtggtcaagcccaacacgcgtgagcagaaactgatctcggaagaggatgggagcggcaccccattcccttctctggcccctcccatcatgctgctggtggacggcaagcagcagatggtggtcgtgtgcctggtgctggatgtggccccacctggactggacagccccatctggtttagcgccggcaatggctctgccctggacgcctttacctacggcccaagccctgccaccgatggcacctggacaaatctggcccacctgagcctgcccagcgaggaactggcttcttgggagcctctcgtgtgccacacaggacctggcgctgagggacacagcagatccacccagcctatgcacctgtctggcgaggccagcaccgccagaacctgtcctcaggaacctctgagaggcacccctggcggagcactgtggctgggagtgctgagactgctgctgttcaagctgctgctgtttgacctgctgctgacctgctcctgtctgtgcgatcctgccggccctctgccttctcctgccaccaccacaagactgagagccctgggcagccacagactgcaccctgccacagagacaggcggcagagaggccacaagcagccctagaccccagcccagagacagaagatggggcgataccccccctggcagaaagcctggatctccagtccgcgccaagagaagcggatctggcgtgaagcagaccctgaatttcgacctgctgaagctggctggcgacgtggaatccaacccaggcccttctagaggccatatgaccgagtacaagcccacggtgcgcctcgccacccgcgacgacgtccccagggccgtacgcaccctcgccgccgcgttcgccgactaccccgccacgcgccacaccgtcgatccggaccgccacatcgagcgggtcaccgagctgcaagaactcttcctcacgcgcgtcgggctcgacatcggcaaggtgtgggtcgcggacgacggcgccgcggtggcggtctggaccacgccggagagcgtcgaagcgggggcggtgttcgccgagatcggcccgcgcatggccgagttgagcggttcccggctggccgcgcagcaacagatggaaggcctcctggcgccgcaccggcccaaggagcccgcgtggttcctggccaccgtcggcgtctcgcccgaccaccagggcaagggtctgggcagcgccgtcgtgctccccggagtggaggcggccgagcgcgccggggtgcccgccttcctggagacctccgcgccccgcaacctccccttctacgagcggctcggcttcaccgtcaccgccgacgtcgaggtgcccgaaggaccgcgcacctggtgcatgacccgcaagcccggtgcctga

SEQ ID NO: 3780 - DNA, 3318 bp, Artificial Sequence
  Synthetic Polynucloetide
atggccttaccagtgaccgccttgctcctgccgctggccttgctgctccacgccgccaggccggcatgccaggtccagctcgtcgagtccggcggcggcctcgtccaggccggcgactccgtcaccctctcctgcaccgcctccggccgcaccttctcctcctacgccctcgcctggttccgccagcgccccggcaaggagcgcgagttcgtcgccggcctccgctggggcggccccaccaactacgccgactccgtcaaggaccgcttcaccatctccggcgactccgccaagcacaccatgtacctccagatgaactccctcaagcccgaggacaccgccgtctactactgcggctacaaccccggcggctgggccgtcccctcccagtacgagtacgactcctggggccagggcacccaggtcaccgtctcctccggtaccggcggaggcggatctggcggcggaggtagcggtggcggaggatctgaattcgaagccgacatctaccagacacctagatacctggtcatcggcaccggcaagaaaatcaccctggaatgcagccagacaatgggccacgacaagatgtactggtatcagcaggaccccggcatggaactgcacctgatccactacagctacggcgtgaacagcaccgagaagggcgatctgtctagcgagagcaccgtgtccagaatcagaaccgagcacttcccactgacactggaaagcgccagacctagccacaccagccagtacctgtgtgcctcttctgaggccagaggactggccgagttcaccgacacacagtatttcggccctggcaccagactgaccgttctcgaggggaaaccaattcccaaccctcttctgggactggattcaaccggcagcggcgacaagcagctggacgccgacgtgtcccccaagcctaccatcttcctgccctctatcgccgagacaaagctccagaaggccggcacctacctgtgcctgctggaaaagttcttcccagatgtgattaagatccactggcaggaaaagaagtccaacaccatcctgggcagccaggaaggcaacaccatgaagaccaacgacacctacatgaagttcagctggctgaccgtgcccgagaagtccctggacaaagaacacagatgcatcgtgcggcacgaaaacaacaagaacggcgtggaccaggaaatcatcttcccacccatcaagaccgatgtgattacaatggaccccaaggacaactgctccaaggacgccaacgataccctgctgctccagctgaccaacaccagcgcctactacatgtacttgttgctgctgctgaagtccgtggtgtacttcgccatcatcacatgctgcctgctgcggagaaccgccttctgctgcaacggcgagaagtctagggccaagcgatctggatctggagcaacaaacttctcactactcaaacaagcaggtgacgtggaggagaatcccgggcctactagtatggactggatttggcgcatccttttccttgtcggcgctgctaccggcgcccattccgggcccatggaccccgacctggaaatcagagccgccttcctgcggcagagaaacacagccctgagaacagaggtggccgagctggaacaagaggtgcagcggctggaaaacgaggtgtcccagtacgagacaagatacggccctctcggaggcggaaaaggatccggcggcggaggatctggcggaggcggatctgggggcggaggctctttcgaacaagttcagcttcaacagcctggcgctgagctggtcaaacctggcgcttctgtgaagatgagctgcaaagccagcggctacgccttcagcagctactggatcaactggatgaagcagaaacccggccagggactcgaatggatcggccaaatctatcccggcgacggcaccgagaacagattcagcgtgaacttccagaaggccgccaagagcttcagcctgaagatcagcgatagccagctgggcgacgccgccatgtacttttgcgcttatagaagcgccgtgaacgcccggctgatgtttggagatggcacacagctggtggtcaagcccaacacgcgtgagcagaaactgatctcggaagaggatgggagcggcagccagcctcacaccaagcccagcgtgttcgtgatgaagaacggcaccaacgtggcctgcctcgtgaaagagttctaccccaaggacatcaggatcaacctggtgtccagcaagaagatcaccgagttcgaccccgccatcgtgatctcccccagcggcaagtacaacgccgtgaagctggggaagtacgaggacagcaacagcgtgacctgctccgtgcagcacgacaacaagaccgtgcacagcaccgactttgaagtgaaaaccgactccaccgaccacgtgaagcccaaagagacagagaacaccaagcagcccagcaagagctgccacaagcccaaggccatcgtgcacaccgagaaagtgaacatgatgagcctgaccgtgctgggcctgcggatgctgttcgccaaaaccgtggccgtgaacttcctgctgaccgccaagctgttcttcctccgcgccaagagaagcggatctggcgtgaagcagaccctgaatttcgacctgctgaagctggctggcgacgtggaatccaacccaggcccttctagaggccatatgaccgagtacaagcccacggtgcgcctcgccacccgcgacgacgtccccagggccgtacgcaccctcgccgccgcgttcgccgactaccccgccacgcgccacaccgtcgatccggaccgccacatcgagcgggtcaccgagctgcaagaactcttcctcacgcgcgtcgggctcgacatcggcaaggtgtgggtcgcggacgacggcgccgcggtggcggtctggaccacgccggagagcgtcgaagcgggggcggtgttcgccgagatcggcccgcgcatggccgagttgagcggttcccggctggccgcgcagcaacagatggaaggcctcctggcgccgcaccggcccaaggagcccgcgtggttcctggccaccgtcggcgtctcgcccgaccaccagggcaagggtctgggcagcgccgtcgtgctccccggagtggaggcggccgagcgcgccggggtgcccgccttcctggagacctccgcgccccgcaacctccccttctacgagcggctcggcttcaccgtcaccgccgacgtcgaggtgcccgaaggaccgcgcacctggtgcatgacccgcaagcccggtgcctga

SEQ ID NO: 3781 - DNA, 2529 bp, Artificial Sequence
  Synthetic Polynucloetide
atggccttaccagtgaccgccttgctcctgccgctggccttgctgctccacgccgccaggccggcatgccaggtccagctcgtcgagtccggcggcggcctcgtccaggccggcgactccgtcaccctctcctgcaccgcctccggccgcaccttctcctcctacgccctcgcctggttccgccagcgccccggcaaggagcgcgagttcgtcgccggcctccgctggggcggccccaccaactacgccgactccgtcaaggaccgcttcaccatctccggcgactccgccaagcacaccatgtacctccagatgaactccctcaagcccgaggacaccgccgtctactactgcggctacaaccccggcggctgggccgtcccctcccagtacgagtacgactcctggggccagggcacccaggtcaccgtctcctccggtaccggcggaggcggatctggcggcggaggtagcggtggcggaggatctgaattcgaagccgacatctaccagacacctagatacctggtcatcggcaccggcaagaaaatcaccctggaatgcagccagacaatgggccacgacaagatgtactggtatcagcaggaccccggcatggaactgcacctgatccactacagctacggcgtgaacagcaccgagaagggcgatctgtctagcgagagcaccgtgtccagaatcagaaccgagcacttcccactgacactggaaagcgccagacctagccacaccagccagtacctgtgtgcctcttctgaggccagaggactggccgagttcaccgacacacagtatttcggccctggcaccagactgaccgttctcgagagccagcctcacaccaagcccagcgtgttcgtgatgaagaacggcaccaacgtggcctgcctcgtgaaagagttctaccccaaggacatcaggatcaacctggtgtccagcaagaagatcaccgagttcgaccccgccatcgtgatctcccccagcggcaagtacaacgccgtgaagctggggaagtacgaggacagcaacagcgtgacctgctccgtgcagcacgacaacaagaccgtgcacagcaccgactttgaagtgaaaaccgactccaccgaccacgtgaagcccaaagagacagagaacaccaagcagcccagcaagagctgccacaagcccaaggccatcgtgcacaccgagaaagtgaacatgatgagcctgaccgtgctgggcctgcggatgctgttcgccaaaaccgtggccgtgaacttcctgctgaccgccaagctgttcttcctcagggccaagcgatctggatctggagcaacaaacttctcactactcaaacaagcaggtgacgtggaggagaatcccgggcctactagtatggactggatttggcgcatccttttccttgtcggcgctgctaccggcgcccattccgggcccatggaccccgacctggaaatcagagccgccttcctgcggcagagaaacacagccctgagaacagaggtggccgagctggaacaagaggtgcagcggctggaaaacgaggtgtcccagtacgagacaagatacggccctctcggaggcggaaaaggatccggcggcggaggatctggcggaggcggatctgggggcggaggctctttcgaacaagttcagcttcaacagcctggcgctgagctggtcaaacctggcgcttctgtgaagatgagctgcaaagccagcggctacgccttcagcagctactggatcaactggatgaagcagaaacccggccagggactcgaatggatcggccaaatctatcccggcgacggcaccgagaacagattcagcgtgaacttccagaaggccgccaagagcttcagcctgaagatcagcgatagccagctgggcgacgccgccatgtacttttgcgcttatagaagcgccgtgaacgcccggctgatgtttggagatggcacacagctggtggtcaagcccaacacgcgtgacaagcagctggacgccgacgtgtcccccaagcctaccatcttcctgccctctatcgccgagacaaagctccagaaggccggcacctacctgtgcctgctggaaaagttcttcccagatgtgattaagatccactggcaggaaaagaagtccaacaccatcctgggcagccaggaaggcaacaccatgaagaccaacgacacctacatgaagttcagctggctgaccgtgcccgagaagtccctggacaaagaacacagatgcatcgtgcggcacgaaaacaacaagaacggcgtggaccaggaaatcatcttcccacccatcaagaccgatgtgattacaatggaccccaaggacaactgctccaaggacgccaacgataccctgctgctccagctgaccaacaccagcgcctactacatgtacttgttgctgctgctgaagtccgtggtgtacttcgccatcatcacatgctgcctgctgcggagaaccgccttctgctgcaacggcgagaagtct

SEQ ID NO: 3782 - DNA, 3738 bp, Artificial Sequence
  Synthetic Polynucloetide
atggccttaccagtgaccgccttgctcctgccgctggccttgctgctccacgccgccaggccggcatgccaggtccagctcgtcgagtccggcggcggcctcgtccaggccggcgactccgtcaccctctcctgcaccgcctccggccgcaccttctcctcctacgccctcgcctggttccgccagcgccccggcaaggagcgcgagttcgtcgccggcctccgctggggcggccccaccaactacgccgactccgtcaaggaccgcttcaccatctccggcgactccgccaagcacaccatgtacctccagatgaactccctcaagcccgaggacaccgccgtctactactgcggctacaaccccggcggctgggccgtcccctcccagtacgagtacgactcctggggccagggcacccaggtcaccgtctcctccggtaccggcggaggcggatctggcggcggaggtagcggtggcggaggatctgaattcgaagccgacatctaccagacacctagatacctggtcatcggcaccggcaagaaaatcaccctggaatgcagccagacaatgggccacgacaagatgtactggtatcagcaggaccccggcatggaactgcacctgatccactacagctacggcgtgaacagcaccgagaagggcgatctgtctagcgagagcaccgtgtccagaatcagaaccgagcacttcccactgacactggaaagcgccagacctagccacaccagccagtacctgtgtgcctcttctgaggccagaggactggccgagttcaccgacacacagtatttcggccctggcaccagactgaccgttggacagcctaaggccaatcctaccgtgacactgttccctccaagcagcgaagaactccaggccaacaaggccacacttgtgtgcctgatctccgacttctaccctggggctgtgacagtggcttggaaggccgatggatctcctgtgaaagccggcgtggaaaccaccaagccatccaagcagagcaacaacaaatacgccgccagctcctacctgagcctgacacctgagcagtggaagtcccacagatcctacagctgccaagtgacccacgaaggcagcaccgtggaaaagacagtggcccctacagagtgcagcggatcccagagcttcggcctgctggaccccaagctgtgctacctgctggatggcatcctgttcatctacggcgtgatcctgaccgccctgttcctgagagtgaagttcagcagaagcgccgacgcccctgcctaccagcagggacagaaccaactgtacaacgagctgaacctgggcagacgggaagagtacgacgtgctggacaagcggagaggcagggaccctgagatgggcggaaagccccagcggagaaagaacccccaggaaggactgtataacgaactccagaaagacaagatggccgaagcctacagcgagatcggcatgaagggcgagcggagaagaggcaagggccacgatggcctgtaccagggcctgagcaccgccaccaaggacacctatgacgccctgcacatgcaggccctgcctccaagaagggccaagcgatctggatctggagcaacaaacttctcactactcaaacaagcaggtgacgtggaggagaatcccgggcctactagtatggactggatttggcgcatccttttccttgtcggcgctgctaccggcgcccattccgggcccatggaccccgacctggaaatcagagccgccttcctgcggcagagaaacacagccctgagaacagaggtggccgagctggaacaagaggtgcagcggctggaaaacgaggtgtcccagtacgagacaagatacggccctctcggaggcggaaaaggatccggcggcggaggatctggcggaggcggatctgggggcggaggctctttcgaacaagttcagcttcaacagcctggcgctgagctggtcaaacctggcgcttctgtgaagatgagctgcaaagccagcggctacgccttcagcagctactggatcaactggatgaagcagaaacccggccagggactcgaatggatcggccaaatctatcccggcgacggcaccgagaacagattcagcgtgaacttccagaaggccgccaagagcttcagcctgaagatcagcgatagccagctgggcgacgccgccatgtacttttgcgcttatagaagcgccgtgaacgcccggctgatgtttggagatggcacacagctggtggtcaagcccaacgcctctacaaagggaccctccgtgtttcctctggctcccagcagcaagtctacaagcggaggaacagccgctctgggctgcctggtcaaggattactttcccgagcctgtgaccgtgtcctggaatagcggagcactgacaagcggcgtgcacacctttccagccgtgctgcaaagcagcggcctgtactctctgagcagcgtggtcacagtgcctagctctagcctgggcacccagacctacatctgcaatgtgaaccacaagcctagcaacaccaaggtggacaagagagtggaacccaagagctgtggtacccagagttttgggttgttggaccctaaattgtgctatctgttggacggaatcctgttcatttacggagtgatcctgaccgcattgttcctgcgggttaagttttccagatccgcagacgcacccgcttaccaacaagggcagaaccaactctacaatgaacttaatttggggcggagggaagagtacgacgttctggacaaaaggaggggacgagatcccgagatgggcggaaagcctcagcgaaggaagaatccgcaagaggggctttataacgaactccagaaagataaaatggcagaagcctatagtgagattgggatgaagggagaaaggaggaggggtaaaggtcacgatgggttgtaccaaggattgagcacagccactaaagatacctatgatgcgctccacatgcaggccctgccgccaagacgcgccaagagaagcggatctggcgtgaagcagaccctgaatttcgacctgctgaagctggctggcgacgtggaatccaacccaggcccttctagaggccatatgaccgagtacaagcccacggtgcgcctcgccacccgcgacgacgtccccagggccgtacgcaccctcgccgccgcgttcgccgactaccccgccacgcgccacaccgtcgatccggaccgccacatcgagcgggtcaccgagctgcaagaactcttcctcacgcgcgtcgggctcgacatcggcaaggtgtgggtcgcggacgacggcgccgcggtggcggtctggaccacgccggagagcgtcgaagcgggggcggtgttcgccgagatcggcccgcgcatggccgagttgagcggttcccggctggccgcgcagcaacagatggaaggcctcctggcgccgcaccggcccaaggagcccgcgtggttcctggccaccgtcggcgtctcgcccgaccaccagggcaagggtctgggcagcgccgtcgtgctccccggagtggaggcggccgagcgcgccggggtgcccgccttcctggagacctccgcgccccgcaacctccccttctacgagcggctcggcttcaccgtcaccgccgacgtcgaggtgcccgaaggaccgcgcacctggtgcatgacccgcaagcccggtgcctga

SEQ ID NO: 3783 - DNA, 3093 bp, Artificial Sequence
  Synthetic Polynucloetide
atggccttaccagtgaccgccttgctcctgccgctggccttgctgctccacgccgccaggccggcatgccaggtccagctcgtcgagtccggcggcggcctcgtccaggccggcgactccgtcaccctctcctgcaccgcctccggccgcaccttctcctcctacgccctcgcctggttccgccagcgccccggcaaggagcgcgagttcgtcgccggcctccgctggggcggccccaccaactacgccgactccgtcaaggaccgcttcaccatctccggcgactccgccaagcacaccatgtacctccagatgaactccctcaagcccgaggacaccgccgtctactactgcggctacaaccccggcggctgggccgtcccctcccagtacgagtacgactcctggggccagggcacccaggtcaccgtctcctccggtaccggcggaggcggatctggcggcggaggtagcggtggcggaggatctgaattcgaagccgacatctaccagacacctagatacctggtcatcggcaccggcaagaaaatcaccctggaatgcagccagacaatgggccacgacaagatgtactggtatcagcaggaccccggcatggaactgcacctgatccactacagctacggcgtgaacagcaccgagaagggcgatctgtctagcgagagcaccgtgtccagaatcagaaccgagcacttcccactgacactggaaagcgccagacctagccacaccagccagtacctgtgtgcctcttctgaggccagaggactggccgagttcaccgacacacagtatttcggccctggcaccagactgaccgttctcgaggacctgaagaacgtgttcccacctgaggtggccgtgttcgagcctagcgaggccgagatcagccacacccagaaagccaccctcgtgtgcctggctaccggcttctaccccgaccatgtggaactgtcttggtgggtcaacggcaaagaggtgcacagcggcgtgtctaccgacccccagccactgaaagaacagcccgccctgaacgacagccggtactgcctgagcagcagactgagagtgtccgccaccttctggcagaacccccggaaccacttcagatgccaggtgcagttctacggcctgagcgagaacgacgagtggacccaggacagagccaagcccgtgacccagatcgtgtctgccgaagcctggggcagagccgattgcggatcccagagcttcggcctgctggaccccaagctgtgctacctgctggatggcatcctgttcatctacggcgtgatcctgaccgccctgttcctgagagtgaagttcagcagaagcgccgacgcccctgcctaccagcagggacagaaccaactgtacaacgagctgaacctgggcagacgggaagagtacgacgtgctggacaagcggagaggcagggaccctgagatgggcggaaagccccagcggagaaagaacccccaggaaggactgtataacgaactccagaaagacaagatggccgaagcctacagcgagatcggcatgaagggcgagcggagaagaggcaagggccacgatggcctgtaccagggcctgagcaccgccaccaaggacacctatgacgccctgcacatgcaggccctgcctccaagaagggccaagcgatctggatctggagcaacaaacttctcactactcaaacaagcaggtgacgtggaggagaatcccgggcctactagtatggactggatttggcgcatccttttccttgtcggcgctgctaccggcgcccattccgggcccatggaccccgacctggaaatcagagccgccttcctgcggcagagaaacacagccctgagaacagaggtggccgagctggaacaagaggtgcagcggctggaaaacgaggtgtcccagtacgagacaagatacggccctctcggaggcggaaaaggatccggcggcggaggatctggcggaggcggatctgggggcggaggctctttcgaacaagttcagcttcaacagcctggcgctgagctggtcaaacctggcgcttctgtgaagatgagctgcaaagccagcggctacgccttcagcagctactggatcaactggatgaagcagaaacccggccagggactcgaatggatcggccaaatctatcccggcgacggcaccgagaacagattcagcgtgaacttccagaaggccgccaagagcttcagcctgaagatcagcgatagccagctgggcgacgccgccatgtacttttgcgcttatagaagcgccgtgaacgcccggctgatgtttggagatggcacacagctggtggtcaagcccaacacgcgtatccagaaccctgatcctgccgtgtaccagctgcgggatagcaagagcagcgacaagagcgtgtgtctgttcaccgacttcgacagccagaccaacgtgtcccagagcaaggactccgacgtgtacatcaccgataagaccgtgctggacatgcggagcatggacttcaagagcaactccgccgtggcctggtccaacaagtccgatttcgcctgcgccaacgccttcaacaacagcattatccccgaggacacattcttcccaagccccgagagcagctgcggtacccagagttttgggttgttggaccctaaattgtgctatctgttggacggaatcctgttcatttacggagtgatcctgaccgcattgttcctgcgggttaagttttccagatccgcagacgcacccgcttaccaacaagggcagaaccaactctacaatgaacttaatttggggcggagggaagagtacgacgttctggacaaaaggaggggacgagatcccgagatgggcggaaagcctcagcgaaggaagaatccgcaagaggggctttataacgaactccagaaagataaaatggcagaagcctatagtgagattgggatgaagggagaaaggaggaggggtaaaggtcacgatgggttgtaccaaggattgagcacagccactaaagatacctatgatgcgctccacatgcaggccctgccgccaaga

SEQ ID NO: 3784 - DNA, 3093 bp, Artificial Sequence
  Synthetic Polynucloetide
atggccttaccagtgaccgccttgctcctgccgctggccttgctgctccacgccgccaggccggcatgccaggtccagctcgtcgagtccggcggcggcctcgtccaggccggcgactccgtcaccctctcctgcaccgcctccggccgcaccttctcctcctacgccctcgcctggttccgccagcgccccggcaaggagcgcgagttcgtcgccggcctccgctggggcggccccaccaactacgccgactccgtcaaggaccgcttcaccatctccggcgactccgccaagcacaccatgtacctccagatgaactccctcaagcccgaggacaccgccgtctactactgcggctacaaccccggcggctgggccgtcccctcccagtacgagtacgactcctggggccagggcacccaggtcaccgtctcctccggtaccggcggaggcggatctggcggcggaggtagcggtggcggaggatctgaattcgaagccgacatctaccagacacctagatacctggtcatcggcaccggcaagaaaatcaccctggaatgcagccagacaatgggccacgacaagatgtactggtatcagcaggaccccggcatggaactgcacctgatccactacagctacggcgtgaacagcaccgagaagggcgatctgtctagcgagagcaccgtgtccagaatcagaaccgagcacttcccactgacactggaaagcgccagacctagccacaccagccagtacctgtgtgcctcttctgaggccagaggactggccgagttcaccgacacacagtatttcggccctggcaccagactgaccgttctcgaggacctgaagaacgtgttcccacctgaggtggccgtgttcgagcctagcaaggccgagatcgcccacacccagaaagccaccctcgtgtgcctggctaccggcttctaccccgaccatgtggaactgtcttggtgggtcaacggcaaagaggtgcacagcggcgtgtgtaccgacccccagccactgaaagaacagcccgccctgaacgacagccggtactgcctgagcagcagactgagagtgtccgccaccttctggcagaacccccggaaccacttcagatgccaggtgcagttctacggcctgagcgagaacgacgagtggacccaggacagagccaagcccgtgacccagatcgtgtctgccgaagcctggggcagagccgattgcggatcccagagcttcggcctgctggaccccaagctgtgctacctgctggatggcatcctgttcatctacggcgtgatcctgaccgccctgttcctgagagtgaagttcagcagaagcgccgacgcccctgcctaccagcagggacagaaccaactgtacaacgagctgaacctgggcagacgggaagagtacgacgtgctggacaagcggagaggcagggaccctgagatgggcggaaagccccagcggagaaagaacccccaggaaggactgtataacgaactccagaaagacaagatggccgaagcctacagcgagatcggcatgaagggcgagcggagaagaggcaagggccacgatggcctgtaccagggcctgagcaccgccaccaaggacacctatgacgccctgcacatgcaggccctgcctccaagaagggccaagcgatctggatctggagcaacaaacttctcactactcaaacaagcaggtgacgtggaggagaatcccgggcctactagtatggactggatttggcgcatccttttccttgtcggcgctgctaccggcgcccattccgggcccatggaccccgacctggaaatcagagccgccttcctgcggcagagaaacacagccctgagaacagaggtggccgagctggaacaagaggtgcagcggctggaaaacgaggtgtcccagtacgagacaagatacggccctctcggaggcggaaaaggatccggcggcggaggatctggcggaggcggatctgggggcggaggctctttcgaacaagttcagcttcaacagcctggcgctgagctggtcaaacctggcgcttctgtgaagatgagctgcaaagccagcggctacgccttcagcagctactggatcaactggatgaagcagaaacccggccagggactcgaatggatcggccaaatctatcccggcgacggcaccgagaacagattcagcgtgaacttccagaaggccgccaagagcttcagcctgaagatcagcgatagccagctgggcgacgccgccatgtacttttgcgcttatagaagcgccgtgaacgcccggctgatgtttggagatggcacacagctggtggtcaagcccaacacgcgtatccagaaccctgatcctgccgtgtaccagctgcgggatagcaagagcagcgacaagagcgtgtgtctgttcaccgacttcgacagccagaccaacgtgtcccagagcaaggactccgacgtgtacatcaccgataagtgcgtgctggacatgcggagcatggacttcaagagcaactccgccgtggcctggtccaacaagtccgatttcgcctgcgccaacgccttcaacaacagcattatccccgaggacacattcttcccaagcagcgacgtgccctgcggtacccagagttttgggttgttggaccctaaattgtgctatctgttggacggaatcctgttcatttacggagtgatcctgaccgcattgttcctgcgggttaagttttccagatccgcagacgcacccgcttaccaacaagggcagaaccaactctacaatgaacttaatttggggcggagggaagagtacgacgttctggacaaaaggaggggacgagatcccgagatgggcggaaagcctcagcgaaggaagaatccgcaagaggggctttataacgaactccagaaagataaaatggcagaagcctatagtgagattgggatgaagggagaaaggaggaggggtaaaggtcacgatgggttgtaccaaggattgagcacagccactaaagatacctatgatgcgctccacatgcaggccctgccgccaaga

SEQ ID NO: 3785 - DNA, 3306 bp, Artificial Sequence
  Synthetic Polynucloetide
atggccttaccagtgaccgccttgctcctgccgctggccttgctgctccacgccgccaggccggcatgccaggtccagctcgtcgagtccggcggcggcctcgtccaggccggcgactccgtcaccctctcctgcaccgcctccggccgcaccttctcctcctacgccctcgcctggttccgccagcgccccggcaaggagcgcgagttcgtcgccggcctccgctggggcggccccaccaactacgccgactccgtcaaggaccgcttcaccatctccggcgactccgccaagcacaccatgtacctccagatgaactccctcaagcccgaggacaccgccgtctactactgcggctacaaccccggcggctgggccgtcccctcccagtacgagtacgactcctggggccagggcacccaggtcaccgtctcctccggtaccggcggaggcggatctggcggcggaggtagcggtggcggaggatctgaattcgaagccgacatctaccagacacctagatacctggtcatcggcaccggcaagaaaatcaccctggaatgcagccagacaatgggccacgacaagatgtactggtatcagcaggaccccggcatggaactgcacctgatccactacagctacggcgtgaacagcaccgagaagggcgatctgtctagcgagagcaccgtgtccagaatcagaaccgagcacttcccactgacactggaaagcgccagacctagccacaccagccagtacctgtgtgcctcttctgaggccagaggactggccgagttcaccgacacacagtatttcggccctggcaccagactgaccgttctcgaggggaaaccaattcccaaccctcttctgggactggattcaaccggcagcggcgaggacctgaagaacgtgttcccacctgaggtggccgtgttcgagcctagcgaggccgagatcagccacacccagaaagccaccctcgtgtgcctggctaccggcttctaccccgaccatgtggaactgtcttggtgggtcaacggcaaagaggtgcacagcggcgtgtctaccgacccccagccactgaaagaacagcccgccctgaacgacagccggtactgcctgagcagcagactgagagtgtccgccaccttctggcagaacccccggaaccacttcagatgccaggtgcagttctacggcctgagcgagaacgacgagtggacccaggacagagccaagcccgtgacccagatcgtgtctgccgaagcctggggcagagccgattgcggatcccagagcttcggcctgctggaccccaagctgtgctacctgctggatggcatcctgttcatctacggcgtgatcctgaccgccctgttcctgagagtgaagttcagcagaagcgccgacgcccctgcctaccagcagggacagaaccaactgtacaacgagctgaacctgggcagacgggaagagtacgacgtgctggacaagcggagaggcagggaccctgagatgggcggaaagccccagcggagaaagaacccccaggaaggactgtataacgaactccagaaagacaagatggccgaagcctacagcgagatcggcatgaagggcgagcggagaagaggcaagggccacgatggcctgtaccagggcctgagcaccgccaccaaggacacctatgacgccctgcacatgcaggccctgcctccaagaagggccaagcgatctggatctggagcaacaaacttctcactactcaaacaagcaggtgacgtggaggagaatcccgggcctactagtatggactggatttggcgcatccttttccttgtcggcgctgctaccggcgcccattccgggcccatggaccccgacctggaaatcagagccgccttcctgcggcagagaaacacagccctgagaacagaggtggccgagctggaacaagaggtgcagcggctggaaaacgaggtgtcccagtacgagacaagatacggccctctcggaggcggaaaaggatccggcggcggaggatctggcggaggcggatctgggggcggaggctctttcgaacaagttcagcttcaacagcctggcgctgagctggtcaaacctggcgcttctgtgaagatgagctgcaaagccagcggctacgccttcagcagctactggatcaactggatgaagcagaaacccggccagggactcgaatggatcggccaaatctatcccggcgacggcaccgagaacagattcagcgtgaacttccagaaggccgccaagagcttcagcctgaagatcagcgatagccagctgggcgacgccgccatgtacttttgcgcttatagaagcgccgtgaacgcccggctgatgtttggagatggcacacagctggtggtcaagcccaacacgcgtgagcagaaactgatctcggaagaggatgggagcggcatccagaaccctgatcctgccgtgtaccagctgcgggatagcaagagcagcgacaagagcgtgtgtctgttcaccgacttcgacagccagaccaacgtgtcccagagcaaggactccgacgtgtacatcaccgataagaccgtgctggacatgcggagcatggacttcaagagcaactccgccgtggcctggtccaacaagtccgatttcgcctgcgccaacgccttcaacaacagcattatccccgaggacacattcttcccaagccccgagagcagctgcggtacccagagttttgggttgttggaccctaaattgtgctatctgttggacggaatcctgttcatttacggagtgatcctgaccgcattgttcctgaggagcaagcggtcacggctgctccacagcgattacatgaatatgacaccacgaagaccgggtcctactcgcaaacactaccaaccctacgcacctccccgcgactttgcagcgtaccgatctcgggttaagttttccagatccgcagacgcacccgcttaccaacaagggcagaaccaactctacaatgaacttaatttggggcggagggaagagtacgacgttctggacaaaaggaggggacgagatcccgagatgggcggaaagcctcagcgaaggaagaatccgcaagaggggctttataacgaactccagaaagataaaatggcagaagcctatagtgagattgggatgaagggagaaaggaggaggggtaaaggtcacgatgggttgtaccaaggattgagcacagccactaaagatacctatgatgcgctccacatgcaggccctgccgccaaga

SEQ ID NO: 3786 - DNA, 3429 bp, Artificial Sequence
  Synthetic Polynucloetide
atggccttaccagtgaccgccttgctcctgccgctggccttgctgctccacgccgccaggccggcatgccaggtccagctcgtcgagtccggcggcggcctcgtccaggccggcgactccgtcaccctctcctgcaccgcctccggccgcaccttctcctcctacgccctcgcctggttccgccagcgccccggcaaggagcgcgagttcgtcgccggcctccgctggggcggccccaccaactacgccgactccgtcaaggaccgcttcaccatctccggcgactccgccaagcacaccatgtacctccagatgaactccctcaagcccgaggacaccgccgtctactactgcggctacaaccccggcggctgggccgtcccctcccagtacgagtacgactcctggggccagggcacccaggtcaccgtctcctccggtaccggcggaggcggatctggcggcggaggtagcggtggcggaggatctgaattcgaagccgacatctaccagacacctagatacctggtcatcggcaccggcaagaaaatcaccctggaatgcagccagacaatgggccacgacaagatgtactggtatcagcaggaccccggcatggaactgcacctgatccactacagctacggcgtgaacagcaccgagaagggcgatctgtctagcgagagcaccgtgtccagaatcagaaccgagcacttcccactgacactggaaagcgccagacctagccacaccagccagtacctgtgtgcctcttctgaggccagaggactggccgagttcaccgacacacagtatttcggccctggcaccagactgaccgttctcgaggggaaaccaattcccaaccctcttctgggactggattcaaccggcagcggcgaggacctgaagaacgtgttcccacctgaggtggccgtgttcgagcctagcgaggccgagatcagccacacccagaaagccaccctcgtgtgcctggctaccggcttctaccccgaccatgtggaactgtcttggtgggtcaacggcaaagaggtgcacagcggcgtgtctaccgacccccagccactgaaagaacagcccgccctgaacgacagccggtactgcctgagcagcagactgagagtgtccgccaccttctggcagaacccccggaaccacttcagatgccaggtgcagttctacggcctgagcgagaacgacgagtggacccaggacagagccaagcccgtgacccagatcgtgtctgccgaagcctggggcagagccgattgcggatcccagagcttcggcctgctggaccccaagctgtgctacctgctggatggcatcctgttcatctacggcgtgatcctgaccgccctgttcctgaggagtaagaggagcaggctcctgcacagtgactacatgaacatgactccacgccgccccggacccacccgcaagcattaccagccctatgccccaccacgcgacttcgcagcctatcgctccagagtgaagttcagcagaagcgccgacgcccctgcctaccagcagggacagaaccaactgtacaacgagctgaacctgggcagacgggaagagtacgacgtgctggacaagcggagaggcagggaccctgagatgggcggaaagccccagcggagaaagaacccccaggaaggactgtataacgaactccagaaagacaagatggccgaagcctacagcgagatcggcatgaagggcgagcggagaagaggcaagggccacgatggcctgtaccagggcctgagcaccgccaccaaggacacctatgacgccctgcacatgcaggccctgcctccaagaagggccaagcgatctggatctggagcaacaaacttctcactactcaaacaagcaggtgacgtggaggagaatcccgggcctactagtatggactggatttggcgcatccttttccttgtcggcgctgctaccggcgcccattccgggcccatggaccccgacctggaaatcagagccgccttcctgcggcagagaaacacagccctgagaacagaggtggccgagctggaacaagaggtgcagcggctggaaaacgaggtgtcccagtacgagacaagatacggccctctcggaggcggaaaaggatccggcggcggaggatctggcggaggcggatctgggggcggaggctctttcgaacaagttcagcttcaacagcctggcgctgagctggtcaaacctggcgcttctgtgaagatgagctgcaaagccagcggctacgccttcagcagctactggatcaactggatgaagcagaaacccggccagggactcgaatggatcggccaaatctatcccggcgacggcaccgagaacagattcagcgtgaacttccagaaggccgccaagagcttcagcctgaagatcagcgatagccagctgggcgacgccgccatgtacttttgcgcttatagaagcgccgtgaacgcccggctgatgtttggagatggcacacagctggtggtcaagcccaacacgcgtgagcagaaactgatctcggaagaggatgggagcggcatccagaaccctgatcctgccgtgtaccagctgcgggatagcaagagcagcgacaagagcgtgtgtctgttcaccgacttcgacagccagaccaacgtgtcccagagcaaggactccgacgtgtacatcaccgataagaccgtgctggacatgcggagcatggacttcaagagcaactccgccgtggcctggtccaacaagtccgatttcgcctgcgccaacgccttcaacaacagcattatccccgaggacacattcttcccaagccccgagagcagctgcggtacccagagttttgggttgttggaccctaaattgtgctatctgttggacggaatcctgttcatttacggagtgatcctgaccgcattgttcctgaggagcaagcggtcacggctgctccacagcgattacatgaatatgacaccacgaagaccgggtcctactcgcaaacactaccaaccctacgcacctccccgcgactttgcagcgtaccgatctcgggttaagttttccagatccgcagacgcacccgcttaccaacaagggcagaaccaactctacaatgaacttaatttggggcggagggaagagtacgacgttctggacaaaaggaggggacgagatcccgagatgggcggaaagcctcagcgaaggaagaatccgcaagaggggctttataacgaactccagaaagataaaatggcagaagcctatagtgagattgggatgaagggagaaaggaggaggggtaaaggtcacgatgggttgtaccaaggattgagcacagccactaaagatacctatgatgcgctccacatgcaggccctgccgccaaga

SEQ ID NO: 3787 - DNA, 3312 bp, Artificial Sequence
  Synthetic Polynucloetide
atggccttaccagtgaccgccttgctcctgccgctggccttgctgctccacgccgccaggccggcatgccaggtccagctcgtcgagtccggcggcggcctcgtccaggccggcgactccgtcaccctctcctgcaccgcctccggccgcaccttctcctcctacgccctcgcctggttccgccagcgccccggcaaggagcgcgagttcgtcgccggcctccgctggggcggccccaccaactacgccgactccgtcaaggaccgcttcaccatctccggcgactccgccaagcacaccatgtacctccagatgaactccctcaagcccgaggacaccgccgtctactactgcggctacaaccccggcggctgggccgtcccctcccagtacgagtacgactcctggggccagggcacccaggtcaccgtctcctccggtaccggcggaggcggatctggcggcggaggtagcggtggcggaggatctgaattcgaagccgacatctaccagacacctagatacctggtcatcggcaccggcaagaaaatcaccctggaatgcagccagacaatgggccacgacaagatgtactggtatcagcaggaccccggcatggaactgcacctgatccactacagctacggcgtgaacagcaccgagaagggcgatctgtctagcgagagcaccgtgtccagaatcagaaccgagcacttcccactgacactggaaagcgccagacctagccacaccagccagtacctgtgtgcctcttctgaggccagaggactggccgagttcaccgacacacagtatttcggccctggcaccagactgaccgttctcgaggggaaaccaattcccaaccctcttctgggactggattcaaccggcagcggcgaggacctgaagaacgtgttcccacctgaggtggccgtgttcgagcctagcgaggccgagatcagccacacccagaaagccaccctcgtgtgcctggctaccggcttctaccccgaccatgtggaactgtcttggtgggtcaacggcaaagaggtgcacagcggcgtgtctaccgacccccagccactgaaagaacagcccgccctgaacgacagccggtactgcctgagcagcagactgagagtgtccgccaccttctggcagaacccccggaaccacttcagatgccaggtgcagttctacggcctgagcgagaacgacgagtggacccaggacagagccaagcccgtgacccagatcgtgtctgccgaagcctggggcagagccgattgcggatcccagagcttcggcctgctggaccccaagctgtgctacctgctggatggcatcctgttcatctacggcgtgatcctgaccgccctgttcctgagagtgaagttcagcagaagcgccgacgcccctgcctaccagcagggacagaaccaactgtacaacgagctgaacctgggcagacgggaagagtacgacgtgctggacaagcggagaggcagggaccctgagatgggcggaaagccccagcggagaaagaacccccaggaaggactgtataacgaactccagaaagacaagatggccgaagcctacagcgagatcggcatgaagggcgagcggagaagaggcaagggccacgatggcctgtaccagggcctgagcaccgccaccaaggacacctatgacgccctgcacatgcaggccctgcctccaagaagggccaagcgatctggatctggagcaacaaacttctcactactcaaacaagcaggtgacgtggaggagaatcccgggcctactagtatggactggatttggcgcatccttttccttgtcggcgctgctaccggcgcccattccgggcccatggaccccgacctggaaatcagagccgccttcctgcggcagagaaacacagccctgagaacagaggtggccgagctggaacaagaggtgcagcggctggaaaacgaggtgtcccagtacgagacaagatacggccctctcggaggcggaaaaggatccggcggcggaggatctggcggaggcggatctgggggcggaggctctttcgaacaagttcagcttcaacagcctggcgctgagctggtcaaacctggcgcttctgtgaagatgagctgcaaagccagcggctacgccttcagcagctactggatcaactggatgaagcagaaacccggccagggactcgaatggatcggccaaatctatcccggcgacggcaccgagaacagattcagcgtgaacttccagaaggccgccaagagcttcagcctgaagatcagcgatagccagctgggcgacgccgccatgtacttttgcgcttatagaagcgccgtgaacgcccggctgatgtttggagatggcacacagctggtggtcaagcccaacacgcgtgagcagaaactgatctcggaagaggatctggggagcggcatccagaaccctgatcctgccgtgtaccagctgcgggatagcaagagcagcgacaagagcgtgtgtctgttcaccgacttcgacagccagaccaacgtgtcccagagcaaggactccgacgtgtacatcaccgataagaccgtgctggacatgcggagcatggacttcaagagcaactccgccgtggcctggtccaacaagtccgatttcgcctgcgccaacgccttcaacaacagcattatccccgaggacacattcttcccaagccccgagagcagctgcggtacccagagttttgggttgttggaccctaaattgtgctatctgttggacggaatcctgttcatttacggagtgatcctgaccgcattgttcctgaagagaggccggaagaagctgctgtacatcttcaagcagcctttcatgcggcccgtgcagaccacccaggaagaggacggctgctcctgccggttccccgaggaagaagaaggcggctgcgagctgcgggttaagttttccagatccgcagacgcacccgcttaccaacaagggcagaaccaactctacaatgaacttaatttggggcggagggaagagtacgacgttctggacaaaaggaggggacgagatcccgagatgggcggaaagcctcagcgaaggaagaatccgcaagaggggctttataacgaactccagaaagataaaatggcagaagcctatagtgagattgggatgaagggagaaaggaggaggggtaaaggtcacgatgggttgtaccaaggattgagcacagccactaaagatacctatgatgcgctccacatgcaggccctgccgccaaga

SEQ ID NO: 3788 - DNA, 3438 bp, Artificial Sequence
  Synthetic Polynucloetide
atggccttaccagtgaccgccttgctcctgccgctggccttgctgctccacgccgccaggccggcatgccaggtccagctcgtcgagtccggcggcggcctcgtccaggccggcgactccgtcaccctctcctgcaccgcctccggccgcaccttctcctcctacgccctcgcctggttccgccagcgccccggcaaggagcgcgagttcgtcgccggcctccgctggggcggccccaccaactacgccgactccgtcaaggaccgcttcaccatctccggcgactccgccaagcacaccatgtacctccagatgaactccctcaagcccgaggacaccgccgtctactactgcggctacaaccccggcggctgggccgtcccctcccagtacgagtacgactcctggggccagggcacccaggtcaccgtctcctccggtaccggcggaggcggatctggcggcggaggtagcggtggcggaggatctgaattcgaagccgacatctaccagacacctagatacctggtcatcggcaccggcaagaaaatcaccctggaatgcagccagacaatgggccacgacaagatgtactggtatcagcaggaccccggcatggaactgcacctgatccactacagctacggcgtgaacagcaccgagaagggcgatctgtctagcgagagcaccgtgtccagaatcagaaccgagcacttcccactgacactggaaagcgccagacctagccacaccagccagtacctgtgtgcctcttctgaggccagaggactggccgagttcaccgacacacagtatttcggccctggcaccagactgaccgttctcgaggggaaaccaattcccaaccctcttctgggactggattcaaccggcagcggcgaggacctgaagaacgtgttcccacctgaggtggccgtgttcgagcctagcgaggccgagatcagccacacccagaaagccaccctcgtgtgcctggctaccggcttctaccccgaccatgtggaactgtcttggtgggtcaacggcaaagaggtgcacagcggcgtgtctaccgacccccagccactgaaagaacagcccgccctgaacgacagccggtactgcctgagcagcagactgagagtgtccgccaccttctggcagaacccccggaaccacttcagatgccaggtgcagttctacggcctgagcgagaacgacgagtggacccaggacagagccaagcccgtgacccagatcgtgtctgccgaagcctggggcagagccgattgcggatcccagagcttcggcctgctggaccccaagctgtgctacctgctggatggcatcctgttcatctacggcgtgatcctgaccgccctgttcctgaaacggggcagaaagaaactcctgtatatattcaaacaaccatttatgagaccagtacaaactactcaagaggaagatggctgtagctgccgatttccagaagaagaagaaggaggatgtgaactgagagtgaagttcagcagaagcgccgacgcccctgcctaccagcagggacagaaccaactgtacaacgagctgaacctgggcagacgggaagagtacgacgtgctggacaagcggagaggcagggaccctgagatgggcggaaagccccagcggagaaagaacccccaggaaggactgtataacgaactccagaaagacaagatggccgaagcctacagcgagatcggcatgaagggcgagcggagaagaggcaagggccacgatggcctgtaccagggcctgagcaccgccaccaaggacacctatgacgccctgcacatgcaggccctgcctccaagaagggccaagcgatctggatctggagcaacaaacttctcactactcaaacaagcaggtgacgtggaggagaatcccgggcctactagtatggactggatttggcgcatccttttccttgtcggcgctgctaccggcgcccattccgggcccatggaccccgacctggaaatcagagccgccttcctgcggcagagaaacacagccctgagaacagaggtggccgagctggaacaagaggtgcagcggctggaaaacgaggtgtcccagtacgagacaagatacggccctctcggaggcggaaaaggatccggcggcggaggatctggcggaggcggatctgggggcggaggctctttcgaacaagttcagcttcaacagcctggcgctgagctggtcaaacctggcgcttctgtgaagatgagctgcaaagccagcggctacgccttcagcagctactggatcaactggatgaagcagaaacccggccagggactcgaatggatcggccaaatctatcccggcgacggcaccgagaacagattcagcgtgaacttccagaaggccgccaagagcttcagcctgaagatcagcgatagccagctgggcgacgccgccatgtacttttgcgcttatagaagcgccgtgaacgcccggctgatgtttggagatggcacacagctggtggtcaagcccaacacgcgtgagcagaaactgatctcggaagaggatctggggagcggcatccagaaccctgatcctgccgtgtaccagctgcgggatagcaagagcagcgacaagagcgtgtgtctgttcaccgacttcgacagccagaccaacgtgtcccagagcaaggactccgacgtgtacatcaccgataagaccgtgctggacatgcggagcatggacttcaagagcaactccgccgtggcctggtccaacaagtccgatttcgcctgcgccaacgccttcaacaacagcattatccccgaggacacattcttcccaagccccgagagcagctgcggtacccagagttttgggttgttggaccctaaattgtgctatctgttggacggaatcctgttcatttacggagtgatcctgaccgcattgttcctgaagagaggccggaagaagctgctgtacatcttcaagcagcctttcatgcggcccgtgcagaccacccaggaagaggacggctgctcctgccggttccccgaggaagaagaaggcggctgcgagctgcgggttaagttttccagatccgcagacgcacccgcttaccaacaagggcagaaccaactctacaatgaacttaatttggggcggagggaagagtacgacgttctggacaaaaggaggggacgagatcccgagatgggcggaaagcctcagcgaaggaagaatccgcaagaggggctttataacgaactccagaaagataaaatggcagaagcctatagtgagattgggatgaagggagaaaggaggaggggtaaaggtcacgatgggttgtaccaaggattgagcacagccactaaagatacctatgatgcgctccacatgcaggccctgccgccaaga

SEQ ID NO: 3789 - DNA, 3111 bp, Artificial Sequence
  Synthetic Polynucloetide
atggccttaccagtgaccgccttgctcctgccgctggccttgctgctccacgccgccaggccggcatgccaggtccagctcgtcgagtccggcggcggcctcgtccaggccggcgactccgtcaccctctcctgcaccgcctccggccgcaccttctcctcctacgccctcgcctggttccgccagcgccccggcaaggagcgcgagttcgtcgccggcctccgctggggcggccccaccaactacgccgactccgtcaaggaccgcttcaccatctccggcgactccgccaagcacaccatgtacctccagatgaactccctcaagcccgaggacaccgccgtctactactgcggctacaaccccggcggctgggccgtcccctcccagtacgagtacgactcctggggccagggcacccaggtcaccgtctcctccggtaccggcggaggcggatctggcggcggaggtagcggtggcggaggatctgaattcgaagccgacatctaccagacacctagatacctggtcatcggcaccggcaagaaaatcaccctggaatgcagccagacaatgggccacgacaagatgtactggtatcagcaggaccccggcatggaactgcacctgatccactacagctacggcgtgaacagcaccgagaagggcgatctgtctagcgagagcaccgtgtccagaatcagaaccgagcacttcccactgacactggaaagcgccagacctagccacaccagccagtacctgtgtgcctcttctgaggccagaggactggccgagttcaccgacacacagtatttcggccctggcaccagactgaccgttctcgagcagagcttcggcctgctggaccccaagctgtgctacctgctggatggcatcctgttcatctacggcgtgatcctgaccgccctgttcctgagagtgaagttcagcagaagcgccgacgcccctgcctaccagcagggacagaaccaactgtacaacgagctgaacctgggcagacgggaagagtacgacgtgctggacaagcggagaggcagggaccctgagatgggcggaaagccccagcggagaaagaacccccaggaaggactgtataacgaactccagaaagacaagatggccgaagcctacagcgagatcggcatgaagggcgagcggagaagaggcaagggccacgatggcctgtaccagggcctgagcaccgccaccaaggacacctatgacgccctgcacatgcaggccctgcctccaagaagggccaagcgatctggatctggagcaacaaacttctcactactcaaacaagcaggtgacgtggaggagaatcccgggcctactagtatggactggatttggcgcatccttttccttgtcggcgctgctaccggcgcccattccgggcccatggaccccgacctggaaatcagagccgccttcctgcggcagagaaacacagccctgagaacagaggtggccgagctggaacaagaggtgcagcggctggaaaacgaggtgtcccagtacgagacaagatacggccctctcggaggcggaaaaggatccggcggcggaggatctggcggaggcggatctgggggcggaggctctttcgaacaagttcagcttcaacagcctggcgctgagctggtcaaacctggcgcttctgtgaagatgagctgcaaagccagcggctacgccttcagcagctactggatcaactggatgaagcagaaacccggccagggactcgaatggatcggccaaatctatcccggcgacggcaccgagaacagattcagcgtgaacttccagaaggccgccaagagcttcagcctgaagatcagcgatagccagctgggcgacgccgccatgtacttttgcgcttatagaagcgccgtgaacgcccggctgatgtttggagatggcacacagctggtggtcaagcccaacacgcgtcagagttttgggttgttggaccctaaattgtgctatctgttggacggaatcctgttcatttacggagtgatcctgaccgcattgttcctgcgggttaagttttccagatccgcagacgcacccgcttaccaacaagggcagaaccaactctacaatgaacttaatttggggcggagggaagagtacgacgttctggacaaaaggaggggacgagatcccgagatgggcggaaagcctcagcgaaggaagaatccgcaagaggggctttataacgaactccagaaagataaaatggcagaagcctatagtgagattgggatgaagggagaaaggaggaggggtaaaggtcacgatgggttgtaccaaggattgagcacagccactaaagatacctatgatgcgctccacatgcaggccctgccgccaagacgcgccaagagaagcggatctggcgtgaagcagaccctgaatttcgacctgctgaagctggctggcgacgtggaatccaacccaggcccttctagaggccatatgaccgagtacaagcccacggtgcgcctcgccacccgcgacgacgtccccagggccgtacgcaccctcgccgccgcgttcgccgactaccccgccacgcgccacaccgtcgatccggaccgccacatcgagcgggtcaccgagctgcaagaactcttcctcacgcgcgtcgggctcgacatcggcaaggtgtgggtcgcggacgacggcgccgcggtggcggtctggaccacgccggagagcgtcgaagcgggggcggtgttcgccgagatcggcccgcgcatggccgagttgagcggttcccggctggccgcgcagcaacagatggaaggcctcctggcgccgcaccggcccaaggagcccgcgtggttcctggccaccgtcggcgtctcgcccgaccaccagggcaagggtctgggcagcgccgtcgtgctccccggagtggaggcggccgagcgcgccggggtgcccgccttcctggagacctccgcgccccgcaacctccccttctacgagcggctcggcttcaccgtcaccgccgacgtcgaggtgcccgaaggaccgcgcacctggtgcatgacccgcaagcccggtgcctga

SEQ ID NO: 3790 - DNA, 2583 bp, Artificial Sequence
  Synthetic Polynucloetide
atggccttaccagtgaccgccttgctcctgccgctggccttgctgctccacgccgccaggccggcatgccaggtccagctcgtcgagtccggcggcggcctcgtccaggccggcgactccgtcaccctctcctgcaccgcctccggccgcaccttctcctcctacgccctcgcctggttccgccagcgccccggcaaggagcgcgagttcgtcgccggcctccgctggggcggccccaccaactacgccgactccgtcaaggaccgcttcaccatctccggcgactccgccaagcacaccatgtacctccagatgaactccctcaagcccgaggacaccgccgtctactactgcggctacaaccccggcggctgggccgtcccctcccagtacgagtacgactcctggggccagggcacccaggtcaccgtctcctccggtaccggcggaggcggatctggcggcggaggtagcggtggcggaggatctgaattcgaagccgacatctaccagacacctagatacctggtcatcggcaccggcaagaaaatcaccctggaatgcagccagacaatgggccacgacaagatgtactggtatcagcaggaccccggcatggaactgcacctgatccactacagctacggcgtgaacagcaccgagaagggcgatctgtctagcgagagcaccgtgtccagaatcagaaccgagcacttcccactgacactggaaagcgccagacctagccacaccagccagtacctgtgtgcctcttctgaggccagaggactggccgagttcaccgacacacagtatttcggccctggcaccagactgaccgttctcgagggacagcctaaggccaatcctaccgtgacactgttccctccaagcagcgaagaactccaggccaacaaggccacacttgtgtgcctgatctccgacttctaccctggggctgtgacagtggcttggaaggccgatggatctcctgtgaaagccggcgtggaaaccaccaagccatccaagcagagcaacaacaaatacgccgccagctcctacctgagcctgacacctgagcagtggaagtcccacagatcctacagctgccaagtgacccacgaaggcagcaccgtggaaaagacagtggcccctacagagtgcagccccatcaagaccgatgtgattacaatggaccccaaggacaactgctccaaggacgccaacgataccctgctgctccagctgaccaacaccagcgcctactacatgtacttgttgctgctgctgaagtccgtggtgtacttcgccatcatcacatgctgcctgctgcggagaaccgccttctgctgcaacggcgagaagtctagggccaagcgatctggatctggagcaacaaacttctcactactcaaacaagcaggtgacgtggaggagaatcccgggcctactagtatggactggatttggcgcatccttttccttgtcggcgctgctaccggcgcccattccgggcccatggaccccgacctggaaatcagagccgccttcctgcggcagagaaacacagccctgagaacagaggtggccgagctggaacaagaggtgcagcggctggaaaacgaggtgtcccagtacgagacaagatacggccctctcggaggcggaaaaggatccggcggcggaggatctggcggaggcggatctgggggcggaggctctttcgaacaagttcagcttcaacagcctggcgctgagctggtcaaacctggcgcttctgtgaagatgagctgcaaagccagcggctacgccttcagcagctactggatcaactggatgaagcagaaacccggccagggactcgaatggatcggccaaatctatcccggcgacggcaccgagaacagattcagcgtgaacttccagaaggccgccaagagcttcagcctgaagatcagcgatagccagctgggcgacgccgccatgtacttttgcgcttatagaagcgccgtgaacgcccggctgatgtttggagatggcacacagctggtggtcaagcccaacacgcgtgcctctacaaagggaccctccgtgtttcctctggctcccagcagcaagtctacaagcggaggaacagccgctctgggctgcctggtcaaggattactttcccgagcctgtgaccgtgtcctggaatagcggagcactgacaagcggcgtgcacacctttccagccgtgctgcaaagcagcggcctgtactctctgagcagcgtggtcacagtgcctagctctagcctgggcacccagacctacatctgcaatgtgaaccacaagcctagcaacaccaaggtggacaagagagtggaacccaagagctgtgaagtgaaaaccgactccaccgaccacgtgaagcccaaagagacagagaacaccaagcagcccagcaagagctgccacaagcccaaggccatcgtgcacaccgagaaagtgaacatgatgagcctgaccgtgctgggcctgcggatgctgttcgccaaaaccgtggccgtgaacttcctgctgaccgccaagctgttcttcctc

SEQ ID NO: 3791 - DNA, 2517 bp, Artificial Sequence
  Synthetic Polynucloetide
atggccttaccagtgaccgccttgctcctgccgctggccttgctgctccacgccgccaggccggcatgccaggtccagctcgtcgagtccggcggcggcctcgtccaggccggcgactccgtcaccctctcctgcaccgcctccggccgcaccttctcctcctacgccctcgcctggttccgccagcgccccggcaaggagcgcgagttcgtcgccggcctccgctggggcggccccaccaactacgccgactccgtcaaggaccgcttcaccatctccggcgactccgccaagcacaccatgtacctccagatgaactccctcaagcccgaggacaccgccgtctactactgcggctacaaccccggcggctgggccgtcccctcccagtacgagtacgactcctggggccagggcacccaggtcaccgtctcctccggtaccggcggaggcggatctggcggcggaggtagcggtggcggaggatctgaattcgaagccgacatctaccagacacctagatacctggtcatcggcaccggcaagaaaatcaccctggaatgcagccagacaatgggccacgacaagatgtactggtatcagcaggaccccggcatggaactgcacctgatccactacagctacggcgtgaacagcaccgagaagggcgatctgtctagcgagagcaccgtgtccagaatcagaaccgagcacttcccactgacactggaaagcgccagacctagccacaccagccagtacctgtgtgcctcttctgaggccagaggactggccgagttcaccgacacacagtatttcggccctggcaccagactgaccgttctcgagggacagcctaaggccaatcctaccgtgacactgttccctccaagcagcgaagaactccaggccaacaaggccacacttgtgtgcctgatctccgacttctaccctggggctgtgacagtggcttggaaggccgatggatctcctgtgaaagccggcgtggaaaccaccaagccatccaagcagagcaacaacaaatacgccgccagctcctacctgagcctgacacctgagcagtggaagtcccacagatcctacagctgccaagtgacccacgaaggcagcaccgtggaaaagacagtggcccctacagagtgcagcggcagagccgattgcggcatcaccagcgccagctaccaccagggcgtgctgagcgccaccatcctgtacgagatcctgctgggcaaggccaccctgtacgccgtgctggtgtctgccctggtgctgatggctatggtcaagcggaaggacagccggggaagggccaagcgatctggatctggagcaacaaacttctcactactcaaacaagcaggtgacgtggaggagaatcccgggcctactagtatggactggatttggcgcatccttttccttgtcggcgctgctaccggcgcccattccgggcccatggaccccgacctggaaatcagagccgccttcctgcggcagagaaacacagccctgagaacagaggtggccgagctggaacaagaggtgcagcggctggaaaacgaggtgtcccagtacgagacaagatacggccctctcggaggcggaaaaggatccggcggcggaggatctggcggaggcggatctgggggcggaggctctttcgaacaagttcagcttcaacagcctggcgctgagctggtcaaacctggcgcttctgtgaagatgagctgcaaagccagcggctacgccttcagcagctactggatcaactggatgaagcagaaacccggccagggactcgaatggatcggccaaatctatcccggcgacggcaccgagaacagattcagcgtgaacttccagaaggccgccaagagcttcagcctgaagatcagcgatagccagctgggcgacgccgccatgtacttttgcgcttatagaagcgccgtgaacgcccggctgatgtttggagatggcacacagctggtggtcaagcccaacacgcgtgcctctacaaagggaccctccgtgtttcctctggctcccagcagcaagtctacaagcggaggaacagccgctctgggctgcctggtcaaggattactttcccgagcctgtgaccgtgtcctggaatagcggagcactgacaagcggcgtgcacacctttccagccgtgctgcaaagcagcggcctgtactctctgagcagcgtggtcacagtgcctagctctagcctgggcacccagacctacatctgcaatgtgaaccacaagcctagcaacaccaaggtggacaagagagtggaacccaagagctgtatccccgaggacacattcttcccaagcagcgacgtgccctgcgacgtgaagctggtggaaaagagcttcgagacagacaccaacctgaacttccagaacctgagcgtgatcggcttcagaatcctgctgctgaaagtggccggctttaacctgctgatgaccctgcggctgtggtccagc

SEQ ID NO: 3792 - DNA, 2517 bp, Artificial Sequence
  Synthetic Polynucloetide
atggccttaccagtgaccgccttgctcctgccgctggccttgctgctccacgccgccaggccggcatgccaggtccagctcgtcgagtccggcggcggcctcgtccaggccggcgactccgtcaccctctcctgcaccgcctccggccgcaccttctcctcctacgccctcgcctggttccgccagcgccccggcaaggagcgcgagttcgtcgccggcctccgctggggcggccccaccaactacgccgactccgtcaaggaccgcttcaccatctccggcgactccgccaagcacaccatgtacctccagatgaactccctcaagcccgaggacaccgccgtctactactgcggctacaaccccggcggctgggccgtcccctcccagtacgagtacgactcctggggccagggcacccaggtcaccgtctcctccggtaccggcggaggcggatctggcggcggaggtagcggtggcggaggatctgaattcgaagccgacatctaccagacacctagatacctggtcatcggcaccggcaagaaaatcaccctggaatgcagccagacaatgggccacgacaagatgtactggtatcagcaggaccccggcatggaactgcacctgatccactacagctacggcgtgaacagcaccgagaagggcgatctgtctagcgagagcaccgtgtccagaatcagaaccgagcacttcccactgacactggaaagcgccagacctagccacaccagccagtacctgtgtgcctcttctgaggccagaggactggccgagttcaccgacacacagtatttcggccctggcaccagactgaccgttctcgagggacagcctaaggccaatcctaccgtgacactgttccctccaagcagcgaagaactccaggccaacaaggccacacttgtgtgcctgatctccgacttctaccctggggctgtgacagtggcttggaaggccgatggatctcctgtgaaagccggcgtggaaaccaccaagccatccaagcagagcaacaacaaatacgccgccagctcctacctgagcctgacacctgagcagtggaagtcccacagatcctacagctgccaagtgacccacgaaggcagcaccgtggaaaagacagtggcccctacagagtgcagcggcagagccgattgcggctttaccagcgagagctaccagcagggcgtgctgagcgccaccatcctgtacgagatcctgctgggcaaggccaccctgtacgccgtgctggtgtctgccctggtgctgatggctatggtcaagcggaaggacagccggggaagggccaagcgatctggatctggagcaacaaacttctcactactcaaacaagcaggtgacgtggaggagaatcccgggcctactagtatggactggatttggcgcatccttttccttgtcggcgctgctaccggcgcccattccgggcccatggaccccgacctggaaatcagagccgccttcctgcggcagagaaacacagccctgagaacagaggtggccgagctggaacaagaggtgcagcggctggaaaacgaggtgtcccagtacgagacaagatacggccctctcggaggcggaaaaggatccggcggcggaggatctggcggaggcggatctgggggcggaggctctttcgaacaagttcagcttcaacagcctggcgctgagctggtcaaacctggcgcttctgtgaagatgagctgcaaagccagcggctacgccttcagcagctactggatcaactggatgaagcagaaacccggccagggactcgaatggatcggccaaatctatcccggcgacggcaccgagaacagattcagcgtgaacttccagaaggccgccaagagcttcagcctgaagatcagcgatagccagctgggcgacgccgccatgtacttttgcgcttatagaagcgccgtgaacgcccggctgatgtttggagatggcacacagctggtggtcaagcccaacacgcgtgcctctacaaagggaccctccgtgtttcctctggctcccagcagcaagtctacaagcggaggaacagccgctctgggctgcctggtcaaggattactttcccgagcctgtgaccgtgtcctggaatagcggagcactgacaagcggcgtgcacacctttccagccgtgctgcaaagcagcggcctgtactctctgagcagcgtggtcacagtgcctagctctagcctgggcacccagacctacatctgcaatgtgaaccacaagcctagcaacaccaaggtggacaagagagtggaacccaagagctgtatccccgaggacacattcttcccaagccccgagagcagctgcgacgtgaagctggtggaaaagagcttcgagacagacaccaacctgaacttccagaacctgagcgtgatcggcttcagaatcctgctgctgaaagtggccggctttaacctgctgatgaccctgcggctgtggtccagc

SEQ ID NO: 3793 - DNA, 1920 bp, Artificial Sequence; identical to SEQ ID NO: 3499
  Synthetic Polynucloetide

SEQ ID NO: 3794 - DNA, 2979 bp, Artificial Sequence; identical to SEQ ID NO: 3500
  Synthetic Polynucloetide

SEQ ID NO: 3795 - DNA, 2976 bp, Artificial Sequence; identical to SEQ ID NO: 3501
  Synthetic Polynucloetide

SEQ ID NO: 3796 - DNA, 2976 bp, Artificial Sequence; identical to SEQ ID NO: 3502
  Synthetic Polynucloetide

SEQ ID NO: 3797 - DNA, 2274 bp, Artificial Sequence; identical to SEQ ID NO: 3503
  Synthetic Polynucloetide

SEQ ID NO: 3798 - DNA, 2949 bp, Artificial Sequence; identical to SEQ ID NO: 3504
  Synthetic Polynucloetide

SEQ ID NO: 3799 - DNA, 2286 bp, Artificial Sequence; identical to SEQ ID NO: 3505
  Synthetic Polynucloetide

SEQ ID NO: 3800 - DNA, 2952 bp, Artificial Sequence; identical to SEQ ID NO: 3506
  Synthetic Polynucloetide

SEQ ID NO: 3801 - DNA, 2976 bp, Artificial Sequence; identical to SEQ ID NO: 3507
  Synthetic Polynucloetide

SEQ ID NO: 3802 - DNA, 3222 bp, Artificial Sequence; identical to SEQ ID NO: 3508
  Synthetic Polynucloetide

SEQ ID NO: 3803 - DNA, 3087 bp, Artificial Sequence; identical to SEQ ID NO: 3509
  Synthetic Polynucloetide

SEQ ID NO: 3804 - DNA, 2298 bp, Artificial Sequence; identical to SEQ ID NO: 3510
  Synthetic Polynucloetide

SEQ ID NO: 3805 - DNA, 3507 bp, Artificial Sequence; identical to SEQ ID NO: 3511
  Synthetic Polynucloetide

SEQ ID NO: 3806 - DNA, 2862 bp, Artificial Sequence; identical to SEQ ID NO: 3512
  Synthetic Polynucloetide

SEQ ID NO: 3807 - DNA, 2862 bp, Artificial Sequence; identical to SEQ ID NO: 3513
  Synthetic Polynucloetide

SEQ ID NO: 3808 - DNA, 3075 bp, Artificial Sequence; identical to SEQ ID NO: 3514
  Synthetic Polynucloetide

SEQ ID NO: 3809 - DNA, 3198 bp, Artificial Sequence; identical to SEQ ID NO: 3515
  Synthetic Polynucloetide

SEQ ID NO: 3810 - DNA, 3081 bp, Artificial Sequence; identical to SEQ ID NO: 3516
  Synthetic Polynucloetide

SEQ ID NO: 3811 - DNA, 3207 bp, Artificial Sequence; identical to SEQ ID NO: 3517
  Synthetic Polynucloetide

SEQ ID NO: 3812 - DNA, 2880 bp, Artificial Sequence; identical to SEQ ID NO: 3518
  Synthetic Polynucloetide

SEQ ID NO: 3813 - DNA, 2352 bp, Artificial Sequence; identical to SEQ ID NO: 3519
  Synthetic Polynucloetide

SEQ ID NO: 3814 - DNA, 2286 bp, Artificial Sequence; identical to SEQ ID NO: 3520
  Synthetic Polynucloetide

SEQ ID NO: 3815 - DNA, 2286 bp, Artificial Sequence; identical to SEQ ID NO: 3521
  Synthetic Polynucloetide

SEQ ID NO: 3816 - DNA, 1776 bp, Artificial Sequence; identical to SEQ ID NO: 3522
  Synthetic Polynucloetide

SEQ ID NO: 3817 - DNA, 1671 bp, Artificial Sequence; identical to SEQ ID NO: 3523
  Synthetic Polynucloetide

SEQ ID NO: 3818 - DNA, 1701 bp, Artificial Sequence; identical to SEQ ID NO: 3524
  Synthetic Polynucloetide

SEQ ID NO: 3819 - DNA, 1650 bp, Artificial Sequence; identical to SEQ ID NO: 3525
  Synthetic Polynucloetide

SEQ ID NO: 3820 - DNA, 1737 bp, Artificial Sequence; identical to SEQ ID NO: 3526
  Synthetic Polynucloetide

SEQ ID NO: 3821 - DNA, 1236 bp, Artificial Sequence; identical to SEQ ID NO: 3527
  Synthetic Polynucloetide

SEQ ID NO: 3822 - DNA, 1773 bp, Artificial Sequence; identical to SEQ ID NO: 3528
  Synthetic Polynucloetide

SEQ ID NO: 3823 - DNA, 1275 bp, Artificial Sequence; identical to SEQ ID NO: 3529
  Synthetic Polynucloetide

SEQ ID NO: 3824 - DNA, 2121 bp, Artificial Sequence
  Synthetic Polynucloetide
atggccttaccagtgaccgccttgctcctgccgctggccttgctgctccacgccgccaggccgggcatgcggactgaagacctcccaaaggctgtggtgttcctggagcctcaatggtacagggtgctggagaaggacagtgtgactctgaagtgccagggagcctactcccctgaggacaattccacacagtggtttcacaatgagagcctcatctcaagccaggcctccagctacttcattgacgctgccacagtggacgacagtggagagtacaggtgccagacaaacctctccaccctcagtgacccggtgcagctagaagtccatatcggctggctgttgctccaggcccctcggtgggtgttcaaggaggaagaccctattcacctgaggtgtcacagctggaagaacactgctctgcataaggtcacatatttacagaatggcaaaggcaggaagtattttcatcataattctgacttctacattccaaaagccacactcaaagacagcggctcctacttctgcagggggcttgttgggagtaaaaatgtgtcttcagagactgtgaacatcaccatcactcaaggtttggcagtgtcaaccatctcatcattctttccacctggctaccaaggtaccggcggaggcggatctggcggcggaggtagcggtggcggaggatctgaattcgaagccgacatctaccagacacctagatacctggtcatcggcaccggcaagaaaatcaccctggaatgcagccagacaatgggccacgacaagatgtactggtatcagcaggaccccggcatggaactgcacctgatccactacagctacggcgtgaacagcaccgagaagggcgatctgtctagcgagagcaccgtgtccagaatcagaaccgagcacttcccactgacactggaaagcgccagacctagccacaccagccagtacctgtgtgcctcttctgaggccagaggactggccgagttcaccgacacacagtatttcggccctggcaccagactgaccgttggcggaggcggaagtggaggcggaggatctggcggcggaggctctcaagttcagcttcaacagcctggcgctgagctggtcaaacctggcgcttctgtgaagatgagctgcaaagccagcggctacgccttcagcagctactggatcaactggatgaagcagaaacccggccagggactcgaatggatcggccaaatctatcccggcgacggcaccgagaacagattcagcgtgaacttccagaaggccgccaagagcttcagcctgaagatcagcgatagccagctgggcgacgccgccatgtacttttgcgcttatagaagcgccgtgaacgcccggctgatgtttggagatggcacacagctggtggtcaagcccaacacgcgtgagcagaaactgatctcggaagaggatctgaaaattgaagttatgtatcctcctccttacctagacaatgagaagagcaatggaaccattatccatgtgaaagggaaacacctttgtccaagtcccctatttcccggaccttctaagcccttttgggtgctggtggtggttgggggagtcctggcttgctatagcttgctagtaacagtggcctttattattttctgggtgaggagtaagaggagcaggctcctgcacagtgactacatgaacatgactccacgccgccccggacccacccgcaagcattaccagccctatgccccaccacgcgacttcgcagcctatcgctccagagtgaagttcagcaggagcgcagacgcccccgcgtaccagcagggccagaaccagctctataacgagctcaatctaggacgaagagaggagtacgatgttttggacaagagacgtggccgggaccctgagatggggggaaagccgagaaggaagaaccctcaggaaggcctgtacaatgaactgcagaaagataagatggcggaggcctacagtgagattgggatgaaaggcgagcgccggaggggcaaggggcacgatggcctttaccagggtctcagtacagccaccaaggacacctacgacgcccttcacatgcaggccctgccccctcgc

SEQ ID NO: 3825 - DNA, 2142 bp, Artificial Sequence
  Synthetic Polynucloetide
atggccttaccagtgaccgccttgctcctgccgctggccttgctgctccacgccgccaggccgggcatgcggactgaagacctcccaaaggctgtggtgttcctggagcctcaatggtacagggtgctggagaaggacagtgtgactctgaagtgccagggagcctactcccctgaggacaattccacacagtggtttcacaatgagagcctcatctcaagccaggcctccagctacttcattgacgctgccacagtggacgacagtggagagtacaggtgccagacaaacctctccaccctcagtgacccggtgcagctagaagtccatatcggctggctgttgctccaggcccctcggtgggtgttcaaggaggaagaccctattcacctgaggtgtcacagctggaagaacactgctctgcataaggtcacatatttacagaatggcaaaggcaggaagtattttcatcataattctgacttctacattccaaaagccacactcaaagacagcggctcctacttctgcagggggcttgttgggagtaaaaatgtgtcttcagagactgtgaacatcaccatcactcaaggtttggcagtgtcaaccatctcatcattctttccacctggctaccaaggtaccggcggaggcggatctggcggcggaggtagcggtggcggaggatctgaattcgaagccgacatctaccagacacctagatacctggtcatcggcaccggcaagaaaatcaccctggaatgcagccagacaatgggccacgacaagatgtactggtatcagcaggaccccggcatggaactgcacctgatccactacagctacggcgtgaacagcaccgagaagggcgatctgtctagcgagagcaccgtgtccagaatcagaaccgagcacttcccactgacactggaaagcgccagacctagccacaccagccagtacctgtgtgcctcttctgaggccagaggactggccgagttcaccgacacacagtatttcggccctggcaccagactgaccgttggcggaggcggaagtggaggcggaggatctggcggcggaggctctcaagttcagcttcaacagcctggcgctgagctggtcaaacctggcgcttctgtgaagatgagctgcaaagccagcggctacgccttcagcagctactggatcaactggatgaagcagaaacccggccagggactcgaatggatcggccaaatctatcccggcgacggcaccgagaacagattcagcgtgaacttccagaaggccgccaagagcttcagcctgaagatcagcgatagccagctgggcgacgccgccatgtacttttgcgcttatagaagcgccgtgaacgcccggctgatgtttggagatggcacacagctggtggtcaagcccaacacgcgtgagcagaaactgatctcggaagaggatctggcgaagcccaccacgacgccagcgccgcgaccaccaacaccggcgcccaccatcgcgtcgcagcccctgtccctgcgcccagaggcgtgccggccagcggcggggggcgcagtgcacacgagggggctggacttcgcctgtgacatctacatctgggcgcccttggccgggacttgtggggtccttctcctgtcactggttatcaccctttactgcaaacggggcagaaagaaactcctgtatatattcaaacaaccatttatgagaccagtacaaactactcaagaggaagatggctgtagctgccgatttccagaagaagaagaaggaggatgtgaactgagagtgaagttcagcaggagcgcagacgcccccgcgtaccagcagggccagaaccagctctataacgagctgaatctaggacgaagagaggagtacgatgttttggacaagagacgtggccgggaccctgagatggggggaaagccgagaaggaagaaccctcaggaaggcctgtacaatgaactgcagaaagataagatggcggaggcctacagtgagattgggatgaaaggcgagcgccggaggggcaaggggcacgatggcctttaccagggtctcagtacagccaccaaggacacctacgacgcccttcacatgcaggccctgccccctcgctga

SEQ ID NO: 3826 - DNA, 3381 bp, Artificial Sequence
  Synthetic Polynucloetide
atggccttaccagtgaccgccttgctcctgccgctggccttgctgctccacgccgccaggccgggcatgcggactgaagacctcccaaaggctgtggtgttcctggagcctcaatggtacagggtgctggagaaggacagtgtgactctgaagtgccagggagcctactcccctgaggacaattccacacagtggtttcacaatgagagcctcatctcaagccaggcctccagctacttcattgacgctgccacagtggacgacagtggagagtacaggtgccagacaaacctctccaccctcagtgacccggtgcagctagaagtccatatcggctggctgttgctccaggcccctcggtgggtgttcaaggaggaagaccctattcacctgaggtgtcacagctggaagaacactgctctgcataaggtcacatatttacagaatggcaaaggcaggaagtattttcatcataattctgacttctacattccaaaagccacactcaaagacagcggctcctacttctgcagggggcttgttgggagtaaaaatgtgtcttcagagactgtgaacatcaccatcactcaaggtttggcagtgtcaaccatctcatcattctttccacctggctaccaaggtaccggcggaggcggatctggcggcggaggtagcggtggcggaggatctgaattcgaagccgacatctaccagacacctagatacctggtcatcggcaccggcaagaaaatcaccctggaatgcagccagacaatgggccacgacaagatgtactggtatcagcaggaccccggcatggaactgcacctgatccactacagctacggcgtgaacagcaccgagaagggcgatctgtctagcgagagcaccgtgtccagaatcagaaccgagcacttcccactgacactggaaagcgccagacctagccacaccagccagtacctgtgtgcctcttctgaggccagaggactggccgagttcaccgacacacagtatttcggccctggcaccagactgaccgttggcggaggcggaagtggaggcggaggatctggcggcggaggctctcaagttcagcttcaacagcctggcgctgagctggtcaaacctggcgcttctgtgaagatgagctgcaaagccagcggctacgccttcagcagctactggatcaactggatgaagcagaaacccggccagggactcgaatggatcggccaaatctatcccggcgacggcaccgagaacagattcagcgtgaacttccagaaggccgccaagagcttcagcctgaagatcagcgatagccagctgggcgacgccgccatgtacttttgcgcttatagaagcgccgtgaacgcccggctgatgtttggagatggcacacagctggtggtcaagcccaacacgcgtgagcagaaactgatctcggaagaggatctggcgaagcccaccacgacgccagcgccgcgaccaccaacaccggcgcccaccatcgcgtcgcagcccctgtccctgcgcccagaggcgtgccggccagcggcggggggcgcagtgcacacgagggggctggacttcgcctgtgacatctacatctgggcgcccttggccgggacttgtggggtccttctcctgtcactggttatcaccctttactgcgggcgcgccagagtgaagttcagcaggagcgcagacgcccccgcgtaccagcagggccagaaccagctctataacgagctgaatctaggacgaagagaggagtacgatgttttggacaagagacgtggccgggaccctgagatggggggaaagccgagaaggaagaaccctcaggaaggcctgtacaatgaactgcagaaagataagatggcggaggcctacagtgagattgggatgaaaggcgagcgccggaggggcaaggggcacgatggcctttaccagggtctcagtacagccaccaaggacacctacgacgcccttcacatgcaggccctgccccctcgctctagaggatctggagcaacaaacttctcactactcaaacaagcaggtgacgtggaggagaatcccgggcctgggatccacatggccacttacgaggttctctgtgaggtggcgcggaaactgggcacggatgacagggaagtggtattgttcctcctaaacgtgttcatacctcaacccacactggcccaattaattggagctcttagagctttaaaggaggagggcaggttaacgtttcccctgttagcggaatgtctgtttcgtgcaggtcgcagagacctcttgcgcgacctgcttcacttagacccgcgttttttagagcgccacctagcgggcacaatgagttatttcagcccttatcagctcactgttctccacgtagacggggagctgtgtgcgagggatattaggtctttgatatttttaagcaaggacactatagggtctcgcagcacaccacagacattcttacactgggtgtactgtatggaaaacttagacctactgggtcccactgacgtggatgccctaatgtcaatgcttagatctttgtcaagagtagacctacagcgccaagtgcaaaccctaatgggccttcacctttccggcccatcacactcccaacactatcgccatacaccactcgagaccgatttctacgactacaaggacgacgatgacaagactagtggctccggcgagggcagaggaagtctactaacctgcggagatgtggaagaaaatcctggcccacatatgaccgagtacaagcccacggtgcgcctcgccacccgcgacgacgtccccagggccgtacgcaccctcgccgccgcgttcgccgactaccccgccacgcgccacaccgtcgatccggaccgccacatcgagcgggtcaccgagctgcaagaactcttcctcacgcgcgtcgggctcgacatcggcaaggtgtgggtcgcggacgacggcgccgcggtggcggtctggaccacgccggagagcgtcgaagcgggggcggtgttcgccgagatcggcccgcgcatggccgagttgagcggttcccggctggccgcgcagcaacagatggaaggcctcctggcgccgcaccggcccaaggagcccgcgtggttcctggccaccgtcggcgtctcgcccgaccaccagggcaagggtctgggcagcgccgtcgtgctccccggagtggaggcggccgagcgcgccggggtgcccgccttcctggagacctccgcgccccgcaacctccccttctacgagcggctcggcttcaccgtcaccgccgacgtcgaggtgcccgaaggaccgcgcacctggtgcatgacccgcaagcccggtgcctga

SEQ ID NO: 3827 - DNA, 3201 bp, Artificial Sequence
  Synthetic Polynucloetide
atggccttaccagtgaccgccttgctcctgccgctggccttgctgctccacgccgccaggccgggcatgcggactgaagacctcccaaaggctgtggtgttcctggagcctcaatggtacagggtgctggagaaggacagtgtgactctgaagtgccagggagcctactcccctgaggacaattccacacagtggtttcacaatgagagcctcatctcaagccaggcctccagctacttcattgacgctgccacagtggacgacagtggagagtacaggtgccagacaaacctctccaccctcagtgacccggtgcagctagaagtccatatcggctggctgttgctccaggcccctcggtgggtgttcaaggaggaagaccctattcacctgaggtgtcacagctggaagaacactgctctgcataaggtcacatatttacagaatggcaaaggcaggaagtattttcatcataattctgacttctacattccaaaagccacactcaaagacagcggctcctacttctgcagggggcttgttgggagtaaaaatgtgtcttcagagactgtgaacatcaccatcactcaaggtttggcagtgtcaaccatctcatcattctttccacctggctaccaaggtaccggcggaggcggatctggcggcggaggtagcggtggcggaggatctgaattcgaagccgacatctaccagacacctagatacctggtcatcggcaccggcaagaaaatcaccctggaatgcagccagacaatgggccacgacaagatgtactggtatcagcaggaccccggcatggaactgcacctgatccactacagctacggcgtgaacagcaccgagaagggcgatctgtctagcgagagcaccgtgtccagaatcagaaccgagcacttcccactgacactggaaagcgccagacctagccacaccagccagtacctgtgtgcctcttctgaggccagaggactggccgagttcaccgacacacagtatttcggccctggcaccagactgaccgttctcgagatccagaaccctgatcctgccgtgtaccagctgcgggatagcaagagcagcgacaagagcgtgtgtctgttcaccgacttcgacagccagaccaacgtgtcccagagcaaggactccgacgtgtacatcaccgataagtgcgtgctggacatgcggagcatggacttcaagagcaactccgccgtggcctggtccaacaagtccgatttcgcctgcgccaacgccttcaacaacagcattatccccgaggacacattcttcccaagcagcgacgtgccctgcgacgtgaagctggtggaaaagagcttcgagacagacaccaacctgaacttccagaacctgagcgtgatcggcttcagaatcctgctgctgaaagtggccggctttaacctgctgatgaccctgcggctgtggtccagccgcgccaagagaagcggatctggcgtgaagcagaccctgaatttcgacctgctgaagctggctggcgacgtggaatccaacccaggccctactagtatggactggatttggcgcatccttttccttgtcggcgctgctaccggcgcgcattccttcgaacaagttcagcttcaacagcctggcgctgagctggtcaaacctggcgcttctgtgaagatgagctgcaaagccagcggctacgccttcagcagctactggatcaactggatgaagcagaaacccggccagggactcgaatggatcggccaaatctatcccggcgacggcaccgagaacagattcagcgtgaacttccagaaggccgccaagagcttcagcctgaagatcagcgatagccagctgggcgacgccgccatgtacttttgcgcttatagaagcgccgtgaacgcccggctgatgtttggagatggcacacagctggtggtcaagcccaacacgcgtgaggacctgaagaacgtgttcccacctgaggtggccgtgttcgagcctagcaaggccgagatcgcccacacccagaaagccaccctcgtgtgcctggctaccggcttctaccccgaccatgtggaactgtcttggtgggtcaacggcaaagaggtgcacagcggcgtgtgtaccgacccccagccactgaaagaacagcccgccctgaacgacagccggtactgcctgagcagcagactgagagtgtccgccaccttctggcagaacccccggaaccacttcagatgccaggtgcagttctacggcctgagcgagaacgacgagtggacccaggacagagccaagcccgtgacccagatcgtgtctgccgaagcctggggcagagccgattgcggcatcaccagcgccagctaccaccagggcgtgctgagcgccaccatcctgtacgagatcctgctgggcaaggccaccctgtacgccgtgctggtgtctgccctggtgctgatggctatggtcaagcggaaggacagccggggaagggccaagcgatctggatctggagcaacaaacttctcactactcaaacaagcaggtgacgtggaggagaatcccgggccttctagaggccatatgaccgagtacaagcccacggtgcgcctcgccacccgcgacgacgtccccagggccgtacgcaccctcgccgccgcgttcgccgactaccccgccacgcgccacaccgtcgatccggaccgccacatcgagcgggtcaccgagctgcaagaactcttcctcacgcgcgtcgggctcgacatcggcaaggtgtgggtcgcggacgacggcgccgcggtggcggtctggaccacgccggagagcgtcgaagcgggggcggtgttcgccgagatcggcccgcgcatggccgagttgagcggttcccggctggccgcgcagcaacagatggaaggcctcctggcgccgcaccggcccaaggagcccgcgtggttcctggccaccgtcggcgtctcgcccgaccaccagggcaagggtctgggcagcgccgtcgtgctccccggagtggaggcggccgagcgcgccggggtgcccgccttcctggagacctccgcgccccgcaacctccccttctacgagcggctcggcttcaccgtcaccgccgacgtcgaggtgcccgaaggaccgcgcacctggtgcatgacccgcaagcccggtgcctga

SEQ ID NO: 3828 - DNA, 3198 bp, Artificial Sequence
  Synthetic Polynucloetide
atggccttaccagtgaccgccttgctcctgccgctggccttgctgctccacgccgccaggccgggcatgcggactgaagacctcccaaaggctgtggtgttcctggagcctcaatggtacagggtgctggagaaggacagtgtgactctgaagtgccagggagcctactcccctgaggacaattccacacagtggtttcacaatgagagcctcatctcaagccaggcctccagctacttcattgacgctgccacagtggacgacagtggagagtacaggtgccagacaaacctctccaccctcagtgacccggtgcagctagaagtccatatcggctggctgttgctccaggcccctcggtgggtgttcaaggaggaagaccctattcacctgaggtgtcacagctggaagaacactgctctgcataaggtcacatatttacagaatggcaaaggcaggaagtattttcatcataattctgacttctacattccaaaagccacactcaaagacagcggctcctacttctgcagggggcttgttgggagtaaaaatgtgtcttcagagactgtgaacatcaccatcactcaaggtttggcagtgtcaaccatctcatcattctttccacctggctaccaaggtaccggcggaggcggatctggcggcggaggtagcggtggcggaggatctgaattcgaagccgacatctaccagacacctagatacctggtcatcggcaccggcaagaaaatcaccctggaatgcagccagacaatgggccacgacaagatgtactggtatcagcaggaccccggcatggaactgcacctgatccactacagctacggcgtgaacagcaccgagaagggcgatctgtctagcgagagcaccgtgtccagaatcagaaccgagcacttcccactgacactggaaagcgccagacctagccacaccagccagtacctgtgtgcctcttctgaggccagaggactggccgagttcaccgacacacagtatttcggccctggcaccagactgaccgttctcgaggacctgaagaacgtgttcccacctgaggtggccgtgttcgagcctagcaaggccgagatcgcccacacccagaaagccaccctcgtgtgcctggctaccggcttctaccccgaccatgtggaactgtcttggtgggtcaacggcaaagaggtgcacagcggcgtgtgtaccgacccccagccactgaaagaacagcccgccctgaacgacagccggtactgcctgagcagcagactgagagtgtccgccaccttctggcagaacccccggaaccacttcagatgccaggtgcagttctacggcctgagcgagaacgacgagtggacccaggacagagccaagcccgtgacccagatcgtgtctgccgaagcctggggcagagccgattgcggcatcaccagcgccagctaccaccagggcgtgctgagcgccaccatcctgtacgagatcctgctgggcaaggccaccctgtacgccgtgctggtgtctgccctggtgctgatggctatggtcaagcggaaggacagccggggaagggccaagcgatctggatctggagcaacaaacttctcactactcaaacaagcaggtgacgtggaggagaatcccgggcctactagtatggactggatttggcgcatccttttccttgtcggcgctgctaccggcgcgcattccttcgaacaagttcagcttcaacagcctggcgctgagctggtcaaacctggcgcttctgtgaagatgagctgcaaagccagcggctacgccttcagcagctactggatcaactggatgaagcagaaacccggccagggactcgaatggatcggccaaatctatcccggcgacggcaccgagaacagattcagcgtgaacttccagaaggccgccaagagcttcagcctgaagatcagcgatagccagctgggcgacgccgccatgtacttttgcgcttatagaagcgccgtgaacgcccggctgatgtttggagatggcacacagctggtggtcaagcccaacacgcgtatccagaaccctgatcctgccgtgtaccagctgcgggatagcaagagcagcgacaagagcgtgtgtctgttcaccgacttcgacagccagaccaacgtgtcccagagcaaggactccgacgtgtacatcaccgataagtgcgtgctggacatgcggagcatggacttcaagagcaactccgccgtggcctggtccaacaagtccgatttcgcctgcgccaacgccttcaacaacagcattatccccgaggacacattcttcccaagcagcgacgtgccctgcgacgtgaagctggtggaaaagagcttcgagacagacaccaacctgaacttccagaacctgagcgtgatcggcttcagaatcctgctgctgaaagtggccggctttaacctgctgatgaccctgcggctgtggtccagccgcgccaagagaagcggatctggcgtgaagcagaccctgaatttcgacctgctgaagctggctggcgacgtggaatccaacccaggcccttctagaggccatatgaccgagtacaagcccacggtgcgcctcgccacccgcgacgacgtccccagggccgtacgcaccctcgccgccgcgttcgccgactaccccgccacgcgccacaccgtcgatccggaccgccacatcgagcgggtcaccgagctgcaagaactcttcctcacgcgcgtcgggctcgacatcggcaaggtgtgggtcgcggacgacggcgccgcggtggcggtctggaccacgccggagagcgtcgaagcgggggcggtgttcgccgagatcggcccgcgcatggccgagttgagcggttcccggctggccgcgcagcaacagatggaaggcctcctggcgccgcaccggcccaaggagcccgcgtggttcctggccaccgtcggcgtctcgcccgaccaccagggcaagggtctgggcagcgccgtcgtgctccccggagtggaggcggccgagcgcgccggggtgcccgccttcctggagacctccgcgccccgcaacctccccttctacgagcggctcggcttcaccgtcaccgccgacgtcgaggtgcccgaaggaccgcgcacctggtgcatgacccgcaagcccggtgcctga

SEQ ID NO: 3829 - DNA, 2496 bp, Artificial Sequence
  Synthetic Polynucloetide
atggccttaccagtgaccgccttgctcctgccgctggccttgctgctccacgccgccaggccgggcatgcggactgaagacctcccaaaggctgtggtgttcctggagcctcaatggtacagggtgctggagaaggacagtgtgactctgaagtgccagggagcctactcccctgaggacaattccacacagtggtttcacaatgagagcctcatctcaagccaggcctccagctacttcattgacgctgccacagtggacgacagtggagagtacaggtgccagacaaacctctccaccctcagtgacccggtgcagctagaagtccatatcggctggctgttgctccaggcccctcggtgggtgttcaaggaggaagaccctattcacctgaggtgtcacagctggaagaacactgctctgcataaggtcacatatttacagaatggcaaaggcaggaagtattttcatcataattctgacttctacattccaaaagccacactcaaagacagcggctcctacttctgcagggggcttgttgggagtaaaaatgtgtcttcagagactgtgaacatcaccatcactcaaggtttggcagtgtcaaccatctcatcattctttccacctggctaccaaggtaccggcggaggcggatctggcggcggaggtagcggtggcggaggatctgaattcgaagccgacatctaccagacacctagatacctggtcatcggcaccggcaagaaaatcaccctggaatgcagccagacaatgggccacgacaagatgtactggtatcagcaggaccccggcatggaactgcacctgatccactacagctacggcgtgaacagcaccgagaagggcgatctgtctagcgagagcaccgtgtccagaatcagaaccgagcacttcccactgacactggaaagcgccagacctagccacaccagccagtacctgtgtgcctcttctgaggccagaggactggccgagttcaccgacacacagtatttcggccctggcaccagactgaccgttctcgaggacctgaagaacgtgttcccacctgaggtggccgtgttcgagcctagcgaggccgagatcagccacacccagaaagccaccctcgtgtgcctggctaccggcttctaccccgaccatgtggaactgtcttggtgggtcaacggcaaagaggtgcacagcggcgtgtgtaccgacccccagccactgaaagaacagcccgccctgaacgacagccggtactgcctgagcagcagactgagagtgtccgccaccttctggcagaacccccggaaccacttcagatgccaggtgcagttctacggcctgagcgagaacgacgagtggacccaggacagagccaagcccgtgacccagatcgtgtctgccgaagcctggggcagagccgattgcggctttaccagcgagagctaccagcagggcgtgctgagcgccaccatcctgtacgagatcctgctgggcaaggccaccctgtacgccgtgctggtgtctgccctggtgctgatggctatggtcaagcggaaggacagccggggaagggccaagcgatctggatctggagcaacaaacttctcactactcaaacaagcaggtgacgtggaggagaatcccgggcctactagtatggactggatttggcgcatccttttccttgtcggcgctgctaccggcgcgcattccttcgaacaagttcagcttcaacagcctggcgctgagctggtcaaacctggcgcttctgtgaagatgagctgcaaagccagcggctacgccttcagcagctactggatcaactggatgaagcagaaacccggccagggactcgaatggatcggccaaatctatcccggcgacggcaccgagaacagattcagcgtgaacttccagaaggccgccaagagcttcagcctgaagatcagcgatagccagctgggcgacgccgccatgtacttttgcgcttatagaagcgccgtgaacgcccggctgatgtttggagatggcacacagctggtggtcaagcccaacacgcgtatccagaaccctgatcctgccgtgtaccagctgcgggatagcaagagcagcgacaagagcgtgtgtctgttcaccgacttcgacagccagaccaacgtgtcccagagcaaggactccgacgtgtacatcaccgataagtgcgtgctggacatgcggagcatggacttcaagagcaactccgccgtggcctggtccaacaagtccgatttcgcctgcgccaacgccttcaacaacagcattatccccgaggacacattcttcccaagccccgagagcagctgcgacgtgaagctggtggaaaagagcttcgagacagacaccaacctgaacttccagaacctgagcgtgatcggcttcagaatcctgctgctgaaagtggccggctttaacctgctgatgaccctgcggctgtggtccagc

SEQ ID NO: 3830 - DNA, 3171 bp, Artificial Sequence
  Synthetic Polynucloetide
atggccttaccagtgaccgccttgctcctgccgctggccttgctgctccacgccgccaggccgggcatgcggactgaagacctcccaaaggctgtggtgttcctggagcctcaatggtacagggtgctggagaaggacagtgtgactctgaagtgccagggagcctactcccctgaggacaattccacacagtggtttcacaatgagagcctcatctcaagccaggcctccagctacttcattgacgctgccacagtggacgacagtggagagtacaggtgccagacaaacctctccaccctcagtgacccggtgcagctagaagtccatatcggctggctgttgctccaggcccctcggtgggtgttcaaggaggaagaccctattcacctgaggtgtcacagctggaagaacactgctctgcataaggtcacatatttacagaatggcaaaggcaggaagtattttcatcataattctgacttctacattccaaaagccacactcaaagacagcggctcctacttctgcagggggcttgttgggagtaaaaatgtgtcttcagagactgtgaacatcaccatcactcaaggtttggcagtgtcaaccatctcatcattctttccacctggctaccaaggtaccggcggaggcggatctggcggcggaggtagcggtggcggaggatctgaattcgaagccgacatctaccagacacctagatacctggtcatcggcaccggcaagaaaatcaccctggaatgcagccagacaatgggccacgacaagatgtactggtatcagcaggaccccggcatggaactgcacctgatccactacagctacggcgtgaacagcaccgagaagggcgatctgtctagcgagagcaccgtgtccagaatcagaaccgagcacttcccactgacactggaaagcgccagacctagccacaccagccagtacctgtgtgcctcttctgaggccagaggactggccgagttcaccgacacacagtatttcggccctggcaccagactgaccgttctcgaggacctgaagaacgtgttcccacctgaggtggccgtgttcgagcctagcgaggccgagatcagccacacccagaaagccaccctcgtgtgcctggctaccggcttctaccccgaccatgtggaactgtcttggtgggtcaacggcaaagaggtgcacagcggcgtgtgtaccgacccccagccactgaaagaacagcccgccctgaacgacagccggtactgcctgagcagcagactgagagtgtccgccaccttctggcagaacccccggaaccacttcagatgccaggtgcagttctacggcctgagcgagaacgacgagtggacccaggacagagccaagcccgtgacccagatcgtgtctgccgaagcctggggcagagccgattgcggctttaccagcgagagctaccagcagggcgtgctgagcgccaccatcctgtacgagatcctgctgggcaaggccaccctgtacgccgtgctggtgtctgccctggtgctgatggctatggtcaagcggaaggacagccggggaagggccaagcgatctggatctggagcaacaaacttctcactactcaaacaagcaggtgacgtggaggagaatcccgggcctactagtatggactggatttggcgcatccttttccttgtcggcgctgctaccggcgcgcattccttcgaacaagttcagcttcaacagcctggcgctgagctggtcaaacctggcgcttctgtgaagatgagctgcaaagccagcggctacgccttcagcagctactggatcaactggatgaagcagaaacccggccagggactcgaatggatcggccaaatctatcccggcgacggcaccgagaacagattcagcgtgaacttccagaaggccgccaagagcttcagcctgaagatcagcgatagccagctgggcgacgccgccatgtacttttgcgcttatagaagcgccgtgaacgcccggctgatgtttggagatggcacacagctggtggtcaagcccaacacgcgtatccagaaccctgatcctgccgtgtaccagctgcgggatagcaagagcagcgacaagagcgtgtgtctgttcaccgacttcgacagccagaccaacgtgtcccagagcaaggactccgacgtgtacatcaccgataagtgcgtgctggacatgcggagcatggacttcaagagcaactccgccgtggcctggtccaacaagtccgatttcgcctgcgccaacgccttcaacaacagcattatccccgaggacacattcttcccaagccccgagagcagctgcgacgtgaagctggtggaaaagagcttcgagacagacaccaacctgaacttccagaacctgagcgtgatcggcttcagaatcctgctgctgaaagtggccggctttaacctgctgatgaccctgcggctgtggtccagccgcgccaagagaagcggatctggcgtgaagcagaccctgaatttcgacctgctgaagctggctggcgacgtggaatccaacccaggcccttctagaggcgggatccacaccatggctacctacgaggtgctgtgcgaggtggcaagaaagctgggcaccgacgacagagaagtggtgctgttcctgctgaacgtgttcatccctcagcctacactggcccagctgatcggtgcactgagagccctgaaagaggaaggccggctgacctttcctctgctggccgaatgcctgttcagagccggaagaagggatctgctgcgggacctgctgcatctggaccccagatttctggaaagacacctggccggcaccatgagctacttcagcccttaccagctgaccgtgctgcacgttgacggcgaactgtgcgccagagatattcggagcctgatcttcctgagcaaggacaccatcggcagccggtctacccctcagacatttctgcactgggtgtactgcatggaaaacctggacctgctcggccccacagatgtggatgccctgatgtccatgctgagaagcctgagcagagtggacctccagagacaggtgcagacactgatgggactgcacctgagcggacctagccacagccagcactacagacacacccct

SEQ ID NO: 3831 - DNA, 2508 bp, Artificial Sequence
  Synthetic Polynucloetide
atggccttaccagtgaccgccttgctcctgccgctggccttgctgctccacgccgccaggccgggcatgcggactgaagacctcccaaaggctgtggtgttcctggagcctcaatggtacagggtgctggagaaggacagtgtgactctgaagtgccagggagcctactcccctgaggacaattccacacagtggtttcacaatgagagcctcatctcaagccaggcctccagctacttcattgacgctgccacagtggacgacagtggagagtacaggtgccagacaaacctctccaccctcagtgacccggtgcagctagaagtccatatcggctggctgttgctccaggcccctcggtgggtgttcaaggaggaagaccctattcacctgaggtgtcacagctggaagaacactgctctgcataaggtcacatatttacagaatggcaaaggcaggaagtattttcatcataattctgacttctacattccaaaagccacactcaaagacagcggctcctacttctgcagggggcttgttgggagtaaaaatgtgtcttcagagactgtgaacatcaccatcactcaaggtttggcagtgtcaaccatctcatcattctttccacctggctaccaaggtaccggcggaggcggatctggcggcggaggtagcggtggcggaggatctgaattcgaagccgacatctaccagacacctagatacctggtcatcggcaccggcaagaaaatcaccctggaatgcagccagacaatgggccacgacaagatgtactggtatcagcaggaccccggcatggaactgcacctgatccactacagctacggcgtgaacagcaccgagaagggcgatctgtctagcgagagcaccgtgtccagaatcagaaccgagcacttcccactgacactggaaagcgccagacctagccacaccagccagtacctgtgtgcctcttctgaggccagaggactggccgagttcaccgacacacagtatttcggccctggcaccagactgaccgttctcgagatccagaaccctgatcctgccgtgtaccagctgcgggatagcaagagcagcgacaagagcgtgtgtctgttcaccgacttcgacagccagaccaacgtgtcccagagcaaggactccgacgtgtacatcaccgataagtgcgtgctggacatgcggagcatggacttcaagagcaactccgccgtggcctggtccaacaagtccgatttcgcctgcgccaacgccttcaacaacagcattatccccgaggacacattcttcccaagccccgagagcagctgcgacgtgaagctggtggaaaagagcttcgagacagacaccaacctgaacttccagaacctgagcgtgatcggcttcagaatcctgctgctgaaagtggccggctttaacctgctgatgaccctgcggctgtggtccagccgcgccaagagaagcggatctggcgtgaagcagaccctgaatttcgacctgctgaagctggctggcgacgtggaatccaacccaggccctactagtatggactggatttggcgcatccttttccttgtcggcgctgctaccggcgcgcattccttcgaacaagttcagcttcaacagcctggcgctgagctggtcaaacctggcgcttctgtgaagatgagctgcaaagccagcggctacgccttcagcagctactggatcaactggatgaagcagaaacccggccagggactcgaatggatcggccaaatctatcccggcgacggcaccgagaacagattcagcgtgaacttccagaaggccgccaagagcttcagcctgaagatcagcgatagccagctgggcgacgccgccatgtacttttgcgcttatagaagcgccgtgaacgcccggctgatgtttggagatggcacacagctggtggtcaagcccaacacgcgtgaggacctgaagaacgtgttcccacctgaggtggccgtgttcgagcctagcgaggccgagatcagccacacccagaaagccaccctcgtgtgcctggctaccggcttctaccccgaccatgtggaactgtcttggtgggtcaacggcaaagaggtgcacagcggcgtgtgtaccgacccccagccactgaaagaacagcccgccctgaacgacagccggtactgcctgagcagcagactgagagtgtccgccaccttctggcagaacccccggaaccacttcagatgccaggtgcagttctacggcctgagcgagaacgacgagtggacccaggacagagccaagcccgtgacccagatcgtgtctgccgaagcctggggcagagccgattgcggctttaccagcgagagctaccagcagggcgtgctgagcgccaccatcctgtacgagatcctgctgggcaaggccaccctgtacgccgtgctggtgtctgccctggtgctgatggctatggtcaagcggaaggacagccgggga

SEQ ID NO: 3832 - DNA, 3174 bp, Artificial Sequence
  Synthetic Polynucloetide
atggccttaccagtgaccgccttgctcctgccgctggccttgctgctccacgccgccaggccgggcatgcggactgaagacctcccaaaggctgtggtgttcctggagcctcaatggtacagggtgctggagaaggacagtgtgactctgaagtgccagggagcctactcccctgaggacaattccacacagtggtttcacaatgagagcctcatctcaagccaggcctccagctacttcattgacgctgccacagtggacgacagtggagagtacaggtgccagacaaacctctccaccctcagtgacccggtgcagctagaagtccatatcggctggctgttgctccaggcccctcggtgggtgttcaaggaggaagaccctattcacctgaggtgtcacagctggaagaacactgctctgcataaggtcacatatttacagaatggcaaaggcaggaagtattttcatcataattctgacttctacattccaaaagccacactcaaagacagcggctcctacttctgcagggggcttgttgggagtaaaaatgtgtcttcagagactgtgaacatcaccatcactcaaggtttggcagtgtcaaccatctcatcattctttccacctggctaccaaggtaccggcggaggcggatctggcggcggaggtagcggtggcggaggatctgaattcgaagccgacatctaccagacacctagatacctggtcatcggcaccggcaagaaaatcaccctggaatgcagccagacaatgggccacgacaagatgtactggtatcagcaggaccccggcatggaactgcacctgatccactacagctacggcgtgaacagcaccgagaagggcgatctgtctagcgagagcaccgtgtccagaatcagaaccgagcacttcccactgacactggaaagcgccagacctagccacaccagccagtacctgtgtgcctcttctgaggccagaggactggccgagttcaccgacacacagtatttcggccctggcaccagactgaccgttctcgagatccagaaccctgatcctgccgtgtaccagctgcgggatagcaagagcagcgacaagagcgtgtgtctgttcaccgacttcgacagccagaccaacgtgtcccagagcaaggactccgacgtgtacatcaccgataagtgcgtgctggacatgcggagcatggacttcaagagcaactccgccgtggcctggtccaacaagtccgatttcgcctgcgccaacgccttcaacaacagcattatccccgaggacacattcttcccaagccccgagagcagctgcgacgtgaagctggtggaaaagagcttcgagacagacaccaacctgaacttccagaacctgagcgtgatcggcttcagaatcctgctgctgaaagtggccggctttaacctgctgatgaccctgcggctgtggtccagccgcgccaagagaagcggatctggcgtgaagcagaccctgaatttcgacctgctgaagctggctggcgacgtggaatccaacccaggccctactagtatggactggatttggcgcatccttttccttgtcggcgctgctaccggcgcgcattccttcgaacaagttcagcttcaacagcctggcgctgagctggtcaaacctggcgcttctgtgaagatgagctgcaaagccagcggctacgccttcagcagctactggatcaactggatgaagcagaaacccggccagggactcgaatggatcggccaaatctatcccggcgacggcaccgagaacagattcagcgtgaacttccagaaggccgccaagagcttcagcctgaagatcagcgatagccagctgggcgacgccgccatgtacttttgcgcttatagaagcgccgtgaacgcccggctgatgtttggagatggcacacagctggtggtcaagcccaacacgcgtgaggacctgaagaacgtgttcccacctgaggtggccgtgttcgagcctagcgaggccgagatcagccacacccagaaagccaccctcgtgtgcctggctaccggcttctaccccgaccatgtggaactgtcttggtgggtcaacggcaaagaggtgcacagcggcgtgtgtaccgacccccagccactgaaagaacagcccgccctgaacgacagccggtactgcctgagcagcagactgagagtgtccgccaccttctggcagaacccccggaaccacttcagatgccaggtgcagttctacggcctgagcgagaacgacgagtggacccaggacagagccaagcccgtgacccagatcgtgtctgccgaagcctggggcagagccgattgcggctttaccagcgagagctaccagcagggcgtgctgagcgccaccatcctgtacgagatcctgctgggcaaggccaccctgtacgccgtgctggtgtctgccctggtgctgatggctatggtcaagcggaaggacagccggggaagggccaagcgatctggatctggagcaacaaacttctcactactcaaacaagcaggtgacgtggaggagaatcccgggccttctagaggcgggatccacaccatggctacctacgaggtgctgtgcgaggtggcaagaaagctgggcaccgacgacagagaagtggtgctgttcctgctgaacgtgttcatccctcagcctacactggcccagctgatcggtgcactgagagccctgaaagaggaaggccggctgacctttcctctgctggccgaatgcctgttcagagccggaagaagggatctgctgcgggacctgctgcatctggaccccagatttctggaaagacacctggccggcaccatgagctacttcagcccttaccagctgaccgtgctgcacgttgacggcgaactgtgcgccagagatattcggagcctgatcttcctgagcaaggacaccatcggcagccggtctacccctcagacatttctgcactgggtgtactgcatggaaaacctggacctgctcggccccacagatgtggatgccctgatgtccatgctgagaagcctgagcagagtggacctccagagacaggtgcagacactgatgggactgcacctgagcggacctagccacagccagcactacagacacacccct

SEQ ID NO: 3833 - DNA, 3333 bp, Artificial Sequence
  Synthetic Polynucloetide
atggccttaccagtgaccgccttgctcctgccgctggccttgctgctccacgccgccaggccgctcgaggggaaaccaattcccaaccctcttctgggactggattcaaccggcagcggcgaggacctgaagaacgtgttcccacctgaggtggccgtgttcgagcctagcaaggccgagatcgcccacacccagaaagccaccctcgtgtgcctggctaccggcttctaccccgaccatgtggaactgtcttggtgggtcaacggcaaagaggtgcacagcggcgtgtgtaccgacccccagccactgaaagaacagcccgccctgaacgacagccggtactgcctgagcagcagactgagagtgtccgccaccttctggcagaacccccggaaccacttcagatgccaggtgcagttctacggcctgagcgagaacgacgagtggacccaggacagagccaagcccgtgacccagatcgtgtctgccgaagcctggggcagagccgattgcggcatcaccagcgccagctaccaccagggcgtgctgagcgccaccatcctgtacgagatcctgctgggcaaggccaccctgtacgccgtgctggtgtctgccctggtgctgatggctatggtcaagcggaaggacagccggggaagggccaagcgatctggatctggagcaacaaacttctcactactcaaacaagcaggtgacgtggaggagaatcccgggcctactagcatggccttaccagtgaccgccttgctcctgccgctggccttgctgctccacgccgccaggccgggcatgcggactgaagacctcccaaaggctgtggtgttcctggagcctcaatggtacagggtgctggagaaggacagtgtgactctgaagtgccagggagcctactcccctgaggacaattccacacagtggtttcacaatgagagcctcatctcaagccaggcctccagctacttcattgacgctgccacagtggacgacagtggagagtacaggtgccagacaaacctctccaccctcagtgacccggtgcagctagaagtccatatcggctggctgttgctccaggcccctcggtgggtgttcaaggaggaagaccctattcacctgaggtgtcacagctggaagaacactgctctgcataaggtcacatatttacagaatggcaaaggcaggaagtattttcatcataattctgacttctacattccaaaagccacactcaaagacagcggctcctacttctgcagggggcttgttgggagtaaaaatgtgtcttcagagactgtgaacatcaccatcactcaaggtttggcagtgtcaaccatctcatcattctttccacctggctaccaaggtaccggcggaggcggatctggcggcggaggtagcggtggcggaggatctgaattcgaagccgacatctaccagacacctagatacctggtcatcggcaccggcaagaaaatcaccctggaatgcagccagacaatgggccacgacaagatgtactggtatcagcaggaccccggcatggaactgcacctgatccactacagctacggcgtgaacagcaccgagaagggcgatctgtctagcgagagcaccgtgtccagaatcagaaccgagcacttcccactgacactggaaagcgccagacctagccacaccagccagtacctgtgtgcctcttctgaggccagaggactggccgagttcaccgacacacagtatttcggccctggcaccagactgaccgttggcggaggcggaagtggaggcggaggatctggcggcggaggctctcaagttcagcttcaacagcctggcgctgagctggtcaaacctggcgcttctgtgaagatgagctgcaaagccagcggctacgccttcagcagctactggatcaactggatgaagcagaaacccggccagggactcgaatggatcggccaaatctatcccggcgacggcaccgagaacagattcagcgtgaacttccagaaggccgccaagagcttcagcctgaagatcagcgatagccagctgggcgacgccgccatgtacttttgcgcttatagaagcgccgtgaacgcccggctgatgtttggagatggcacacagctggtggtcaagcccaacacgcgtgagcagaaactgatctcggaagaggatgggagcggcatccagaaccctgatcctgccgtgtaccagctgcgggatagcaagagcagcgacaagagcgtgtgtctgttcaccgacttcgacagccagaccaacgtgtcccagagcaaggactccgacgtgtacatcaccgataagtgcgtgctggacatgcggagcatggacttcaagagcaactccgccgtggcctggtccaacaagtccgatttcgcctgcgccaacgccttcaacaacagcattatccccgaggacacattcttcccaagcagcgacgtgccctgcgacgtgaagctggtggaaaagagcttcgagacagacaccaacctgaacttccagaacctgagcgtgatcggcttcagaatcctgctgctgaaagtggccggctttaacctgctgatgaccctgcggctgtggtccagccgcgccaagagaagcggatctggcgtgaagcagaccctgaatttcgacctgctgaagctggctggcgacgtggaatccaacccaggcccttctagaggccatatgaccgagtacaagcccacggtgcgcctcgccacccgcgacgacgtccccagggccgtacgcaccctcgccgccgcgttcgccgactaccccgccacgcgccacaccgtcgatccggaccgccacatcgagcgggtcaccgagctgcaagaactcttcctcacgcgcgtcgggctcgacatcggcaaggtgtgggtcgcggacgacggcgccgcggtggcggtctggaccacgccggagagcgtcgaagcgggggcggtgttcgccgagatcggcccgcgcatggccgagttgagcggttcccggctggccgcgcagcaacagatggaaggcctcctggcgccgcaccggcccaaggagcccgcgtggttcctggccaccgtcggcgtctcgcccgaccaccagggcaagggtctgggcagcgccgtcgtgctccccggagtggaggcggccgagcgcgccggggtgcccgccttcctggagacctccgcgccccgcaacctccccttctacgagcggctcggcttcaccgtcaccgccgacgtcgaggtgcccgaaggaccgcgcacctggtgcatgacccgcaagcccggtgcctga

SEQ ID NO: 3834 - DNA, 3336 bp, Artificial Sequence
  Synthetic Polynucloetide
atggccttaccagtgaccgccttgctcctgccgctggccttgctgctccacgccgccaggccgctcgagcagaaactgatctcggaagaggatctgggctccggcgatcgccctgatcctgccgtgtaccagctgcgggatagcaagagcagcgacaagagcgtgtgtctgttcaccgacttcgacagccagaccaacgtgtcccagagcaaggactccgacgtgtacatcaccgataagtgcgtgctggacatgcggagcatggacttcaagagcaactccgccgtggcctggtccaacaagtccgatttcgcctgcgccaacgccttcaacaacagcattatccccgaggacacattcttcccaagccccgagagcagctgcgacgtgaagctggtggaaaagagcttcgagacagacaccaacctgaacttccagaacctgagcgtgatcggcttcagaatcctgctgctgaaagtggccggctttaacctgctgatgaccctgcggctgtggtccagctctagtcgcgccaagagaagcggatctggcgtgaagcagaccctgaatttcgacctgctgaagctggctggcgacgtggaatccaacccaggccccactagcatggccttaccagtgaccgccttgctcctgccgctggccttgctgctccacgccgccaggccgggcatgcggactgaagacctcccaaaggctgtggtgttcctggagcctcaatggtacagggtgctggagaaggacagtgtgactctgaagtgccagggagcctactcccctgaggacaattccacacagtggtttcacaatgagagcctcatctcaagccaggcctccagctacttcattgacgctgccacagtggacgacagtggagagtacaggtgccagacaaacctctccaccctcagtgacccggtgcagctagaagtccatatcggctggctgttgctccaggcccctcggtgggtgttcaaggaggaagaccctattcacctgaggtgtcacagctggaagaacactgctctgcataaggtcacatatttacagaatggcaaaggcaggaagtattttcatcataattctgacttctacattccaaaagccacactcaaagacagcggctcctacttctgcagggggcttgttgggagtaaaaatgtgtcttcagagactgtgaacatcaccatcactcaaggtttggcagtgtcaaccatctcatcattctttccacctggctaccaaggtaccggcggaggcggatctggcggcggaggtagcggtggcggaggatctgaattcgaagccgacatctaccagacacctagatacctggtcatcggcaccggcaagaaaatcaccctggaatgcagccagacaatgggccacgacaagatgtactggtatcagcaggaccccggcatggaactgcacctgatccactacagctacggcgtgaacagcaccgagaagggcgatctgtctagcgagagcaccgtgtccagaatcagaaccgagcacttcccactgacactggaaagcgccagacctagccacaccagccagtacctgtgtgcctcttctgaggccagaggactggccgagttcaccgacacacagtatttcggccctggcaccagactgaccgttggcggaggcggaagtggaggcggaggatctggcggcggaggctctcaagttcagcttcaacagcctggcgctgagctggtcaaacctggcgcttctgtgaagatgagctgcaaagccagcggctacgccttcagcagctactggatcaactggatgaagcagaaacccggccagggactcgaatggatcggccaaatctatcccggcgacggcaccgagaacagattcagcgtgaacttccagaaggccgccaagagcttcagcctgaagatcagcgatagccagctgggcgacgccgccatgtacttttgcgcttatagaagcgccgtgaacgcccggctgatgtttggagatggcacacagctggtggtcaagcccaacacgcgtgggaaaccaattcccaaccctcttctgggactggattcaaccggcagcggcgaggacctgaagaacgtgttcccacctgaggtggccgtgttcgagcctagcgaggccgagatcagccacacccagaaagccaccctcgtgtgcctggctaccggcttctaccccgaccatgtggaactgtcttggtgggtcaacggcaaagaggtgcacagcggcgtgtgtaccgacccccagccactgaaagaacagcccgccctgaacgacagccggtactgcctgagcagcagactgagagtgtccgccaccttctggcagaacccccggaaccacttcagatgccaggtgcagttctacggcctgagcgagaacgacgagtggacccaggacagagccaagcccgtgacccagatcgtgtctgccgaagcctggggcagagccgattgcggctttaccagcgagagctaccagcagggcgtgctgagcgccaccatcctgtacgagatcctgctgggcaaggccaccctgtacgccgtgctggtgtctgccctggtgctgatggctatggtcaagcggaaggacagccggggaagggccaagcgatctggatctggagcaacaaacttctcactactcaaacaagcaggtgacgtggaggagaatcccgggccttctagaggccatatgaccgagtacaagcccacggtgcgcctcgccacccgcgacgacgtccccagggccgtacgcaccctcgccgccgcgttcgccgactaccccgccacgcgccacaccgtcgatccggaccgccacatcgagcgggtcaccgagctgcaagaactcttcctcacgcgcgtcgggctcgacatcggcaaggtgtgggtcgcggacgacggcgccgcggtggcggtctggaccacgccggagagcgtcgaagcgggggcggtgttcgccgagatcggcccgcgcatggccgagttgagcggttcccggctggccgcgcagcaacagatggaaggcctcctggcgccgcaccggcccaaggagcccgcgtggttcctggccaccgtcggcgtctcgcccgaccaccagggcaagggtctgggcagcgccgtcgtgctccccggagtggaggcggccgagcgcgccggggtgcccgccttcctggagacctccgcgccccgcaacctccccttctacgagcggctcggcttcaccgtcaccgccgacgtcgaggtgcccgaaggaccgcgcacctggtgcatgacccgcaagcccggtgcctga

SEQ ID NO: 3835 - DNA, 3198 bp, Artificial Sequence
  Synthetic Polynucloetide
atggccttaccagtgaccgccttgctcctgccgctggccttgctgctccacgccgccaggccgggcatgcggactgaagacctcccaaaggctgtggtgttcctggagcctcaatggtacagggtgctggagaaggacagtgtgactctgaagtgccagggagcctactcccctgaggacaattccacacagtggtttcacaatgagagcctcatctcaagccaggcctccagctacttcattgacgctgccacagtggacgacagtggagagtacaggtgccagacaaacctctccaccctcagtgacccggtgcagctagaagtccatatcggctggctgttgctccaggcccctcggtgggtgttcaaggaggaagaccctattcacctgaggtgtcacagctggaagaacactgctctgcataaggtcacatatttacagaatggcaaaggcaggaagtattttcatcataattctgacttctacattccaaaagccacactcaaagacagcggctcctacttctgcagggggcttgttgggagtaaaaatgtgtcttcagagactgtgaacatcaccatcactcaaggtttggcagtgtcaaccatctcatcattctttccacctggctaccaaggtaccggcggaggcggatctggcggcggaggtagcggtggcggaggatctgaattcgaagccgacatctaccagacacctagatacctggtcatcggcaccggcaagaaaatcaccctggaatgcagccagacaatgggccacgacaagatgtactggtatcagcaggaccccggcatggaactgcacctgatccactacagctacggcgtgaacagcaccgagaagggcgatctgtctagcgagagcaccgtgtccagaatcagaaccgagcacttcccactgacactggaaagcgccagacctagccacaccagccagtacctgtgtgcctcttctgaggccagaggactggccgagttcaccgacacacagtatttcggccctggcaccagactgaccgttctcgaggacctgaagaacgtgttcccacctgaggtggccgtgttcgagcctagcgaggccgagatcagccacacccagaaagccaccctcgtgtgcctggctaccggcttctaccccgaccatgtggaactgtcttggtgggtcaacggcaaagaggtgcacagcggcgtgtctaccgacccccagccactgaaagaacagcccgccctgaacgacagccggtactgcctgagcagcagactgagagtgtccgccaccttctggcagaacccccggaaccacttcagatgccaggtgcagttctacggcctgagcgagaacgacgagtggacccaggacagagccaagcccgtgacccagatcgtgtctgccgaagcctggggcagagccgattgcggctttaccagcgagagctaccagcagggcgtgctgagcgccaccatcctgtacgagatcctgctgggcaaggccaccctgtacgccgtgctggtgtctgccctggtgctgatggctatggtcaagcggaaggacagccggggaagggccaagcgatctggatctggagcaacaaacttctcactactcaaacaagcaggtgacgtggaggagaatcccgggcctactagtatggactggatttggcgcatccttttccttgtcggcgctgctaccggcgcgcattccttcgaacaagttcagcttcaacagcctggcgctgagctggtcaaacctggcgcttctgtgaagatgagctgcaaagccagcggctacgccttcagcagctactggatcaactggatgaagcagaaacccggccagggactcgaatggatcggccaaatctatcccggcgacggcaccgagaacagattcagcgtgaacttccagaaggccgccaagagcttcagcctgaagatcagcgatagccagctgggcgacgccgccatgtacttttgcgcttatagaagcgccgtgaacgcccggctgatgtttggagatggcacacagctggtggtcaagcccaacacgcgtatccagaaccctgatcctgccgtgtaccagctgcgggatagcaagagcagcgacaagagcgtgtgtctgttcaccgacttcgacagccagaccaacgtgtcccagagcaaggactccgacgtgtacatcaccgataagaccgtgctggacatgcggagcatggacttcaagagcaactccgccgtggcctggtccaacaagtccgatttcgcctgcgccaacgccttcaacaacagcattatccccgaggacacattcttcccaagccccgagagcagctgcgacgtgaagctggtggaaaagagcttcgagacagacaccaacctgaacttccagaacctgagcgtgatcggcttcagaatcctgctgctgaaagtggccggctttaacctgctgatgaccctgcggctgtggtccagccgcgccaagagaagcggatctggcgtgaagcagaccctgaatttcgacctgctgaagctggctggcgacgtggaatccaacccaggcccttctagaggccatatgaccgagtacaagcccacggtgcgcctcgccacccgcgacgacgtccccagggccgtacgcaccctcgccgccgcgttcgccgactaccccgccacgcgccacaccgtcgatccggaccgccacatcgagcgggtcaccgagctgcaagaactcttcctcacgcgcgtcgggctcgacatcggcaaggtgtgggtcgcggacgacggcgccgcggtggcggtctggaccacgccggagagcgtcgaagcgggggcggtgttcgccgagatcggcccgcgcatggccgagttgagcggttcccggctggccgcgcagcaacagatggaaggcctcctggcgccgcaccggcccaaggagcccgcgtggttcctggccaccgtcggcgtctcgcccgaccaccagggcaagggtctgggcagcgccgtcgtgctccccggagtggaggcggccgagcgcgccggggtgcccgccttcctggagacctccgcgccccgcaacctccccttctacgagcggctcggcttcaccgtcaccgccgacgtcgaggtgcccgaaggaccgcgcacctggtgcatgacccgcaagcccggtgcctga

SEQ ID NO: 3836 - DNA, 3444 bp, Artificial Sequence
  Synthetic Polynucloetide
atggccttaccagtgaccgccttgctcctgccgctggccttgctgctccacgccgccaggccgggcatgcggactgaagacctcccaaaggctgtggtgttcctggagcctcaatggtacagggtgctggagaaggacagtgtgactctgaagtgccagggagcctactcccctgaggacaattccacacagtggtttcacaatgagagcctcatctcaagccaggcctccagctacttcattgacgctgccacagtggacgacagtggagagtacaggtgccagacaaacctctccaccctcagtgacccggtgcagctagaagtccatatcggctggctgttgctccaggcccctcggtgggtgttcaaggaggaagaccctattcacctgaggtgtcacagctggaagaacactgctctgcataaggtcacatatttacagaatggcaaaggcaggaagtattttcatcataattctgacttctacattccaaaagccacactcaaagacagcggctcctacttctgcagggggcttgttgggagtaaaaatgtgtcttcagagactgtgaacatcaccatcactcaaggtttggcagtgtcaaccatctcatcattctttccacctggctaccaaggtaccggcggaggcggatctggcggcggaggtagcggtggcggaggatctgaattcgaagccgacatctaccagacacctagatacctggtcatcggcaccggcaagaaaatcaccctggaatgcagccagacaatgggccacgacaagatgtactggtatcagcaggaccccggcatggaactgcacctgatccactacagctacggcgtgaacagcaccgagaagggcgatctgtctagcgagagcaccgtgtccagaatcagaaccgagcacttcccactgacactggaaagcgccagacctagccacaccagccagtacctgtgtgcctcttctgaggccagaggactggccgagttcaccgacacacagtatttcggccctggcaccagactgaccgttctcgaggacctgaagaacgtgttcccacctgaggtggccgtgttcgagcctagcgaggccgagatcagccacacccagaaagccaccctcgtgtgcctggctaccggcttctaccccgaccatgtggaactgtcttggtgggtcaacggcaaagaggtgcacagcggcgtgtctaccgacccccagccactgaaagaacagcccgccctgaacgacagccggtactgcctgagcagcagactgagagtgtccgccaccttctggcagaacccccggaaccacttcagatgccaggtgcagttctacggcctgagcgagaacgacgagtggacccaggacagagccaagcccgtgacccagatcgtgtctgccgaagcctggggcagagccgattgcggctttaccagcgagagctaccagcagggcgtgctgagcgccaccatcctgtacgagatcctgctgggcaaggccaccctgtacgccgtgctggtgtctgccctggtgctgatggctatggtcaagcggaaggacagccggggaagggccaagcgatctggatctggagcaacaaacttctcactactcaaacaagcaggtgacgtggaggagaatcccgggcctactagtatggactggatttggcgcatccttttccttgtcggcgctgctaccggcgcgcattccttcgaacaagttcagcttcaacagcctggcgctgagctggtcaaacctggcgcttctgtgaagatgagctgcaaagccagcggctacgccttcagcagctactggatcaactggatgaagcagaaacccggccagggactcgaatggatcggccaaatctatcccggcgacggcaccgagaacagattcagcgtgaacttccagaaggccgccaagagcttcagcctgaagatcagcgatagccagctgggcgacgccgccatgtacttttgcgcttatagaagcgccgtgaacgcccggctgatgtttggagatggcacacagctggtggtcaagcccaacacgcgtgagcagaaactgatctcggaagaggatgggagcggcaccccattcccttctctggcccctcccatcatgctgctggtggacggcaagcagcagatggtggtcgtgtgcctggtgctggatgtggccccacctggactggacagccccatctggtttagcgccggcaatggctctgccctggacgcctttacctacggcccaagccctgccaccgatggcacctggacaaatctggcccacctgagcctgcccagcgaggaactggcttcttgggagcctctcgtgtgccacacaggacctggcgctgagggacacagcagatccacccagcctatgcacctgtctggcgaggccagcaccgccagaacctgtcctcaggaacctctgagaggcacccctggcggagcactgtggctgggagtgctgagactgctgctgttcaagctgctgctgtttgacctgctgctgacctgctcctgtctgtgcgatcctgccggccctctgccttctcctgccaccaccacaagactgagagccctgggcagccacagactgcaccctgccacagagacaggcggcagagaggccacaagcagccctagaccccagcccagagacagaagatggggcgataccccccctggcagaaagcctggatctccagtccgcgccaagagaagcggatctggcgtgaagcagaccctgaatttcgacctgctgaagctggctggcgacgtggaatccaacccaggcccttctagaggccatatgaccgagtacaagcccacggtgcgcctcgccacccgcgacgacgtccccagggccgtacgcaccctcgccgccgcgttcgccgactaccccgccacgcgccacaccgtcgatccggaccgccacatcgagcgggtcaccgagctgcaagaactcttcctcacgcgcgtcgggctcgacatcggcaaggtgtgggtcgcggacgacggcgccgcggtggcggtctggaccacgccggagagcgtcgaagcgggggcggtgttcgccgagatcggcccgcgcatggccgagttgagcggttcccggctggccgcgcagcaacagatggaaggcctcctggcgccgcaccggcccaaggagcccgcgtggttcctggccaccgtcggcgtctcgcccgaccaccagggcaagggtctgggcagcgccgtcgtgctccccggagtggaggcggccgagcgcgccggggtgcccgccttcctggagacctccgcgccccgcaacctccccttctacgagcggctcggcttcaccgtcaccgccgacgtcgaggtgcccgaaggaccgcgcacctggtgcatgacccgcaagcccggtgcctga

SEQ ID NO: 3837 - DNA, 3498 bp, Artificial Sequence
  Synthetic Polynucloetide
atggccttaccagtgaccgccttgctcctgccgctggccttgctgctccacgccgccaggccgctcgaggacctgaagaacgtgttcccacctgaggtggccgtgttcgagcctagcgaggccgagatcagccacacccagaaagccaccctcgtgtgcctggctaccggcttctaccccgaccatgtggaactgtcttggtgggtcaacggcaaagaggtgcacagcggcgtgtctaccgacccccagccactgaaagaacagcccgccctgaacgacagccggtactgcctgagcagcagactgagagtgtccgccaccttctggcagaacccccggaaccacttcagatgccaggtgcagttctacggcctgagcgagaacgacgagtggacccaggacagagccaagcccgtgacccagatcgtgtctgccgaagcctggggcagagccgattgcggctttaccagcgagagctaccagcagggcgtgctgagcgccaccatcctgtacgagatcctgctgggcaaggccaccctgtacgccgtgctggtgtctgccctggtgctgatggctatggtcaagcggaaggacagccggggaagggccaagcgatctggatctggagcaacaaacttctcactactcaaacaagcaggtgacgtggaggagaatcccgggcctactagcatggccttaccagtgaccgccttgctcctgccgctggccttgctgctccacgccgccaggccgggcatgcggactgaagacctcccaaaggctgtggtgttcctggagcctcaatggtacagggtgctggagaaggacagtgtgactctgaagtgccagggagcctactcccctgaggacaattccacacagtggtttcacaatgagagcctcatctcaagccaggcctccagctacttcattgacgctgccacagtggacgacagtggagagtacaggtgccagacaaacctctccaccctcagtgacccggtgcagctagaagtccatatcggctggctgttgctccaggcccctcggtgggtgttcaaggaggaagaccctattcacctgaggtgtcacagctggaagaacactgctctgcataaggtcacatatttacagaatggcaaaggcaggaagtattttcatcataattctgacttctacattccaaaagccacactcaaagacagcggctcctacttctgcagggggcttgttgggagtaaaaatgtgtcttcagagactgtgaacatcaccatcactcaaggtttggcagtgtcaaccatctcatcattctttccacctggctaccaaggtaccggcggaggcggatctggcggcggaggtagcggtggcggaggatctgaattcgaagccgacatctaccagacacctagatacctggtcatcggcaccggcaagaaaatcaccctggaatgcagccagacaatgggccacgacaagatgtactggtatcagcaggaccccggcatggaactgcacctgatccactacagctacggcgtgaacagcaccgagaagggcgatctgtctagcgagagcaccgtgtccagaatcagaaccgagcacttcccactgacactggaaagcgccagacctagccacaccagccagtacctgtgtgcctcttctgaggccagaggactggccgagttcaccgacacacagtatttcggccctggcaccagactgaccgttggcggaggcggaagtggaggcggaggatctggcggcggaggctctcaagttcagcttcaacagcctggcgctgagctggtcaaacctggcgcttctgtgaagatgagctgcaaagccagcggctacgccttcagcagctactggatcaactggatgaagcagaaacccggccagggactcgaatggatcggccaaatctatcccggcgacggcaccgagaacagattcagcgtgaacttccagaaggccgccaagagcttcagcctgaagatcagcgatagccagctgggcgacgccgccatgtacttttgcgcttatagaagcgccgtgaacgcccggctgatgtttggagatggcacacagctggtggtcaagcccaacacgcgtgagcagaaactgatctcggaagaggatctggggagcggcaccccattcccttctctggcccctcccatcatgctgctggtggacggcaagcagcagatggtggtcgtgtgcctggtgctggatgtggccccacctggactggacagccccatctggtttagcgccggcaatggctctgccctggacgcctttacctacggcccaagccctgccaccgatggcacctggacaaatctggcccacctgagcctgcccagcgaggaactggcttcttgggagcctctcgtgtgccacacaggacctggcgctgagggacacagcagatccacccagcctatgcacctgtctggcgaggccagcaccgccagaacctgtcctcaggaacctctgagaggcacccctggcggagcactgtggctgggagtgctgagactgctgctgttcaagctgctgctgtttgacctgctgctgacctgctcctgtctgtgcgatcctgccggccctctgccttctcctgccaccaccacaagactgagagccctgggcagccacagactgcaccctgccacagagacaggcggcagagaggccacaagcagccctagaccccagcccagagacagaagatggggcgataccccccctggcagaaagcctggatctccagtccgcgccaagagaagcggatctggcgtgaagcagaccctgaatttcgacctgctgaagctggctggcgacgtggaatccaacccaggcccttctagatctagaggccatatgaccgagtacaagcccacggtgcgcctcgccacccgcgacgacgtccccagggccgtacgcaccctcgccgccgcgttcgccgactaccccgccacgcgccacaccgtcgatccggaccgccacatcgagcgggtcaccgagctgcaagaactcttcctcacgcgcgtcgggctcgacatcggcaaggtgtgggtcgcggacgacggcgccgcggtggcggtctggaccacgccggagagcgtcgaagcgggggcggtgttcgccgagatcggcccgcgcatggccgagttgagcggttcccggctggccgcgcagcaacagatggaaggcctcctggcgccgcaccggcccaaggagcccgcgtggttcctggccaccgtcggcgtctcgcccgaccaccagggcaagggtctgggcagcgccgtcgtgctccccggagtggaggcggccgagcgcgccggggtgcccgccttcctggagacctccgcgccccgcaacctccccttctacgagcggctcggcttcaccgtcaccgccgacgtcgaggtgcccgaaggaccgcgcacctggtgcatgacccgcaagcccggtgcctga

SEQ ID NO: 3838 - DNA, 3309 bp, Artificial Sequence
  Synthetic Polynucloetide
atggccttaccagtgaccgccttgctcctgccgctggccttgctgctccacgccgccaggccgggcatgcggactgaagacctcccaaaggctgtggtgttcctggagcctcaatggtacagggtgctggagaaggacagtgtgactctgaagtgccagggagcctactcccctgaggacaattccacacagtggtttcacaatgagagcctcatctcaagccaggcctccagctacttcattgacgctgccacagtggacgacagtggagagtacaggtgccagacaaacctctccaccctcagtgacccggtgcagctagaagtccatatcggctggctgttgctccaggcccctcggtgggtgttcaaggaggaagaccctattcacctgaggtgtcacagctggaagaacactgctctgcataaggtcacatatttacagaatggcaaaggcaggaagtattttcatcataattctgacttctacattccaaaagccacactcaaagacagcggctcctacttctgcagggggcttgttgggagtaaaaatgtgtcttcagagactgtgaacatcaccatcactcaaggtttggcagtgtcaaccatctcatcattctttccacctggctaccaaggtaccggcggaggcggatctggcggcggaggtagcggtggcggaggatctgaattcgaagccgacatctaccagacacctagatacctggtcatcggcaccggcaagaaaatcaccctggaatgcagccagacaatgggccacgacaagatgtactggtatcagcaggaccccggcatggaactgcacctgatccactacagctacggcgtgaacagcaccgagaagggcgatctgtctagcgagagcaccgtgtccagaatcagaaccgagcacttcccactgacactggaaagcgccagacctagccacaccagccagtacctgtgtgcctcttctgaggccagaggactggccgagttcaccgacacacagtatttcggccctggcaccagactgaccgttctcgaggggaaaccaattcccaaccctcttctgggactggattcaaccggcagcggcgacaagcagctggacgccgacgtgtcccccaagcctaccatcttcctgccctctatcgccgagacaaagctccagaaggccggcacctacctgtgcctgctggaaaagttcttcccagatgtgattaagatccactggcaggaaaagaagtccaacaccatcctgggcagccaggaaggcaacaccatgaagaccaacgacacctacatgaagttcagctggctgaccgtgcccgagaagtccctggacaaagaacacagatgcatcgtgcggcacgaaaacaacaagaacggcgtggaccaggaaatcatcttcccacccatcaagaccgatgtgattacaatggaccccaaggacaactgctccaaggacgccaacgataccctgctgctccagctgaccaacaccagcgcctactacatgtacttgttgctgctgctgaagtccgtggtgtacttcgccatcatcacatgctgcctgctgcggagaaccgccttctgctgcaacggcgagaagtctagggccaagcgatctggatctggagcaacaaacttctcactactcaaacaagcaggtgacgtggaggagaatcccgggcctactagtatggactggatttggcgcatccttttccttgtcggcgctgctaccggcgcgcattccttcgaacaagttcagcttcaacagcctggcgctgagctggtcaaacctggcgcttctgtgaagatgagctgcaaagccagcggctacgccttcagcagctactggatcaactggatgaagcagaaacccggccagggactcgaatggatcggccaaatctatcccggcgacggcaccgagaacagattcagcgtgaacttccagaaggccgccaagagcttcagcctgaagatcagcgatagccagctgggcgacgccgccatgtacttttgcgcttatagaagcgccgtgaacgcccggctgatgtttggagatggcacacagctggtggtcaagcccaacacgcgtgagcagaaactgatctcggaagaggatgggagcggcagccagcctcacaccaagcccagcgtgttcgtgatgaagaacggcaccaacgtggcctgcctcgtgaaagagttctaccccaaggacatcaggatcaacctggtgtccagcaagaagatcaccgagttcgaccccgccatcgtgatctcccccagcggcaagtacaacgccgtgaagctggggaagtacgaggacagcaacagcgtgacctgctccgtgcagcacgacaacaagaccgtgcacagcaccgactttgaagtgaaaaccgactccaccgaccacgtgaagcccaaagagacagagaacaccaagcagcccagcaagagctgccacaagcccaaggccatcgtgcacaccgagaaagtgaacatgatgagcctgaccgtgctgggcctgcggatgctgttcgccaaaaccgtggccgtgaacttcctgctgaccgccaagctgttcttcctccgcgccaagagaagcggatctggcgtgaagcagaccctgaatttcgacctgctgaagctggctggcgacgtggaatccaacccaggcccttctagaggccatatgaccgagtacaagcccacggtgcgcctcgccacccgcgacgacgtccccagggccgtacgcaccctcgccgccgcgttcgccgactaccccgccacgcgccacaccgtcgatccggaccgccacatcgagcgggtcaccgagctgcaagaactcttcctcacgcgcgtcgggctcgacatcggcaaggtgtgggtcgcggacgacggcgccgcggtggcggtctggaccacgccggagagcgtcgaagcgggggcggtgttcgccgagatcggcccgcgcatggccgagttgagcggttcccggctggccgcgcagcaacagatggaaggcctcctggcgccgcaccggcccaaggagcccgcgtggttcctggccaccgtcggcgtctcgcccgaccaccagggcaagggtctgggcagcgccgtcgtgctccccggagtggaggcggccgagcgcgccggggtgcccgccttcctggagacctccgcgccccgcaacctccccttctacgagcggctcggcttcaccgtcaccgccgacgtcgaggtgcccgaaggaccgcgcacctggtgcatgacccgcaagcccggtgcctga

SEQ ID NO: 3839 - DNA, 2520 bp, Artificial Sequence
  Synthetic Polynucloetide
atggccttaccagtgaccgccttgctcctgccgctggccttgctgctccacgccgccaggccgggcatgcggactgaagacctcccaaaggctgtggtgttcctggagcctcaatggtacagggtgctggagaaggacagtgtgactctgaagtgccagggagcctactcccctgaggacaattccacacagtggtttcacaatgagagcctcatctcaagccaggcctccagctacttcattgacgctgccacagtggacgacagtggagagtacaggtgccagacaaacctctccaccctcagtgacccggtgcagctagaagtccatatcggctggctgttgctccaggcccctcggtgggtgttcaaggaggaagaccctattcacctgaggtgtcacagctggaagaacactgctctgcataaggtcacatatttacagaatggcaaaggcaggaagtattttcatcataattctgacttctacattccaaaagccacactcaaagacagcggctcctacttctgcagggggcttgttgggagtaaaaatgtgtcttcagagactgtgaacatcaccatcactcaaggtttggcagtgtcaaccatctcatcattctttccacctggctaccaaggtaccggcggaggcggatctggcggcggaggtagcggtggcggaggatctgaattcgaagccgacatctaccagacacctagatacctggtcatcggcaccggcaagaaaatcaccctggaatgcagccagacaatgggccacgacaagatgtactggtatcagcaggaccccggcatggaactgcacctgatccactacagctacggcgtgaacagcaccgagaagggcgatctgtctagcgagagcaccgtgtccagaatcagaaccgagcacttcccactgacactggaaagcgccagacctagccacaccagccagtacctgtgtgcctcttctgaggccagaggactggccgagttcaccgacacacagtatttcggccctggcaccagactgaccgttctcgagagccagcctcacaccaagcccagcgtgttcgtgatgaagaacggcaccaacgtggcctgcctcgtgaaagagttctaccccaaggacatcaggatcaacctggtgtccagcaagaagatcaccgagttcgaccccgccatcgtgatctcccccagcggcaagtacaacgccgtgaagctggggaagtacgaggacagcaacagcgtgacctgctccgtgcagcacgacaacaagaccgtgcacagcaccgactttgaagtgaaaaccgactccaccgaccacgtgaagcccaaagagacagagaacaccaagcagcccagcaagagctgccacaagcccaaggccatcgtgcacaccgagaaagtgaacatgatgagcctgaccgtgctgggcctgcggatgctgttcgccaaaaccgtggccgtgaacttcctgctgaccgccaagctgttcttcctcagggccaagcgatctggatctggagcaacaaacttctcactactcaaacaagcaggtgacgtggaggagaatcccgggcctactagtatggactggatttggcgcatccttttccttgtcggcgctgctaccggcgcgcattccttcgaacaagttcagcttcaacagcctggcgctgagctggtcaaacctggcgcttctgtgaagatgagctgcaaagccagcggctacgccttcagcagctactggatcaactggatgaagcagaaacccggccagggactcgaatggatcggccaaatctatcccggcgacggcaccgagaacagattcagcgtgaacttccagaaggccgccaagagcttcagcctgaagatcagcgatagccagctgggcgacgccgccatgtacttttgcgcttatagaagcgccgtgaacgcccggctgatgtttggagatggcacacagctggtggtcaagcccaacacgcgtgacaagcagctggacgccgacgtgtcccccaagcctaccatcttcctgccctctatcgccgagacaaagctccagaaggccggcacctacctgtgcctgctggaaaagttcttcccagatgtgattaagatccactggcaggaaaagaagtccaacaccatcctgggcagccaggaaggcaacaccatgaagaccaacgacacctacatgaagttcagctggctgaccgtgcccgagaagtccctggacaaagaacacagatgcatcgtgcggcacgaaaacaacaagaacggcgtggaccaggaaatcatcttcccacccatcaagaccgatgtgattacaatggaccccaaggacaactgctccaaggacgccaacgataccctgctgctccagctgaccaacaccagcgcctactacatgtacttgttgctgctgctgaagtccgtggtgtacttcgccatcatcacatgctgcctgctgcggagaaccgccttctgctgcaacggcgagaagtct

SEQ ID NO: 3840 - DNA, 3354 bp, Artificial Sequence
  Synthetic Polynucloetide
atggccttaccagtgaccgccttgctcctgccgctggccttgctgctccacgccgccaggccgctcgaggggaaaccaattcccaaccctcttctgggactggattcaaccggcagcggcgacaagcagctggacgccgacgtgtcccccaagcctaccatcttcctgccctctatcgccgagacaaagctccagaaggccggcacctacctgtgcctgctggaaaagttcttcccagatgtgattaagatccactggcaggaaaagaagtccaacaccatcctgggcagccaggaaggcaacaccatgaagaccaacgacacctacatgaagttcagctggctgaccgtgcccgagaagtccctggacaaagaacacagatgcatcgtgcggcacgaaaacaacaagaacggcgtggaccaggaaatcatcttcccacccatcaagaccgatgtgattacaatggaccccaaggacaactgctccaaggacgccaacgataccctgctgctccagctgaccaacaccagcgcctactacatgtacttgttgctgctgctgaagtccgtggtgtacttcgccatcatcacatgctgcctgctgcggagaaccgccttctgctgcaacggcgagaagtctagggccaagcgatctggatctggagcaacaaacttctcactactcaaacaagcaggtgacgtggaggagaatcccgggcctactagcatggccttaccagtgaccgccttgctcctgccgctggccttgctgctccacgccgccaggccgggcatgcggactgaagacctcccaaaggctgtggtgttcctggagcctcaatggtacagggtgctggagaaggacagtgtgactctgaagtgccagggagcctactcccctgaggacaattccacacagtggtttcacaatgagagcctcatctcaagccaggcctccagctacttcattgacgctgccacagtggacgacagtggagagtacaggtgccagacaaacctctccaccctcagtgacccggtgcagctagaagtccatatcggctggctgttgctccaggcccctcggtgggtgttcaaggaggaagaccctattcacctgaggtgtcacagctggaagaacactgctctgcataaggtcacatatttacagaatggcaaaggcaggaagtattttcatcataattctgacttctacattccaaaagccacactcaaagacagcggctcctacttctgcagggggcttgttgggagtaaaaatgtgtcttcagagactgtgaacatcaccatcactcaaggtttggcagtgtcaaccatctcatcattctttccacctggctaccaaggtaccggcggaggcggatctggcggcggaggtagcggtggcggaggatctgaattcgaagccgacatctaccagacacctagatacctggtcatcggcaccggcaagaaaatcaccctggaatgcagccagacaatgggccacgacaagatgtactggtatcagcaggaccccggcatggaactgcacctgatccactacagctacggcgtgaacagcaccgagaagggcgatctgtctagcgagagcaccgtgtccagaatcagaaccgagcacttcccactgacactggaaagcgccagacctagccacaccagccagtacctgtgtgcctcttctgaggccagaggactggccgagttcaccgacacacagtatttcggccctggcaccagactgaccgttggcggaggcggaagtggaggcggaggatctggcggcggaggctctcaagttcagcttcaacagcctggcgctgagctggtcaaacctggcgcttctgtgaagatgagctgcaaagccagcggctacgccttcagcagctactggatcaactggatgaagcagaaacccggccagggactcgaatggatcggccaaatctatcccggcgacggcaccgagaacagattcagcgtgaacttccagaaggccgccaagagcttcagcctgaagatcagcgatagccagctgggcgacgccgccatgtacttttgcgcttatagaagcgccgtgaacgcccggctgatgtttggagatggcacacagctggtggtcaagcccaacacgcgtgagcagaaactgatctcggaagaggatgggagcggcagccagcctcacaccaagcccagcgtgttcgtgatgaagaacggcaccaacgtggcctgcctcgtgaaagagttctaccccaaggacatcaggatcaacctggtgtccagcaagaagatcaccgagttcgaccccgccatcgtgatctcccccagcggcaagtacaacgccgtgaagctggggaagtacgaggacagcaacagcgtgacctgctccgtgcagcacgacaacaagaccgtgcacagcaccgactttgaagtgaaaaccgactccaccgaccacgtgaagcccaaagagacagagaacaccaagcagcccagcaagagctgccacaagcccaaggccatcgtgcacaccgagaaagtgaacatgatgagcctgaccgtgctgggcctgcggatgctgttcgccaaaaccgtggccgtgaacttcctgctgaccgccaagctgttcttcctccgcgccaagagaagcggatctggcgtgaagcagaccctgaatttcgacctgctgaagctggctggcgacgtggaatccaacccaggcccttctagaggccatatgaccgagtacaagcccacggtgcgcctcgccacccgcgacgacgtccccagggccgtacgcaccctcgccgccgcgttcgccgactaccccgccacgcgccacaccgtcgatccggaccgccacatcgagcgggtcaccgagctgcaagaactcttcctcacgcgcgtcgggctcgacatcggcaaggtgtgggtcgcggacgacggcgccgcggtggcggtctggaccacgccggagagcgtcgaagcgggggcggtgttcgccgagatcggcccgcgcatggccgagttgagcggttcccggctggccgcgcagcaacagatggaaggcctcctggcgccgcaccggcccaaggagcccgcgtggttcctggccaccgtcggcgtctcgcccgaccaccagggcaagggtctgggcagcgccgtcgtgctccccggagtggaggcggccgagcgcgccggggtgcccgccttcctggagacctccgcgccccgcaacctccccttctacgagcggctcggcttcaccgtcaccgccgacgtcgaggtgcccgaaggaccgcgcacctggtgcatgacccgcaagcccggtgcctga

SEQ ID NO: 3841 - DNA, 3729 bp, Artificial Sequence
  Synthetic Polynucloetide
atggccttaccagtgaccgccttgctcctgccgctggccttgctgctccacgccgccaggccgggcatgcggactgaagacctcccaaaggctgtggtgttcctggagcctcaatggtacagggtgctggagaaggacagtgtgactctgaagtgccagggagcctactcccctgaggacaattccacacagtggtttcacaatgagagcctcatctcaagccaggcctccagctacttcattgacgctgccacagtggacgacagtggagagtacaggtgccagacaaacctctccaccctcagtgacccggtgcagctagaagtccatatcggctggctgttgctccaggcccctcggtgggtgttcaaggaggaagaccctattcacctgaggtgtcacagctggaagaacactgctctgcataaggtcacatatttacagaatggcaaaggcaggaagtattttcatcataattctgacttctacattccaaaagccacactcaaagacagcggctcctacttctgcagggggcttgttgggagtaaaaatgtgtcttcagagactgtgaacatcaccatcactcaaggtttggcagtgtcaaccatctcatcattctttccacctggctaccaaggtaccggcggaggcggatctggcggcggaggtagcggtggcggaggatctgaattcgaagccgacatctaccagacacctagatacctggtcatcggcaccggcaagaaaatcaccctggaatgcagccagacaatgggccacgacaagatgtactggtatcagcaggaccccggcatggaactgcacctgatccactacagctacggcgtgaacagcaccgagaagggcgatctgtctagcgagagcaccgtgtccagaatcagaaccgagcacttcccactgacactggaaagcgccagacctagccacaccagccagtacctgtgtgcctcttctgaggccagaggactggccgagttcaccgacacacagtatttcggccctggcaccagactgaccgttggacagcctaaggccaatcctaccgtgacactgttccctccaagcagcgaagaactccaggccaacaaggccacacttgtgtgcctgatctccgacttctaccctggggctgtgacagtggcttggaaggccgatggatctcctgtgaaagccggcgtggaaaccaccaagccatccaagcagagcaacaacaaatacgccgccagctcctacctgagcctgacacctgagcagtggaagtcccacagatcctacagctgccaagtgacccacgaaggcagcaccgtggaaaagacagtggcccctacagagtgcagcggatcccagagcttcggcctgctggaccccaagctgtgctacctgctggatggcatcctgttcatctacggcgtgatcctgaccgccctgttcctgagagtgaagttcagcagaagcgccgacgcccctgcctaccagcagggacagaaccaactgtacaacgagctgaacctgggcagacgggaagagtacgacgtgctggacaagcggagaggcagggaccctgagatgggcggaaagccccagcggagaaagaacccccaggaaggactgtataacgaactccagaaagacaagatggccgaagcctacagcgagatcggcatgaagggcgagcggagaagaggcaagggccacgatggcctgtaccagggcctgagcaccgccaccaaggacacctatgacgccctgcacatgcaggccctgcctccaagaagggccaagcgatctggatctggagcaacaaacttctcactactcaaacaagcaggtgacgtggaggagaatcccgggcctactagtatggactggatttggcgcatccttttccttgtcggcgctgctaccggcgcgcattccttcgaacaagttcagcttcaacagcctggcgctgagctggtcaaacctggcgcttctgtgaagatgagctgcaaagccagcggctacgccttcagcagctactggatcaactggatgaagcagaaacccggccagggactcgaatggatcggccaaatctatcccggcgacggcaccgagaacagattcagcgtgaacttccagaaggccgccaagagcttcagcctgaagatcagcgatagccagctgggcgacgccgccatgtacttttgcgcttatagaagcgccgtgaacgcccggctgatgtttggagatggcacacagctggtggtcaagcccaacgcctctacaaagggaccctccgtgtttcctctggctcccagcagcaagtctacaagcggaggaacagccgctctgggctgcctggtcaaggattactttcccgagcctgtgaccgtgtcctggaatagcggagcactgacaagcggcgtgcacacctttccagccgtgctgcaaagcagcggcctgtactctctgagcagcgtggtcacagtgcctagctctagcctgggcacccagacctacatctgcaatgtgaaccacaagcctagcaacaccaaggtggacaagagagtggaacccaagagctgtggtacccagagttttgggttgttggaccctaaattgtgctatctgttggacggaatcctgttcatttacggagtgatcctgaccgcattgttcctgcgggttaagttttccagatccgcagacgcacccgcttaccaacaagggcagaaccaactctacaatgaacttaatttggggcggagggaagagtacgacgttctggacaaaaggaggggacgagatcccgagatgggcggaaagcctcagcgaaggaagaatccgcaagaggggctttataacgaactccagaaagataaaatggcagaagcctatagtgagattgggatgaagggagaaaggaggaggggtaaaggtcacgatgggttgtaccaaggattgagcacagccactaaagatacctatgatgcgctccacatgcaggccctgccgccaagacgcgccaagagaagcggatctggcgtgaagcagaccctgaatttcgacctgctgaagctggctggcgacgtggaatccaacccaggcccttctagaggccatatgaccgagtacaagcccacggtgcgcctcgccacccgcgacgacgtccccagggccgtacgcaccctcgccgccgcgttcgccgactaccccgccacgcgccacaccgtcgatccggaccgccacatcgagcgggtcaccgagctgcaagaactcttcctcacgcgcgtcgggctcgacatcggcaaggtgtgggtcgcggacgacggcgccgcggtggcggtctggaccacgccggagagcgtcgaagcgggggcggtgttcgccgagatcggcccgcgcatggccgagttgagcggttcccggctggccgcgcagcaacagatggaaggcctcctggcgccgcaccggcccaaggagcccgcgtggttcctggccaccgtcggcgtctcgcccgaccaccagggcaagggtctgggcagcgccgtcgtgctccccggagtggaggcggccgagcgcgccggggtgcccgccttcctggagacctccgcgccccgcaacctccccttctacgagcggctcggcttcaccgtcaccgccgacgtcgaggtgcccgaaggaccgcgcacctggtgcatgacccgcaagcccggtgcctga

SEQ ID NO: 3842 - DNA, 3084 bp, Artificial Sequence
  Synthetic Polynucloetide
atggccttaccagtgaccgccttgctcctgccgctggccttgctgctccacgccgccaggccgggcatgcggactgaagacctcccaaaggctgtggtgttcctggagcctcaatggtacagggtgctggagaaggacagtgtgactctgaagtgccagggagcctactcccctgaggacaattccacacagtggtttcacaatgagagcctcatctcaagccaggcctccagctacttcattgacgctgccacagtggacgacagtggagagtacaggtgccagacaaacctctccaccctcagtgacccggtgcagctagaagtccatatcggctggctgttgctccaggcccctcggtgggtgttcaaggaggaagaccctattcacctgaggtgtcacagctggaagaacactgctctgcataaggtcacatatttacagaatggcaaaggcaggaagtattttcatcataattctgacttctacattccaaaagccacactcaaagacagcggctcctacttctgcagggggcttgttgggagtaaaaatgtgtcttcagagactgtgaacatcaccatcactcaaggtttggcagtgtcaaccatctcatcattctttccacctggctaccaaggtaccggcggaggcggatctggcggcggaggtagcggtggcggaggatctgaattcgaagccgacatctaccagacacctagatacctggtcatcggcaccggcaagaaaatcaccctggaatgcagccagacaatgggccacgacaagatgtactggtatcagcaggaccccggcatggaactgcacctgatccactacagctacggcgtgaacagcaccgagaagggcgatctgtctagcgagagcaccgtgtccagaatcagaaccgagcacttcccactgacactggaaagcgccagacctagccacaccagccagtacctgtgtgcctcttctgaggccagaggactggccgagttcaccgacacacagtatttcggccctggcaccagactgaccgttctcgaggacctgaagaacgtgttcccacctgaggtggccgtgttcgagcctagcgaggccgagatcagccacacccagaaagccaccctcgtgtgcctggctaccggcttctaccccgaccatgtggaactgtcttggtgggtcaacggcaaagaggtgcacagcggcgtgtctaccgacccccagccactgaaagaacagcccgccctgaacgacagccggtactgcctgagcagcagactgagagtgtccgccaccttctggcagaacccccggaaccacttcagatgccaggtgcagttctacggcctgagcgagaacgacgagtggacccaggacagagccaagcccgtgacccagatcgtgtctgccgaagcctggggcagagccgattgcggatcccagagcttcggcctgctggaccccaagctgtgctacctgctggatggcatcctgttcatctacggcgtgatcctgaccgccctgttcctgagagtgaagttcagcagaagcgccgacgcccctgcctaccagcagggacagaaccaactgtacaacgagctgaacctgggcagacgggaagagtacgacgtgctggacaagcggagaggcagggaccctgagatgggcggaaagccccagcggagaaagaacccccaggaaggactgtataacgaactccagaaagacaagatggccgaagcctacagcgagatcggcatgaagggcgagcggagaagaggcaagggccacgatggcctgtaccagggcctgagcaccgccaccaaggacacctatgacgccctgcacatgcaggccctgcctccaagaagggccaagcgatctggatctggagcaacaaacttctcactactcaaacaagcaggtgacgtggaggagaatcccgggcctactagtatggactggatttggcgcatccttttccttgtcggcgctgctaccggcgcgcattccttcgaacaagttcagcttcaacagcctggcgctgagctggtcaaacctggcgcttctgtgaagatgagctgcaaagccagcggctacgccttcagcagctactggatcaactggatgaagcagaaacccggccagggactcgaatggatcggccaaatctatcccggcgacggcaccgagaacagattcagcgtgaacttccagaaggccgccaagagcttcagcctgaagatcagcgatagccagctgggcgacgccgccatgtacttttgcgcttatagaagcgccgtgaacgcccggctgatgtttggagatggcacacagctggtggtcaagcccaacacgcgtatccagaaccctgatcctgccgtgtaccagctgcgggatagcaagagcagcgacaagagcgtgtgtctgttcaccgacttcgacagccagaccaacgtgtcccagagcaaggactccgacgtgtacatcaccgataagaccgtgctggacatgcggagcatggacttcaagagcaactccgccgtggcctggtccaacaagtccgatttcgcctgcgccaacgccttcaacaacagcattatccccgaggacacattcttcccaagccccgagagcagctgcggtacccagagttttgggttgttggaccctaaattgtgctatctgttggacggaatcctgttcatttacggagtgatcctgaccgcattgttcctgcgggttaagttttccagatccgcagacgcacccgcttaccaacaagggcagaaccaactctacaatgaacttaatttggggcggagggaagagtacgacgttctggacaaaaggaggggacgagatcccgagatgggcggaaagcctcagcgaaggaagaatccgcaagaggggctttataacgaactccagaaagataaaatggcagaagcctatagtgagattgggatgaagggagaaaggaggaggggtaaaggtcacgatgggttgtaccaaggattgagcacagccactaaagatacctatgatgcgctccacatgcaggccctgccgccaaga

SEQ ID NO: 3843 - DNA, 3084 bp, Artificial Sequence
  Synthetic Polynucloetide
atggccttaccagtgaccgccttgctcctgccgctggccttgctgctccacgccgccaggccgggcatgcggactgaagacctcccaaaggctgtggtgttcctggagcctcaatggtacagggtgctggagaaggacagtgtgactctgaagtgccagggagcctactcccctgaggacaattccacacagtggtttcacaatgagagcctcatctcaagccaggcctccagctacttcattgacgctgccacagtggacgacagtggagagtacaggtgccagacaaacctctccaccctcagtgacccggtgcagctagaagtccatatcggctggctgttgctccaggcccctcggtgggtgttcaaggaggaagaccctattcacctgaggtgtcacagctggaagaacactgctctgcataaggtcacatatttacagaatggcaaaggcaggaagtattttcatcataattctgacttctacattccaaaagccacactcaaagacagcggctcctacttctgcagggggcttgttgggagtaaaaatgtgtcttcagagactgtgaacatcaccatcactcaaggtttggcagtgtcaaccatctcatcattctttccacctggctaccaaggtaccggcggaggcggatctggcggcggaggtagcggtggcggaggatctgaattcgaagccgacatctaccagacacctagatacctggtcatcggcaccggcaagaaaatcaccctggaatgcagccagacaatgggccacgacaagatgtactggtatcagcaggaccccggcatggaactgcacctgatccactacagctacggcgtgaacagcaccgagaagggcgatctgtctagcgagagcaccgtgtccagaatcagaaccgagcacttcccactgacactggaaagcgccagacctagccacaccagccagtacctgtgtgcctcttctgaggccagaggactggccgagttcaccgacacacagtatttcggccctggcaccagactgaccgttctcgaggacctgaagaacgtgttcccacctgaggtggccgtgttcgagcctagcaaggccgagatcgcccacacccagaaagccaccctcgtgtgcctggctaccggcttctaccccgaccatgtggaactgtcttggtgggtcaacggcaaagaggtgcacagcggcgtgtgtaccgacccccagccactgaaagaacagcccgccctgaacgacagccggtactgcctgagcagcagactgagagtgtccgccaccttctggcagaacccccggaaccacttcagatgccaggtgcagttctacggcctgagcgagaacgacgagtggacccaggacagagccaagcccgtgacccagatcgtgtctgccgaagcctggggcagagccgattgcggatcccagagcttcggcctgctggaccccaagctgtgctacctgctggatggcatcctgttcatctacggcgtgatcctgaccgccctgttcctgagagtgaagttcagcagaagcgccgacgcccctgcctaccagcagggacagaaccaactgtacaacgagctgaacctgggcagacgggaagagtacgacgtgctggacaagcggagaggcagggaccctgagatgggcggaaagccccagcggagaaagaacccccaggaaggactgtataacgaactccagaaagacaagatggccgaagcctacagcgagatcggcatgaagggcgagcggagaagaggcaagggccacgatggcctgtaccagggcctgagcaccgccaccaaggacacctatgacgccctgcacatgcaggccctgcctccaagaagggccaagcgatctggatctggagcaacaaacttctcactactcaaacaagcaggtgacgtggaggagaatcccgggcctactagtatggactggatttggcgcatccttttccttgtcggcgctgctaccggcgcgcattccttcgaacaagttcagcttcaacagcctggcgctgagctggtcaaacctggcgcttctgtgaagatgagctgcaaagccagcggctacgccttcagcagctactggatcaactggatgaagcagaaacccggccagggactcgaatggatcggccaaatctatcccggcgacggcaccgagaacagattcagcgtgaacttccagaaggccgccaagagcttcagcctgaagatcagcgatagccagctgggcgacgccgccatgtacttttgcgcttatagaagcgccgtgaacgcccggctgatgtttggagatggcacacagctggtggtcaagcccaacacgcgtatccagaaccctgatcctgccgtgtaccagctgcgggatagcaagagcagcgacaagagcgtgtgtctgttcaccgacttcgacagccagaccaacgtgtcccagagcaaggactccgacgtgtacatcaccgataagtgcgtgctggacatgcggagcatggacttcaagagcaactccgccgtggcctggtccaacaagtccgatttcgcctgcgccaacgccttcaacaacagcattatccccgaggacacattcttcccaagcagcgacgtgccctgcggtacccagagttttgggttgttggaccctaaattgtgctatctgttggacggaatcctgttcatttacggagtgatcctgaccgcattgttcctgcgggttaagttttccagatccgcagacgcacccgcttaccaacaagggcagaaccaactctacaatgaacttaatttggggcggagggaagagtacgacgttctggacaaaaggaggggacgagatcccgagatgggcggaaagcctcagcgaaggaagaatccgcaagaggggctttataacgaactccagaaagataaaatggcagaagcctatagtgagattgggatgaagggagaaaggaggaggggtaaaggtcacgatgggttgtaccaaggattgagcacagccactaaagatacctatgatgcgctccacatgcaggccctgccgccaaga

SEQ ID NO: 3844 - DNA, 3297 bp, Artificial Sequence
  Synthetic Polynucloetide
atggccttaccagtgaccgccttgctcctgccgctggccttgctgctccacgccgccaggccgggcatgcggactgaagacctcccaaaggctgtggtgttcctggagcctcaatggtacagggtgctggagaaggacagtgtgactctgaagtgccagggagcctactcccctgaggacaattccacacagtggtttcacaatgagagcctcatctcaagccaggcctccagctacttcattgacgctgccacagtggacgacagtggagagtacaggtgccagacaaacctctccaccctcagtgacccggtgcagctagaagtccatatcggctggctgttgctccaggcccctcggtgggtgttcaaggaggaagaccctattcacctgaggtgtcacagctggaagaacactgctctgcataaggtcacatatttacagaatggcaaaggcaggaagtattttcatcataattctgacttctacattccaaaagccacactcaaagacagcggctcctacttctgcagggggcttgttgggagtaaaaatgtgtcttcagagactgtgaacatcaccatcactcaaggtttggcagtgtcaaccatctcatcattctttccacctggctaccaaggtaccggcggaggcggatctggcggcggaggtagcggtggcggaggatctgaattcgaagccgacatctaccagacacctagatacctggtcatcggcaccggcaagaaaatcaccctggaatgcagccagacaatgggccacgacaagatgtactggtatcagcaggaccccggcatggaactgcacctgatccactacagctacggcgtgaacagcaccgagaagggcgatctgtctagcgagagcaccgtgtccagaatcagaaccgagcacttcccactgacactggaaagcgccagacctagccacaccagccagtacctgtgtgcctcttctgaggccagaggactggccgagttcaccgacacacagtatttcggccctggcaccagactgaccgttctcgaggggaaaccaattcccaaccctcttctgggactggattcaaccggcagcggcgaggacctgaagaacgtgttcccacctgaggtggccgtgttcgagcctagcgaggccgagatcagccacacccagaaagccaccctcgtgtgcctggctaccggcttctaccccgaccatgtggaactgtcttggtgggtcaacggcaaagaggtgcacagcggcgtgtctaccgacccccagccactgaaagaacagcccgccctgaacgacagccggtactgcctgagcagcagactgagagtgtccgccaccttctggcagaacccccggaaccacttcagatgccaggtgcagttctacggcctgagcgagaacgacgagtggacccaggacagagccaagcccgtgacccagatcgtgtctgccgaagcctggggcagagccgattgcggatcccagagcttcggcctgctggaccccaagctgtgctacctgctggatggcatcctgttcatctacggcgtgatcctgaccgccctgttcctgagagtgaagttcagcagaagcgccgacgcccctgcctaccagcagggacagaaccaactgtacaacgagctgaacctgggcagacgggaagagtacgacgtgctggacaagcggagaggcagggaccctgagatgggcggaaagccccagcggagaaagaacccccaggaaggactgtataacgaactccagaaagacaagatggccgaagcctacagcgagatcggcatgaagggcgagcggagaagaggcaagggccacgatggcctgtaccagggcctgagcaccgccaccaaggacacctatgacgccctgcacatgcaggccctgcctccaagaagggccaagcgatctggatctggagcaacaaacttctcactactcaaacaagcaggtgacgtggaggagaatcccgggcctactagtatggactggatttggcgcatccttttccttgtcggcgctgctaccggcgcgcattccttcgaacaagttcagcttcaacagcctggcgctgagctggtcaaacctggcgcttctgtgaagatgagctgcaaagccagcggctacgccttcagcagctactggatcaactggatgaagcagaaacccggccagggactcgaatggatcggccaaatctatcccggcgacggcaccgagaacagattcagcgtgaacttccagaaggccgccaagagcttcagcctgaagatcagcgatagccagctgggcgacgccgccatgtacttttgcgcttatagaagcgccgtgaacgcccggctgatgtttggagatggcacacagctggtggtcaagcccaacacgcgtgagcagaaactgatctcggaagaggatgggagcggcatccagaaccctgatcctgccgtgtaccagctgcgggatagcaagagcagcgacaagagcgtgtgtctgttcaccgacttcgacagccagaccaacgtgtcccagagcaaggactccgacgtgtacatcaccgataagaccgtgctggacatgcggagcatggacttcaagagcaactccgccgtggcctggtccaacaagtccgatttcgcctgcgccaacgccttcaacaacagcattatccccgaggacacattcttcccaagccccgagagcagctgcggtacccagagttttgggttgttggaccctaaattgtgctatctgttggacggaatcctgttcatttacggagtgatcctgaccgcattgttcctgaggagcaagcggtcacggctgctccacagcgattacatgaatatgacaccacgaagaccgggtcctactcgcaaacactaccaaccctacgcacctccccgcgactttgcagcgtaccgatctcgggttaagttttccagatccgcagacgcacccgcttaccaacaagggcagaaccaactctacaatgaacttaatttggggcggagggaagagtacgacgttctggacaaaaggaggggacgagatcccgagatgggcggaaagcctcagcgaaggaagaatccgcaagaggggctttataacgaactccagaaagataaaatggcagaagcctatagtgagattgggatgaagggagaaaggaggaggggtaaaggtcacgatgggttgtaccaaggattgagcacagccactaaagatacctatgatgcgctccacatgcaggccctgccgccaaga

SEQ ID NO: 3845 - DNA, 3420 bp, Artificial Sequence
  Synthetic Polynucloetide
atggccttaccagtgaccgccttgctcctgccgctggccttgctgctccacgccgccaggccgggcatgcggactgaagacctcccaaaggctgtggtgttcctggagcctcaatggtacagggtgctggagaaggacagtgtgactctgaagtgccagggagcctactcccctgaggacaattccacacagtggtttcacaatgagagcctcatctcaagccaggcctccagctacttcattgacgctgccacagtggacgacagtggagagtacaggtgccagacaaacctctccaccctcagtgacccggtgcagctagaagtccatatcggctggctgttgctccaggcccctcggtgggtgttcaaggaggaagaccctattcacctgaggtgtcacagctggaagaacactgctctgcataaggtcacatatttacagaatggcaaaggcaggaagtattttcatcataattctgacttctacattccaaaagccacactcaaagacagcggctcctacttctgcagggggcttgttgggagtaaaaatgtgtcttcagagactgtgaacatcaccatcactcaaggtttggcagtgtcaaccatctcatcattctttccacctggctaccaaggtaccggcggaggcggatctggcggcggaggtagcggtggcggaggatctgaattcgaagccgacatctaccagacacctagatacctggtcatcggcaccggcaagaaaatcaccctggaatgcagccagacaatgggccacgacaagatgtactggtatcagcaggaccccggcatggaactgcacctgatccactacagctacggcgtgaacagcaccgagaagggcgatctgtctagcgagagcaccgtgtccagaatcagaaccgagcacttcccactgacactggaaagcgccagacctagccacaccagccagtacctgtgtgcctcttctgaggccagaggactggccgagttcaccgacacacagtatttcggccctggcaccagactgaccgttctcgaggggaaaccaattcccaaccctcttctgggactggattcaaccggcagcggcgaggacctgaagaacgtgttcccacctgaggtggccgtgttcgagcctagcgaggccgagatcagccacacccagaaagccaccctcgtgtgcctggctaccggcttctaccccgaccatgtggaactgtcttggtgggtcaacggcaaagaggtgcacagcggcgtgtctaccgacccccagccactgaaagaacagcccgccctgaacgacagccggtactgcctgagcagcagactgagagtgtccgccaccttctggcagaacccccggaaccacttcagatgccaggtgcagttctacggcctgagcgagaacgacgagtggacccaggacagagccaagcccgtgacccagatcgtgtctgccgaagcctggggcagagccgattgcggatcccagagcttcggcctgctggaccccaagctgtgctacctgctggatggcatcctgttcatctacggcgtgatcctgaccgccctgttcctgaggagtaagaggagcaggctcctgcacagtgactacatgaacatgactccacgccgccccggacccacccgcaagcattaccagccctatgccccaccacgcgacttcgcagcctatcgctccagagtgaagttcagcagaagcgccgacgcccctgcctaccagcagggacagaaccaactgtacaacgagctgaacctgggcagacgggaagagtacgacgtgctggacaagcggagaggcagggaccctgagatgggcggaaagccccagcggagaaagaacccccaggaaggactgtataacgaactccagaaagacaagatggccgaagcctacagcgagatcggcatgaagggcgagcggagaagaggcaagggccacgatggcctgtaccagggcctgagcaccgccaccaaggacacctatgacgccctgcacatgcaggccctgcctccaagaagggccaagcgatctggatctggagcaacaaacttctcactactcaaacaagcaggtgacgtggaggagaatcccgggcctactagtatggactggatttggcgcatccttttccttgtcggcgctgctaccggcgcgcattccttcgaacaagttcagcttcaacagcctggcgctgagctggtcaaacctggcgcttctgtgaagatgagctgcaaagccagcggctacgccttcagcagctactggatcaactggatgaagcagaaacccggccagggactcgaatggatcggccaaatctatcccggcgacggcaccgagaacagattcagcgtgaacttccagaaggccgccaagagcttcagcctgaagatcagcgatagccagctgggcgacgccgccatgtacttttgcgcttatagaagcgccgtgaacgcccggctgatgtttggagatggcacacagctggtggtcaagcccaacacgcgtgagcagaaactgatctcggaagaggatgggagcggcatccagaaccctgatcctgccgtgtaccagctgcgggatagcaagagcagcgacaagagcgtgtgtctgttcaccgacttcgacagccagaccaacgtgtcccagagcaaggactccgacgtgtacatcaccgataagaccgtgctggacatgcggagcatggacttcaagagcaactccgccgtggcctggtccaacaagtccgatttcgcctgcgccaacgccttcaacaacagcattatccccgaggacacattcttcccaagccccgagagcagctgcggtacccagagttttgggttgttggaccctaaattgtgctatctgttggacggaatcctgttcatttacggagtgatcctgaccgcattgttcctgaggagcaagcggtcacggctgctccacagcgattacatgaatatgacaccacgaagaccgggtcctactcgcaaacactaccaaccctacgcacctccccgcgactttgcagcgtaccgatctcgggttaagttttccagatccgcagacgcacccgcttaccaacaagggcagaaccaactctacaatgaacttaatttggggcggagggaagagtacgacgttctggacaaaaggaggggacgagatcccgagatgggcggaaagcctcagcgaaggaagaatccgcaagaggggctttataacgaactccagaaagataaaatggcagaagcctatagtgagattgggatgaagggagaaaggaggaggggtaaaggtcacgatgggttgtaccaaggattgagcacagccactaaagatacctatgatgcgctccacatgcaggccctgccgccaaga

SEQ ID NO: 3846 - DNA, 3303 bp, Artificial Sequence
  Synthetic Polynucloetide
atggccttaccagtgaccgccttgctcctgccgctggccttgctgctccacgccgccaggccgggcatgcggactgaagacctcccaaaggctgtggtgttcctggagcctcaatggtacagggtgctggagaaggacagtgtgactctgaagtgccagggagcctactcccctgaggacaattccacacagtggtttcacaatgagagcctcatctcaagccaggcctccagctacttcattgacgctgccacagtggacgacagtggagagtacaggtgccagacaaacctctccaccctcagtgacccggtgcagctagaagtccatatcggctggctgttgctccaggcccctcggtgggtgttcaaggaggaagaccctattcacctgaggtgtcacagctggaagaacactgctctgcataaggtcacatatttacagaatggcaaaggcaggaagtattttcatcataattctgacttctacattccaaaagccacactcaaagacagcggctcctacttctgcagggggcttgttgggagtaaaaatgtgtcttcagagactgtgaacatcaccatcactcaaggtttggcagtgtcaaccatctcatcattctttccacctggctaccaaggtaccggcggaggcggatctggcggcggaggtagcggtggcggaggatctgaattcgaagccgacatctaccagacacctagatacctggtcatcggcaccggcaagaaaatcaccctggaatgcagccagacaatgggccacgacaagatgtactggtatcagcaggaccccggcatggaactgcacctgatccactacagctacggcgtgaacagcaccgagaagggcgatctgtctagcgagagcaccgtgtccagaatcagaaccgagcacttcccactgacactggaaagcgccagacctagccacaccagccagtacctgtgtgcctcttctgaggccagaggactggccgagttcaccgacacacagtatttcggccctggcaccagactgaccgttctcgaggggaaaccaattcccaaccctcttctgggactggattcaaccggcagcggcgaggacctgaagaacgtgttcccacctgaggtggccgtgttcgagcctagcgaggccgagatcagccacacccagaaagccaccctcgtgtgcctggctaccggcttctaccccgaccatgtggaactgtcttggtgggtcaacggcaaagaggtgcacagcggcgtgtctaccgacccccagccactgaaagaacagcccgccctgaacgacagccggtactgcctgagcagcagactgagagtgtccgccaccttctggcagaacccccggaaccacttcagatgccaggtgcagttctacggcctgagcgagaacgacgagtggacccaggacagagccaagcccgtgacccagatcgtgtctgccgaagcctggggcagagccgattgcggatcccagagcttcggcctgctggaccccaagctgtgctacctgctggatggcatcctgttcatctacggcgtgatcctgaccgccctgttcctgagagtgaagttcagcagaagcgccgacgcccctgcctaccagcagggacagaaccaactgtacaacgagctgaacctgggcagacgggaagagtacgacgtgctggacaagcggagaggcagggaccctgagatgggcggaaagccccagcggagaaagaacccccaggaaggactgtataacgaactccagaaagacaagatggccgaagcctacagcgagatcggcatgaagggcgagcggagaagaggcaagggccacgatggcctgtaccagggcctgagcaccgccaccaaggacacctatgacgccctgcacatgcaggccctgcctccaagaagggccaagcgatctggatctggagcaacaaacttctcactactcaaacaagcaggtgacgtggaggagaatcccgggcctactagtatggactggatttggcgcatccttttccttgtcggcgctgctaccggcgcgcattccttcgaacaagttcagcttcaacagcctggcgctgagctggtcaaacctggcgcttctgtgaagatgagctgcaaagccagcggctacgccttcagcagctactggatcaactggatgaagcagaaacccggccagggactcgaatggatcggccaaatctatcccggcgacggcaccgagaacagattcagcgtgaacttccagaaggccgccaagagcttcagcctgaagatcagcgatagccagctgggcgacgccgccatgtacttttgcgcttatagaagcgccgtgaacgcccggctgatgtttggagatggcacacagctggtggtcaagcccaacacgcgtgagcagaaactgatctcggaagaggatctggggagcggcatccagaaccctgatcctgccgtgtaccagctgcgggatagcaagagcagcgacaagagcgtgtgtctgttcaccgacttcgacagccagaccaacgtgtcccagagcaaggactccgacgtgtacatcaccgataagaccgtgctggacatgcggagcatggacttcaagagcaactccgccgtggcctggtccaacaagtccgatttcgcctgcgccaacgccttcaacaacagcattatccccgaggacacattcttcccaagccccgagagcagctgcggtacccagagttttgggttgttggaccctaaattgtgctatctgttggacggaatcctgttcatttacggagtgatcctgaccgcattgttcctgaagagaggccggaagaagctgctgtacatcttcaagcagcctttcatgcggcccgtgcagaccacccaggaagaggacggctgctcctgccggttccccgaggaagaagaaggcggctgcgagctgcgggttaagttttccagatccgcagacgcacccgcttaccaacaagggcagaaccaactctacaatgaacttaatttggggcggagggaagagtacgacgttctggacaaaaggaggggacgagatcccgagatgggcggaaagcctcagcgaaggaagaatccgcaagaggggctttataacgaactccagaaagataaaatggcagaagcctatagtgagattgggatgaagggagaaaggaggaggggtaaaggtcacgatgggttgtaccaaggattgagcacagccactaaagatacctatgatgcgctccacatgcaggccctgccgccaaga

SEQ ID NO: 3847 - DNA, 3429 bp, Artificial Sequence
  Synthetic Polynucloetide
atggccttaccagtgaccgccttgctcctgccgctggccttgctgctccacgccgccaggccgggcatgcggactgaagacctcccaaaggctgtggtgttcctggagcctcaatggtacagggtgctggagaaggacagtgtgactctgaagtgccagggagcctactcccctgaggacaattccacacagtggtttcacaatgagagcctcatctcaagccaggcctccagctacttcattgacgctgccacagtggacgacagtggagagtacaggtgccagacaaacctctccaccctcagtgacccggtgcagctagaagtccatatcggctggctgttgctccaggcccctcggtgggtgttcaaggaggaagaccctattcacctgaggtgtcacagctggaagaacactgctctgcataaggtcacatatttacagaatggcaaaggcaggaagtattttcatcataattctgacttctacattccaaaagccacactcaaagacagcggctcctacttctgcagggggcttgttgggagtaaaaatgtgtcttcagagactgtgaacatcaccatcactcaaggtttggcagtgtcaaccatctcatcattctttccacctggctaccaaggtaccggcggaggcggatctggcggcggaggtagcggtggcggaggatctgaattcgaagccgacatctaccagacacctagatacctggtcatcggcaccggcaagaaaatcaccctggaatgcagccagacaatgggccacgacaagatgtactggtatcagcaggaccccggcatggaactgcacctgatccactacagctacggcgtgaacagcaccgagaagggcgatctgtctagcgagagcaccgtgtccagaatcagaaccgagcacttcccactgacactggaaagcgccagacctagccacaccagccagtacctgtgtgcctcttctgaggccagaggactggccgagttcaccgacacacagtatttcggccctggcaccagactgaccgttctcgaggggaaaccaattcccaaccctcttctgggactggattcaaccggcagcggcgaggacctgaagaacgtgttcccacctgaggtggccgtgttcgagcctagcgaggccgagatcagccacacccagaaagccaccctcgtgtgcctggctaccggcttctaccccgaccatgtggaactgtcttggtgggtcaacggcaaagaggtgcacagcggcgtgtctaccgacccccagccactgaaagaacagcccgccctgaacgacagccggtactgcctgagcagcagactgagagtgtccgccaccttctggcagaacccccggaaccacttcagatgccaggtgcagttctacggcctgagcgagaacgacgagtggacccaggacagagccaagcccgtgacccagatcgtgtctgccgaagcctggggcagagccgattgcggatcccagagcttcggcctgctggaccccaagctgtgctacctgctggatggcatcctgttcatctacggcgtgatcctgaccgccctgttcctgaaacggggcagaaagaaactcctgtatatattcaaacaaccatttatgagaccagtacaaactactcaagaggaagatggctgtagctgccgatttccagaagaagaagaaggaggatgtgaactgagagtgaagttcagcagaagcgccgacgcccctgcctaccagcagggacagaaccaactgtacaacgagctgaacctgggcagacgggaagagtacgacgtgctggacaagcggagaggcagggaccctgagatgggcggaaagccccagcggagaaagaacccccaggaaggactgtataacgaactccagaaagacaagatggccgaagcctacagcgagatcggcatgaagggcgagcggagaagaggcaagggccacgatggcctgtaccagggcctgagcaccgccaccaaggacacctatgacgccctgcacatgcaggccctgcctccaagaagggccaagcgatctggatctggagcaacaaacttctcactactcaaacaagcaggtgacgtggaggagaatcccgggcctactagtatggactggatttggcgcatccttttccttgtcggcgctgctaccggcgcgcattccttcgaacaagttcagcttcaacagcctggcgctgagctggtcaaacctggcgcttctgtgaagatgagctgcaaagccagcggctacgccttcagcagctactggatcaactggatgaagcagaaacccggccagggactcgaatggatcggccaaatctatcccggcgacggcaccgagaacagattcagcgtgaacttccagaaggccgccaagagcttcagcctgaagatcagcgatagccagctgggcgacgccgccatgtacttttgcgcttatagaagcgccgtgaacgcccggctgatgtttggagatggcacacagctggtggtcaagcccaacacgcgtgagcagaaactgatctcggaagaggatctggggagcggcatccagaaccctgatcctgccgtgtaccagctgcgggatagcaagagcagcgacaagagcgtgtgtctgttcaccgacttcgacagccagaccaacgtgtcccagagcaaggactccgacgtgtacatcaccgataagaccgtgctggacatgcggagcatggacttcaagagcaactccgccgtggcctggtccaacaagtccgatttcgcctgcgccaacgccttcaacaacagcattatccccgaggacacattcttcccaagccccgagagcagctgcggtacccagagttttgggttgttggaccctaaattgtgctatctgttggacggaatcctgttcatttacggagtgatcctgaccgcattgttcctgaagagaggccggaagaagctgctgtacatcttcaagcagcctttcatgcggcccgtgcagaccacccaggaagaggacggctgctcctgccggttccccgaggaagaagaaggcggctgcgagctgcgggttaagttttccagatccgcagacgcacccgcttaccaacaagggcagaaccaactctacaatgaacttaatttggggcggagggaagagtacgacgttctggacaaaaggaggggacgagatcccgagatgggcggaaagcctcagcgaaggaagaatccgcaagaggggctttataacgaactccagaaagataaaatggcagaagcctatagtgagattgggatgaagggagaaaggaggaggggtaaaggtcacgatgggttgtaccaaggattgagcacagccactaaagatacctatgatgcgctccacatgcaggccctgccgccaaga

SEQ ID NO: 3848 - DNA, 3102 bp, Artificial Sequence
  Synthetic Polynucloetide
atggccttaccagtgaccgccttgctcctgccgctggccttgctgctccacgccgccaggccgggcatgcggactgaagacctcccaaaggctgtggtgttcctggagcctcaatggtacagggtgctggagaaggacagtgtgactctgaagtgccagggagcctactcccctgaggacaattccacacagtggtttcacaatgagagcctcatctcaagccaggcctccagctacttcattgacgctgccacagtggacgacagtggagagtacaggtgccagacaaacctctccaccctcagtgacccggtgcagctagaagtccatatcggctggctgttgctccaggcccctcggtgggtgttcaaggaggaagaccctattcacctgaggtgtcacagctggaagaacactgctctgcataaggtcacatatttacagaatggcaaaggcaggaagtattttcatcataattctgacttctacattccaaaagccacactcaaagacagcggctcctacttctgcagggggcttgttgggagtaaaaatgtgtcttcagagactgtgaacatcaccatcactcaaggtttggcagtgtcaaccatctcatcattctttccacctggctaccaaggtaccggcggaggcggatctggcggcggaggtagcggtggcggaggatctgaattcgaagccgacatctaccagacacctagatacctggtcatcggcaccggcaagaaaatcaccctggaatgcagccagacaatgggccacgacaagatgtactggtatcagcaggaccccggcatggaactgcacctgatccactacagctacggcgtgaacagcaccgagaagggcgatctgtctagcgagagcaccgtgtccagaatcagaaccgagcacttcccactgacactggaaagcgccagacctagccacaccagccagtacctgtgtgcctcttctgaggccagaggactggccgagttcaccgacacacagtatttcggccctggcaccagactgaccgttctcgagcagagcttcggcctgctggaccccaagctgtgctacctgctggatggcatcctgttcatctacggcgtgatcctgaccgccctgttcctgagagtgaagttcagcagaagcgccgacgcccctgcctaccagcagggacagaaccaactgtacaacgagctgaacctgggcagacgggaagagtacgacgtgctggacaagcggagaggcagggaccctgagatgggcggaaagccccagcggagaaagaacccccaggaaggactgtataacgaactccagaaagacaagatggccgaagcctacagcgagatcggcatgaagggcgagcggagaagaggcaagggccacgatggcctgtaccagggcctgagcaccgccaccaaggacacctatgacgccctgcacatgcaggccctgcctccaagaagggccaagcgatctggatctggagcaacaaacttctcactactcaaacaagcaggtgacgtggaggagaatcccgggcctactagtatggactggatttggcgcatccttttccttgtcggcgctgctaccggcgcgcattccttcgaacaagttcagcttcaacagcctggcgctgagctggtcaaacctggcgcttctgtgaagatgagctgcaaagccagcggctacgccttcagcagctactggatcaactggatgaagcagaaacccggccagggactcgaatggatcggccaaatctatcccggcgacggcaccgagaacagattcagcgtgaacttccagaaggccgccaagagcttcagcctgaagatcagcgatagccagctgggcgacgccgccatgtacttttgcgcttatagaagcgccgtgaacgcccggctgatgtttggagatggcacacagctggtggtcaagcccaacacgcgtcagagttttgggttgttggaccctaaattgtgctatctgttggacggaatcctgttcatttacggagtgatcctgaccgcattgttcctgcgggttaagttttccagatccgcagacgcacccgcttaccaacaagggcagaaccaactctacaatgaacttaatttggggcggagggaagagtacgacgttctggacaaaaggaggggacgagatcccgagatgggcggaaagcctcagcgaaggaagaatccgcaagaggggctttataacgaactccagaaagataaaatggcagaagcctatagtgagattgggatgaagggagaaaggaggaggggtaaaggtcacgatgggttgtaccaaggattgagcacagccactaaagatacctatgatgcgctccacatgcaggccctgccgccaagacgcgccaagagaagcggatctggcgtgaagcagaccctgaatttcgacctgctgaagctggctggcgacgtggaatccaacccaggcccttctagaggccatatgaccgagtacaagcccacggtgcgcctcgccacccgcgacgacgtccccagggccgtacgcaccctcgccgccgcgttcgccgactaccccgccacgcgccacaccgtcgatccggaccgccacatcgagcgggtcaccgagctgcaagaactcttcctcacgcgcgtcgggctcgacatcggcaaggtgtgggtcgcggacgacggcgccgcggtggcggtctggaccacgccggagagcgtcgaagcgggggcggtgttcgccgagatcggcccgcgcatggccgagttgagcggttcccggctggccgcgcagcaacagatggaaggcctcctggcgccgcaccggcccaaggagcccgcgtggttcctggccaccgtcggcgtctcgcccgaccaccagggcaagggtctgggcagcgccgtcgtgctccccggagtggaggcggccgagcgcgccggggtgcccgccttcctggagacctccgcgccccgcaacctccccttctacgagcggctcggcttcaccgtcaccgccgacgtcgaggtgcccgaaggaccgcgcacctggtgcatgacccgcaagcccggtgcctga

SEQ ID NO: 3849 - DNA, 2574 bp, Artificial Sequence
  Synthetic Polynucloetide
atggccttaccagtgaccgccttgctcctgccgctggccttgctgctccacgccgccaggccgggcatgcggactgaagacctcccaaaggctgtggtgttcctggagcctcaatggtacagggtgctggagaaggacagtgtgactctgaagtgccagggagcctactcccctgaggacaattccacacagtggtttcacaatgagagcctcatctcaagccaggcctccagctacttcattgacgctgccacagtggacgacagtggagagtacaggtgccagacaaacctctccaccctcagtgacccggtgcagctagaagtccatatcggctggctgttgctccaggcccctcggtgggtgttcaaggaggaagaccctattcacctgaggtgtcacagctggaagaacactgctctgcataaggtcacatatttacagaatggcaaaggcaggaagtattttcatcataattctgacttctacattccaaaagccacactcaaagacagcggctcctacttctgcagggggcttgttgggagtaaaaatgtgtcttcagagactgtgaacatcaccatcactcaaggtttggcagtgtcaaccatctcatcattctttccacctggctaccaaggtaccggcggaggcggatctggcggcggaggtagcggtggcggaggatctgaattcgaagccgacatctaccagacacctagatacctggtcatcggcaccggcaagaaaatcaccctggaatgcagccagacaatgggccacgacaagatgtactggtatcagcaggaccccggcatggaactgcacctgatccactacagctacggcgtgaacagcaccgagaagggcgatctgtctagcgagagcaccgtgtccagaatcagaaccgagcacttcccactgacactggaaagcgccagacctagccacaccagccagtacctgtgtgcctcttctgaggccagaggactggccgagttcaccgacacacagtatttcggccctggcaccagactgaccgttctcgagggacagcctaaggccaatcctaccgtgacactgttccctccaagcagcgaagaactccaggccaacaaggccacacttgtgtgcctgatctccgacttctaccctggggctgtgacagtggcttggaaggccgatggatctcctgtgaaagccggcgtggaaaccaccaagccatccaagcagagcaacaacaaatacgccgccagctcctacctgagcctgacacctgagcagtggaagtcccacagatcctacagctgccaagtgacccacgaaggcagcaccgtggaaaagacagtggcccctacagagtgcagccccatcaagaccgatgtgattacaatggaccccaaggacaactgctccaaggacgccaacgataccctgctgctccagctgaccaacaccagcgcctactacatgtacttgttgctgctgctgaagtccgtggtgtacttcgccatcatcacatgctgcctgctgcggagaaccgccttctgctgcaacggcgagaagtctagggccaagcgatctggatctggagcaacaaacttctcactactcaaacaagcaggtgacgtggaggagaatcccgggcctactagtatggactggatttggcgcatccttttccttgtcggcgctgctaccggcgcgcattccttcgaacaagttcagcttcaacagcctggcgctgagctggtcaaacctggcgcttctgtgaagatgagctgcaaagccagcggctacgccttcagcagctactggatcaactggatgaagcagaaacccggccagggactcgaatggatcggccaaatctatcccggcgacggcaccgagaacagattcagcgtgaacttccagaaggccgccaagagcttcagcctgaagatcagcgatagccagctgggcgacgccgccatgtacttttgcgcttatagaagcgccgtgaacgcccggctgatgtttggagatggcacacagctggtggtcaagcccaacacgcgtgcctctacaaagggaccctccgtgtttcctctggctcccagcagcaagtctacaagcggaggaacagccgctctgggctgcctggtcaaggattactttcccgagcctgtgaccgtgtcctggaatagcggagcactgacaagcggcgtgcacacctttccagccgtgctgcaaagcagcggcctgtactctctgagcagcgtggtcacagtgcctagctctagcctgggcacccagacctacatctgcaatgtgaaccacaagcctagcaacaccaaggtggacaagagagtggaacccaagagctgtgaagtgaaaaccgactccaccgaccacgtgaagcccaaagagacagagaacaccaagcagcccagcaagagctgccacaagcccaaggccatcgtgcacaccgagaaagtgaacatgatgagcctgaccgtgctgggcctgcggatgctgttcgccaaaaccgtggccgtgaacttcctgctgaccgccaagctgttcttcctc

SEQ ID NO: 3850 - DNA, 2508 bp, Artificial Sequence
  Synthetic Polynucloetide
atggccttaccagtgaccgccttgctcctgccgctggccttgctgctccacgccgccaggccgggcatgcggactgaagacctcccaaaggctgtggtgttcctggagcctcaatggtacagggtgctggagaaggacagtgtgactctgaagtgccagggagcctactcccctgaggacaattccacacagtggtttcacaatgagagcctcatctcaagccaggcctccagctacttcattgacgctgccacagtggacgacagtggagagtacaggtgccagacaaacctctccaccctcagtgacccggtgcagctagaagtccatatcggctggctgttgctccaggcccctcggtgggtgttcaaggaggaagaccctattcacctgaggtgtcacagctggaagaacactgctctgcataaggtcacatatttacagaatggcaaaggcaggaagtattttcatcataattctgacttctacattccaaaagccacactcaaagacagcggctcctacttctgcagggggcttgttgggagtaaaaatgtgtcttcagagactgtgaacatcaccatcactcaaggtttggcagtgtcaaccatctcatcattctttccacctggctaccaaggtaccggcggaggcggatctggcggcggaggtagcggtggcggaggatctgaattcgaagccgacatctaccagacacctagatacctggtcatcggcaccggcaagaaaatcaccctggaatgcagccagacaatgggccacgacaagatgtactggtatcagcaggaccccggcatggaactgcacctgatccactacagctacggcgtgaacagcaccgagaagggcgatctgtctagcgagagcaccgtgtccagaatcagaaccgagcacttcccactgacactggaaagcgccagacctagccacaccagccagtacctgtgtgcctcttctgaggccagaggactggccgagttcaccgacacacagtatttcggccctggcaccagactgaccgttctcgagggacagcctaaggccaatcctaccgtgacactgttccctccaagcagcgaagaactccaggccaacaaggccacacttgtgtgcctgatctccgacttctaccctggggctgtgacagtggcttggaaggccgatggatctcctgtgaaagccggcgtggaaaccaccaagccatccaagcagagcaacaacaaatacgccgccagctcctacctgagcctgacacctgagcagtggaagtcccacagatcctacagctgccaagtgacccacgaaggcagcaccgtggaaaagacagtggcccctacagagtgcagcggcagagccgattgcggcatcaccagcgccagctaccaccagggcgtgctgagcgccaccatcctgtacgagatcctgctgggcaaggccaccctgtacgccgtgctggtgtctgccctggtgctgatggctatggtcaagcggaaggacagccggggaagggccaagcgatctggatctggagcaacaaacttctcactactcaaacaagcaggtgacgtggaggagaatcccgggcctactagtatggactggatttggcgcatccttttccttgtcggcgctgctaccggcgcgcattccttcgaacaagttcagcttcaacagcctggcgctgagctggtcaaacctggcgcttctgtgaagatgagctgcaaagccagcggctacgccttcagcagctactggatcaactggatgaagcagaaacccggccagggactcgaatggatcggccaaatctatcccggcgacggcaccgagaacagattcagcgtgaacttccagaaggccgccaagagcttcagcctgaagatcagcgatagccagctgggcgacgccgccatgtacttttgcgcttatagaagcgccgtgaacgcccggctgatgtttggagatggcacacagctggtggtcaagcccaacacgcgtgcctctacaaagggaccctccgtgtttcctctggctcccagcagcaagtctacaagcggaggaacagccgctctgggctgcctggtcaaggattactttcccgagcctgtgaccgtgtcctggaatagcggagcactgacaagcggcgtgcacacctttccagccgtgctgcaaagcagcggcctgtactctctgagcagcgtggtcacagtgcctagctctagcctgggcacccagacctacatctgcaatgtgaaccacaagcctagcaacaccaaggtggacaagagagtggaacccaagagctgtatccccgaggacacattcttcccaagcagcgacgtgccctgcgacgtgaagctggtggaaaagagcttcgagacagacaccaacctgaacttccagaacctgagcgtgatcggcttcagaatcctgctgctgaaagtggccggctttaacctgctgatgaccctgcggctgtggtccagc

SEQ ID NO: 3851 - DNA, 2508 bp, Artificial Sequence
  Synthetic Polynucloetide
atggccttaccagtgaccgccttgctcctgccgctggccttgctgctccacgccgccaggccgggcatgcggactgaagacctcccaaaggctgtggtgttcctggagcctcaatggtacagggtgctggagaaggacagtgtgactctgaagtgccagggagcctactcccctgaggacaattccacacagtggtttcacaatgagagcctcatctcaagccaggcctccagctacttcattgacgctgccacagtggacgacagtggagagtacaggtgccagacaaacctctccaccctcagtgacccggtgcagctagaagtccatatcggctggctgttgctccaggcccctcggtgggtgttcaaggaggaagaccctattcacctgaggtgtcacagctggaagaacactgctctgcataaggtcacatatttacagaatggcaaaggcaggaagtattttcatcataattctgacttctacattccaaaagccacactcaaagacagcggctcctacttctgcagggggcttgttgggagtaaaaatgtgtcttcagagactgtgaacatcaccatcactcaaggtttggcagtgtcaaccatctcatcattctttccacctggctaccaaggtaccggcggaggcggatctggcggcggaggtagcggtggcggaggatctgaattcgaagccgacatctaccagacacctagatacctggtcatcggcaccggcaagaaaatcaccctggaatgcagccagacaatgggccacgacaagatgtactggtatcagcaggaccccggcatggaactgcacctgatccactacagctacggcgtgaacagcaccgagaagggcgatctgtctagcgagagcaccgtgtccagaatcagaaccgagcacttcccactgacactggaaagcgccagacctagccacaccagccagtacctgtgtgcctcttctgaggccagaggactggccgagttcaccgacacacagtatttcggccctggcaccagactgaccgttctcgagggacagcctaaggccaatcctaccgtgacactgttccctccaagcagcgaagaactccaggccaacaaggccacacttgtgtgcctgatctccgacttctaccctggggctgtgacagtggcttggaaggccgatggatctcctgtgaaagccggcgtggaaaccaccaagccatccaagcagagcaacaacaaatacgccgccagctcctacctgagcctgacacctgagcagtggaagtcccacagatcctacagctgccaagtgacccacgaaggcagcaccgtggaaaagacagtggcccctacagagtgcagcggcagagccgattgcggctttaccagcgagagctaccagcagggcgtgctgagcgccaccatcctgtacgagatcctgctgggcaaggccaccctgtacgccgtgctggtgtctgccctggtgctgatggctatggtcaagcggaaggacagccggggaagggccaagcgatctggatctggagcaacaaacttctcactactcaaacaagcaggtgacgtggaggagaatcccgggcctactagtatggactggatttggcgcatccttttccttgtcggcgctgctaccggcgcgcattccttcgaacaagttcagcttcaacagcctggcgctgagctggtcaaacctggcgcttctgtgaagatgagctgcaaagccagcggctacgccttcagcagctactggatcaactggatgaagcagaaacccggccagggactcgaatggatcggccaaatctatcccggcgacggcaccgagaacagattcagcgtgaacttccagaaggccgccaagagcttcagcctgaagatcagcgatagccagctgggcgacgccgccatgtacttttgcgcttatagaagcgccgtgaacgcccggctgatgtttggagatggcacacagctggtggtcaagcccaacacgcgtgcctctacaaagggaccctccgtgtttcctctggctcccagcagcaagtctacaagcggaggaacagccgctctgggctgcctggtcaaggattactttcccgagcctgtgaccgtgtcctggaatagcggagcactgacaagcggcgtgcacacctttccagccgtgctgcaaagcagcggcctgtactctctgagcagcgtggtcacagtgcctagctctagcctgggcacccagacctacatctgcaatgtgaaccacaagcctagcaacaccaaggtggacaagagagtggaacccaagagctgtatccccgaggacacattcttcccaagccccgagagcagctgcgacgtgaagctggtggaaaagagcttcgagacagacaccaacctgaacttccagaacctgagcgtgatcggcttcagaatcctgctgctgaaagtggccggctttaacctgctgatgaccctgcggctgtggtccagc

SEQ ID NO: 3852 - DNA, 1986 bp, Artificial Sequence
  Synthetic Polynucloetide
atggccttaccagtgaccgccttgctcctgccgctggccttgctgctccacgccgccaggccgggcatgcggactgaagacctcccaaaggctgtggtgttcctggagcctcaatggtacagggtgctggagaaggacagtgtgactctgaagtgccagggagcctactcccctgaggacaattccacacagtggtttcacaatgagagcctcatctcaagccaggcctccagctacttcattgacgctgccacagtggacgacagtggagagtacaggtgccagacaaacctctccaccctcagtgacccggtgcagctagaagtccatatcggctggctgttgctccaggcccctcggtgggtgttcaaggaggaagaccctattcacctgaggtgtcacagctggaagaacactgctctgcataaggtcacatatttacagaatggcaaaggcaggaagtattttcatcataattctgacttctacattccaaaagccacactcaaagacagcggctcctacttctgcagggggcttgttgggagtaaaaatgtgtcttcagagactgtgaacatcaccatcactcaaggtttggcagtgtcaaccatctcatcattctttccacctggctaccaaggtaccggcggaggcggatctggcggcggaggtagcggtggcggaggatctgaattcgaagccgacatctaccagacacctagatacctggtcatcggcaccggcaagaaaatcaccctggaatgcagccagacaatgggccacgacaagatgtactggtatcagcaggaccccggcatggaactgcacctgatccactacagctacggcgtgaacagcaccgagaagggcgatctgtctagcgagagcaccgtgtccagaatcagaaccgagcacttcccactgacactggaaagcgccagacctagccacaccagccagtacctgtgtgcctcttctgaggccagaggactggccgagttcaccgacacacagtatttcggccctggcaccagactgaccgttggcggaggcggaagtggaggcggaggatctggcggcggaggctctcaagttcagcttcaacagcctggcgctgagctggtcaaacctggcgcttctgtgaagatgagctgcaaagccagcggctacgccttcagcagctactggatcaactggatgaagcagaaacccggccagggactcgaatggatcggccaaatctatcccggcgacggcaccgagaacagattcagcgtgaacttccagaaggccgccaagagcttcagcctgaagatcagcgatagccagctgggcgacgccgccatgtacttttgcgcttatagaagcgccgtgaacgcccggctgatgtttggagatggcacacagctggtggtcaagcccaacacgcgtgacggtaacgaggagatgggaggaatcactcaaaccccttacaaagtctcaatttcaggaacaactgttatccttacatgtccccagtatcctggcagcgagatcctttggcagcataacgacaagaatatagggggagatgaagacgataagaatatcggatctgacgaggatcacttgagcctgaaagagttctccgagcttgaacaaagcggatattatgtgtgctatccgcgcgggtcaaagccggaagacgctaacttttacctttatctccgagccagagtgtgcgaaaattgcatggaaatggacgttatgtccgttgctacaatagttatcgtagatatatgcatcacgggtggactgcttctgctggtttattattggtccaagaatagaaaggccaaagctaaacccgtgaccagaggcgctggcgcaggcggaaggcaaaggggacaaaacaaagaacggccaccaccagtgccaaatccagattatgagcctattcggaaaggacagagggacctgtactctggcctgaatcagagaagaatc

SEQ ID NO: 3853 - DNA, 1881 bp, Artificial Sequence
  Synthetic Polynucloetide
atggccttaccagtgaccgccttgctcctgccgctggccttgctgctccacgccgccaggccgggcatgcggactgaagacctcccaaaggctgtggtgttcctggagcctcaatggtacagggtgctggagaaggacagtgtgactctgaagtgccagggagcctactcccctgaggacaattccacacagtggtttcacaatgagagcctcatctcaagccaggcctccagctacttcattgacgctgccacagtggacgacagtggagagtacaggtgccagacaaacctctccaccctcagtgacccggtgcagctagaagtccatatcggctggctgttgctccaggcccctcggtgggtgttcaaggaggaagaccctattcacctgaggtgtcacagctggaagaacactgctctgcataaggtcacatatttacagaatggcaaaggcaggaagtattttcatcataattctgacttctacattccaaaagccacactcaaagacagcggctcctacttctgcagggggcttgttgggagtaaaaatgtgtcttcagagactgtgaacatcaccatcactcaaggtttggcagtgtcaaccatctcatcattctttccacctggctaccaaggtaccggcggaggcggatctggcggcggaggtagcggtggcggaggatctgaattcgaagccgacatctaccagacacctagatacctggtcatcggcaccggcaagaaaatcaccctggaatgcagccagacaatgggccacgacaagatgtactggtatcagcaggaccccggcatggaactgcacctgatccactacagctacggcgtgaacagcaccgagaagggcgatctgtctagcgagagcaccgtgtccagaatcagaaccgagcacttcccactgacactggaaagcgccagacctagccacaccagccagtacctgtgtgcctcttctgaggccagaggactggccgagttcaccgacacacagtatttcggccctggcaccagactgaccgttggcggaggcggaagtggaggcggaggatctggcggcggaggctctcaagttcagcttcaacagcctggcgctgagctggtcaaacctggcgcttctgtgaagatgagctgcaaagccagcggctacgccttcagcagctactggatcaactggatgaagcagaaacccggccagggactcgaatggatcggccaaatctatcccggcgacggcaccgagaacagattcagcgtgaacttccagaaggccgccaagagcttcagcctgaagatcagcgatagccagctgggcgacgccgccatgtacttttgcgcttatagaagcgccgtgaacgcccggctgatgtttggagatggcacacagctggtggtcaagcccaacacgcgtttcaagatccccatcgaggaactggaagatcgggtgttcgtgaactgcaacacctctatcacctgggtggaaggcaccgtgggaacactgctgagcgacatcaccagactggacctcggcaagcggattctggaccctcggggcatctacagatgcaacggcaccgacatctacaaggacaaagaaagcaccgtgcaggtccactacagaatgtgccagtcctgcgtggaactggaccctgctacagtggccggcatcatcgtgaccgatgtgatcgctactctgctgctggctctgggagtgttctgcttcgccggacacgaaacaggcagactgtctggcgctgccgatacacaggccctgctgagaaacgaccaagtgtatcagcccctgcgcgacagagatgatgcccagtattctcacctcggcggcaactgggctagaaacaag

SEQ ID NO: 3854 - DNA, 1911 bp, Artificial Sequence
  Synthetic Polynucloetide
atggccttaccagtgaccgccttgctcctgccgctggccttgctgctccacgccgccaggccgggcatgcggactgaagacctcccaaaggctgtggtgttcctggagcctcaatggtacagggtgctggagaaggacagtgtgactctgaagtgccagggagcctactcccctgaggacaattccacacagtggtttcacaatgagagcctcatctcaagccaggcctccagctacttcattgacgctgccacagtggacgacagtggagagtacaggtgccagacaaacctctccaccctcagtgacccggtgcagctagaagtccatatcggctggctgttgctccaggcccctcggtgggtgttcaaggaggaagaccctattcacctgaggtgtcacagctggaagaacactgctctgcataaggtcacatatttacagaatggcaaaggcaggaagtattttcatcataattctgacttctacattccaaaagccacactcaaagacagcggctcctacttctgcagggggcttgttgggagtaaaaatgtgtcttcagagactgtgaacatcaccatcactcaaggtttggcagtgtcaaccatctcatcattctttccacctggctaccaaggtaccggcggaggcggatctggcggcggaggtagcggtggcggaggatctgaattcgaagccgacatctaccagacacctagatacctggtcatcggcaccggcaagaaaatcaccctggaatgcagccagacaatgggccacgacaagatgtactggtatcagcaggaccccggcatggaactgcacctgatccactacagctacggcgtgaacagcaccgagaagggcgatctgtctagcgagagcaccgtgtccagaatcagaaccgagcacttcccactgacactggaaagcgccagacctagccacaccagccagtacctgtgtgcctcttctgaggccagaggactggccgagttcaccgacacacagtatttcggccctggcaccagactgaccgttggcggaggcggaagtggaggcggaggatctggcggcggaggctctcaagttcagcttcaacagcctggcgctgagctggtcaaacctggcgcttctgtgaagatgagctgcaaagccagcggctacgccttcagcagctactggatcaactggatgaagcagaaacccggccagggactcgaatggatcggccaaatctatcccggcgacggcaccgagaacagattcagcgtgaacttccagaaggccgccaagagcttcagcctgaagatcagcgatagccagctgggcgacgccgccatgtacttttgcgcttatagaagcgccgtgaacgcccggctgatgtttggagatggcacacagctggtggtcaagcccaacacgcgtcagagcatcaagggcaaccacctggtcaaggtgtacgactaccaagaggacggcagcgtgctgctgacatgtgatgccgaggccaagaacatcacctggtttaaggacggcaagatgatcggcttcctgaccgaggacaagaagaagtggaacctgggcagcaacgctaaggaccccagaggcatgtatcagtgcaagggcagccagaacaagagcaagcccctccaggtgtactaccggatgtgccagaactgcatcgagctgaacgccgctaccatcagcggctttctgttcgccgagatcgtgtccatcttcgtgctggccgtgggcgtgtactttatcgctggacaggatggcgtgcggcagagcagagcttccgataagcaaaccctgctgcctaacgaccagctgtaccagcctctgaaggacagagaggacgaccagtacagccacctccagggcaatcagctgagaagaaac

SEQ ID NO: 3855 - DNA, 1860 bp, Artificial Sequence
  Synthetic Polynucloetide
atggccttaccagtgaccgccttgctcctgccgctggccttgctgctccacgccgccaggccgggcatgcggactgaagacctcccaaaggctgtggtgttcctggagcctcaatggtacagggtgctggagaaggacagtgtgactctgaagtgccagggagcctactcccctgaggacaattccacacagtggtttcacaatgagagcctcatctcaagccaggcctccagctacttcattgacgctgccacagtggacgacagtggagagtacaggtgccagacaaacctctccaccctcagtgacccggtgcagctagaagtccatatcggctggctgttgctccaggcccctcggtgggtgttcaaggaggaagaccctattcacctgaggtgtcacagctggaagaacactgctctgcataaggtcacatatttacagaatggcaaaggcaggaagtattttcatcataattctgacttctacattccaaaagccacactcaaagacagcggctcctacttctgcagggggcttgttgggagtaaaaatgtgtcttcagagactgtgaacatcaccatcactcaaggtttggcagtgtcaaccatctcatcattctttccacctggctaccaaggtaccggcggaggcggatctggcggcggaggtagcggtggcggaggatctgaattcgaagccgacatctaccagacacctagatacctggtcatcggcaccggcaagaaaatcaccctggaatgcagccagacaatgggccacgacaagatgtactggtatcagcaggaccccggcatggaactgcacctgatccactacagctacggcgtgaacagcaccgagaagggcgatctgtctagcgagagcaccgtgtccagaatcagaaccgagcacttcccactgacactggaaagcgccagacctagccacaccagccagtacctgtgtgcctcttctgaggccagaggactggccgagttcaccgacacacagtatttcggccctggcaccagactgaccgttggcggaggcggaagtggaggcggaggatctggcggcggaggctctcaagttcagcttcaacagcctggcgctgagctggtcaaacctggcgcttctgtgaagatgagctgcaaagccagcggctacgccttcagcagctactggatcaactggatgaagcagaaacccggccagggactcgaatggatcggccaaatctatcccggcgacggcaccgagaacagattcagcgtgaacttccagaaggccgccaagagcttcagcctgaagatcagcgatagccagctgggcgacgccgccatgtacttttgcgcttatagaagcgccgtgaacgcccggctgatgtttggagatggcacacagctggtggtcaagcccaacacgcgtcagagttttgggttgttggaccctaaattgtgctatctgttggacggaatcctgttcatttacggagtgatcctgaccgcattgttcctgcgggttaagttttccagatccgcagacgcacccgcttaccaacaagggcagaaccaactctacaatgaacttaatttggggcggagggaagagtacgacgttctggacaaaaggaggggacgagatcccgagatgggcggaaagcctcagcgaaggaagaatccgcaagaggggctttataacgaactccagaaagataaaatggcagaagcctatagtgagattgggatgaagggagaaaggaggaggggtaaaggtcacgatgggttgtaccaaggattgagcacagccactaaagatacctatgatgcgctccacatgcaggccctgccgccaaga

SEQ ID NO: 3856 - DNA, 2562 bp, Artificial Sequence
  Synthetic Polynucloetide
atggccttaccagtgaccgccttgctcctgccgctggccttgctgctccacgccgccaggccgggcatgcggactgaagacctcccaaaggctgtggtgttcctggagcctcaatggtacagggtgctggagaaggacagtgtgactctgaagtgccagggagcctactcccctgaggacaattccacacagtggtttcacaatgagagcctcatctcaagccaggcctccagctacttcattgacgctgccacagtggacgacagtggagagtacaggtgccagacaaacctctccaccctcagtgacccggtgcagctagaagtccatatcggctggctgttgctccaggcccctcggtgggtgttcaaggaggaagaccctattcacctgaggtgtcacagctggaagaacactgctctgcataaggtcacatatttacagaatggcaaaggcaggaagtattttcatcataattctgacttctacattccaaaagccacactcaaagacagcggctcctacttctgcagggggcttgttgggagtaaaaatgtgtcttcagagactgtgaacatcaccatcactcaaggtttggcagtgtcaaccatctcatcattctttccacctggctaccaaggtaccggcggaggcggatctggcggcggaggtagcggtggcggaggatctgaattcgaagccgacatctaccagacacctagatacctggtcatcggcaccggcaagaaaatcaccctggaatgcagccagacaatgggccacgacaagatgtactggtatcagcaggaccccggcatggaactgcacctgatccactacagctacggcgtgaacagcaccgagaagggcgatctgtctagcgagagcaccgtgtccagaatcagaaccgagcacttcccactgacactggaaagcgccagacctagccacaccagccagtacctgtgtgcctcttctgaggccagaggactggccgagttcaccgacacacagtatttcggccctggcaccagactgaccgttggcggaggcggaagtggaggcggaggatctggcggcggaggctctcaagttcagcttcaacagcctggcgctgagctggtcaaacctggcgcttctgtgaagatgagctgcaaagccagcggctacgccttcagcagctactggatcaactggatgaagcagaaacccggccagggactcgaatggatcggccaaatctatcccggcgacggcaccgagaacagattcagcgtgaacttccagaaggccgccaagagcttcagcctgaagatcagcgatagccagctgggcgacgccgccatgtacttttgcgcttatagaagcgccgtgaacgcccggctgatgtttggagatggcacacagctggtggtcaagcccaacacgcgtgggagcggcatccagaaccctgatcctgccgtgtaccagctgcgggatagcaagagcagcgacaagagcgtgtgtctgttcaccgacttcgacagccagaccaacgtgtcccagagcaaggactccgacgtgtacatcaccgataagaccgtgctggacatgcggagcatggacttcaagagcaactccgccgtggcctggtccaacaagtccgatttcgcctgcgccaacgccttcaacaacagcattatccccgaggacacattcttcccaagccccgagagcagctgcgacgtgaagctggtggaaaagagcttcgagacagacaccaacctgaacttccagaacctgagcgtgatcggcttcagaatcctgctgctgaaagtggccggctttaacctgctgatgaccctgcggctgtggtccagccgcgccaagagaagcggatctggcgtgaagcagaccctgaatttcgacctgctgaagctggctggcgacgtggaatccaacccaggcccttctagaggccatatgaccgagtacaagcccacggtgcgcctcgccacccgcgacgacgtccccagggccgtacgcaccctcgccgccgcgttcgccgactaccccgccacgcgccacaccgtcgatccggaccgccacatcgagcgggtcaccgagctgcaagaactcttcctcacgcgcgtcgggctcgacatcggcaaggtgtgggtcgcggacgacggcgccgcggtggcggtctggaccacgccggagagcgtcgaagcgggggcggtgttcgccgagatcggcccgcgcatggccgagttgagcggttcccggctggccgcgcagcaacagatggaaggcctcctggcgccgcaccggcccaaggagcccgcgtggttcctggccaccgtcggcgtctcgcccgaccaccagggcaagggtctgggcagcgccgtcgtgctccccggagtggaggcggccgagcgcgccggggtgcccgccttcctggagacctccgcgccccgcaacctccccttctacgagcggctcggcttcaccgtcaccgccgacgtcgaggtgcccgaaggaccgcgcacctggtgcatgacccgcaagcccggtgcctga

SEQ ID NO: 3857 - DNA, 2658 bp, Artificial Sequence
  Synthetic Polynucloetide
atggccttaccagtgaccgccttgctcctgccgctggccttgctgctccacgccgccaggccgggcatgcggactgaagacctcccaaaggctgtggtgttcctggagcctcaatggtacagggtgctggagaaggacagtgtgactctgaagtgccagggagcctactcccctgaggacaattccacacagtggtttcacaatgagagcctcatctcaagccaggcctccagctacttcattgacgctgccacagtggacgacagtggagagtacaggtgccagacaaacctctccaccctcagtgacccggtgcagctagaagtccatatcggctggctgttgctccaggcccctcggtgggtgttcaaggaggaagaccctattcacctgaggtgtcacagctggaagaacactgctctgcataaggtcacatatttacagaatggcaaaggcaggaagtattttcatcataattctgacttctacattccaaaagccacactcaaagacagcggctcctacttctgcagggggcttgttgggagtaaaaatgtgtcttcagagactgtgaacatcaccatcactcaaggtttggcagtgtcaaccatctcatcattctttccacctggctaccaaggtaccggcggaggcggatctggcggcggaggtagcggtggcggaggatctgaattcgaagccgacatctaccagacacctagatacctggtcatcggcaccggcaagaaaatcaccctggaatgcagccagacaatgggccacgacaagatgtactggtatcagcaggaccccggcatggaactgcacctgatccactacagctacggcgtgaacagcaccgagaagggcgatctgtctagcgagagcaccgtgtccagaatcagaaccgagcacttcccactgacactggaaagcgccagacctagccacaccagccagtacctgtgtgcctcttctgaggccagaggactggccgagttcaccgacacacagtatttcggccctggcaccagactgaccgttggcggaggcggaagtggaggcggaggatctggcggcggaggctctcaagttcagcttcaacagcctggcgctgagctggtcaaacctggcgcttctgtgaagatgagctgcaaagccagcggctacgccttcagcagctactggatcaactggatgaagcagaaacccggccagggactcgaatggatcggccaaatctatcccggcgacggcaccgagaacagattcagcgtgaacttccagaaggccgccaagagcttcagcctgaagatcagcgatagccagctgggcgacgccgccatgtacttttgcgcttatagaagcgccgtgaacgcccggctgatgtttggagatggcacacagctggtggtcaagcccaacctcgaggacctgaagaacgtgttcccacctgaggtggccgtgttcgagcctagcgaggccgagatcagccacacccagaaagccaccctcgtgtgcctggctaccggcttctaccccgaccatgtggaactgtcttggtgggtcaacggcaaagaggtgcacagcggcgtgtctaccgacccccagccactgaaagaacagcccgccctgaacgacagccggtactgcctgagcagcagactgagagtgtccgccaccttctggcagaacccccggaaccacttcagatgccaggtgcagttctacggcctgagcgagaacgacgagtggacccaggacagagccaagcccgtgacccagatcgtgtctgccgaagcctggggcagagccgattgcggctttaccagcgagagctaccagcagggcgtgctgagcgccaccatcctgtacgagatcctgctgggcaaggccaccctgtacgccgtgctggtgtctgccctggtgctgatggctatggtcaagcggaaggacagccggggaagggccaagcgatctggatctggagcaacaaacttctcactactcaaacaagcaggtgacgtggaggagaatcccgggcctactagaggccatatgaccgagtacaagcccacggtgcgcctcgccacccgcgacgacgtccccagggccgtacgcaccctcgccgccgcgttcgccgactaccccgccacgcgccacaccgtcgatccggaccgccacatcgagcgggtcaccgagctgcaagaactcttcctcacgcgcgtcgggctcgacatcggcaaggtgtgggtcgcggacgacggcgccgcggtggcggtctggaccacgccggagagcgtcgaagcgggggcggtgttcgccgagatcggcccgcgcatggccgagttgagcggttcccggctggccgcgcagcaacagatggaaggcctcctggcgccgcaccggcccaaggagcccgcgtggttcctggccaccgtcggcgtctcgcccgaccaccagggcaagggtctgggcagcgccgtcgtgctccccggagtggaggcggccgagcgcgccggggtgcccgccttcctggagacctccgcgccccgcaacctccccttctacgagcggctcggcttcaccgtcaccgccgacgtcgaggtgcccgaaggaccgcgcacctggtgcatgacccgcaagcccggtgcctga

SEQ ID NO: 3858 - DNA, 2808 bp, Artificial Sequence
  Synthetic Polynucloetide
atggccttaccagtgaccgccttgctcctgccgctggccttgctgctccacgccgccaggccgggcatgcggactgaagacctcccaaaggctgtggtgttcctggagcctcaatggtacagggtgctggagaaggacagtgtgactctgaagtgccagggagcctactcccctgaggacaattccacacagtggtttcacaatgagagcctcatctcaagccaggcctccagctacttcattgacgctgccacagtggacgacagtggagagtacaggtgccagacaaacctctccaccctcagtgacccggtgcagctagaagtccatatcggctggctgttgctccaggcccctcggtgggtgttcaaggaggaagaccctattcacctgaggtgtcacagctggaagaacactgctctgcataaggtcacatatttacagaatggcaaaggcaggaagtattttcatcataattctgacttctacattccaaaagccacactcaaagacagcggctcctacttctgcagggggcttgttgggagtaaaaatgtgtcttcagagactgtgaacatcaccatcactcaaggtttggcagtgtcaaccatctcatcattctttccacctggctaccaaggtaccggcggaggcggatctggcggcggaggtagcggtggcggaggatctgaattcgaagccgacatctaccagacacctagatacctggtcatcggcaccggcaagaaaatcaccctggaatgcagccagacaatgggccacgacaagatgtactggtatcagcaggaccccggcatggaactgcacctgatccactacagctacggcgtgaacagcaccgagaagggcgatctgtctagcgagagcaccgtgtccagaatcagaaccgagcacttcccactgacactggaaagcgccagacctagccacaccagccagtacctgtgtgcctcttctgaggccagaggactggccgagttcaccgacacacagtatttcggccctggcaccagactgaccgttggcggaggcggaagtggaggcggaggatctggcggcggaggctctcaagttcagcttcaacagcctggcgctgagctggtcaaacctggcgcttctgtgaagatgagctgcaaagccagcggctacgccttcagcagctactggatcaactggatgaagcagaaacccggccagggactcgaatggatcggccaaatctatcccggcgacggcaccgagaacagattcagcgtgaacttccagaaggccgccaagagcttcagcctgaagatcagcgatagccagctgggcgacgccgccatgtacttttgcgcttatagaagcgccgtgaacgcccggctgatgtttggagatggcacacagctggtggtcaagcccaacacgcgtgagcagaaactgatctcggaagaggatctggggagcggcaccccattcccttctctggcccctcccatcatgctgctggtggacggcaagcagcagatggtggtcgtgtgcctggtgctggatgtggccccacctggactggacagccccatctggtttagcgccggcaatggctctgccctggacgcctttacctacggcccaagccctgccaccgatggcacctggacaaatctggcccacctgagcctgcccagcgaggaactggcttcttgggagcctctcgtgtgccacacaggacctggcgctgagggacacagcagatccacccagcctatgcacctgtctggcgaggccagcaccgccagaacctgtcctcaggaacctctgagaggcacccctggcggagcactgtggctgggagtgctgagactgctgctgttcaagctgctgctgtttgacctgctgctgacctgctcctgtctgtgcgatcctgccggccctctgccttctcctgccaccaccacaagactgagagccctgggcagccacagactgcaccctgccacagagacaggcggcagagaggccacaagcagccctagaccccagcccagagacagaagatggggcgataccccccctggcagaaagcctggatctccagtccgcgccaagagaagcggatctggcgtgaagcagaccctgaatttcgacctgctgaagctggctggcgacgtggaatccaacccaggcccttctagatctagaggccatatgaccgagtacaagcccacggtgcgcctcgccacccgcgacgacgtccccagggccgtacgcaccctcgccgccgcgttcgccgactaccccgccacgcgccacaccgtcgatccggaccgccacatcgagcgggtcaccgagctgcaagaactcttcctcacgcgcgtcgggctcgacatcggcaaggtgtgggtcgcggacgacggcgccgcggtggcggtctggaccacgccggagagcgtcgaagcgggggcggtgttcgccgagatcggcccgcgcatggccgagttgagcggttcccggctggccgcgcagcaacagatggaaggcctcctggcgccgcaccggcccaaggagcccgcgtggttcctggccaccgtcggcgtctcgcccgaccaccagggcaagggtctgggcagcgccgtcgtgctccccggagtggaggcggccgagcgcgccggggtgcccgccttcctggagacctccgcgccccgcaacctccccttctacgagcggctcggcttcaccgtcaccgccgacgtcgaggtgcccgaaggaccgcgcacctggtgcatgacccgcaagcccggtgcctga

SEQ ID NO: 3859 - DNA, 2277 bp, Artificial Sequence
  Synthetic Polynucloetide
atggccttaccagtgaccgccttgctcctgccgctggccttgctgctccacgccgccaggccgggcatgcggactgaagacctcccaaaggctgtggtgttcctggagcctcaatggtacagggtgctggagaaggacagtgtgactctgaagtgccagggagcctactcccctgaggacaattccacacagtggtttcacaatgagagcctcatctcaagccaggcctccagctacttcattgacgctgccacagtggacgacagtggagagtacaggtgccagacaaacctctccaccctcagtgacccggtgcagctagaagtccatatcggctggctgttgctccaggcccctcggtgggtgttcaaggaggaagaccctattcacctgaggtgtcacagctggaagaacactgctctgcataaggtcacatatttacagaatggcaaaggcaggaagtattttcatcataattctgacttctacattccaaaagccacactcaaagacagcggctcctacttctgcagggggcttgttgggagtaaaaatgtgtcttcagagactgtgaacatcaccatcactcaaggtttggcagtgtcaaccatctcatcattctttccacctggctaccaaggtaccggcggaggcggatctggcggcggaggtagcggtggcggaggatctgaattcgaagccgacatctaccagacacctagatacctggtcatcggcaccggcaagaaaatcaccctggaatgcagccagacaatgggccacgacaagatgtactggtatcagcaggaccccggcatggaactgcacctgatccactacagctacggcgtgaacagcaccgagaagggcgatctgtctagcgagagcaccgtgtccagaatcagaaccgagcacttcccactgacactggaaagcgccagacctagccacaccagccagtacctgtgtgcctcttctgaggccagaggactggccgagttcaccgacacacagtatttcggccctggcaccagactgaccgttctcgaggacctgaagaacgtgttcccacctgaggtggccgtgttcgagcctagcgaggccgagatcagccacacccagaaagccaccctcgtgtgcctggctaccggcttctaccccgaccatgtggaactgtcttggtgggtcaacggcaaagaggtgcacagcggcgtgtctaccgacccccagccactgaaagaacagcccgccctgaacgacagccggtactgcctgagcagcagactgagagtgtccgccaccttctggcagaacccccggaaccacttcagatgccaggtgcagttctacggcctgagcgagaacgacgagtggacccaggacagagccaagcccgtgacccagatcgtgtctgccgaagcctggggcagagccgattgcggctttaccagcgagagctaccagcagggcgtgctgagcgccaccatcctgtacgagatcctgctgggcaaggccaccctgtacgccgtgctggtgtctgccctggtgctgatggctatggtcaagcggaaggacagccggggaagggccaagcgatctggatctggagcaacaaacttctcactactcaaacaagcaggtgacgtggaggagaatcccgggcctactagaggccatatgaccgagtacaagcccacggtgcgcctcgccacccgcgacgacgtccccagggccgtacgcaccctcgccgccgcgttcgccgactaccccgccacgcgccacaccgtcgatccggaccgccacatcgagcgggtcaccgagctgcaagaactcttcctcacgcgcgtcgggctcgacatcggcaaggtgtgggtcgcggacgacggcgccgcggtggcggtctggaccacgccggagagcgtcgaagcgggggcggtgttcgccgagatcggcccgcgcatggccgagttgagcggttcccggctggccgcgcagcaacagatggaaggcctcctggcgccgcaccggcccaaggagcccgcgtggttcctggccaccgtcggcgtctcgcccgaccaccagggcaagggtctgggcagcgccgtcgtgctccccggagtggaggcggccgagcgcgccggggtgcccgccttcctggagacctccgcgccccgcaacctccccttctacgagcggctcggcttcaccgtcaccgccgacgtcgaggtgcccgaaggaccgcgcacctggtgcatgacccgcaagcccggtgcctga

SEQ ID NO: 3860 - DNA, 1584 bp, Artificial Sequence
  Synthetic Polynucloetide
atggccttaccagtgaccgccttgctcctgccgctggccttgctgctccacgccgccaggccgggcatgcggactgaagacctcccaaaggctgtggtgttcctggagcctcaatggtacagggtgctggagaaggacagtgtgactctgaagtgccagggagcctactcccctgaggacaattccacacagtggtttcacaatgagagcctcatctcaagccaggcctccagctacttcattgacgctgccacagtggacgacagtggagagtacaggtgccagacaaacctctccaccctcagtgacccggtgcagctagaagtccatatcggctggctgttgctccaggcccctcggtgggtgttcaaggaggaagaccctattcacctgaggtgtcacagctggaagaacactgctctgcataaggtcacatatttacagaatggcaaaggcaggaagtattttcatcataattctgacttctacattccaaaagccacactcaaagacagcggctcctacttctgcagggggcttgttgggagtaaaaatgtgtcttcagagactgtgaacatcaccatcactcaaggtttggcagtgtcaaccatctcatcattctttccacctggctaccaaggtaccggcggaggcggatctggcggcggaggtagcggtggcggaggatctgaattcgaagccgacatctaccagacacctagatacctggtcatcggcaccggcaagaaaatcaccctggaatgcagccagacaatgggccacgacaagatgtactggtatcagcaggaccccggcatggaactgcacctgatccactacagctacggcgtgaacagcaccgagaagggcgatctgtctagcgagagcaccgtgtccagaatcagaaccgagcacttcccactgacactggaaagcgccagacctagccacaccagccagtacctgtgtgcctcttctgaggccagaggactggccgagttcaccgacacacagtatttcggccctggcaccagactgaccgttctcgaggacctgaagaacgtgttcccacctgaggtggccgtgttcgagcctagcgaggccgagatcagccacacccagaaagccaccctcgtgtgcctggctaccggcttctaccccgaccatgtggaactgtcttggtgggtcaacggcaaagaggtgcacagcggcgtgtctaccgacccccagccactgaaagaacagcccgccctgaacgacagccggtactgcctgagcagcagactgagagtgtccgccaccttctggcagaacccccggaaccacttcagatgccaggtgcagttctacggcctgagcgagaacgacgagtggacccaggacagagccaagcccgtgacccagatcgtgtctgccgaagcctggggcagagccgattgcggctttaccagcgagagctaccagcagggcgtgctgagcgccaccatcctgtacgagatcctgctgggcaaggccaccctgtacgccgtgctggtgtctgccctggtgctgatggctatggtcaagcggaaggacagccgggga

SEQ ID NO: 3861 - DNA, 1326 bp, Artificial Sequence; identical to SEQ ID NO: 3567
  Synthetic Polynucloetide

SEQ ID NO: 3862 - DNA, 825 bp, Artificial Sequence; identical to SEQ ID NO: 3568
  Synthetic Polynucloetide

SEQ ID NO: 3863 - DNA, 2331 bp, Artificial Sequence
  Synthetic Polynucloetide
atggccttaccagtgaccgccttgctcctgccgctggccttgctgctccacgccgccaggccgggcatgcggactgaagacctcccaaaggctgtggtgttcctggagcctcaatggtacagggtgctggagaaggacagtgtgactctgaagtgccagggagcctactcccctgaggacaattccacacagtggtttcacaatgagagcctcatctcaagccaggcctccagctacttcattgacgctgccacagtggacgacagtggagagtacaggtgccagacaaacctctccaccctcagtgacccggtgcagctagaagtccatatcggctggctgttgctccaggcccctcggtgggtgttcaaggaggaagaccctattcacctgaggtgtcacagctggaagaacactgctctgcataaggtcacatatttacagaatggcaaaggcaggaagtattttcatcataattctgacttctacattccaaaagccacactcaaagacagcggctcctacttctgcagggggcttgttgggagtaaaaatgtgtcttcagagactgtgaacatcaccatcactcaaggtttggcagtgtcaaccatctcatcattctttccacctggctaccaaggtaccggcggaggcggatctggcggcggaggtagcggtggcggaggatctgaattcgaagccgacatctaccagacacctagatacctggtcatcggcaccggcaagaaaatcaccctggaatgcagccagacaatgggccacgacaagatgtactggtatcagcaggaccccggcatggaactgcacctgatccactacagctacggcgtgaacagcaccgagaagggcgatctgtctagcgagagcaccgtgtccagaatcagaaccgagcacttcccactgacactggaaagcgccagacctagccacaccagccagtacctgtgtgcctcttctgaggccagaggactggccgagttcaccgacacacagtatttcggccctggcaccagactgaccgttctcgaggggaaaccaattcccaaccctcttctgggactggattcaaccggcagcggcgaggacctgaagaacgtgttcccacctgaggtggccgtgttcgagcctagcgaggccgagatcagccacacccagaaagccaccctcgtgtgcctggctaccggcttctaccccgaccatgtggaactgtcttggtgggtcaacggcaaagaggtgcacagcggcgtgtgtaccgacccccagccactgaaagaacagcccgccctgaacgacagccggtactgcctgagcagcagactgagagtgtccgccaccttctggcagaacccccggaaccacttcagatgccaggtgcagttctacggcctgagcgagaacgacgagtggacccaggacagagccaagcccgtgacccagatcgtgtctgccgaagcctggggcagagccgattgcggctttaccagcgagagctaccagcagggcgtgctgagcgccaccatcctgtacgagatcctgctgggcaaggccaccctgtacgccgtgctggtgtctgccctggtgctgatggctatggtcaagcggaaggacagccggggaagggccaagcgatctggatctggagcaacaaacttctcactactcaaacaagcaggtgacgtggaggagaatcccgggcctactagaggccatatgaccgagtacaagcccacggtgcgcctcgccacccgcgacgacgtccccagggccgtacgcaccctcgccgccgcgttcgccgactaccccgccacgcgccacaccgtcgatccggaccgccacatcgagcgggtcaccgagctgcaagaactcttcctcacgcgcgtcgggctcgacatcggcaaggtgtgggtcgcggacgacggcgccgcggtggcggtctggaccacgccggagagcgtcgaagcgggggcggtgttcgccgagatcggcccgcgcatggccgagttgagcggttcccggctggccgcgcagcaacagatggaaggcctcctggcgccgcaccggcccaaggagcccgcgtggttcctggccaccgtcggcgtctcgcccgaccaccagggcaagggtctgggcagcgccgtcgtgctccccggagtggaggcggccgagcgcgccggggtgcccgccttcctggagacctccgcgccccgcaacctccccttctacgagcggctcggcttcaccgtcaccgccgacgtcgaggtgcccgaaggaccgcgcacctggtgcatgacccgcaagcccggtgcctga

SEQ ID NO: 3864 - DNA, 1641 bp, Artificial Sequence
  Synthetic Polynucloetide
atggccttaccagtgaccgccttgctcctgccgctggccttgctgctccacgccgccaggccgggcatgcggactgaagacctcccaaaggctgtggtgttcctggagcctcaatggtacagggtgctggagaaggacagtgtgactctgaagtgccagggagcctactcccctgaggacaattccacacagtggtttcacaatgagagcctcatctcaagccaggcctccagctacttcattgacgctgccacagtggacgacagtggagagtacaggtgccagacaaacctctccaccctcagtgacccggtgcagctagaagtccatatcggctggctgttgctccaggcccctcggtgggtgttcaaggaggaagaccctattcacctgaggtgtcacagctggaagaacactgctctgcataaggtcacatatttacagaatggcaaaggcaggaagtattttcatcataattctgacttctacattccaaaagccacactcaaagacagcggctcctacttctgcagggggcttgttgggagtaaaaatgtgtcttcagagactgtgaacatcaccatcactcaaggtttggcagtgtcaaccatctcatcattctttccacctggctaccaaggtaccggcggaggcggatctggcggcggaggtagcggtggcggaggatctgaattcgaagccgacatctaccagacacctagatacctggtcatcggcaccggcaagaaaatcaccctggaatgcagccagacaatgggccacgacaagatgtactggtatcagcaggaccccggcatggaactgcacctgatccactacagctacggcgtgaacagcaccgagaagggcgatctgtctagcgagagcaccgtgtccagaatcagaaccgagcacttcccactgacactggaaagcgccagacctagccacaccagccagtacctgtgtgcctcttctgaggccagaggactggccgagttcaccgacacacagtatttcggccctggcaccagactgaccgttctcgaggggaaaccaattcccaaccctcttctgggactggattcaaccggcagcggcgaggacctgaagaacgtgttcccacctgaggtggccgtgttcgagcctagcgaggccgagatcagccacacccagaaagccaccctcgtgtgcctggctaccggcttctaccccgaccatgtggaactgtcttggtgggtcaacggcaaagaggtgcacagcggcgtgtgtaccgacccccagccactgaaagaacagcccgccctgaacgacagccggtactgcctgagcagcagactgagagtgtccgccaccttctggcagaacccccggaaccacttcagatgccaggtgcagttctacggcctgagcgagaacgacgagtggacccaggacagagccaagcccgtgacccagatcgtgtctgccgaagcctggggcagagccgattgcggctttaccagcgagagctaccagcagggcgtgctgagcgccaccatcctgtacgagatcctgctgggcaaggccaccctgtacgccgtgctggtgtctgccctggtgctgatggctatggtcaagcggaaggacagccggggatga

SEQ ID NO: 3865 - DNA, 1362 bp, Artificial Sequence; identical to SEQ ID NO: 3571
  Synthetic Polynucloetide

SEQ ID NO: 3866 - DNA, 864 bp, Artificial Sequence; identical to SEQ ID NO: 3572
  Synthetic Polynucloetide

SEQ ID NO: 3867 - DNA, 2562 bp, Artificial Sequence
  Synthetic Polynucloetide
atggccttaccagtgaccgccttgctcctgccgctggccttgctgctccacgccgccaggccgggcatgcggactgaagacctcccaaaggctgtggtgttcctggagcctcaatggtacagggtgctggagaaggacagtgtgactctgaagtgccagggagcctactcccctgaggacaattccacacagtggtttcacaatgagagcctcatctcaagccaggcctccagctacttcattgacgctgccacagtggacgacagtggagagtacaggtgccagacaaacctctccaccctcagtgacccggtgcagctagaagtccatatcggctggctgttgctccaggcccctcggtgggtgttcaaggaggaagaccctattcacctgaggtgtcacagctggaagaacactgctctgcataaggtcacatatttacagaatggcaaaggcaggaagtattttcatcataattctgacttctacattccaaaagccacactcaaagacagcggctcctacttctgcagggggcttgttgggagtaaaaatgtgtcttcagagactgtgaacatcaccatcactcaaggtttggcagtgtcaaccatctcatcattctttccacctggctaccaaggtaccggcggaggcggatctggcggcggaggtagcggtggcggaggatctgaattcgaagccgacatctaccagacacctagatacctggtcatcggcaccggcaagaaaatcaccctggaatgcagccagacaatgggccacgacaagatgtactggtatcagcaggaccccggcatggaactgcacctgatccactacagctacggcgtgaacagcaccgagaagggcgatctgtctagcgagagcaccgtgtccagaatcagaaccgagcacttcccactgacactggaaagcgccagacctagccacaccagccagtacctgtgtgcctcttctgaggccagaggactggccgagttcaccgacacacagtatttcggccctggcaccagactgaccgttggcggaggcggaagtggaggcggaggatctggcggcggaggctctcaagttcagcttcaacagcctggcgctgagctggtcaaacctggcgcttctgtgaagatgagctgcaaagccagcggctacgccttcagcagctactggatcaactggatgaagcagaaacccggccagggactcgaatggatcggccaaatctatcccggcgacggcaccgagaacagattcagcgtgaacttccagaaggccgccaagagcttcagcctgaagatcagcgatagccagctgggcgacgccgccatgtacttttgcgcttatagaagcgccgtgaacgcccggctgatgtttggagatggcacacagctggtggtcaagcccaacacgcgtgggagcggcatccagaaccctgatcctgccgtgtaccagctgcgggatagcaagagcagcgacaagagcgtgtgtctgttcaccgacttcgacagccagaccaacgtgtcccagagcaaggactccgacgtgtacatcaccgataagaccgtgctggacatgcggagcatggacttcaagagcaactccgccgtggcctggtccaacaagtccgatttcgcctgcgccaacgccttcaacaacagcattatccccgaggacacattcttcccaagcagcgacgtgccctgcgacgtgaagctggtggaaaagagcttcgagacagacaccaacctgaacttccagaacctgagcgtgatcggcttcagaatcctgctgctgaaagtggccggctttaacctgctgatgaccctgcggctgtggtccagccgcgccaagagaagcggatctggcgtgaagcagaccctgaatttcgacctgctgaagctggctggcgacgtggaatccaacccaggcccttctagaggccatatgaccgagtacaagcccacggtgcgcctcgccacccgcgacgacgtccccagggccgtacgcaccctcgccgccgcgttcgccgactaccccgccacgcgccacaccgtcgatccggaccgccacatcgagcgggtcaccgagctgcaagaactcttcctcacgcgcgtcgggctcgacatcggcaaggtgtgggtcgcggacgacggcgccgcggtggcggtctggaccacgccggagagcgtcgaagcgggggcggtgttcgccgagatcggcccgcgcatggccgagttgagcggttcccggctggccgcgcagcaacagatggaaggcctcctggcgccgcaccggcccaaggagcccgcgtggttcctggccaccgtcggcgtctcgcccgaccaccagggcaagggtctgggcagcgccgtcgtgctccccggagtggaggcggccgagcgcgccggggtgcccgccttcctggagacctccgcgccccgcaacctccccttctacgagcggctcggcttcaccgtcaccgccgacgtcgaggtgcccgaaggaccgcgcacctggtgcatgacccgcaagcccggtgcctga

SEQ ID NO: 3868 - DNA, 2658 bp, Artificial Sequence
  Synthetic Polynucloetide
atggccttaccagtgaccgccttgctcctgccgctggccttgctgctccacgccgccaggccgggcatgcggactgaagacctcccaaaggctgtggtgttcctggagcctcaatggtacagggtgctggagaaggacagtgtgactctgaagtgccagggagcctactcccctgaggacaattccacacagtggtttcacaatgagagcctcatctcaagccaggcctccagctacttcattgacgctgccacagtggacgacagtggagagtacaggtgccagacaaacctctccaccctcagtgacccggtgcagctagaagtccatatcggctggctgttgctccaggcccctcggtgggtgttcaaggaggaagaccctattcacctgaggtgtcacagctggaagaacactgctctgcataaggtcacatatttacagaatggcaaaggcaggaagtattttcatcataattctgacttctacattccaaaagccacactcaaagacagcggctcctacttctgcagggggcttgttgggagtaaaaatgtgtcttcagagactgtgaacatcaccatcactcaaggtttggcagtgtcaaccatctcatcattctttccacctggctaccaaggtaccggcggaggcggatctggcggcggaggtagcggtggcggaggatctgaattcgaagccgacatctaccagacacctagatacctggtcatcggcaccggcaagaaaatcaccctggaatgcagccagacaatgggccacgacaagatgtactggtatcagcaggaccccggcatggaactgcacctgatccactacagctacggcgtgaacagcaccgagaagggcgatctgtctagcgagagcaccgtgtccagaatcagaaccgagcacttcccactgacactggaaagcgccagacctagccacaccagccagtacctgtgtgcctcttctgaggccagaggactggccgagttcaccgacacacagtatttcggccctggcaccagactgaccgttggcggaggcggaagtggaggcggaggatctggcggcggaggctctcaagttcagcttcaacagcctggcgctgagctggtcaaacctggcgcttctgtgaagatgagctgcaaagccagcggctacgccttcagcagctactggatcaactggatgaagcagaaacccggccagggactcgaatggatcggccaaatctatcccggcgacggcaccgagaacagattcagcgtgaacttccagaaggccgccaagagcttcagcctgaagatcagcgatagccagctgggcgacgccgccatgtacttttgcgcttatagaagcgccgtgaacgcccggctgatgtttggagatggcacacagctggtggtcaagcccaacctcgaggacctgaagaacgtgttcccacctgaggtggccgtgttcgagcctagcaaggccgagatcgcccacacccagaaagccaccctcgtgtgcctggctaccggcttctaccccgaccatgtggaactgtcttggtgggtcaacggcaaagaggtgcacagcggcgtgtctaccgacccccagccactgaaagaacagcccgccctgaacgacagccggtactgcctgagcagcagactgagagtgtccgccaccttctggcagaacccccggaaccacttcagatgccaggtgcagttctacggcctgagcgagaacgacgagtggacccaggacagagccaagcccgtgacccagatcgtgtctgccgaagcctggggcagagccgattgcggcatcaccagcgccagctaccaccagggcgtgctgagcgccaccatcctgtacgagatcctgctgggcaaggccaccctgtacgccgtgctggtgtctgccctggtgctgatggctatggtcaagcggaaggacagccggggaagggccaagcgatctggatctggagcaacaaacttctcactactcaaacaagcaggtgacgtggaggagaatcccgggcctactagaggccatatgaccgagtacaagcccacggtgcgcctcgccacccgcgacgacgtccccagggccgtacgcaccctcgccgccgcgttcgccgactaccccgccacgcgccacaccgtcgatccggaccgccacatcgagcgggtcaccgagctgcaagaactcttcctcacgcgcgtcgggctcgacatcggcaaggtgtgggtcgcggacgacggcgccgcggtggcggtctggaccacgccggagagcgtcgaagcgggggcggtgttcgccgagatcggcccgcgcatggccgagttgagcggttcccggctggccgcgcagcaacagatggaaggcctcctggcgccgcaccggcccaaggagcccgcgtggttcctggccaccgtcggcgtctcgcccgaccaccagggcaagggtctgggcagcgccgtcgtgctccccggagtggaggcggccgagcgcgccggggtgcccgccttcctggagacctccgcgccccgcaacctccccttctacgagcggctcggcttcaccgtcaccgccgacgtcgaggtgcccgaaggaccgcgcacctggtgcatgacccgcaagcccggtgcctga

SEQ ID NO: 3869 - DNA, 3612 bp, Artificial Sequence
  Synthetic Polynucloetide
atggccttaccagtgaccgccttgctcctgccgctggccttgctgctccacgccgccaggccgggcatgcggactgaagacctcccaaaggctgtggtgttcctggagcctcaatggtacagggtgctggagaaggacagtgtgactctgaagtgccagggagcctactcccctgaggacaattccacacagtggtttcacaatgagagcctcatctcaagccaggcctccagctacttcattgacgctgccacagtggacgacagtggagagtacaggtgccagacaaacctctccaccctcagtgacccggtgcagctagaagtccatatcggctggctgttgctccaggcccctcggtgggtgttcaaggaggaagaccctattcacctgaggtgtcacagctggaagaacactgctctgcataaggtcacatatttacagaatggcaaaggcaggaagtattttcatcataattctgacttctacattccaaaagccacactcaaagacagcggctcctacttctgcagggggcttgttgggagtaaaaatgtgtcttcagagactgtgaacatcaccatcactcaaggtttggcagtgtcaaccatctcatcattctttccacctggctaccaaggtaccggcggaggcggatctggcggcggaggtagcggtggcggaggatctgaattcgaagccgacatctaccagacacctagatacctggtcatcggcaccggcaagaaaatcaccctggaatgcagccagacaatgggccacgacaagatgtactggtatcagcaggaccccggcatggaactgcacctgatccactacagctacggcgtgaacagcaccgagaagggcgatctgtctagcgagagcaccgtgtccagaatcagaaccgagcacttcccactgacactggaaagcgccagacctagccacaccagccagtacctgtgtgcctcttctgaggccagaggactggccgagttcaccgacacacagtatttcggccctggcaccagactgaccgttctcgagatccagaaccctgatcctgccgtgtaccagctgcgggatagcaagagcagcgacaagagcgtgtgtctgttcaccgacttcgacagccagaccaacgtgtcccagagcaaggactccgacgtgtacatcaccgataagtgcgtgctggacatgcggagcatggacttcaagagcaactccgccgtggcctggtccaacaagtccgatttcgcctgcgccaacgccttcaacaacagcattatccccgaggacacattcttcccaagcagcgacgtgccctgcgacgtgaagctggtggaaaagagcttcgagacagacaccaacctgaacttccagaacctgagcgtgatcggcttcagaatcctgctgctgaaagtggccggctttaacctgctgatgaccctgcggctgtggtccagccgcgccaagagaagcggatctggcgtgaagcagaccctgaatttcgacctgctgaagctggctggcgacgtggaatccaacccaggccctactagtatggactggatttggcgcatccttttccttgtcggcgctgctaccggcgcccattccgggccccaggttcagctgcaagagtctggcggaggacttgctcaagctggcggaagcctgagactgtcttgtgccgcctctggcagaaccttcagcatgggctggtttagacaggcccctggcaaagagagagagttcgtcgccgccatcacatacagcggcggcagcccttactacgcctcttctgtcagaggccggttcaccatcagccgggacaacgccaagaacaccgtgtacctccagatgaacagcctgaagccagaggacaccgccgtgtactactgtgccgccaatccaacctacggcagcgactggaatgccgagaattggggccagggcacccaagtgacagtgtctagtggatccggcggcggaggatctggcggaggcggatctgggggcggaggctctttcgaacaagttcagcttcaacagcctggcgctgagctggtcaaacctggcgcttctgtgaagatgagctgcaaagccagcggctacgccttcagcagctactggatcaactggatgaagcagaaacccggccagggactcgaatggatcggccaaatctatcccggcgacggcaccgagaacagattcagcgtgaacttccagaaggccgccaagagcttcagcctgaagatcagcgatagccagctgggcgacgccgccatgtacttttgcgcttatagaagcgccgtgaacgcccggctgatgtttggagatggcacacagctggtggtcaagcccaacacgcgtgaggacctgaagaacgtgttcccacctgaggtggccgtgttcgagcctagcaaggccgagatcgcccacacccagaaagccaccctcgtgtgcctggctaccggcttctaccccgaccatgtggaactgtcttggtgggtcaacggcaaagaggtgcacagcggcgtgtgtaccgacccccagccactgaaagaacagcccgccctgaacgacagccggtactgcctgagcagcagactgagagtgtccgccaccttctggcagaacccccggaaccacttcagatgccaggtgcagttctacggcctgagcgagaacgacgagtggacccaggacagagccaagcccgtgacccagatcgtgtctgccgaagcctggggcagagccgattgcggcatcaccagcgccagctaccaccagggcgtgctgagcgccaccatcctgtacgagatcctgctgggcaaggccaccctgtacgccgtgctggtgtctgccctggtgctgatggctatggtcaagcggaaggacagccggggaagggccaagcgatctggatctggagcaacaaacttctcactactcaaacaagcaggtgacgtggaggagaatcccgggccttctagaggccatatgaccgagtacaagcccacggtgcgcctcgccacccgcgacgacgtccccagggccgtacgcaccctcgccgccgcgttcgccgactaccccgccacgcgccacaccgtcgatccggaccgccacatcgagcgggtcaccgagctgcaagaactcttcctcacgcgcgtcgggctcgacatcggcaaggtgtgggtcgcggacgacggcgccgcggtggcggtctggaccacgccggagagcgtcgaagcgggggcggtgttcgccgagatcggcccgcgcatggccgagttgagcggttcccggctggccgcgcagcaacagatggaaggcctcctggcgccgcaccggcccaaggagcccgcgtggttcctggccaccgtcggcgtctcgcccgaccaccagggcaagggtctgggcagcgccgtcgtgctccccggagtggaggcggccgagcgcgccggggtgcccgccttcctggagacctccgcgccccgcaacctccccttctacgagcggctcggcttcaccgtcaccgccgacgtcgaggtgcccgaaggaccgcgcacctggtgcatgacccgcaagcccggtgcctga

SEQ ID NO: 3870 - DNA, 3609 bp, Artificial Sequence
  Synthetic Polynucloetide
atggccttaccagtgaccgccttgctcctgccgctggccttgctgctccacgccgccaggccgggcatgcggactgaagacctcccaaaggctgtggtgttcctggagcctcaatggtacagggtgctggagaaggacagtgtgactctgaagtgccagggagcctactcccctgaggacaattccacacagtggtttcacaatgagagcctcatctcaagccaggcctccagctacttcattgacgctgccacagtggacgacagtggagagtacaggtgccagacaaacctctccaccctcagtgacccggtgcagctagaagtccatatcggctggctgttgctccaggcccctcggtgggtgttcaaggaggaagaccctattcacctgaggtgtcacagctggaagaacactgctctgcataaggtcacatatttacagaatggcaaaggcaggaagtattttcatcataattctgacttctacattccaaaagccacactcaaagacagcggctcctacttctgcagggggcttgttgggagtaaaaatgtgtcttcagagactgtgaacatcaccatcactcaaggtttggcagtgtcaaccatctcatcattctttccacctggctaccaaggtaccggcggaggcggatctggcggcggaggtagcggtggcggaggatctgaattcgaagccgacatctaccagacacctagatacctggtcatcggcaccggcaagaaaatcaccctggaatgcagccagacaatgggccacgacaagatgtactggtatcagcaggaccccggcatggaactgcacctgatccactacagctacggcgtgaacagcaccgagaagggcgatctgtctagcgagagcaccgtgtccagaatcagaaccgagcacttcccactgacactggaaagcgccagacctagccacaccagccagtacctgtgtgcctcttctgaggccagaggactggccgagttcaccgacacacagtatttcggccctggcaccagactgaccgttctcgaggacctgaagaacgtgttcccacctgaggtggccgtgttcgagcctagcaaggccgagatcgcccacacccagaaagccaccctcgtgtgcctggctaccggcttctaccccgaccatgtggaactgtcttggtgggtcaacggcaaagaggtgcacagcggcgtgtgtaccgacccccagccactgaaagaacagcccgccctgaacgacagccggtactgcctgagcagcagactgagagtgtccgccaccttctggcagaacccccggaaccacttcagatgccaggtgcagttctacggcctgagcgagaacgacgagtggacccaggacagagccaagcccgtgacccagatcgtgtctgccgaagcctggggcagagccgattgcggcatcaccagcgccagctaccaccagggcgtgctgagcgccaccatcctgtacgagatcctgctgggcaaggccaccctgtacgccgtgctggtgtctgccctggtgctgatggctatggtcaagcggaaggacagccggggaagggccaagcgatctggatctggagcaacaaacttctcactactcaaacaagcaggtgacgtggaggagaatcccgggcctactagtatggactggatttggcgcatccttttccttgtcggcgctgctaccggcgcccattccgggccccaggttcagctgcaagagtctggcggaggacttgctcaagctggcggaagcctgagactgtcttgtgccgcctctggcagaaccttcagcatgggctggtttagacaggcccctggcaaagagagagagttcgtcgccgccatcacatacagcggcggcagcccttactacgcctcttctgtcagaggccggttcaccatcagccgggacaacgccaagaacaccgtgtacctccagatgaacagcctgaagccagaggacaccgccgtgtactactgtgccgccaatccaacctacggcagcgactggaatgccgagaattggggccagggcacccaagtgacagtgtctagtggatccggcggcggaggatctggcggaggcggatctgggggcggaggctctttcgaacaagttcagcttcaacagcctggcgctgagctggtcaaacctggcgcttctgtgaagatgagctgcaaagccagcggctacgccttcagcagctactggatcaactggatgaagcagaaacccggccagggactcgaatggatcggccaaatctatcccggcgacggcaccgagaacagattcagcgtgaacttccagaaggccgccaagagcttcagcctgaagatcagcgatagccagctgggcgacgccgccatgtacttttgcgcttatagaagcgccgtgaacgcccggctgatgtttggagatggcacacagctggtggtcaagcccaacacgcgtatccagaaccctgatcctgccgtgtaccagctgcgggatagcaagagcagcgacaagagcgtgtgtctgttcaccgacttcgacagccagaccaacgtgtcccagagcaaggactccgacgtgtacatcaccgataagtgcgtgctggacatgcggagcatggacttcaagagcaactccgccgtggcctggtccaacaagtccgatttcgcctgcgccaacgccttcaacaacagcattatccccgaggacacattcttcccaagcagcgacgtgccctgcgacgtgaagctggtggaaaagagcttcgagacagacaccaacctgaacttccagaacctgagcgtgatcggcttcagaatcctgctgctgaaagtggccggctttaacctgctgatgaccctgcggctgtggtccagccgcgccaagagaagcggatctggcgtgaagcagaccctgaatttcgacctgctgaagctggctggcgacgtggaatccaacccaggcccttctagaggccatatgaccgagtacaagcccacggtgcgcctcgccacccgcgacgacgtccccagggccgtacgcaccctcgccgccgcgttcgccgactaccccgccacgcgccacaccgtcgatccggaccgccacatcgagcgggtcaccgagctgcaagaactcttcctcacgcgcgtcgggctcgacatcggcaaggtgtgggtcgcggacgacggcgccgcggtggcggtctggaccacgccggagagcgtcgaagcgggggcggtgttcgccgagatcggcccgcgcatggccgagttgagcggttcccggctggccgcgcagcaacagatggaaggcctcctggcgccgcaccggcccaaggagcccgcgtggttcctggccaccgtcggcgtctcgcccgaccaccagggcaagggtctgggcagcgccgtcgtgctccccggagtggaggcggccgagcgcgccggggtgcccgccttcctggagacctccgcgccccgcaacctccccttctacgagcggctcggcttcaccgtcaccgccgacgtcgaggtgcccgaaggaccgcgcacctggtgcatgacccgcaagcccggtgcctga

SEQ ID NO: 3871 - DNA, 3609 bp, Artificial Sequence
  Synthetic Polynucloetide
atggccttaccagtgaccgccttgctcctgccgctggccttgctgctccacgccgccaggccgggcatgcggactgaagacctcccaaaggctgtggtgttcctggagcctcaatggtacagggtgctggagaaggacagtgtgactctgaagtgccagggagcctactcccctgaggacaattccacacagtggtttcacaatgagagcctcatctcaagccaggcctccagctacttcattgacgctgccacagtggacgacagtggagagtacaggtgccagacaaacctctccaccctcagtgacccggtgcagctagaagtccatatcggctggctgttgctccaggcccctcggtgggtgttcaaggaggaagaccctattcacctgaggtgtcacagctggaagaacactgctctgcataaggtcacatatttacagaatggcaaaggcaggaagtattttcatcataattctgacttctacattccaaaagccacactcaaagacagcggctcctacttctgcagggggcttgttgggagtaaaaatgtgtcttcagagactgtgaacatcaccatcactcaaggtttggcagtgtcaaccatctcatcattctttccacctggctaccaaggtaccggcggaggcggatctggcggcggaggtagcggtggcggaggatctgaattcgaagccgacatctaccagacacctagatacctggtcatcggcaccggcaagaaaatcaccctggaatgcagccagacaatgggccacgacaagatgtactggtatcagcaggaccccggcatggaactgcacctgatccactacagctacggcgtgaacagcaccgagaagggcgatctgtctagcgagagcaccgtgtccagaatcagaaccgagcacttcccactgacactggaaagcgccagacctagccacaccagccagtacctgtgtgcctcttctgaggccagaggactggccgagttcaccgacacacagtatttcggccctggcaccagactgaccgttctcgaggacctgaagaacgtgttcccacctgaggtggccgtgttcgagcctagcgaggccgagatcagccacacccagaaagccaccctcgtgtgcctggctaccggcttctaccccgaccatgtggaactgtcttggtgggtcaacggcaaagaggtgcacagcggcgtgtgtaccgacccccagccactgaaagaacagcccgccctgaacgacagccggtactgcctgagcagcagactgagagtgtccgccaccttctggcagaacccccggaaccacttcagatgccaggtgcagttctacggcctgagcgagaacgacgagtggacccaggacagagccaagcccgtgacccagatcgtgtctgccgaagcctggggcagagccgattgcggctttaccagcgagagctaccagcagggcgtgctgagcgccaccatcctgtacgagatcctgctgggcaaggccaccctgtacgccgtgctggtgtctgccctggtgctgatggctatggtcaagcggaaggacagccggggaagggccaagcgatctggatctggagcaacaaacttctcactactcaaacaagcaggtgacgtggaggagaatcccgggcctactagtatggactggatttggcgcatccttttccttgtcggcgctgctaccggcgcccattccgggccccaggttcagctgcaagagtctggcggaggacttgctcaagctggcggaagcctgagactgtcttgtgccgcctctggcagaaccttcagcatgggctggtttagacaggcccctggcaaagagagagagttcgtcgccgccatcacatacagcggcggcagcccttactacgcctcttctgtcagaggccggttcaccatcagccgggacaacgccaagaacaccgtgtacctccagatgaacagcctgaagccagaggacaccgccgtgtactactgtgccgccaatccaacctacggcagcgactggaatgccgagaattggggccagggcacccaagtgacagtgtctagtggatccggcggcggaggatctggcggaggcggatctgggggcggaggctctttcgaacaagttcagcttcaacagcctggcgctgagctggtcaaacctggcgcttctgtgaagatgagctgcaaagccagcggctacgccttcagcagctactggatcaactggatgaagcagaaacccggccagggactcgaatggatcggccaaatctatcccggcgacggcaccgagaacagattcagcgtgaacttccagaaggccgccaagagcttcagcctgaagatcagcgatagccagctgggcgacgccgccatgtacttttgcgcttatagaagcgccgtgaacgcccggctgatgtttggagatggcacacagctggtggtcaagcccaacacgcgtatccagaaccctgatcctgccgtgtaccagctgcgggatagcaagagcagcgacaagagcgtgtgtctgttcaccgacttcgacagccagaccaacgtgtcccagagcaaggactccgacgtgtacatcaccgataagtgcgtgctggacatgcggagcatggacttcaagagcaactccgccgtggcctggtccaacaagtccgatttcgcctgcgccaacgccttcaacaacagcattatccccgaggacacattcttcccaagccccgagagcagctgcgacgtgaagctggtggaaaagagcttcgagacagacaccaacctgaacttccagaacctgagcgtgatcggcttcagaatcctgctgctgaaagtggccggctttaacctgctgatgaccctgcggctgtggtccagccgcgccaagagaagcggatctggcgtgaagcagaccctgaatttcgacctgctgaagctggctggcgacgtggaatccaacccaggcccttctagaggccatatgaccgagtacaagcccacggtgcgcctcgccacccgcgacgacgtccccagggccgtacgcaccctcgccgccgcgttcgccgactaccccgccacgcgccacaccgtcgatccggaccgccacatcgagcgggtcaccgagctgcaagaactcttcctcacgcgcgtcgggctcgacatcggcaaggtgtgggtcgcggacgacggcgccgcggtggcggtctggaccacgccggagagcgtcgaagcgggggcggtgttcgccgagatcggcccgcgcatggccgagttgagcggttcccggctggccgcgcagcaacagatggaaggcctcctggcgccgcaccggcccaaggagcccgcgtggttcctggccaccgtcggcgtctcgcccgaccaccagggcaagggtctgggcagcgccgtcgtgctccccggagtggaggcggccgagcgcgccggggtgcccgccttcctggagacctccgcgccccgcaacctccccttctacgagcggctcggcttcaccgtcaccgccgacgtcgaggtgcccgaaggaccgcgcacctggtgcatgacccgcaagcccggtgcctga

SEQ ID NO: 3872 - DNA, 2907 bp, Artificial Sequence
  Synthetic Polynucloetide
atggccttaccagtgaccgccttgctcctgccgctggccttgctgctccacgccgccaggccgggcatgcggactgaagacctcccaaaggctgtggtgttcctggagcctcaatggtacagggtgctggagaaggacagtgtgactctgaagtgccagggagcctactcccctgaggacaattccacacagtggtttcacaatgagagcctcatctcaagccaggcctccagctacttcattgacgctgccacagtggacgacagtggagagtacaggtgccagacaaacctctccaccctcagtgacccggtgcagctagaagtccatatcggctggctgttgctccaggcccctcggtgggtgttcaaggaggaagaccctattcacctgaggtgtcacagctggaagaacactgctctgcataaggtcacatatttacagaatggcaaaggcaggaagtattttcatcataattctgacttctacattccaaaagccacactcaaagacagcggctcctacttctgcagggggcttgttgggagtaaaaatgtgtcttcagagactgtgaacatcaccatcactcaaggtttggcagtgtcaaccatctcatcattctttccacctggctaccaaggtaccggcggaggcggatctggcggcggaggtagcggtggcggaggatctgaattcgaagccgacatctaccagacacctagatacctggtcatcggcaccggcaagaaaatcaccctggaatgcagccagacaatgggccacgacaagatgtactggtatcagcaggaccccggcatggaactgcacctgatccactacagctacggcgtgaacagcaccgagaagggcgatctgtctagcgagagcaccgtgtccagaatcagaaccgagcacttcccactgacactggaaagcgccagacctagccacaccagccagtacctgtgtgcctcttctgaggccagaggactggccgagttcaccgacacacagtatttcggccctggcaccagactgaccgttctcgaggacctgaagaacgtgttcccacctgaggtggccgtgttcgagcctagcgaggccgagatcagccacacccagaaagccaccctcgtgtgcctggctaccggcttctaccccgaccatgtggaactgtcttggtgggtcaacggcaaagaggtgcacagcggcgtgtgtaccgacccccagccactgaaagaacagcccgccctgaacgacagccggtactgcctgagcagcagactgagagtgtccgccaccttctggcagaacccccggaaccacttcagatgccaggtgcagttctacggcctgagcgagaacgacgagtggacccaggacagagccaagcccgtgacccagatcgtgtctgccgaagcctggggcagagccgattgcggctttaccagcgagagctaccagcagggcgtgctgagcgccaccatcctgtacgagatcctgctgggcaaggccaccctgtacgccgtgctggtgtctgccctggtgctgatggctatggtcaagcggaaggacagccggggaagggccaagcgatctggatctggagcaacaaacttctcactactcaaacaagcaggtgacgtggaggagaatcccgggcctactagtatggactggatttggcgcatccttttccttgtcggcgctgctaccggcgcccattccgggccccaggttcagctgcaagagtctggcggaggacttgctcaagctggcggaagcctgagactgtcttgtgccgcctctggcagaaccttcagcatgggctggtttagacaggcccctggcaaagagagagagttcgtcgccgccatcacatacagcggcggcagcccttactacgcctcttctgtcagaggccggttcaccatcagccgggacaacgccaagaacaccgtgtacctccagatgaacagcctgaagccagaggacaccgccgtgtactactgtgccgccaatccaacctacggcagcgactggaatgccgagaattggggccagggcacccaagtgacagtgtctagtggatccggcggcggaggatctggcggaggcggatctgggggcggaggctctttcgaacaagttcagcttcaacagcctggcgctgagctggtcaaacctggcgcttctgtgaagatgagctgcaaagccagcggctacgccttcagcagctactggatcaactggatgaagcagaaacccggccagggactcgaatggatcggccaaatctatcccggcgacggcaccgagaacagattcagcgtgaacttccagaaggccgccaagagcttcagcctgaagatcagcgatagccagctgggcgacgccgccatgtacttttgcgcttatagaagcgccgtgaacgcccggctgatgtttggagatggcacacagctggtggtcaagcccaacacgcgtatccagaaccctgatcctgccgtgtaccagctgcgggatagcaagagcagcgacaagagcgtgtgtctgttcaccgacttcgacagccagaccaacgtgtcccagagcaaggactccgacgtgtacatcaccgataagtgcgtgctggacatgcggagcatggacttcaagagcaactccgccgtggcctggtccaacaagtccgatttcgcctgcgccaacgccttcaacaacagcattatccccgaggacacattcttcccaagccccgagagcagctgcgacgtgaagctggtggaaaagagcttcgagacagacaccaacctgaacttccagaacctgagcgtgatcggcttcagaatcctgctgctgaaagtggccggctttaacctgctgatgaccctgcggctgtggtccagc

SEQ ID NO: 3873 - DNA, 3582 bp, Artificial Sequence
  Synthetic Polynucloetide
atggccttaccagtgaccgccttgctcctgccgctggccttgctgctccacgccgccaggccgggcatgcggactgaagacctcccaaaggctgtggtgttcctggagcctcaatggtacagggtgctggagaaggacagtgtgactctgaagtgccagggagcctactcccctgaggacaattccacacagtggtttcacaatgagagcctcatctcaagccaggcctccagctacttcattgacgctgccacagtggacgacagtggagagtacaggtgccagacaaacctctccaccctcagtgacccggtgcagctagaagtccatatcggctggctgttgctccaggcccctcggtgggtgttcaaggaggaagaccctattcacctgaggtgtcacagctggaagaacactgctctgcataaggtcacatatttacagaatggcaaaggcaggaagtattttcatcataattctgacttctacattccaaaagccacactcaaagacagcggctcctacttctgcagggggcttgttgggagtaaaaatgtgtcttcagagactgtgaacatcaccatcactcaaggtttggcagtgtcaaccatctcatcattctttccacctggctaccaaggtaccggcggaggcggatctggcggcggaggtagcggtggcggaggatctgaattcgaagccgacatctaccagacacctagatacctggtcatcggcaccggcaagaaaatcaccctggaatgcagccagacaatgggccacgacaagatgtactggtatcagcaggaccccggcatggaactgcacctgatccactacagctacggcgtgaacagcaccgagaagggcgatctgtctagcgagagcaccgtgtccagaatcagaaccgagcacttcccactgacactggaaagcgccagacctagccacaccagccagtacctgtgtgcctcttctgaggccagaggactggccgagttcaccgacacacagtatttcggccctggcaccagactgaccgttctcgaggacctgaagaacgtgttcccacctgaggtggccgtgttcgagcctagcgaggccgagatcagccacacccagaaagccaccctcgtgtgcctggctaccggcttctaccccgaccatgtggaactgtcttggtgggtcaacggcaaagaggtgcacagcggcgtgtgtaccgacccccagccactgaaagaacagcccgccctgaacgacagccggtactgcctgagcagcagactgagagtgtccgccaccttctggcagaacccccggaaccacttcagatgccaggtgcagttctacggcctgagcgagaacgacgagtggacccaggacagagccaagcccgtgacccagatcgtgtctgccgaagcctggggcagagccgattgcggctttaccagcgagagctaccagcagggcgtgctgagcgccaccatcctgtacgagatcctgctgggcaaggccaccctgtacgccgtgctggtgtctgccctggtgctgatggctatggtcaagcggaaggacagccggggaagggccaagcgatctggatctggagcaacaaacttctcactactcaaacaagcaggtgacgtggaggagaatcccgggcctactagtatggactggatttggcgcatccttttccttgtcggcgctgctaccggcgcccattccgggccccaggttcagctgcaagagtctggcggaggacttgctcaagctggcggaagcctgagactgtcttgtgccgcctctggcagaaccttcagcatgggctggtttagacaggcccctggcaaagagagagagttcgtcgccgccatcacatacagcggcggcagcccttactacgcctcttctgtcagaggccggttcaccatcagccgggacaacgccaagaacaccgtgtacctccagatgaacagcctgaagccagaggacaccgccgtgtactactgtgccgccaatccaacctacggcagcgactggaatgccgagaattggggccagggcacccaagtgacagtgtctagtggatccggcggcggaggatctggcggaggcggatctgggggcggaggctctttcgaacaagttcagcttcaacagcctggcgctgagctggtcaaacctggcgcttctgtgaagatgagctgcaaagccagcggctacgccttcagcagctactggatcaactggatgaagcagaaacccggccagggactcgaatggatcggccaaatctatcccggcgacggcaccgagaacagattcagcgtgaacttccagaaggccgccaagagcttcagcctgaagatcagcgatagccagctgggcgacgccgccatgtacttttgcgcttatagaagcgccgtgaacgcccggctgatgtttggagatggcacacagctggtggtcaagcccaacacgcgtatccagaaccctgatcctgccgtgtaccagctgcgggatagcaagagcagcgacaagagcgtgtgtctgttcaccgacttcgacagccagaccaacgtgtcccagagcaaggactccgacgtgtacatcaccgataagtgcgtgctggacatgcggagcatggacttcaagagcaactccgccgtggcctggtccaacaagtccgatttcgcctgcgccaacgccttcaacaacagcattatccccgaggacacattcttcccaagccccgagagcagctgcgacgtgaagctggtggaaaagagcttcgagacagacaccaacctgaacttccagaacctgagcgtgatcggcttcagaatcctgctgctgaaagtggccggctttaacctgctgatgaccctgcggctgtggtccagccgcgccaagagaagcggatctggcgtgaagcagaccctgaatttcgacctgctgaagctggctggcgacgtggaatccaacccaggcccttctagaggcgggatccacaccatggctacctacgaggtgctgtgcgaggtggcaagaaagctgggcaccgacgacagagaagtggtgctgttcctgctgaacgtgttcatccctcagcctacactggcccagctgatcggtgcactgagagccctgaaagaggaaggccggctgacctttcctctgctggccgaatgcctgttcagagccggaagaagggatctgctgcgggacctgctgcatctggaccccagatttctggaaagacacctggccggcaccatgagctacttcagcccttaccagctgaccgtgctgcacgttgacggcgaactgtgcgccagagatattcggagcctgatcttcctgagcaaggacaccatcggcagccggtctacccctcagacatttctgcactgggtgtactgcatggaaaacctggacctgctcggccccacagatgtggatgccctgatgtccatgctgagaagcctgagcagagtggacctccagagacaggtgcagacactgatgggactgcacctgagcggacctagccacagccagcactacagacacacccct

SEQ ID NO: 3874 - DNA, 2919 bp, Artificial Sequence
  Synthetic Polynucloetide
atggccttaccagtgaccgccttgctcctgccgctggccttgctgctccacgccgccaggccgggcatgcggactgaagacctcccaaaggctgtggtgttcctggagcctcaatggtacagggtgctggagaaggacagtgtgactctgaagtgccagggagcctactcccctgaggacaattccacacagtggtttcacaatgagagcctcatctcaagccaggcctccagctacttcattgacgctgccacagtggacgacagtggagagtacaggtgccagacaaacctctccaccctcagtgacccggtgcagctagaagtccatatcggctggctgttgctccaggcccctcggtgggtgttcaaggaggaagaccctattcacctgaggtgtcacagctggaagaacactgctctgcataaggtcacatatttacagaatggcaaaggcaggaagtattttcatcataattctgacttctacattccaaaagccacactcaaagacagcggctcctacttctgcagggggcttgttgggagtaaaaatgtgtcttcagagactgtgaacatcaccatcactcaaggtttggcagtgtcaaccatctcatcattctttccacctggctaccaaggtaccggcggaggcggatctggcggcggaggtagcggtggcggaggatctgaattcgaagccgacatctaccagacacctagatacctggtcatcggcaccggcaagaaaatcaccctggaatgcagccagacaatgggccacgacaagatgtactggtatcagcaggaccccggcatggaactgcacctgatccactacagctacggcgtgaacagcaccgagaagggcgatctgtctagcgagagcaccgtgtccagaatcagaaccgagcacttcccactgacactggaaagcgccagacctagccacaccagccagtacctgtgtgcctcttctgaggccagaggactggccgagttcaccgacacacagtatttcggccctggcaccagactgaccgttctcgagatccagaaccctgatcctgccgtgtaccagctgcgggatagcaagagcagcgacaagagcgtgtgtctgttcaccgacttcgacagccagaccaacgtgtcccagagcaaggactccgacgtgtacatcaccgataagtgcgtgctggacatgcggagcatggacttcaagagcaactccgccgtggcctggtccaacaagtccgatttcgcctgcgccaacgccttcaacaacagcattatccccgaggacacattcttcccaagccccgagagcagctgcgacgtgaagctggtggaaaagagcttcgagacagacaccaacctgaacttccagaacctgagcgtgatcggcttcagaatcctgctgctgaaagtggccggctttaacctgctgatgaccctgcggctgtggtccagccgcgccaagagaagcggatctggcgtgaagcagaccctgaatttcgacctgctgaagctggctggcgacgtggaatccaacccaggccctactagtatggactggatttggcgcatccttttccttgtcggcgctgctaccggcgcccattccgggccccaggttcagctgcaagagtctggcggaggacttgctcaagctggcggaagcctgagactgtcttgtgccgcctctggcagaaccttcagcatgggctggtttagacaggcccctggcaaagagagagagttcgtcgccgccatcacatacagcggcggcagcccttactacgcctcttctgtcagaggccggttcaccatcagccgggacaacgccaagaacaccgtgtacctccagatgaacagcctgaagccagaggacaccgccgtgtactactgtgccgccaatccaacctacggcagcgactggaatgccgagaattggggccagggcacccaagtgacagtgtctagtggatccggcggcggaggatctggcggaggcggatctgggggcggaggctctttcgaacaagttcagcttcaacagcctggcgctgagctggtcaaacctggcgcttctgtgaagatgagctgcaaagccagcggctacgccttcagcagctactggatcaactggatgaagcagaaacccggccagggactcgaatggatcggccaaatctatcccggcgacggcaccgagaacagattcagcgtgaacttccagaaggccgccaagagcttcagcctgaagatcagcgatagccagctgggcgacgccgccatgtacttttgcgcttatagaagcgccgtgaacgcccggctgatgtttggagatggcacacagctggtggtcaagcccaacacgcgtgaggacctgaagaacgtgttcccacctgaggtggccgtgttcgagcctagcgaggccgagatcagccacacccagaaagccaccctcgtgtgcctggctaccggcttctaccccgaccatgtggaactgtcttggtgggtcaacggcaaagaggtgcacagcggcgtgtgtaccgacccccagccactgaaagaacagcccgccctgaacgacagccggtactgcctgagcagcagactgagagtgtccgccaccttctggcagaacccccggaaccacttcagatgccaggtgcagttctacggcctgagcgagaacgacgagtggacccaggacagagccaagcccgtgacccagatcgtgtctgccgaagcctggggcagagccgattgcggctttaccagcgagagctaccagcagggcgtgctgagcgccaccatcctgtacgagatcctgctgggcaaggccaccctgtacgccgtgctggtgtctgccctggtgctgatggctatggtcaagcggaaggacagccgggga

SEQ ID NO: 3875 - DNA, 3585 bp, Artificial Sequence
  Synthetic Polynucloetide
atggccttaccagtgaccgccttgctcctgccgctggccttgctgctccacgccgccaggccgggcatgcggactgaagacctcccaaaggctgtggtgttcctggagcctcaatggtacagggtgctggagaaggacagtgtgactctgaagtgccagggagcctactcccctgaggacaattccacacagtggtttcacaatgagagcctcatctcaagccaggcctccagctacttcattgacgctgccacagtggacgacagtggagagtacaggtgccagacaaacctctccaccctcagtgacccggtgcagctagaagtccatatcggctggctgttgctccaggcccctcggtgggtgttcaaggaggaagaccctattcacctgaggtgtcacagctggaagaacactgctctgcataaggtcacatatttacagaatggcaaaggcaggaagtattttcatcataattctgacttctacattccaaaagccacactcaaagacagcggctcctacttctgcagggggcttgttgggagtaaaaatgtgtcttcagagactgtgaacatcaccatcactcaaggtttggcagtgtcaaccatctcatcattctttccacctggctaccaaggtaccggcggaggcggatctggcggcggaggtagcggtggcggaggatctgaattcgaagccgacatctaccagacacctagatacctggtcatcggcaccggcaagaaaatcaccctggaatgcagccagacaatgggccacgacaagatgtactggtatcagcaggaccccggcatggaactgcacctgatccactacagctacggcgtgaacagcaccgagaagggcgatctgtctagcgagagcaccgtgtccagaatcagaaccgagcacttcccactgacactggaaagcgccagacctagccacaccagccagtacctgtgtgcctcttctgaggccagaggactggccgagttcaccgacacacagtatttcggccctggcaccagactgaccgttctcgagatccagaaccctgatcctgccgtgtaccagctgcgggatagcaagagcagcgacaagagcgtgtgtctgttcaccgacttcgacagccagaccaacgtgtcccagagcaaggactccgacgtgtacatcaccgataagtgcgtgctggacatgcggagcatggacttcaagagcaactccgccgtggcctggtccaacaagtccgatttcgcctgcgccaacgccttcaacaacagcattatccccgaggacacattcttcccaagccccgagagcagctgcgacgtgaagctggtggaaaagagcttcgagacagacaccaacctgaacttccagaacctgagcgtgatcggcttcagaatcctgctgctgaaagtggccggctttaacctgctgatgaccctgcggctgtggtccagccgcgccaagagaagcggatctggcgtgaagcagaccctgaatttcgacctgctgaagctggctggcgacgtggaatccaacccaggccctactagtatggactggatttggcgcatccttttccttgtcggcgctgctaccggcgcccattccgggccccaggttcagctgcaagagtctggcggaggacttgctcaagctggcggaagcctgagactgtcttgtgccgcctctggcagaaccttcagcatgggctggtttagacaggcccctggcaaagagagagagttcgtcgccgccatcacatacagcggcggcagcccttactacgcctcttctgtcagaggccggttcaccatcagccgggacaacgccaagaacaccgtgtacctccagatgaacagcctgaagccagaggacaccgccgtgtactactgtgccgccaatccaacctacggcagcgactggaatgccgagaattggggccagggcacccaagtgacagtgtctagtggatccggcggcggaggatctggcggaggcggatctgggggcggaggctctttcgaacaagttcagcttcaacagcctggcgctgagctggtcaaacctggcgcttctgtgaagatgagctgcaaagccagcggctacgccttcagcagctactggatcaactggatgaagcagaaacccggccagggactcgaatggatcggccaaatctatcccggcgacggcaccgagaacagattcagcgtgaacttccagaaggccgccaagagcttcagcctgaagatcagcgatagccagctgggcgacgccgccatgtacttttgcgcttatagaagcgccgtgaacgcccggctgatgtttggagatggcacacagctggtggtcaagcccaacacgcgtgaggacctgaagaacgtgttcccacctgaggtggccgtgttcgagcctagcgaggccgagatcagccacacccagaaagccaccctcgtgtgcctggctaccggcttctaccccgaccatgtggaactgtcttggtgggtcaacggcaaagaggtgcacagcggcgtgtgtaccgacccccagccactgaaagaacagcccgccctgaacgacagccggtactgcctgagcagcagactgagagtgtccgccaccttctggcagaacccccggaaccacttcagatgccaggtgcagttctacggcctgagcgagaacgacgagtggacccaggacagagccaagcccgtgacccagatcgtgtctgccgaagcctggggcagagccgattgcggctttaccagcgagagctaccagcagggcgtgctgagcgccaccatcctgtacgagatcctgctgggcaaggccaccctgtacgccgtgctggtgtctgccctggtgctgatggctatggtcaagcggaaggacagccggggaagggccaagcgatctggatctggagcaacaaacttctcactactcaaacaagcaggtgacgtggaggagaatcccgggccttctagaggcgggatccacaccatggctacctacgaggtgctgtgcgaggtggcaagaaagctgggcaccgacgacagagaagtggtgctgttcctgctgaacgtgttcatccctcagcctacactggcccagctgatcggtgcactgagagccctgaaagaggaaggccggctgacctttcctctgctggccgaatgcctgttcagagccggaagaagggatctgctgcgggacctgctgcatctggaccccagatttctggaaagacacctggccggcaccatgagctacttcagcccttaccagctgaccgtgctgcacgttgacggcgaactgtgcgccagagatattcggagcctgatcttcctgagcaaggacaccatcggcagccggtctacccctcagacatttctgcactgggtgtactgcatggaaaacctggacctgctcggccccacagatgtggatgccctgatgtccatgctgagaagcctgagcagagtggacctccagagacaggtgcagacactgatgggactgcacctgagcggacctagccacagccagcactacagacacacccct

SEQ ID NO: 3876 - DNA, 3609 bp, Artificial Sequence
  Synthetic Polynucloetide
atggccttaccagtgaccgccttgctcctgccgctggccttgctgctccacgccgccaggccgggcatgcggactgaagacctcccaaaggctgtggtgttcctggagcctcaatggtacagggtgctggagaaggacagtgtgactctgaagtgccagggagcctactcccctgaggacaattccacacagtggtttcacaatgagagcctcatctcaagccaggcctccagctacttcattgacgctgccacagtggacgacagtggagagtacaggtgccagacaaacctctccaccctcagtgacccggtgcagctagaagtccatatcggctggctgttgctccaggcccctcggtgggtgttcaaggaggaagaccctattcacctgaggtgtcacagctggaagaacactgctctgcataaggtcacatatttacagaatggcaaaggcaggaagtattttcatcataattctgacttctacattccaaaagccacactcaaagacagcggctcctacttctgcagggggcttgttgggagtaaaaatgtgtcttcagagactgtgaacatcaccatcactcaaggtttggcagtgtcaaccatctcatcattctttccacctggctaccaaggtaccggcggaggcggatctggcggcggaggtagcggtggcggaggatctgaattcgaagccgacatctaccagacacctagatacctggtcatcggcaccggcaagaaaatcaccctggaatgcagccagacaatgggccacgacaagatgtactggtatcagcaggaccccggcatggaactgcacctgatccactacagctacggcgtgaacagcaccgagaagggcgatctgtctagcgagagcaccgtgtccagaatcagaaccgagcacttcccactgacactggaaagcgccagacctagccacaccagccagtacctgtgtgcctcttctgaggccagaggactggccgagttcaccgacacacagtatttcggccctggcaccagactgaccgttctcgaggacctgaagaacgtgttcccacctgaggtggccgtgttcgagcctagcgaggccgagatcagccacacccagaaagccaccctcgtgtgcctggctaccggcttctaccccgaccatgtggaactgtcttggtgggtcaacggcaaagaggtgcacagcggcgtgtctaccgacccccagccactgaaagaacagcccgccctgaacgacagccggtactgcctgagcagcagactgagagtgtccgccaccttctggcagaacccccggaaccacttcagatgccaggtgcagttctacggcctgagcgagaacgacgagtggacccaggacagagccaagcccgtgacccagatcgtgtctgccgaagcctggggcagagccgattgcggctttaccagcgagagctaccagcagggcgtgctgagcgccaccatcctgtacgagatcctgctgggcaaggccaccctgtacgccgtgctggtgtctgccctggtgctgatggctatggtcaagcggaaggacagccggggaagggccaagcgatctggatctggagcaacaaacttctcactactcaaacaagcaggtgacgtggaggagaatcccgggcctactagtatggactggatttggcgcatccttttccttgtcggcgctgctaccggcgcccattccgggccccaggttcagctgcaagagtctggcggaggacttgctcaagctggcggaagcctgagactgtcttgtgccgcctctggcagaaccttcagcatgggctggtttagacaggcccctggcaaagagagagagttcgtcgccgccatcacatacagcggcggcagcccttactacgcctcttctgtcagaggccggttcaccatcagccgggacaacgccaagaacaccgtgtacctccagatgaacagcctgaagccagaggacaccgccgtgtactactgtgccgccaatccaacctacggcagcgactggaatgccgagaattggggccagggcacccaagtgacagtgtctagtggatccggcggcggaggatctggcggaggcggatctgggggcggaggctctttcgaacaagttcagcttcaacagcctggcgctgagctggtcaaacctggcgcttctgtgaagatgagctgcaaagccagcggctacgccttcagcagctactggatcaactggatgaagcagaaacccggccagggactcgaatggatcggccaaatctatcccggcgacggcaccgagaacagattcagcgtgaacttccagaaggccgccaagagcttcagcctgaagatcagcgatagccagctgggcgacgccgccatgtacttttgcgcttatagaagcgccgtgaacgcccggctgatgtttggagatggcacacagctggtggtcaagcccaacacgcgtatccagaaccctgatcctgccgtgtaccagctgcgggatagcaagagcagcgacaagagcgtgtgtctgttcaccgacttcgacagccagaccaacgtgtcccagagcaaggactccgacgtgtacatcaccgataagaccgtgctggacatgcggagcatggacttcaagagcaactccgccgtggcctggtccaacaagtccgatttcgcctgcgccaacgccttcaacaacagcattatccccgaggacacattcttcccaagccccgagagcagctgcgacgtgaagctggtggaaaagagcttcgagacagacaccaacctgaacttccagaacctgagcgtgatcggcttcagaatcctgctgctgaaagtggccggctttaacctgctgatgaccctgcggctgtggtccagccgcgccaagagaagcggatctggcgtgaagcagaccctgaatttcgacctgctgaagctggctggcgacgtggaatccaacccaggcccttctagaggccatatgaccgagtacaagcccacggtgcgcctcgccacccgcgacgacgtccccagggccgtacgcaccctcgccgccgcgttcgccgactaccccgccacgcgccacaccgtcgatccggaccgccacatcgagcgggtcaccgagctgcaagaactcttcctcacgcgcgtcgggctcgacatcggcaaggtgtgggtcgcggacgacggcgccgcggtggcggtctggaccacgccggagagcgtcgaagcgggggcggtgttcgccgagatcggcccgcgcatggccgagttgagcggttcccggctggccgcgcagcaacagatggaaggcctcctggcgccgcaccggcccaaggagcccgcgtggttcctggccaccgtcggcgtctcgcccgaccaccagggcaagggtctgggcagcgccgtcgtgctccccggagtggaggcggccgagcgcgccggggtgcccgccttcctggagacctccgcgccccgcaacctccccttctacgagcggctcggcttcaccgtcaccgccgacgtcgaggtgcccgaaggaccgcgcacctggtgcatgacccgcaagcccggtgcctga

SEQ ID NO: 3877 - DNA, 3855 bp, Artificial Sequence
  Synthetic Polynucloetide
atggccttaccagtgaccgccttgctcctgccgctggccttgctgctccacgccgccaggccgggcatgcggactgaagacctcccaaaggctgtggtgttcctggagcctcaatggtacagggtgctggagaaggacagtgtgactctgaagtgccagggagcctactcccctgaggacaattccacacagtggtttcacaatgagagcctcatctcaagccaggcctccagctacttcattgacgctgccacagtggacgacagtggagagtacaggtgccagacaaacctctccaccctcagtgacccggtgcagctagaagtccatatcggctggctgttgctccaggcccctcggtgggtgttcaaggaggaagaccctattcacctgaggtgtcacagctggaagaacactgctctgcataaggtcacatatttacagaatggcaaaggcaggaagtattttcatcataattctgacttctacattccaaaagccacactcaaagacagcggctcctacttctgcagggggcttgttgggagtaaaaatgtgtcttcagagactgtgaacatcaccatcactcaaggtttggcagtgtcaaccatctcatcattctttccacctggctaccaaggtaccggcggaggcggatctggcggcggaggtagcggtggcggaggatctgaattcgaagccgacatctaccagacacctagatacctggtcatcggcaccggcaagaaaatcaccctggaatgcagccagacaatgggccacgacaagatgtactggtatcagcaggaccccggcatggaactgcacctgatccactacagctacggcgtgaacagcaccgagaagggcgatctgtctagcgagagcaccgtgtccagaatcagaaccgagcacttcccactgacactggaaagcgccagacctagccacaccagccagtacctgtgtgcctcttctgaggccagaggactggccgagttcaccgacacacagtatttcggccctggcaccagactgaccgttctcgaggacctgaagaacgtgttcccacctgaggtggccgtgttcgagcctagcgaggccgagatcagccacacccagaaagccaccctcgtgtgcctggctaccggcttctaccccgaccatgtggaactgtcttggtgggtcaacggcaaagaggtgcacagcggcgtgtctaccgacccccagccactgaaagaacagcccgccctgaacgacagccggtactgcctgagcagcagactgagagtgtccgccaccttctggcagaacccccggaaccacttcagatgccaggtgcagttctacggcctgagcgagaacgacgagtggacccaggacagagccaagcccgtgacccagatcgtgtctgccgaagcctggggcagagccgattgcggctttaccagcgagagctaccagcagggcgtgctgagcgccaccatcctgtacgagatcctgctgggcaaggccaccctgtacgccgtgctggtgtctgccctggtgctgatggctatggtcaagcggaaggacagccggggaagggccaagcgatctggatctggagcaacaaacttctcactactcaaacaagcaggtgacgtggaggagaatcccgggcctactagtatggactggatttggcgcatccttttccttgtcggcgctgctaccggcgcccattccgggccccaggttcagctgcaagagtctggcggaggacttgctcaagctggcggaagcctgagactgtcttgtgccgcctctggcagaaccttcagcatgggctggtttagacaggcccctggcaaagagagagagttcgtcgccgccatcacatacagcggcggcagcccttactacgcctcttctgtcagaggccggttcaccatcagccgggacaacgccaagaacaccgtgtacctccagatgaacagcctgaagccagaggacaccgccgtgtactactgtgccgccaatccaacctacggcagcgactggaatgccgagaattggggccagggcacccaagtgacagtgtctagtggatccggcggcggaggatctggcggaggcggatctgggggcggaggctctttcgaacaagttcagcttcaacagcctggcgctgagctggtcaaacctggcgcttctgtgaagatgagctgcaaagccagcggctacgccttcagcagctactggatcaactggatgaagcagaaacccggccagggactcgaatggatcggccaaatctatcccggcgacggcaccgagaacagattcagcgtgaacttccagaaggccgccaagagcttcagcctgaagatcagcgatagccagctgggcgacgccgccatgtacttttgcgcttatagaagcgccgtgaacgcccggctgatgtttggagatggcacacagctggtggtcaagcccaacacgcgtgagcagaaactgatctcggaagaggatgggagcggcaccccattcccttctctggcccctcccatcatgctgctggtggacggcaagcagcagatggtggtcgtgtgcctggtgctggatgtggccccacctggactggacagccccatctggtttagcgccggcaatggctctgccctggacgcctttacctacggcccaagccctgccaccgatggcacctggacaaatctggcccacctgagcctgcccagcgaggaactggcttcttgggagcctctcgtgtgccacacaggacctggcgctgagggacacagcagatccacccagcctatgcacctgtctggcgaggccagcaccgccagaacctgtcctcaggaacctctgagaggcacccctggcggagcactgtggctgggagtgctgagactgctgctgttcaagctgctgctgtttgacctgctgctgacctgctcctgtctgtgcgatcctgccggccctctgccttctcctgccaccaccacaagactgagagccctgggcagccacagactgcaccctgccacagagacaggcggcagagaggccacaagcagccctagaccccagcccagagacagaagatggggcgataccccccctggcagaaagcctggatctccagtccgcgccaagagaagcggatctggcgtgaagcagaccctgaatttcgacctgctgaagctggctggcgacgtggaatccaacccaggcccttctagaggccatatgaccgagtacaagcccacggtgcgcctcgccacccgcgacgacgtccccagggccgtacgcaccctcgccgccgcgttcgccgactaccccgccacgcgccacaccgtcgatccggaccgccacatcgagcgggtcaccgagctgcaagaactcttcctcacgcgcgtcgggctcgacatcggcaaggtgtgggtcgcggacgacggcgccgcggtggcggtctggaccacgccggagagcgtcgaagcgggggcggtgttcgccgagatcggcccgcgcatggccgagttgagcggttcccggctggccgcgcagcaacagatggaaggcctcctggcgccgcaccggcccaaggagcccgcgtggttcctggccaccgtcggcgtctcgcccgaccaccagggcaagggtctgggcagcgccgtcgtgctccccggagtggaggcggccgagcgcgccggggtgcccgccttcctggagacctccgcgccccgcaacctccccttctacgagcggctcggcttcaccgtcaccgccgacgtcgaggtgcccgaaggaccgcgcacctggtgcatgacccgcaagcccggtgcctga

SEQ ID NO: 3878 - DNA, 3720 bp, Artificial Sequence
  Synthetic Polynucloetide
atggccttaccagtgaccgccttgctcctgccgctggccttgctgctccacgccgccaggccgggcatgcggactgaagacctcccaaaggctgtggtgttcctggagcctcaatggtacagggtgctggagaaggacagtgtgactctgaagtgccagggagcctactcccctgaggacaattccacacagtggtttcacaatgagagcctcatctcaagccaggcctccagctacttcattgacgctgccacagtggacgacagtggagagtacaggtgccagacaaacctctccaccctcagtgacccggtgcagctagaagtccatatcggctggctgttgctccaggcccctcggtgggtgttcaaggaggaagaccctattcacctgaggtgtcacagctggaagaacactgctctgcataaggtcacatatttacagaatggcaaaggcaggaagtattttcatcataattctgacttctacattccaaaagccacactcaaagacagcggctcctacttctgcagggggcttgttgggagtaaaaatgtgtcttcagagactgtgaacatcaccatcactcaaggtttggcagtgtcaaccatctcatcattctttccacctggctaccaaggtaccggcggaggcggatctggcggcggaggtagcggtggcggaggatctgaattcgaagccgacatctaccagacacctagatacctggtcatcggcaccggcaagaaaatcaccctggaatgcagccagacaatgggccacgacaagatgtactggtatcagcaggaccccggcatggaactgcacctgatccactacagctacggcgtgaacagcaccgagaagggcgatctgtctagcgagagcaccgtgtccagaatcagaaccgagcacttcccactgacactggaaagcgccagacctagccacaccagccagtacctgtgtgcctcttctgaggccagaggactggccgagttcaccgacacacagtatttcggccctggcaccagactgaccgttctcgaggggaaaccaattcccaaccctcttctgggactggattcaaccggcagcggcgacaagcagctggacgccgacgtgtcccccaagcctaccatcttcctgccctctatcgccgagacaaagctccagaaggccggcacctacctgtgcctgctggaaaagttcttcccagatgtgattaagatccactggcaggaaaagaagtccaacaccatcctgggcagccaggaaggcaacaccatgaagaccaacgacacctacatgaagttcagctggctgaccgtgcccgagaagtccctggacaaagaacacagatgcatcgtgcggcacgaaaacaacaagaacggcgtggaccaggaaatcatcttcccacccatcaagaccgatgtgattacaatggaccccaaggacaactgctccaaggacgccaacgataccctgctgctccagctgaccaacaccagcgcctactacatgtacttgttgctgctgctgaagtccgtggtgtacttcgccatcatcacatgctgcctgctgcggagaaccgccttctgctgcaacggcgagaagtctagggccaagcgatctggatctggagcaacaaacttctcactactcaaacaagcaggtgacgtggaggagaatcccgggcctactagtatggactggatttggcgcatccttttccttgtcggcgctgctaccggcgcccattccgggccccaggttcagctgcaagagtctggcggaggacttgctcaagctggcggaagcctgagactgtcttgtgccgcctctggcagaaccttcagcatgggctggtttagacaggcccctggcaaagagagagagttcgtcgccgccatcacatacagcggcggcagcccttactacgcctcttctgtcagaggccggttcaccatcagccgggacaacgccaagaacaccgtgtacctccagatgaacagcctgaagccagaggacaccgccgtgtactactgtgccgccaatccaacctacggcagcgactggaatgccgagaattggggccagggcacccaagtgacagtgtctagtggatccggcggcggaggatctggcggaggcggatctgggggcggaggctctttcgaacaagttcagcttcaacagcctggcgctgagctggtcaaacctggcgcttctgtgaagatgagctgcaaagccagcggctacgccttcagcagctactggatcaactggatgaagcagaaacccggccagggactcgaatggatcggccaaatctatcccggcgacggcaccgagaacagattcagcgtgaacttccagaaggccgccaagagcttcagcctgaagatcagcgatagccagctgggcgacgccgccatgtacttttgcgcttatagaagcgccgtgaacgcccggctgatgtttggagatggcacacagctggtggtcaagcccaacacgcgtgagcagaaactgatctcggaagaggatgggagcggcagccagcctcacaccaagcccagcgtgttcgtgatgaagaacggcaccaacgtggcctgcctcgtgaaagagttctaccccaaggacatcaggatcaacctggtgtccagcaagaagatcaccgagttcgaccccgccatcgtgatctcccccagcggcaagtacaacgccgtgaagctggggaagtacgaggacagcaacagcgtgacctgctccgtgcagcacgacaacaagaccgtgcacagcaccgactttgaagtgaaaaccgactccaccgaccacgtgaagcccaaagagacagagaacaccaagcagcccagcaagagctgccacaagcccaaggccatcgtgcacaccgagaaagtgaacatgatgagcctgaccgtgctgggcctgcggatgctgttcgccaaaaccgtggccgtgaacttcctgctgaccgccaagctgttcttcctccgcgccaagagaagcggatctggcgtgaagcagaccctgaatttcgacctgctgaagctggctggcgacgtggaatccaacccaggcccttctagaggccatatgaccgagtacaagcccacggtgcgcctcgccacccgcgacgacgtccccagggccgtacgcaccctcgccgccgcgttcgccgactaccccgccacgcgccacaccgtcgatccggaccgccacatcgagcgggtcaccgagctgcaagaactcttcctcacgcgcgtcgggctcgacatcggcaaggtgtgggtcgcggacgacggcgccgcggtggcggtctggaccacgccggagagcgtcgaagcgggggcggtgttcgccgagatcggcccgcgcatggccgagttgagcggttcccggctggccgcgcagcaacagatggaaggcctcctggcgccgcaccggcccaaggagcccgcgtggttcctggccaccgtcggcgtctcgcccgaccaccagggcaagggtctgggcagcgccgtcgtgctccccggagtggaggcggccgagcgcgccggggtgcccgccttcctggagacctccgcgccccgcaacctccccttctacgagcggctcggcttcaccgtcaccgccgacgtcgaggtgcccgaaggaccgcgcacctggtgcatgacccgcaagcccggtgcctga

SEQ ID NO: 3879 - DNA, 2931 bp, Artificial Sequence
  Synthetic Polynucloetide
atggccttaccagtgaccgccttgctcctgccgctggccttgctgctccacgccgccaggccgggcatgcggactgaagacctcccaaaggctgtggtgttcctggagcctcaatggtacagggtgctggagaaggacagtgtgactctgaagtgccagggagcctactcccctgaggacaattccacacagtggtttcacaatgagagcctcatctcaagccaggcctccagctacttcattgacgctgccacagtggacgacagtggagagtacaggtgccagacaaacctctccaccctcagtgacccggtgcagctagaagtccatatcggctggctgttgctccaggcccctcggtgggtgttcaaggaggaagaccctattcacctgaggtgtcacagctggaagaacactgctctgcataaggtcacatatttacagaatggcaaaggcaggaagtattttcatcataattctgacttctacattccaaaagccacactcaaagacagcggctcctacttctgcagggggcttgttgggagtaaaaatgtgtcttcagagactgtgaacatcaccatcactcaaggtttggcagtgtcaaccatctcatcattctttccacctggctaccaaggtaccggcggaggcggatctggcggcggaggtagcggtggcggaggatctgaattcgaagccgacatctaccagacacctagatacctggtcatcggcaccggcaagaaaatcaccctggaatgcagccagacaatgggccacgacaagatgtactggtatcagcaggaccccggcatggaactgcacctgatccactacagctacggcgtgaacagcaccgagaagggcgatctgtctagcgagagcaccgtgtccagaatcagaaccgagcacttcccactgacactggaaagcgccagacctagccacaccagccagtacctgtgtgcctcttctgaggccagaggactggccgagttcaccgacacacagtatttcggccctggcaccagactgaccgttctcgagagccagcctcacaccaagcccagcgtgttcgtgatgaagaacggcaccaacgtggcctgcctcgtgaaagagttctaccccaaggacatcaggatcaacctggtgtccagcaagaagatcaccgagttcgaccccgccatcgtgatctcccccagcggcaagtacaacgccgtgaagctggggaagtacgaggacagcaacagcgtgacctgctccgtgcagcacgacaacaagaccgtgcacagcaccgactttgaagtgaaaaccgactccaccgaccacgtgaagcccaaagagacagagaacaccaagcagcccagcaagagctgccacaagcccaaggccatcgtgcacaccgagaaagtgaacatgatgagcctgaccgtgctgggcctgcggatgctgttcgccaaaaccgtggccgtgaacttcctgctgaccgccaagctgttcttcctcagggccaagcgatctggatctggagcaacaaacttctcactactcaaacaagcaggtgacgtggaggagaatcccgggcctactagtatggactggatttggcgcatccttttccttgtcggcgctgctaccggcgcccattccgggccccaggttcagctgcaagagtctggcggaggacttgctcaagctggcggaagcctgagactgtcttgtgccgcctctggcagaaccttcagcatgggctggtttagacaggcccctggcaaagagagagagttcgtcgccgccatcacatacagcggcggcagcccttactacgcctcttctgtcagaggccggttcaccatcagccgggacaacgccaagaacaccgtgtacctccagatgaacagcctgaagccagaggacaccgccgtgtactactgtgccgccaatccaacctacggcagcgactggaatgccgagaattggggccagggcacccaagtgacagtgtctagtggatccggcggcggaggatctggcggaggcggatctgggggcggaggctctttcgaacaagttcagcttcaacagcctggcgctgagctggtcaaacctggcgcttctgtgaagatgagctgcaaagccagcggctacgccttcagcagctactggatcaactggatgaagcagaaacccggccagggactcgaatggatcggccaaatctatcccggcgacggcaccgagaacagattcagcgtgaacttccagaaggccgccaagagcttcagcctgaagatcagcgatagccagctgggcgacgccgccatgtacttttgcgcttatagaagcgccgtgaacgcccggctgatgtttggagatggcacacagctggtggtcaagcccaacacgcgtgacaagcagctggacgccgacgtgtcccccaagcctaccatcttcctgccctctatcgccgagacaaagctccagaaggccggcacctacctgtgcctgctggaaaagttcttcccagatgtgattaagatccactggcaggaaaagaagtccaacaccatcctgggcagccaggaaggcaacaccatgaagaccaacgacacctacatgaagttcagctggctgaccgtgcccgagaagtccctggacaaagaacacagatgcatcgtgcggcacgaaaacaacaagaacggcgtggaccaggaaatcatcttcccacccatcaagaccgatgtgattacaatggaccccaaggacaactgctccaaggacgccaacgataccctgctgctccagctgaccaacaccagcgcctactacatgtacttgttgctgctgctgaagtccgtggtgtacttcgccatcatcacatgctgcctgctgcggagaaccgccttctgctgcaacggcgagaagtct

SEQ ID NO: 3880 - DNA, 4140 bp, Artificial Sequence
  Synthetic Polynucloetide
atggccttaccagtgaccgccttgctcctgccgctggccttgctgctccacgccgccaggccgggcatgcggactgaagacctcccaaaggctgtggtgttcctggagcctcaatggtacagggtgctggagaaggacagtgtgactctgaagtgccagggagcctactcccctgaggacaattccacacagtggtttcacaatgagagcctcatctcaagccaggcctccagctacttcattgacgctgccacagtggacgacagtggagagtacaggtgccagacaaacctctccaccctcagtgacccggtgcagctagaagtccatatcggctggctgttgctccaggcccctcggtgggtgttcaaggaggaagaccctattcacctgaggtgtcacagctggaagaacactgctctgcataaggtcacatatttacagaatggcaaaggcaggaagtattttcatcataattctgacttctacattccaaaagccacactcaaagacagcggctcctacttctgcagggggcttgttgggagtaaaaatgtgtcttcagagactgtgaacatcaccatcactcaaggtttggcagtgtcaaccatctcatcattctttccacctggctaccaaggtaccggcggaggcggatctggcggcggaggtagcggtggcggaggatctgaattcgaagccgacatctaccagacacctagatacctggtcatcggcaccggcaagaaaatcaccctggaatgcagccagacaatgggccacgacaagatgtactggtatcagcaggaccccggcatggaactgcacctgatccactacagctacggcgtgaacagcaccgagaagggcgatctgtctagcgagagcaccgtgtccagaatcagaaccgagcacttcccactgacactggaaagcgccagacctagccacaccagccagtacctgtgtgcctcttctgaggccagaggactggccgagttcaccgacacacagtatttcggccctggcaccagactgaccgttggacagcctaaggccaatcctaccgtgacactgttccctccaagcagcgaagaactccaggccaacaaggccacacttgtgtgcctgatctccgacttctaccctggggctgtgacagtggcttggaaggccgatggatctcctgtgaaagccggcgtggaaaccaccaagccatccaagcagagcaacaacaaatacgccgccagctcctacctgagcctgacacctgagcagtggaagtcccacagatcctacagctgccaagtgacccacgaaggcagcaccgtggaaaagacagtggcccctacagagtgcagcggatcccagagcttcggcctgctggaccccaagctgtgctacctgctggatggcatcctgttcatctacggcgtgatcctgaccgccctgttcctgagagtgaagttcagcagaagcgccgacgcccctgcctaccagcagggacagaaccaactgtacaacgagctgaacctgggcagacgggaagagtacgacgtgctggacaagcggagaggcagggaccctgagatgggcggaaagccccagcggagaaagaacccccaggaaggactgtataacgaactccagaaagacaagatggccgaagcctacagcgagatcggcatgaagggcgagcggagaagaggcaagggccacgatggcctgtaccagggcctgagcaccgccaccaaggacacctatgacgccctgcacatgcaggccctgcctccaagaagggccaagcgatctggatctggagcaacaaacttctcactactcaaacaagcaggtgacgtggaggagaatcccgggcctactagtatggactggatttggcgcatccttttccttgtcggcgctgctaccggcgcccattccgggccccaggttcagctgcaagagtctggcggaggacttgctcaagctggcggaagcctgagactgtcttgtgccgcctctggcagaaccttcagcatgggctggtttagacaggcccctggcaaagagagagagttcgtcgccgccatcacatacagcggcggcagcccttactacgcctcttctgtcagaggccggttcaccatcagccgggacaacgccaagaacaccgtgtacctccagatgaacagcctgaagccagaggacaccgccgtgtactactgtgccgccaatccaacctacggcagcgactggaatgccgagaattggggccagggcacccaagtgacagtgtctagtggatccggcggcggaggatctggcggaggcggatctgggggcggaggctctttcgaacaagttcagcttcaacagcctggcgctgagctggtcaaacctggcgcttctgtgaagatgagctgcaaagccagcggctacgccttcagcagctactggatcaactggatgaagcagaaacccggccagggactcgaatggatcggccaaatctatcccggcgacggcaccgagaacagattcagcgtgaacttccagaaggccgccaagagcttcagcctgaagatcagcgatagccagctgggcgacgccgccatgtacttttgcgcttatagaagcgccgtgaacgcccggctgatgtttggagatggcacacagctggtggtcaagcccaacgcctctacaaagggaccctccgtgtttcctctggctcccagcagcaagtctacaagcggaggaacagccgctctgggctgcctggtcaaggattactttcccgagcctgtgaccgtgtcctggaatagcggagcactgacaagcggcgtgcacacctttccagccgtgctgcaaagcagcggcctgtactctctgagcagcgtggtcacagtgcctagctctagcctgggcacccagacctacatctgcaatgtgaaccacaagcctagcaacaccaaggtggacaagagagtggaacccaagagctgtggtacccagagttttgggttgttggaccctaaattgtgctatctgttggacggaatcctgttcatttacggagtgatcctgaccgcattgttcctgcgggttaagttttccagatccgcagacgcacccgcttaccaacaagggcagaaccaactctacaatgaacttaatttggggcggagggaagagtacgacgttctggacaaaaggaggggacgagatcccgagatgggcggaaagcctcagcgaaggaagaatccgcaagaggggctttataacgaactccagaaagataaaatggcagaagcctatagtgagattgggatgaagggagaaaggaggaggggtaaaggtcacgatgggttgtaccaaggattgagcacagccactaaagatacctatgatgcgctccacatgcaggccctgccgccaagacgcgccaagagaagcggatctggcgtgaagcagaccctgaatttcgacctgctgaagctggctggcgacgtggaatccaacccaggcccttctagaggccatatgaccgagtacaagcccacggtgcgcctcgccacccgcgacgacgtccccagggccgtacgcaccctcgccgccgcgttcgccgactaccccgccacgcgccacaccgtcgatccggaccgccacatcgagcgggtcaccgagctgcaagaactcttcctcacgcgcgtcgggctcgacatcggcaaggtgtgggtcgcggacgacggcgccgcggtggcggtctggaccacgccggagagcgtcgaagcgggggcggtgttcgccgagatcggcccgcgcatggccgagttgagcggttcccggctggccgcgcagcaacagatggaaggcctcctggcgccgcaccggcccaaggagcccgcgtggttcctggccaccgtcggcgtctcgcccgaccaccagggcaagggtctgggcagcgccgtcgtgctccccggagtggaggcggccgagcgcgccggggtgcccgccttcctggagacctccgcgccccgcaacctccccttctacgagcggctcggcttcaccgtcaccgccgacgtcgaggtgcccgaaggaccgcgcacctggtgcatgacccgcaagcccggtgcctga

SEQ ID NO: 3881 - DNA, 3495 bp, Artificial Sequence
  Synthetic Polynucloetide
atggccttaccagtgaccgccttgctcctgccgctggccttgctgctccacgccgccaggccgggcatgcggactgaagacctcccaaaggctgtggtgttcctggagcctcaatggtacagggtgctggagaaggacagtgtgactctgaagtgccagggagcctactcccctgaggacaattccacacagtggtttcacaatgagagcctcatctcaagccaggcctccagctacttcattgacgctgccacagtggacgacagtggagagtacaggtgccagacaaacctctccaccctcagtgacccggtgcagctagaagtccatatcggctggctgttgctccaggcccctcggtgggtgttcaaggaggaagaccctattcacctgaggtgtcacagctggaagaacactgctctgcataaggtcacatatttacagaatggcaaaggcaggaagtattttcatcataattctgacttctacattccaaaagccacactcaaagacagcggctcctacttctgcagggggcttgttgggagtaaaaatgtgtcttcagagactgtgaacatcaccatcactcaaggtttggcagtgtcaaccatctcatcattctttccacctggctaccaaggtaccggcggaggcggatctggcggcggaggtagcggtggcggaggatctgaattcgaagccgacatctaccagacacctagatacctggtcatcggcaccggcaagaaaatcaccctggaatgcagccagacaatgggccacgacaagatgtactggtatcagcaggaccccggcatggaactgcacctgatccactacagctacggcgtgaacagcaccgagaagggcgatctgtctagcgagagcaccgtgtccagaatcagaaccgagcacttcccactgacactggaaagcgccagacctagccacaccagccagtacctgtgtgcctcttctgaggccagaggactggccgagttcaccgacacacagtatttcggccctggcaccagactgaccgttctcgaggacctgaagaacgtgttcccacctgaggtggccgtgttcgagcctagcgaggccgagatcagccacacccagaaagccaccctcgtgtgcctggctaccggcttctaccccgaccatgtggaactgtcttggtgggtcaacggcaaagaggtgcacagcggcgtgtctaccgacccccagccactgaaagaacagcccgccctgaacgacagccggtactgcctgagcagcagactgagagtgtccgccaccttctggcagaacccccggaaccacttcagatgccaggtgcagttctacggcctgagcgagaacgacgagtggacccaggacagagccaagcccgtgacccagatcgtgtctgccgaagcctggggcagagccgattgcggatcccagagcttcggcctgctggaccccaagctgtgctacctgctggatggcatcctgttcatctacggcgtgatcctgaccgccctgttcctgagagtgaagttcagcagaagcgccgacgcccctgcctaccagcagggacagaaccaactgtacaacgagctgaacctgggcagacgggaagagtacgacgtgctggacaagcggagaggcagggaccctgagatgggcggaaagccccagcggagaaagaacccccaggaaggactgtataacgaactccagaaagacaagatggccgaagcctacagcgagatcggcatgaagggcgagcggagaagaggcaagggccacgatggcctgtaccagggcctgagcaccgccaccaaggacacctatgacgccctgcacatgcaggccctgcctccaagaagggccaagcgatctggatctggagcaacaaacttctcactactcaaacaagcaggtgacgtggaggagaatcccgggcctactagtatggactggatttggcgcatccttttccttgtcggcgctgctaccggcgcccattccgggccccaggttcagctgcaagagtctggcggaggacttgctcaagctggcggaagcctgagactgtcttgtgccgcctctggcagaaccttcagcatgggctggtttagacaggcccctggcaaagagagagagttcgtcgccgccatcacatacagcggcggcagcccttactacgcctcttctgtcagaggccggttcaccatcagccgggacaacgccaagaacaccgtgtacctccagatgaacagcctgaagccagaggacaccgccgtgtactactgtgccgccaatccaacctacggcagcgactggaatgccgagaattggggccagggcacccaagtgacagtgtctagtggatccggcggcggaggatctggcggaggcggatctgggggcggaggctctttcgaacaagttcagcttcaacagcctggcgctgagctggtcaaacctggcgcttctgtgaagatgagctgcaaagccagcggctacgccttcagcagctactggatcaactggatgaagcagaaacccggccagggactcgaatggatcggccaaatctatcccggcgacggcaccgagaacagattcagcgtgaacttccagaaggccgccaagagcttcagcctgaagatcagcgatagccagctgggcgacgccgccatgtacttttgcgcttatagaagcgccgtgaacgcccggctgatgtttggagatggcacacagctggtggtcaagcccaacacgcgtatccagaaccctgatcctgccgtgtaccagctgcgggatagcaagagcagcgacaagagcgtgtgtctgttcaccgacttcgacagccagaccaacgtgtcccagagcaaggactccgacgtgtacatcaccgataagaccgtgctggacatgcggagcatggacttcaagagcaactccgccgtggcctggtccaacaagtccgatttcgcctgcgccaacgccttcaacaacagcattatccccgaggacacattcttcccaagccccgagagcagctgcggtacccagagttttgggttgttggaccctaaattgtgctatctgttggacggaatcctgttcatttacggagtgatcctgaccgcattgttcctgcgggttaagttttccagatccgcagacgcacccgcttaccaacaagggcagaaccaactctacaatgaacttaatttggggcggagggaagagtacgacgttctggacaaaaggaggggacgagatcccgagatgggcggaaagcctcagcgaaggaagaatccgcaagaggggctttataacgaactccagaaagataaaatggcagaagcctatagtgagattgggatgaagggagaaaggaggaggggtaaaggtcacgatgggttgtaccaaggattgagcacagccactaaagatacctatgatgcgctccacatgcaggccctgccgccaaga

SEQ ID NO: 3882 - DNA, 3495 bp, Artificial Sequence
  Synthetic Polynucloetide
atggccttaccagtgaccgccttgctcctgccgctggccttgctgctccacgccgccaggccgggcatgcggactgaagacctcccaaaggctgtggtgttcctggagcctcaatggtacagggtgctggagaaggacagtgtgactctgaagtgccagggagcctactcccctgaggacaattccacacagtggtttcacaatgagagcctcatctcaagccaggcctccagctacttcattgacgctgccacagtggacgacagtggagagtacaggtgccagacaaacctctccaccctcagtgacccggtgcagctagaagtccatatcggctggctgttgctccaggcccctcggtgggtgttcaaggaggaagaccctattcacctgaggtgtcacagctggaagaacactgctctgcataaggtcacatatttacagaatggcaaaggcaggaagtattttcatcataattctgacttctacattccaaaagccacactcaaagacagcggctcctacttctgcagggggcttgttgggagtaaaaatgtgtcttcagagactgtgaacatcaccatcactcaaggtttggcagtgtcaaccatctcatcattctttccacctggctaccaaggtaccggcggaggcggatctggcggcggaggtagcggtggcggaggatctgaattcgaagccgacatctaccagacacctagatacctggtcatcggcaccggcaagaaaatcaccctggaatgcagccagacaatgggccacgacaagatgtactggtatcagcaggaccccggcatggaactgcacctgatccactacagctacggcgtgaacagcaccgagaagggcgatctgtctagcgagagcaccgtgtccagaatcagaaccgagcacttcccactgacactggaaagcgccagacctagccacaccagccagtacctgtgtgcctcttctgaggccagaggactggccgagttcaccgacacacagtatttcggccctggcaccagactgaccgttctcgaggacctgaagaacgtgttcccacctgaggtggccgtgttcgagcctagcaaggccgagatcgcccacacccagaaagccaccctcgtgtgcctggctaccggcttctaccccgaccatgtggaactgtcttggtgggtcaacggcaaagaggtgcacagcggcgtgtgtaccgacccccagccactgaaagaacagcccgccctgaacgacagccggtactgcctgagcagcagactgagagtgtccgccaccttctggcagaacccccggaaccacttcagatgccaggtgcagttctacggcctgagcgagaacgacgagtggacccaggacagagccaagcccgtgacccagatcgtgtctgccgaagcctggggcagagccgattgcggatcccagagcttcggcctgctggaccccaagctgtgctacctgctggatggcatcctgttcatctacggcgtgatcctgaccgccctgttcctgagagtgaagttcagcagaagcgccgacgcccctgcctaccagcagggacagaaccaactgtacaacgagctgaacctgggcagacgggaagagtacgacgtgctggacaagcggagaggcagggaccctgagatgggcggaaagccccagcggagaaagaacccccaggaaggactgtataacgaactccagaaagacaagatggccgaagcctacagcgagatcggcatgaagggcgagcggagaagaggcaagggccacgatggcctgtaccagggcctgagcaccgccaccaaggacacctatgacgccctgcacatgcaggccctgcctccaagaagggccaagcgatctggatctggagcaacaaacttctcactactcaaacaagcaggtgacgtggaggagaatcccgggcctactagtatggactggatttggcgcatccttttccttgtcggcgctgctaccggcgcccattccgggccccaggttcagctgcaagagtctggcggaggacttgctcaagctggcggaagcctgagactgtcttgtgccgcctctggcagaaccttcagcatgggctggtttagacaggcccctggcaaagagagagagttcgtcgccgccatcacatacagcggcggcagcccttactacgcctcttctgtcagaggccggttcaccatcagccgggacaacgccaagaacaccgtgtacctccagatgaacagcctgaagccagaggacaccgccgtgtactactgtgccgccaatccaacctacggcagcgactggaatgccgagaattggggccagggcacccaagtgacagtgtctagtggatccggcggcggaggatctggcggaggcggatctgggggcggaggctctttcgaacaagttcagcttcaacagcctggcgctgagctggtcaaacctggcgcttctgtgaagatgagctgcaaagccagcggctacgccttcagcagctactggatcaactggatgaagcagaaacccggccagggactcgaatggatcggccaaatctatcccggcgacggcaccgagaacagattcagcgtgaacttccagaaggccgccaagagcttcagcctgaagatcagcgatagccagctgggcgacgccgccatgtacttttgcgcttatagaagcgccgtgaacgcccggctgatgtttggagatggcacacagctggtggtcaagcccaacacgcgtatccagaaccctgatcctgccgtgtaccagctgcgggatagcaagagcagcgacaagagcgtgtgtctgttcaccgacttcgacagccagaccaacgtgtcccagagcaaggactccgacgtgtacatcaccgataagtgcgtgctggacatgcggagcatggacttcaagagcaactccgccgtggcctggtccaacaagtccgatttcgcctgcgccaacgccttcaacaacagcattatccccgaggacacattcttcccaagcagcgacgtgccctgcggtacccagagttttgggttgttggaccctaaattgtgctatctgttggacggaatcctgttcatttacggagtgatcctgaccgcattgttcctgcgggttaagttttccagatccgcagacgcacccgcttaccaacaagggcagaaccaactctacaatgaacttaatttggggcggagggaagagtacgacgttctggacaaaaggaggggacgagatcccgagatgggcggaaagcctcagcgaaggaagaatccgcaagaggggctttataacgaactccagaaagataaaatggcagaagcctatagtgagattgggatgaagggagaaaggaggaggggtaaaggtcacgatgggttgtaccaaggattgagcacagccactaaagatacctatgatgcgctccacatgcaggccctgccgccaaga

SEQ ID NO: 3883 - DNA, 3708 bp, Artificial Sequence
  Synthetic Polynucloetide
atggccttaccagtgaccgccttgctcctgccgctggccttgctgctccacgccgccaggccgggcatgcggactgaagacctcccaaaggctgtggtgttcctggagcctcaatggtacagggtgctggagaaggacagtgtgactctgaagtgccagggagcctactcccctgaggacaattccacacagtggtttcacaatgagagcctcatctcaagccaggcctccagctacttcattgacgctgccacagtggacgacagtggagagtacaggtgccagacaaacctctccaccctcagtgacccggtgcagctagaagtccatatcggctggctgttgctccaggcccctcggtgggtgttcaaggaggaagaccctattcacctgaggtgtcacagctggaagaacactgctctgcataaggtcacatatttacagaatggcaaaggcaggaagtattttcatcataattctgacttctacattccaaaagccacactcaaagacagcggctcctacttctgcagggggcttgttgggagtaaaaatgtgtcttcagagactgtgaacatcaccatcactcaaggtttggcagtgtcaaccatctcatcattctttccacctggctaccaaggtaccggcggaggcggatctggcggcggaggtagcggtggcggaggatctgaattcgaagccgacatctaccagacacctagatacctggtcatcggcaccggcaagaaaatcaccctggaatgcagccagacaatgggccacgacaagatgtactggtatcagcaggaccccggcatggaactgcacctgatccactacagctacggcgtgaacagcaccgagaagggcgatctgtctagcgagagcaccgtgtccagaatcagaaccgagcacttcccactgacactggaaagcgccagacctagccacaccagccagtacctgtgtgcctcttctgaggccagaggactggccgagttcaccgacacacagtatttcggccctggcaccagactgaccgttctcgaggggaaaccaattcccaaccctcttctgggactggattcaaccggcagcggcgaggacctgaagaacgtgttcccacctgaggtggccgtgttcgagcctagcgaggccgagatcagccacacccagaaagccaccctcgtgtgcctggctaccggcttctaccccgaccatgtggaactgtcttggtgggtcaacggcaaagaggtgcacagcggcgtgtctaccgacccccagccactgaaagaacagcccgccctgaacgacagccggtactgcctgagcagcagactgagagtgtccgccaccttctggcagaacccccggaaccacttcagatgccaggtgcagttctacggcctgagcgagaacgacgagtggacccaggacagagccaagcccgtgacccagatcgtgtctgccgaagcctggggcagagccgattgcggatcccagagcttcggcctgctggaccccaagctgtgctacctgctggatggcatcctgttcatctacggcgtgatcctgaccgccctgttcctgagagtgaagttcagcagaagcgccgacgcccctgcctaccagcagggacagaaccaactgtacaacgagctgaacctgggcagacgggaagagtacgacgtgctggacaagcggagaggcagggaccctgagatgggcggaaagccccagcggagaaagaacccccaggaaggactgtataacgaactccagaaagacaagatggccgaagcctacagcgagatcggcatgaagggcgagcggagaagaggcaagggccacgatggcctgtaccagggcctgagcaccgccaccaaggacacctatgacgccctgcacatgcaggccctgcctccaagaagggccaagcgatctggatctggagcaacaaacttctcactactcaaacaagcaggtgacgtggaggagaatcccgggcctactagtatggactggatttggcgcatccttttccttgtcggcgctgctaccggcgcccattccgggccccaggttcagctgcaagagtctggcggaggacttgctcaagctggcggaagcctgagactgtcttgtgccgcctctggcagaaccttcagcatgggctggtttagacaggcccctggcaaagagagagagttcgtcgccgccatcacatacagcggcggcagcccttactacgcctcttctgtcagaggccggttcaccatcagccgggacaacgccaagaacaccgtgtacctccagatgaacagcctgaagccagaggacaccgccgtgtactactgtgccgccaatccaacctacggcagcgactggaatgccgagaattggggccagggcacccaagtgacagtgtctagtggatccggcggcggaggatctggcggaggcggatctgggggcggaggctctttcgaacaagttcagcttcaacagcctggcgctgagctggtcaaacctggcgcttctgtgaagatgagctgcaaagccagcggctacgccttcagcagctactggatcaactggatgaagcagaaacccggccagggactcgaatggatcggccaaatctatcccggcgacggcaccgagaacagattcagcgtgaacttccagaaggccgccaagagcttcagcctgaagatcagcgatagccagctgggcgacgccgccatgtacttttgcgcttatagaagcgccgtgaacgcccggctgatgtttggagatggcacacagctggtggtcaagcccaacacgcgtgagcagaaactgatctcggaagaggatgggagcggcatccagaaccctgatcctgccgtgtaccagctgcgggatagcaagagcagcgacaagagcgtgtgtctgttcaccgacttcgacagccagaccaacgtgtcccagagcaaggactccgacgtgtacatcaccgataagaccgtgctggacatgcggagcatggacttcaagagcaactccgccgtggcctggtccaacaagtccgatttcgcctgcgccaacgccttcaacaacagcattatccccgaggacacattcttcccaagccccgagagcagctgcggtacccagagttttgggttgttggaccctaaattgtgctatctgttggacggaatcctgttcatttacggagtgatcctgaccgcattgttcctgaggagcaagcggtcacggctgctccacagcgattacatgaatatgacaccacgaagaccgggtcctactcgcaaacactaccaaccctacgcacctccccgcgactttgcagcgtaccgatctcgggttaagttttccagatccgcagacgcacccgcttaccaacaagggcagaaccaactctacaatgaacttaatttggggcggagggaagagtacgacgttctggacaaaaggaggggacgagatcccgagatgggcggaaagcctcagcgaaggaagaatccgcaagaggggctttataacgaactccagaaagataaaatggcagaagcctatagtgagattgggatgaagggagaaaggaggaggggtaaaggtcacgatgggttgtaccaaggattgagcacagccactaaagatacctatgatgcgctccacatgcaggccctgccgccaaga

SEQ ID NO: 3884 - DNA, 3831 bp, Artificial Sequence
  Synthetic Polynucloetide
atggccttaccagtgaccgccttgctcctgccgctggccttgctgctccacgccgccaggccgggcatgcggactgaagacctcccaaaggctgtggtgttcctggagcctcaatggtacagggtgctggagaaggacagtgtgactctgaagtgccagggagcctactcccctgaggacaattccacacagtggtttcacaatgagagcctcatctcaagccaggcctccagctacttcattgacgctgccacagtggacgacagtggagagtacaggtgccagacaaacctctccaccctcagtgacccggtgcagctagaagtccatatcggctggctgttgctccaggcccctcggtgggtgttcaaggaggaagaccctattcacctgaggtgtcacagctggaagaacactgctctgcataaggtcacatatttacagaatggcaaaggcaggaagtattttcatcataattctgacttctacattccaaaagccacactcaaagacagcggctcctacttctgcagggggcttgttgggagtaaaaatgtgtcttcagagactgtgaacatcaccatcactcaaggtttggcagtgtcaaccatctcatcattctttccacctggctaccaaggtaccggcggaggcggatctggcggcggaggtagcggtggcggaggatctgaattcgaagccgacatctaccagacacctagatacctggtcatcggcaccggcaagaaaatcaccctggaatgcagccagacaatgggccacgacaagatgtactggtatcagcaggaccccggcatggaactgcacctgatccactacagctacggcgtgaacagcaccgagaagggcgatctgtctagcgagagcaccgtgtccagaatcagaaccgagcacttcccactgacactggaaagcgccagacctagccacaccagccagtacctgtgtgcctcttctgaggccagaggactggccgagttcaccgacacacagtatttcggccctggcaccagactgaccgttctcgaggggaaaccaattcccaaccctcttctgggactggattcaaccggcagcggcgaggacctgaagaacgtgttcccacctgaggtggccgtgttcgagcctagcgaggccgagatcagccacacccagaaagccaccctcgtgtgcctggctaccggcttctaccccgaccatgtggaactgtcttggtgggtcaacggcaaagaggtgcacagcggcgtgtctaccgacccccagccactgaaagaacagcccgccctgaacgacagccggtactgcctgagcagcagactgagagtgtccgccaccttctggcagaacccccggaaccacttcagatgccaggtgcagttctacggcctgagcgagaacgacgagtggacccaggacagagccaagcccgtgacccagatcgtgtctgccgaagcctggggcagagccgattgcggatcccagagcttcggcctgctggaccccaagctgtgctacctgctggatggcatcctgttcatctacggcgtgatcctgaccgccctgttcctgaggagtaagaggagcaggctcctgcacagtgactacatgaacatgactccacgccgccccggacccacccgcaagcattaccagccctatgccccaccacgcgacttcgcagcctatcgctccagagtgaagttcagcagaagcgccgacgcccctgcctaccagcagggacagaaccaactgtacaacgagctgaacctgggcagacgggaagagtacgacgtgctggacaagcggagaggcagggaccctgagatgggcggaaagccccagcggagaaagaacccccaggaaggactgtataacgaactccagaaagacaagatggccgaagcctacagcgagatcggcatgaagggcgagcggagaagaggcaagggccacgatggcctgtaccagggcctgagcaccgccaccaaggacacctatgacgccctgcacatgcaggccctgcctccaagaagggccaagcgatctggatctggagcaacaaacttctcactactcaaacaagcaggtgacgtggaggagaatcccgggcctactagtatggactggatttggcgcatccttttccttgtcggcgctgctaccggcgcccattccgggccccaggttcagctgcaagagtctggcggaggacttgctcaagctggcggaagcctgagactgtcttgtgccgcctctggcagaaccttcagcatgggctggtttagacaggcccctggcaaagagagagagttcgtcgccgccatcacatacagcggcggcagcccttactacgcctcttctgtcagaggccggttcaccatcagccgggacaacgccaagaacaccgtgtacctccagatgaacagcctgaagccagaggacaccgccgtgtactactgtgccgccaatccaacctacggcagcgactggaatgccgagaattggggccagggcacccaagtgacagtgtctagtggatccggcggcggaggatctggcggaggcggatctgggggcggaggctctttcgaacaagttcagcttcaacagcctggcgctgagctggtcaaacctggcgcttctgtgaagatgagctgcaaagccagcggctacgccttcagcagctactggatcaactggatgaagcagaaacccggccagggactcgaatggatcggccaaatctatcccggcgacggcaccgagaacagattcagcgtgaacttccagaaggccgccaagagcttcagcctgaagatcagcgatagccagctgggcgacgccgccatgtacttttgcgcttatagaagcgccgtgaacgcccggctgatgtttggagatggcacacagctggtggtcaagcccaacacgcgtgagcagaaactgatctcggaagaggatgggagcggcatccagaaccctgatcctgccgtgtaccagctgcgggatagcaagagcagcgacaagagcgtgtgtctgttcaccgacttcgacagccagaccaacgtgtcccagagcaaggactccgacgtgtacatcaccgataagaccgtgctggacatgcggagcatggacttcaagagcaactccgccgtggcctggtccaacaagtccgatttcgcctgcgccaacgccttcaacaacagcattatccccgaggacacattcttcccaagccccgagagcagctgcggtacccagagttttgggttgttggaccctaaattgtgctatctgttggacggaatcctgttcatttacggagtgatcctgaccgcattgttcctgaggagcaagcggtcacggctgctccacagcgattacatgaatatgacaccacgaagaccgggtcctactcgcaaacactaccaaccctacgcacctccccgcgactttgcagcgtaccgatctcgggttaagttttccagatccgcagacgcacccgcttaccaacaagggcagaaccaactctacaatgaacttaatttggggcggagggaagagtacgacgttctggacaaaaggaggggacgagatcccgagatgggcggaaagcctcagcgaaggaagaatccgcaagaggggctttataacgaactccagaaagataaaatggcagaagcctatagtgagattgggatgaagggagaaaggaggaggggtaaaggtcacgatgggttgtaccaaggattgagcacagccactaaagatacctatgatgcgctccacatgcaggccctgccgccaaga

SEQ ID NO: 3885 - DNA, 3714 bp, Artificial Sequence
  Synthetic Polynucloetide
atggccttaccagtgaccgccttgctcctgccgctggccttgctgctccacgccgccaggccgggcatgcggactgaagacctcccaaaggctgtggtgttcctggagcctcaatggtacagggtgctggagaaggacagtgtgactctgaagtgccagggagcctactcccctgaggacaattccacacagtggtttcacaatgagagcctcatctcaagccaggcctccagctacttcattgacgctgccacagtggacgacagtggagagtacaggtgccagacaaacctctccaccctcagtgacccggtgcagctagaagtccatatcggctggctgttgctccaggcccctcggtgggtgttcaaggaggaagaccctattcacctgaggtgtcacagctggaagaacactgctctgcataaggtcacatatttacagaatggcaaaggcaggaagtattttcatcataattctgacttctacattccaaaagccacactcaaagacagcggctcctacttctgcagggggcttgttgggagtaaaaatgtgtcttcagagactgtgaacatcaccatcactcaaggtttggcagtgtcaaccatctcatcattctttccacctggctaccaaggtaccggcggaggcggatctggcggcggaggtagcggtggcggaggatctgaattcgaagccgacatctaccagacacctagatacctggtcatcggcaccggcaagaaaatcaccctggaatgcagccagacaatgggccacgacaagatgtactggtatcagcaggaccccggcatggaactgcacctgatccactacagctacggcgtgaacagcaccgagaagggcgatctgtctagcgagagcaccgtgtccagaatcagaaccgagcacttcccactgacactggaaagcgccagacctagccacaccagccagtacctgtgtgcctcttctgaggccagaggactggccgagttcaccgacacacagtatttcggccctggcaccagactgaccgttctcgaggggaaaccaattcccaaccctcttctgggactggattcaaccggcagcggcgaggacctgaagaacgtgttcccacctgaggtggccgtgttcgagcctagcgaggccgagatcagccacacccagaaagccaccctcgtgtgcctggctaccggcttctaccccgaccatgtggaactgtcttggtgggtcaacggcaaagaggtgcacagcggcgtgtctaccgacccccagccactgaaagaacagcccgccctgaacgacagccggtactgcctgagcagcagactgagagtgtccgccaccttctggcagaacccccggaaccacttcagatgccaggtgcagttctacggcctgagcgagaacgacgagtggacccaggacagagccaagcccgtgacccagatcgtgtctgccgaagcctggggcagagccgattgcggatcccagagcttcggcctgctggaccccaagctgtgctacctgctggatggcatcctgttcatctacggcgtgatcctgaccgccctgttcctgagagtgaagttcagcagaagcgccgacgcccctgcctaccagcagggacagaaccaactgtacaacgagctgaacctgggcagacgggaagagtacgacgtgctggacaagcggagaggcagggaccctgagatgggcggaaagccccagcggagaaagaacccccaggaaggactgtataacgaactccagaaagacaagatggccgaagcctacagcgagatcggcatgaagggcgagcggagaagaggcaagggccacgatggcctgtaccagggcctgagcaccgccaccaaggacacctatgacgccctgcacatgcaggccctgcctccaagaagggccaagcgatctggatctggagcaacaaacttctcactactcaaacaagcaggtgacgtggaggagaatcccgggcctactagtatggactggatttggcgcatccttttccttgtcggcgctgctaccggcgcccattccgggccccaggttcagctgcaagagtctggcggaggacttgctcaagctggcggaagcctgagactgtcttgtgccgcctctggcagaaccttcagcatgggctggtttagacaggcccctggcaaagagagagagttcgtcgccgccatcacatacagcggcggcagcccttactacgcctcttctgtcagaggccggttcaccatcagccgggacaacgccaagaacaccgtgtacctccagatgaacagcctgaagccagaggacaccgccgtgtactactgtgccgccaatccaacctacggcagcgactggaatgccgagaattggggccagggcacccaagtgacagtgtctagtggatccggcggcggaggatctggcggaggcggatctgggggcggaggctctttcgaacaagttcagcttcaacagcctggcgctgagctggtcaaacctggcgcttctgtgaagatgagctgcaaagccagcggctacgccttcagcagctactggatcaactggatgaagcagaaacccggccagggactcgaatggatcggccaaatctatcccggcgacggcaccgagaacagattcagcgtgaacttccagaaggccgccaagagcttcagcctgaagatcagcgatagccagctgggcgacgccgccatgtacttttgcgcttatagaagcgccgtgaacgcccggctgatgtttggagatggcacacagctggtggtcaagcccaacacgcgtgagcagaaactgatctcggaagaggatctggggagcggcatccagaaccctgatcctgccgtgtaccagctgcgggatagcaagagcagcgacaagagcgtgtgtctgttcaccgacttcgacagccagaccaacgtgtcccagagcaaggactccgacgtgtacatcaccgataagaccgtgctggacatgcggagcatggacttcaagagcaactccgccgtggcctggtccaacaagtccgatttcgcctgcgccaacgccttcaacaacagcattatccccgaggacacattcttcccaagccccgagagcagctgcggtacccagagttttgggttgttggaccctaaattgtgctatctgttggacggaatcctgttcatttacggagtgatcctgaccgcattgttcctgaagagaggccggaagaagctgctgtacatcttcaagcagcctttcatgcggcccgtgcagaccacccaggaagaggacggctgctcctgccggttccccgaggaagaagaaggcggctgcgagctgcgggttaagttttccagatccgcagacgcacccgcttaccaacaagggcagaaccaactctacaatgaacttaatttggggcggagggaagagtacgacgttctggacaaaaggaggggacgagatcccgagatgggcggaaagcctcagcgaaggaagaatccgcaagaggggctttataacgaactccagaaagataaaatggcagaagcctatagtgagattgggatgaagggagaaaggaggaggggtaaaggtcacgatgggttgtaccaaggattgagcacagccactaaagatacctatgatgcgctccacatgcaggccctgccgccaaga

SEQ ID NO: 3886 - DNA, 3840 bp, Artificial Sequence
  Synthetic Polynucloetide
atggccttaccagtgaccgccttgctcctgccgctggccttgctgctccacgccgccaggccgggcatgcggactgaagacctcccaaaggctgtggtgttcctggagcctcaatggtacagggtgctggagaaggacagtgtgactctgaagtgccagggagcctactcccctgaggacaattccacacagtggtttcacaatgagagcctcatctcaagccaggcctccagctacttcattgacgctgccacagtggacgacagtggagagtacaggtgccagacaaacctctccaccctcagtgacccggtgcagctagaagtccatatcggctggctgttgctccaggcccctcggtgggtgttcaaggaggaagaccctattcacctgaggtgtcacagctggaagaacactgctctgcataaggtcacatatttacagaatggcaaaggcaggaagtattttcatcataattctgacttctacattccaaaagccacactcaaagacagcggctcctacttctgcagggggcttgttgggagtaaaaatgtgtcttcagagactgtgaacatcaccatcactcaaggtttggcagtgtcaaccatctcatcattctttccacctggctaccaaggtaccggcggaggcggatctggcggcggaggtagcggtggcggaggatctgaattcgaagccgacatctaccagacacctagatacctggtcatcggcaccggcaagaaaatcaccctggaatgcagccagacaatgggccacgacaagatgtactggtatcagcaggaccccggcatggaactgcacctgatccactacagctacggcgtgaacagcaccgagaagggcgatctgtctagcgagagcaccgtgtccagaatcagaaccgagcacttcccactgacactggaaagcgccagacctagccacaccagccagtacctgtgtgcctcttctgaggccagaggactggccgagttcaccgacacacagtatttcggccctggcaccagactgaccgttctcgaggggaaaccaattcccaaccctcttctgggactggattcaaccggcagcggcgaggacctgaagaacgtgttcccacctgaggtggccgtgttcgagcctagcgaggccgagatcagccacacccagaaagccaccctcgtgtgcctggctaccggcttctaccccgaccatgtggaactgtcttggtgggtcaacggcaaagaggtgcacagcggcgtgtctaccgacccccagccactgaaagaacagcccgccctgaacgacagccggtactgcctgagcagcagactgagagtgtccgccaccttctggcagaacccccggaaccacttcagatgccaggtgcagttctacggcctgagcgagaacgacgagtggacccaggacagagccaagcccgtgacccagatcgtgtctgccgaagcctggggcagagccgattgcggatcccagagcttcggcctgctggaccccaagctgtgctacctgctggatggcatcctgttcatctacggcgtgatcctgaccgccctgttcctgaaacggggcagaaagaaactcctgtatatattcaaacaaccatttatgagaccagtacaaactactcaagaggaagatggctgtagctgccgatttccagaagaagaagaaggaggatgtgaactgagagtgaagttcagcagaagcgccgacgcccctgcctaccagcagggacagaaccaactgtacaacgagctgaacctgggcagacgggaagagtacgacgtgctggacaagcggagaggcagggaccctgagatgggcggaaagccccagcggagaaagaacccccaggaaggactgtataacgaactccagaaagacaagatggccgaagcctacagcgagatcggcatgaagggcgagcggagaagaggcaagggccacgatggcctgtaccagggcctgagcaccgccaccaaggacacctatgacgccctgcacatgcaggccctgcctccaagaagggccaagcgatctggatctggagcaacaaacttctcactactcaaacaagcaggtgacgtggaggagaatcccgggcctactagtatggactggatttggcgcatccttttccttgtcggcgctgctaccggcgcccattccgggccccaggttcagctgcaagagtctggcggaggacttgctcaagctggcggaagcctgagactgtcttgtgccgcctctggcagaaccttcagcatgggctggtttagacaggcccctggcaaagagagagagttcgtcgccgccatcacatacagcggcggcagcccttactacgcctcttctgtcagaggccggttcaccatcagccgggacaacgccaagaacaccgtgtacctccagatgaacagcctgaagccagaggacaccgccgtgtactactgtgccgccaatccaacctacggcagcgactggaatgccgagaattggggccagggcacccaagtgacagtgtctagtggatccggcggcggaggatctggcggaggcggatctgggggcggaggctctttcgaacaagttcagcttcaacagcctggcgctgagctggtcaaacctggcgcttctgtgaagatgagctgcaaagccagcggctacgccttcagcagctactggatcaactggatgaagcagaaacccggccagggactcgaatggatcggccaaatctatcccggcgacggcaccgagaacagattcagcgtgaacttccagaaggccgccaagagcttcagcctgaagatcagcgatagccagctgggcgacgccgccatgtacttttgcgcttatagaagcgccgtgaacgcccggctgatgtttggagatggcacacagctggtggtcaagcccaacacgcgtgagcagaaactgatctcggaagaggatctggggagcggcatccagaaccctgatcctgccgtgtaccagctgcgggatagcaagagcagcgacaagagcgtgtgtctgttcaccgacttcgacagccagaccaacgtgtcccagagcaaggactccgacgtgtacatcaccgataagaccgtgctggacatgcggagcatggacttcaagagcaactccgccgtggcctggtccaacaagtccgatttcgcctgcgccaacgccttcaacaacagcattatccccgaggacacattcttcccaagccccgagagcagctgcggtacccagagttttgggttgttggaccctaaattgtgctatctgttggacggaatcctgttcatttacggagtgatcctgaccgcattgttcctgaagagaggccggaagaagctgctgtacatcttcaagcagcctttcatgcggcccgtgcagaccacccaggaagaggacggctgctcctgccggttccccgaggaagaagaaggcggctgcgagctgcgggttaagttttccagatccgcagacgcacccgcttaccaacaagggcagaaccaactctacaatgaacttaatttggggcggagggaagagtacgacgttctggacaaaaggaggggacgagatcccgagatgggcggaaagcctcagcgaaggaagaatccgcaagaggggctttataacgaactccagaaagataaaatggcagaagcctatagtgagattgggatgaagggagaaaggaggaggggtaaaggtcacgatgggttgtaccaaggattgagcacagccactaaagatacctatgatgcgctccacatgcaggccctgccgccaaga

SEQ ID NO: 3887 - DNA, 3513 bp, Artificial Sequence
  Synthetic Polynucloetide
atggccttaccagtgaccgccttgctcctgccgctggccttgctgctccacgccgccaggccgggcatgcggactgaagacctcccaaaggctgtggtgttcctggagcctcaatggtacagggtgctggagaaggacagtgtgactctgaagtgccagggagcctactcccctgaggacaattccacacagtggtttcacaatgagagcctcatctcaagccaggcctccagctacttcattgacgctgccacagtggacgacagtggagagtacaggtgccagacaaacctctccaccctcagtgacccggtgcagctagaagtccatatcggctggctgttgctccaggcccctcggtgggtgttcaaggaggaagaccctattcacctgaggtgtcacagctggaagaacactgctctgcataaggtcacatatttacagaatggcaaaggcaggaagtattttcatcataattctgacttctacattccaaaagccacactcaaagacagcggctcctacttctgcagggggcttgttgggagtaaaaatgtgtcttcagagactgtgaacatcaccatcactcaaggtttggcagtgtcaaccatctcatcattctttccacctggctaccaaggtaccggcggaggcggatctggcggcggaggtagcggtggcggaggatctgaattcgaagccgacatctaccagacacctagatacctggtcatcggcaccggcaagaaaatcaccctggaatgcagccagacaatgggccacgacaagatgtactggtatcagcaggaccccggcatggaactgcacctgatccactacagctacggcgtgaacagcaccgagaagggcgatctgtctagcgagagcaccgtgtccagaatcagaaccgagcacttcccactgacactggaaagcgccagacctagccacaccagccagtacctgtgtgcctcttctgaggccagaggactggccgagttcaccgacacacagtatttcggccctggcaccagactgaccgttctcgagcagagcttcggcctgctggaccccaagctgtgctacctgctggatggcatcctgttcatctacggcgtgatcctgaccgccctgttcctgagagtgaagttcagcagaagcgccgacgcccctgcctaccagcagggacagaaccaactgtacaacgagctgaacctgggcagacgggaagagtacgacgtgctggacaagcggagaggcagggaccctgagatgggcggaaagccccagcggagaaagaacccccaggaaggactgtataacgaactccagaaagacaagatggccgaagcctacagcgagatcggcatgaagggcgagcggagaagaggcaagggccacgatggcctgtaccagggcctgagcaccgccaccaaggacacctatgacgccctgcacatgcaggccctgcctccaagaagggccaagcgatctggatctggagcaacaaacttctcactactcaaacaagcaggtgacgtggaggagaatcccgggcctactagtatggactggatttggcgcatccttttccttgtcggcgctgctaccggcgcccattccgggccccaggttcagctgcaagagtctggcggaggacttgctcaagctggcggaagcctgagactgtcttgtgccgcctctggcagaaccttcagcatgggctggtttagacaggcccctggcaaagagagagagttcgtcgccgccatcacatacagcggcggcagcccttactacgcctcttctgtcagaggccggttcaccatcagccgggacaacgccaagaacaccgtgtacctccagatgaacagcctgaagccagaggacaccgccgtgtactactgtgccgccaatccaacctacggcagcgactggaatgccgagaattggggccagggcacccaagtgacagtgtctagtggatccggcggcggaggatctggcggaggcggatctgggggcggaggctctttcgaacaagttcagcttcaacagcctggcgctgagctggtcaaacctggcgcttctgtgaagatgagctgcaaagccagcggctacgccttcagcagctactggatcaactggatgaagcagaaacccggccagggactcgaatggatcggccaaatctatcccggcgacggcaccgagaacagattcagcgtgaacttccagaaggccgccaagagcttcagcctgaagatcagcgatagccagctgggcgacgccgccatgtacttttgcgcttatagaagcgccgtgaacgcccggctgatgtttggagatggcacacagctggtggtcaagcccaacacgcgtcagagttttgggttgttggaccctaaattgtgctatctgttggacggaatcctgttcatttacggagtgatcctgaccgcattgttcctgcgggttaagttttccagatccgcagacgcacccgcttaccaacaagggcagaaccaactctacaatgaacttaatttggggcggagggaagagtacgacgttctggacaaaaggaggggacgagatcccgagatgggcggaaagcctcagcgaaggaagaatccgcaagaggggctttataacgaactccagaaagataaaatggcagaagcctatagtgagattgggatgaagggagaaaggaggaggggtaaaggtcacgatgggttgtaccaaggattgagcacagccactaaagatacctatgatgcgctccacatgcaggccctgccgccaagacgcgccaagagaagcggatctggcgtgaagcagaccctgaatttcgacctgctgaagctggctggcgacgtggaatccaacccaggcccttctagaggccatatgaccgagtacaagcccacggtgcgcctcgccacccgcgacgacgtccccagggccgtacgcaccctcgccgccgcgttcgccgactaccccgccacgcgccacaccgtcgatccggaccgccacatcgagcgggtcaccgagctgcaagaactcttcctcacgcgcgtcgggctcgacatcggcaaggtgtgggtcgcggacgacggcgccgcggtggcggtctggaccacgccggagagcgtcgaagcgggggcggtgttcgccgagatcggcccgcgcatggccgagttgagcggttcccggctggccgcgcagcaacagatggaaggcctcctggcgccgcaccggcccaaggagcccgcgtggttcctggccaccgtcggcgtctcgcccgaccaccagggcaagggtctgggcagcgccgtcgtgctccccggagtggaggcggccgagcgcgccggggtgcccgccttcctggagacctccgcgccccgcaacctccccttctacgagcggctcggcttcaccgtcaccgccgacgtcgaggtgcccgaaggaccgcgcacctggtgcatgacccgcaagcccggtgcctga

SEQ ID NO: 3888 - DNA, 2985 bp, Artificial Sequence
  Synthetic Polynucloetide
atggccttaccagtgaccgccttgctcctgccgctggccttgctgctccacgccgccaggccgggcatgcggactgaagacctcccaaaggctgtggtgttcctggagcctcaatggtacagggtgctggagaaggacagtgtgactctgaagtgccagggagcctactcccctgaggacaattccacacagtggtttcacaatgagagcctcatctcaagccaggcctccagctacttcattgacgctgccacagtggacgacagtggagagtacaggtgccagacaaacctctccaccctcagtgacccggtgcagctagaagtccatatcggctggctgttgctccaggcccctcggtgggtgttcaaggaggaagaccctattcacctgaggtgtcacagctggaagaacactgctctgcataaggtcacatatttacagaatggcaaaggcaggaagtattttcatcataattctgacttctacattccaaaagccacactcaaagacagcggctcctacttctgcagggggcttgttgggagtaaaaatgtgtcttcagagactgtgaacatcaccatcactcaaggtttggcagtgtcaaccatctcatcattctttccacctggctaccaaggtaccggcggaggcggatctggcggcggaggtagcggtggcggaggatctgaattcgaagccgacatctaccagacacctagatacctggtcatcggcaccggcaagaaaatcaccctggaatgcagccagacaatgggccacgacaagatgtactggtatcagcaggaccccggcatggaactgcacctgatccactacagctacggcgtgaacagcaccgagaagggcgatctgtctagcgagagcaccgtgtccagaatcagaaccgagcacttcccactgacactggaaagcgccagacctagccacaccagccagtacctgtgtgcctcttctgaggccagaggactggccgagttcaccgacacacagtatttcggccctggcaccagactgaccgttctcgagggacagcctaaggccaatcctaccgtgacactgttccctccaagcagcgaagaactccaggccaacaaggccacacttgtgtgcctgatctccgacttctaccctggggctgtgacagtggcttggaaggccgatggatctcctgtgaaagccggcgtggaaaccaccaagccatccaagcagagcaacaacaaatacgccgccagctcctacctgagcctgacacctgagcagtggaagtcccacagatcctacagctgccaagtgacccacgaaggcagcaccgtggaaaagacagtggcccctacagagtgcagccccatcaagaccgatgtgattacaatggaccccaaggacaactgctccaaggacgccaacgataccctgctgctccagctgaccaacaccagcgcctactacatgtacttgttgctgctgctgaagtccgtggtgtacttcgccatcatcacatgctgcctgctgcggagaaccgccttctgctgcaacggcgagaagtctagggccaagcgatctggatctggagcaacaaacttctcactactcaaacaagcaggtgacgtggaggagaatcccgggcctactagtatggactggatttggcgcatccttttccttgtcggcgctgctaccggcgcccattccgggccccaggttcagctgcaagagtctggcggaggacttgctcaagctggcggaagcctgagactgtcttgtgccgcctctggcagaaccttcagcatgggctggtttagacaggcccctggcaaagagagagagttcgtcgccgccatcacatacagcggcggcagcccttactacgcctcttctgtcagaggccggttcaccatcagccgggacaacgccaagaacaccgtgtacctccagatgaacagcctgaagccagaggacaccgccgtgtactactgtgccgccaatccaacctacggcagcgactggaatgccgagaattggggccagggcacccaagtgacagtgtctagtggatccggcggcggaggatctggcggaggcggatctgggggcggaggctctttcgaacaagttcagcttcaacagcctggcgctgagctggtcaaacctggcgcttctgtgaagatgagctgcaaagccagcggctacgccttcagcagctactggatcaactggatgaagcagaaacccggccagggactcgaatggatcggccaaatctatcccggcgacggcaccgagaacagattcagcgtgaacttccagaaggccgccaagagcttcagcctgaagatcagcgatagccagctgggcgacgccgccatgtacttttgcgcttatagaagcgccgtgaacgcccggctgatgtttggagatggcacacagctggtggtcaagcccaacacgcgtgcctctacaaagggaccctccgtgtttcctctggctcccagcagcaagtctacaagcggaggaacagccgctctgggctgcctggtcaaggattactttcccgagcctgtgaccgtgtcctggaatagcggagcactgacaagcggcgtgcacacctttccagccgtgctgcaaagcagcggcctgtactctctgagcagcgtggtcacagtgcctagctctagcctgggcacccagacctacatctgcaatgtgaaccacaagcctagcaacaccaaggtggacaagagagtggaacccaagagctgtgaagtgaaaaccgactccaccgaccacgtgaagcccaaagagacagagaacaccaagcagcccagcaagagctgccacaagcccaaggccatcgtgcacaccgagaaagtgaacatgatgagcctgaccgtgctgggcctgcggatgctgttcgccaaaaccgtggccgtgaacttcctgctgaccgccaagctgttcttcctc

SEQ ID NO: 3889 - DNA, 2919 bp, Artificial Sequence
  Synthetic Polynucloetide
atggccttaccagtgaccgccttgctcctgccgctggccttgctgctccacgccgccaggccgggcatgcggactgaagacctcccaaaggctgtggtgttcctggagcctcaatggtacagggtgctggagaaggacagtgtgactctgaagtgccagggagcctactcccctgaggacaattccacacagtggtttcacaatgagagcctcatctcaagccaggcctccagctacttcattgacgctgccacagtggacgacagtggagagtacaggtgccagacaaacctctccaccctcagtgacccggtgcagctagaagtccatatcggctggctgttgctccaggcccctcggtgggtgttcaaggaggaagaccctattcacctgaggtgtcacagctggaagaacactgctctgcataaggtcacatatttacagaatggcaaaggcaggaagtattttcatcataattctgacttctacattccaaaagccacactcaaagacagcggctcctacttctgcagggggcttgttgggagtaaaaatgtgtcttcagagactgtgaacatcaccatcactcaaggtttggcagtgtcaaccatctcatcattctttccacctggctaccaaggtaccggcggaggcggatctggcggcggaggtagcggtggcggaggatctgaattcgaagccgacatctaccagacacctagatacctggtcatcggcaccggcaagaaaatcaccctggaatgcagccagacaatgggccacgacaagatgtactggtatcagcaggaccccggcatggaactgcacctgatccactacagctacggcgtgaacagcaccgagaagggcgatctgtctagcgagagcaccgtgtccagaatcagaaccgagcacttcccactgacactggaaagcgccagacctagccacaccagccagtacctgtgtgcctcttctgaggccagaggactggccgagttcaccgacacacagtatttcggccctggcaccagactgaccgttctcgagggacagcctaaggccaatcctaccgtgacactgttccctccaagcagcgaagaactccaggccaacaaggccacacttgtgtgcctgatctccgacttctaccctggggctgtgacagtggcttggaaggccgatggatctcctgtgaaagccggcgtggaaaccaccaagccatccaagcagagcaacaacaaatacgccgccagctcctacctgagcctgacacctgagcagtggaagtcccacagatcctacagctgccaagtgacccacgaaggcagcaccgtggaaaagacagtggcccctacagagtgcagcggcagagccgattgcggcatcaccagcgccagctaccaccagggcgtgctgagcgccaccatcctgtacgagatcctgctgggcaaggccaccctgtacgccgtgctggtgtctgccctggtgctgatggctatggtcaagcggaaggacagccggggaagggccaagcgatctggatctggagcaacaaacttctcactactcaaacaagcaggtgacgtggaggagaatcccgggcctactagtatggactggatttggcgcatccttttccttgtcggcgctgctaccggcgcccattccgggccccaggttcagctgcaagagtctggcggaggacttgctcaagctggcggaagcctgagactgtcttgtgccgcctctggcagaaccttcagcatgggctggtttagacaggcccctggcaaagagagagagttcgtcgccgccatcacatacagcggcggcagcccttactacgcctcttctgtcagaggccggttcaccatcagccgggacaacgccaagaacaccgtgtacctccagatgaacagcctgaagccagaggacaccgccgtgtactactgtgccgccaatccaacctacggcagcgactggaatgccgagaattggggccagggcacccaagtgacagtgtctagtggatccggcggcggaggatctggcggaggcggatctgggggcggaggctctttcgaacaagttcagcttcaacagcctggcgctgagctggtcaaacctggcgcttctgtgaagatgagctgcaaagccagcggctacgccttcagcagctactggatcaactggatgaagcagaaacccggccagggactcgaatggatcggccaaatctatcccggcgacggcaccgagaacagattcagcgtgaacttccagaaggccgccaagagcttcagcctgaagatcagcgatagccagctgggcgacgccgccatgtacttttgcgcttatagaagcgccgtgaacgcccggctgatgtttggagatggcacacagctggtggtcaagcccaacacgcgtgcctctacaaagggaccctccgtgtttcctctggctcccagcagcaagtctacaagcggaggaacagccgctctgggctgcctggtcaaggattactttcccgagcctgtgaccgtgtcctggaatagcggagcactgacaagcggcgtgcacacctttccagccgtgctgcaaagcagcggcctgtactctctgagcagcgtggtcacagtgcctagctctagcctgggcacccagacctacatctgcaatgtgaaccacaagcctagcaacaccaaggtggacaagagagtggaacccaagagctgtatccccgaggacacattcttcccaagcagcgacgtgccctgcgacgtgaagctggtggaaaagagcttcgagacagacaccaacctgaacttccagaacctgagcgtgatcggcttcagaatcctgctgctgaaagtggccggctttaacctgctgatgaccctgcggctgtggtccagc

SEQ ID NO: 3890 - DNA, 2919 bp, Artificial Sequence
  Synthetic Polynucloetide
atggccttaccagtgaccgccttgctcctgccgctggccttgctgctccacgccgccaggccgggcatgcggactgaagacctcccaaaggctgtggtgttcctggagcctcaatggtacagggtgctggagaaggacagtgtgactctgaagtgccagggagcctactcccctgaggacaattccacacagtggtttcacaatgagagcctcatctcaagccaggcctccagctacttcattgacgctgccacagtggacgacagtggagagtacaggtgccagacaaacctctccaccctcagtgacccggtgcagctagaagtccatatcggctggctgttgctccaggcccctcggtgggtgttcaaggaggaagaccctattcacctgaggtgtcacagctggaagaacactgctctgcataaggtcacatatttacagaatggcaaaggcaggaagtattttcatcataattctgacttctacattccaaaagccacactcaaagacagcggctcctacttctgcagggggcttgttgggagtaaaaatgtgtcttcagagactgtgaacatcaccatcactcaaggtttggcagtgtcaaccatctcatcattctttccacctggctaccaaggtaccggcggaggcggatctggcggcggaggtagcggtggcggaggatctgaattcgaagccgacatctaccagacacctagatacctggtcatcggcaccggcaagaaaatcaccctggaatgcagccagacaatgggccacgacaagatgtactggtatcagcaggaccccggcatggaactgcacctgatccactacagctacggcgtgaacagcaccgagaagggcgatctgtctagcgagagcaccgtgtccagaatcagaaccgagcacttcccactgacactggaaagcgccagacctagccacaccagccagtacctgtgtgcctcttctgaggccagaggactggccgagttcaccgacacacagtatttcggccctggcaccagactgaccgttctcgagggacagcctaaggccaatcctaccgtgacactgttccctccaagcagcgaagaactccaggccaacaaggccacacttgtgtgcctgatctccgacttctaccctggggctgtgacagtggcttggaaggccgatggatctcctgtgaaagccggcgtggaaaccaccaagccatccaagcagagcaacaacaaatacgccgccagctcctacctgagcctgacacctgagcagtggaagtcccacagatcctacagctgccaagtgacccacgaaggcagcaccgtggaaaagacagtggcccctacagagtgcagcggcagagccgattgcggctttaccagcgagagctaccagcagggcgtgctgagcgccaccatcctgtacgagatcctgctgggcaaggccaccctgtacgccgtgctggtgtctgccctggtgctgatggctatggtcaagcggaaggacagccggggaagggccaagcgatctggatctggagcaacaaacttctcactactcaaacaagcaggtgacgtggaggagaatcccgggcctactagtatggactggatttggcgcatccttttccttgtcggcgctgctaccggcgcccattccgggccccaggttcagctgcaagagtctggcggaggacttgctcaagctggcggaagcctgagactgtcttgtgccgcctctggcagaaccttcagcatgggctggtttagacaggcccctggcaaagagagagagttcgtcgccgccatcacatacagcggcggcagcccttactacgcctcttctgtcagaggccggttcaccatcagccgggacaacgccaagaacaccgtgtacctccagatgaacagcctgaagccagaggacaccgccgtgtactactgtgccgccaatccaacctacggcagcgactggaatgccgagaattggggccagggcacccaagtgacagtgtctagtggatccggcggcggaggatctggcggaggcggatctgggggcggaggctctttcgaacaagttcagcttcaacagcctggcgctgagctggtcaaacctggcgcttctgtgaagatgagctgcaaagccagcggctacgccttcagcagctactggatcaactggatgaagcagaaacccggccagggactcgaatggatcggccaaatctatcccggcgacggcaccgagaacagattcagcgtgaacttccagaaggccgccaagagcttcagcctgaagatcagcgatagccagctgggcgacgccgccatgtacttttgcgcttatagaagcgccgtgaacgcccggctgatgtttggagatggcacacagctggtggtcaagcccaacacgcgtgcctctacaaagggaccctccgtgtttcctctggctcccagcagcaagtctacaagcggaggaacagccgctctgggctgcctggtcaaggattactttcccgagcctgtgaccgtgtcctggaatagcggagcactgacaagcggcgtgcacacctttccagccgtgctgcaaagcagcggcctgtactctctgagcagcgtggtcacagtgcctagctctagcctgggcacccagacctacatctgcaatgtgaaccacaagcctagcaacaccaaggtggacaagagagtggaacccaagagctgtatccccgaggacacattcttcccaagccccgagagcagctgcgacgtgaagctggtggaaaagagcttcgagacagacaccaacctgaacttccagaacctgagcgtgatcggcttcagaatcctgctgctgaaagtggccggctttaacctgctgatgaccctgcggctgtggtccagc

SEQ ID NO: 3891 - DNA, 1902 bp, Artificial Sequence
  Synthetic Polynucloetide
atggactggatttggcgcatccttttccttgtcggcgctgctaccggcgcccattccgggccccaggttcagctgcaagagtctggcggaggacttgctcaagctggcggaagcctgagactgtcttgtgccgcctctggcagaaccttcagcatgggctggtttagacaggcccctggcaaagagagagagttcgtcgccgccatcacatacagcggcggcagcccttactacgcctcttctgtcagaggccggttcaccatcagccgggacaacgccaagaacaccgtgtacctccagatgaacagcctgaagccagaggacaccgccgtgtactactgtgccgccaatccaacctacggcagcgactggaatgccgagaattggggccagggcacccaagtgacagtgtctagtggatccggcggcggaggatctggcggaggcggatctgggggcggaggctctttcgaaatcctgaacgtggaacagagccctcagagcctgcatgtgcaagagggcgacagcaccaacttcacctgtagcttccccagcagcaacttctacgccctgcactggtacagatgggagacagccaagtctcccgaggcactgttcgtgatgaccctgaacggcgacgagaagaagaagggcagaatcagcgccacactgaacaccaaagagggctactcctacctgtacatcaagggcagccagcctgaggacagcgccacttatctgtgcgccagaaacaccggcaaccagttctactttggcaccggcacaagcctgacagtgatccccaacggcggaggcggaagtggaggcggaggatctggcggcggaggctctggcgtgacccagacacctaagttccaggtgctgaaaaccggccagagcatgaccctgcaatgcgcccaggacatgaaccatgagtacatgagctggtacaggcaggaccctggcatgggcctgagactgatccactattctgtcggagccggcatcaccgaccagggcgaagttcctaatggctacaacgtgtccagaagcaccaccgaggacttcccactgagactgctgtctgccgctcctagccagaccagcgtgtacttttgcgccagcagctttcagaccggcgcttcctacggctacacattcggctctggcaccagactgaccgtgacgcgtgagcagaaactgatctcggaagaggatctggcgaagcccaccacgacgccagcgccgcgaccaccaacaccggcgcccaccatcgcgtcgcagcccctgtccctgcgcccagaggcgtgccggccagcggcggggggcgcagtgcacacgagggggctggacttcgcctgtgacatctacatctgggcgcccttggccgggacttgtggggtccttctcctgtcactggttatcaccctttactgcaaacggggcagaaagaaactcctgtatatattcaaacaaccatttatgagaccagtacaaactactcaagaggaagatggctgtagctgccgatttccagaagaagaagaaggaggatgtgaactgagagtgaagttcagcaggagcgcagacgcccccgcgtaccagcagggccagaaccagctctataacgagctgaatctaggacgaagagaggagtacgatgttttggacaagagacgtggccgggaccctgagatggggggaaagccgagaaggaagaaccctcaggaaggcctgtacaatgaactgcagaaagataagatggcggaggcctacagtgagattgggatgaaaggcgagcgccggaggggcaaggggcacgatggcctttaccagggtctcagtacagccaccaaggacacctacgacgcccttcacatgcaggccctgccccctcgctga

SEQ ID NO: 3892 - DNA, 2949 bp, Artificial Sequence
  Synthetic Polynucloetide
atgaccatccggctgctgtgctatatgggcttctacttcctcggagccggcctgatgggcgtgacccagacacctaagttccaggtgctgaaaaccggccagagcatgaccctgcaatgcgcccaggacatgaaccatgagtacatgagctggtacaggcaggaccctggcatgggcctgagactgatccactattctgtcggagccggcatcaccgaccagggcgaagttcctaatggctacaacgtgtccagaagcaccaccgaggacttcccactgagactgctgtctgccgctcctagccagaccagcgtgtacttttgcgccagcagctttcagaccggcgcttcctacggctacacattcggctctggcaccagactgaccgtgctcgagatccagaaccctgatcctgccgtgtaccagctgcgggatagcaagagcagcgacaagagcgtgtgtctgttcaccgacttcgacagccagaccaacgtgtcccagagcaaggactccgacgtgtacatcaccgataagtgcgtgctggacatgcggagcatggacttcaagagcaactccgccgtggcctggtccaacaagtccgatttcgcctgcgccaacgccttcaacaacagcattatccccgaggacacattcttcccaagcagcgacgtgccctgcgacgtgaagctggtggaaaagagcttcgagacagacaccaacctgaacttccagaacctgagcgtgatcggcttcagaatcctgctgctgaaagtggccggctttaacctgctgatgaccctgcggctgtggtccagccgcgccaagagaagcggatctggcgtgaagcagaccctgaatttcgacctgctgaagctggctggcgacgtggaatccaacccaggccctactagtatggactggatttggcgcatccttttccttgtcggcgctgctaccggcgcccattccgggccccaggttcagctgcaagagtctggcggaggacttgctcaagctggcggaagcctgagactgtcttgtgccgcctctggcagaaccttcagcatgggctggtttagacaggcccctggcaaagagagagagttcgtcgccgccatcacatacagcggcggcagcccttactacgcctcttctgtcagaggccggttcaccatcagccgggacaacgccaagaacaccgtgtacctccagatgaacagcctgaagccagaggacaccgccgtgtactactgtgccgccaatccaacctacggcagcgactggaatgccgagaattggggccagggcacccaagtgacagtgtctagtggatccggcggcggaggatctggcggaggcggatctgggggcggaggctctttcgaaatcctgaacgtggaacagagccctcagagcctgcatgtgcaagagggcgacagcaccaacttcacctgtagcttccccagcagcaacttctacgccctgcactggtacagatgggagacagccaagtctcccgaggcactgttcgtgatgaccctgaacggcgacgagaagaagaagggcagaatcagcgccacactgaacaccaaagagggctactcctacctgtacatcaagggcagccagcctgaggacagcgccacttatctgtgcgccagaaacaccggcaaccagttctactttggcaccggcacaagcctgacagtgatccccaacgaggacctgaagaacgtgttcccacctgaggtggccgtgttcgagcctagcaaggccgagatcgcccacacccagaaagccaccctcgtgtgcctggctaccggcttctaccccgaccatgtggaactgtcttggtgggtcaacggcaaagaggtgcacagcggcgtgtgtaccgacccccagccactgaaagaacagcccgccctgaacgacagccggtactgcctgagcagcagactgagagtgtccgccaccttctggcagaacccccggaaccacttcagatgccaggtgcagttctacggcctgagcgagaacgacgagtggacccaggacagagccaagcccgtgacccagatcgtgtctgccgaagcctggggcagagccgattgcggcatcaccagcgccagctaccaccagggcgtgctgagcgccaccatcctgtacgagatcctgctgggcaaggccaccctgtacgccgtgctggtgtctgccctggtgctgatggctatggtcaagcggaaggacagccggggaagggccaagcgatctggatctggagcaacaaacttctcactactcaaacaagcaggtgacgtggaggagaatcccgggccttctagaggccatatgaccgagtacaagcccacggtgcgcctcgccacccgcgacgacgtccccagggccgtacgcaccctcgccgccgcgttcgccgactaccccgccacgcgccacaccgtcgatccggaccgccacatcgagcgggtcaccgagctgcaagaactcttcctcacgcgcgtcgggctcgacatcggcaaggtgtgggtcgcggacgacggcgccgcggtggcggtctggaccacgccggagagcgtcgaagcgggggcggtgttcgccgagatcggcccgcgcatggccgagttgagcggttcccggctggccgcgcagcaacagatggaaggcctcctggcgccgcaccggcccaaggagcccgcgtggttcctggccaccgtcggcgtctcgcccgaccaccagggcaagggtctgggcagcgccgtcgtgctccccggagtggaggcggccgagcgcgccggggtgcccgccttcctggagacctccgcgccccgcaacctccccttctacgagcggctcggcttcaccgtcaccgccgacgtcgaggtgcccgaaggaccgcgcacctggtgcatgacccgcaagcccggtgcctga

SEQ ID NO: 3893 - DNA, 2946 bp, Artificial Sequence
  Synthetic Polynucloetide
atgaccatccggctgctgtgctatatgggcttctacttcctcggagccggcctgatgggcgtgacccagacacctaagttccaggtgctgaaaaccggccagagcatgaccctgcaatgcgcccaggacatgaaccatgagtacatgagctggtacaggcaggaccctggcatgggcctgagactgatccactattctgtcggagccggcatcaccgaccagggcgaagttcctaatggctacaacgtgtccagaagcaccaccgaggacttcccactgagactgctgtctgccgctcctagccagaccagcgtgtacttttgcgccagcagctttcagaccggcgcttcctacggctacacattcggctctggcaccagactgaccgtgctcgaggacctgaagaacgtgttcccacctgaggtggccgtgttcgagcctagcaaggccgagatcgcccacacccagaaagccaccctcgtgtgcctggctaccggcttctaccccgaccatgtggaactgtcttggtgggtcaacggcaaagaggtgcacagcggcgtgtgtaccgacccccagccactgaaagaacagcccgccctgaacgacagccggtactgcctgagcagcagactgagagtgtccgccaccttctggcagaacccccggaaccacttcagatgccaggtgcagttctacggcctgagcgagaacgacgagtggacccaggacagagccaagcccgtgacccagatcgtgtctgccgaagcctggggcagagccgattgcggcatcaccagcgccagctaccaccagggcgtgctgagcgccaccatcctgtacgagatcctgctgggcaaggccaccctgtacgccgtgctggtgtctgccctggtgctgatggctatggtcaagcggaaggacagccggggaagggccaagcgatctggatctggagcaacaaacttctcactactcaaacaagcaggtgacgtggaggagaatcccgggcctactagtatggactggatttggcgcatccttttccttgtcggcgctgctaccggcgcccattccgggccccaggttcagctgcaagagtctggcggaggacttgctcaagctggcggaagcctgagactgtcttgtgccgcctctggcagaaccttcagcatgggctggtttagacaggcccctggcaaagagagagagttcgtcgccgccatcacatacagcggcggcagcccttactacgcctcttctgtcagaggccggttcaccatcagccgggacaacgccaagaacaccgtgtacctccagatgaacagcctgaagccagaggacaccgccgtgtactactgtgccgccaatccaacctacggcagcgactggaatgccgagaattggggccagggcacccaagtgacagtgtctagtggatccggcggcggaggatctggcggaggcggatctgggggcggaggctctttcgaaatcctgaacgtggaacagagccctcagagcctgcatgtgcaagagggcgacagcaccaacttcacctgtagcttccccagcagcaacttctacgccctgcactggtacagatgggagacagccaagtctcccgaggcactgttcgtgatgaccctgaacggcgacgagaagaagaagggcagaatcagcgccacactgaacaccaaagagggctactcctacctgtacatcaagggcagccagcctgaggacagcgccacttatctgtgcgccagaaacaccggcaaccagttctactttggcaccggcacaagcctgacagtgatccccaacatccagaaccctgatcctgccgtgtaccagctgcgggatagcaagagcagcgacaagagcgtgtgtctgttcaccgacttcgacagccagaccaacgtgtcccagagcaaggactccgacgtgtacatcaccgataagtgcgtgctggacatgcggagcatggacttcaagagcaactccgccgtggcctggtccaacaagtccgatttcgcctgcgccaacgccttcaacaacagcattatccccgaggacacattcttcccaagcagcgacgtgccctgcgacgtgaagctggtggaaaagagcttcgagacagacaccaacctgaacttccagaacctgagcgtgatcggcttcagaatcctgctgctgaaagtggccggctttaacctgctgatgaccctgcggctgtggtccagccgcgccaagagaagcggatctggcgtgaagcagaccctgaatttcgacctgctgaagctggctggcgacgtggaatccaacccaggcccttctagaggccatatgaccgagtacaagcccacggtgcgcctcgccacccgcgacgacgtccccagggccgtacgcaccctcgccgccgcgttcgccgactaccccgccacgcgccacaccgtcgatccggaccgccacatcgagcgggtcaccgagctgcaagaactcttcctcacgcgcgtcgggctcgacatcggcaaggtgtgggtcgcggacgacggcgccgcggtggcggtctggaccacgccggagagcgtcgaagcgggggcggtgttcgccgagatcggcccgcgcatggccgagttgagcggttcccggctggccgcgcagcaacagatggaaggcctcctggcgccgcaccggcccaaggagcccgcgtggttcctggccaccgtcggcgtctcgcccgaccaccagggcaagggtctgggcagcgccgtcgtgctccccggagtggaggcggccgagcgcgccggggtgcccgccttcctggagacctccgcgccccgcaacctccccttctacgagcggctcggcttcaccgtcaccgccgacgtcgaggtgcccgaaggaccgcgcacctggtgcatgacccgcaagcccggtgcctga

SEQ ID NO: 3894 - DNA, 2946 bp, Artificial Sequence
  Synthetic Polynucloetide
atgaccatccggctgctgtgctatatgggcttctacttcctcggagccggcctgatgggcgtgacccagacacctaagttccaggtgctgaaaaccggccagagcatgaccctgcaatgcgcccaggacatgaaccatgagtacatgagctggtacaggcaggaccctggcatgggcctgagactgatccactattctgtcggagccggcatcaccgaccagggcgaagttcctaatggctacaacgtgtccagaagcaccaccgaggacttcccactgagactgctgtctgccgctcctagccagaccagcgtgtacttttgcgccagcagctttcagaccggcgcttcctacggctacacattcggctctggcaccagactgaccgtgctcgaggacctgaagaacgtgttcccacctgaggtggccgtgttcgagcctagcgaggccgagatcagccacacccagaaagccaccctcgtgtgcctggctaccggcttctaccccgaccatgtggaactgtcttggtgggtcaacggcaaagaggtgcacagcggcgtgtgtaccgacccccagccactgaaagaacagcccgccctgaacgacagccggtactgcctgagcagcagactgagagtgtccgccaccttctggcagaacccccggaaccacttcagatgccaggtgcagttctacggcctgagcgagaacgacgagtggacccaggacagagccaagcccgtgacccagatcgtgtctgccgaagcctggggcagagccgattgcggctttaccagcgagagctaccagcagggcgtgctgagcgccaccatcctgtacgagatcctgctgggcaaggccaccctgtacgccgtgctggtgtctgccctggtgctgatggctatggtcaagcggaaggacagccggggaagggccaagcgatctggatctggagcaacaaacttctcactactcaaacaagcaggtgacgtggaggagaatcccgggcctactagtatggactggatttggcgcatccttttccttgtcggcgctgctaccggcgcccattccgggccccaggttcagctgcaagagtctggcggaggacttgctcaagctggcggaagcctgagactgtcttgtgccgcctctggcagaaccttcagcatgggctggtttagacaggcccctggcaaagagagagagttcgtcgccgccatcacatacagcggcggcagcccttactacgcctcttctgtcagaggccggttcaccatcagccgggacaacgccaagaacaccgtgtacctccagatgaacagcctgaagccagaggacaccgccgtgtactactgtgccgccaatccaacctacggcagcgactggaatgccgagaattggggccagggcacccaagtgacagtgtctagtggatccggcggcggaggatctggcggaggcggatctgggggcggaggctctttcgaaatcctgaacgtggaacagagccctcagagcctgcatgtgcaagagggcgacagcaccaacttcacctgtagcttccccagcagcaacttctacgccctgcactggtacagatgggagacagccaagtctcccgaggcactgttcgtgatgaccctgaacggcgacgagaagaagaagggcagaatcagcgccacactgaacaccaaagagggctactcctacctgtacatcaagggcagccagcctgaggacagcgccacttatctgtgcgccagaaacaccggcaaccagttctactttggcaccggcacaagcctgacagtgatccccaacatccagaaccctgatcctgccgtgtaccagctgcgggatagcaagagcagcgacaagagcgtgtgtctgttcaccgacttcgacagccagaccaacgtgtcccagagcaaggactccgacgtgtacatcaccgataagtgcgtgctggacatgcggagcatggacttcaagagcaactccgccgtggcctggtccaacaagtccgatttcgcctgcgccaacgccttcaacaacagcattatccccgaggacacattcttcccaagccccgagagcagctgcgacgtgaagctggtggaaaagagcttcgagacagacaccaacctgaacttccagaacctgagcgtgatcggcttcagaatcctgctgctgaaagtggccggctttaacctgctgatgaccctgcggctgtggtccagccgcgccaagagaagcggatctggcgtgaagcagaccctgaatttcgacctgctgaagctggctggcgacgtggaatccaacccaggcccttctagaggccatatgaccgagtacaagcccacggtgcgcctcgccacccgcgacgacgtccccagggccgtacgcaccctcgccgccgcgttcgccgactaccccgccacgcgccacaccgtcgatccggaccgccacatcgagcgggtcaccgagctgcaagaactcttcctcacgcgcgtcgggctcgacatcggcaaggtgtgggtcgcggacgacggcgccgcggtggcggtctggaccacgccggagagcgtcgaagcgggggcggtgttcgccgagatcggcccgcgcatggccgagttgagcggttcccggctggccgcgcagcaacagatggaaggcctcctggcgccgcaccggcccaaggagcccgcgtggttcctggccaccgtcggcgtctcgcccgaccaccagggcaagggtctgggcagcgccgtcgtgctccccggagtggaggcggccgagcgcgccggggtgcccgccttcctggagacctccgcgccccgcaacctccccttctacgagcggctcggcttcaccgtcaccgccgacgtcgaggtgcccgaaggaccgcgcacctggtgcatgacccgcaagcccggtgcctga

SEQ ID NO: 3895 - DNA, 2244 bp, Artificial Sequence
  Synthetic Polynucloetide
atgaccatccggctgctgtgctatatgggcttctacttcctcggagccggcctgatgggcgtgacccagacacctaagttccaggtgctgaaaaccggccagagcatgaccctgcaatgcgcccaggacatgaaccatgagtacatgagctggtacaggcaggaccctggcatgggcctgagactgatccactattctgtcggagccggcatcaccgaccagggcgaagttcctaatggctacaacgtgtccagaagcaccaccgaggacttcccactgagactgctgtctgccgctcctagccagaccagcgtgtacttttgcgccagcagctttcagaccggcgcttcctacggctacacattcggctctggcaccagactgaccgtgctcgaggacctgaagaacgtgttcccacctgaggtggccgtgttcgagcctagcgaggccgagatcagccacacccagaaagccaccctcgtgtgcctggctaccggcttctaccccgaccatgtggaactgtcttggtgggtcaacggcaaagaggtgcacagcggcgtgtgtaccgacccccagccactgaaagaacagcccgccctgaacgacagccggtactgcctgagcagcagactgagagtgtccgccaccttctggcagaacccccggaaccacttcagatgccaggtgcagttctacggcctgagcgagaacgacgagtggacccaggacagagccaagcccgtgacccagatcgtgtctgccgaagcctggggcagagccgattgcggctttaccagcgagagctaccagcagggcgtgctgagcgccaccatcctgtacgagatcctgctgggcaaggccaccctgtacgccgtgctggtgtctgccctggtgctgatggctatggtcaagcggaaggacagccggggaagggccaagcgatctggatctggagcaacaaacttctcactactcaaacaagcaggtgacgtggaggagaatcccgggcctactagtatggactggatttggcgcatccttttccttgtcggcgctgctaccggcgcccattccgggccccaggttcagctgcaagagtctggcggaggacttgctcaagctggcggaagcctgagactgtcttgtgccgcctctggcagaaccttcagcatgggctggtttagacaggcccctggcaaagagagagagttcgtcgccgccatcacatacagcggcggcagcccttactacgcctcttctgtcagaggccggttcaccatcagccgggacaacgccaagaacaccgtgtacctccagatgaacagcctgaagccagaggacaccgccgtgtactactgtgccgccaatccaacctacggcagcgactggaatgccgagaattggggccagggcacccaagtgacagtgtctagtggatccggcggcggaggatctggcggaggcggatctgggggcggaggctctttcgaaatcctgaacgtggaacagagccctcagagcctgcatgtgcaagagggcgacagcaccaacttcacctgtagcttccccagcagcaacttctacgccctgcactggtacagatgggagacagccaagtctcccgaggcactgttcgtgatgaccctgaacggcgacgagaagaagaagggcagaatcagcgccacactgaacaccaaagagggctactcctacctgtacatcaagggcagccagcctgaggacagcgccacttatctgtgcgccagaaacaccggcaaccagttctactttggcaccggcacaagcctgacagtgatccccaacatccagaaccctgatcctgccgtgtaccagctgcgggatagcaagagcagcgacaagagcgtgtgtctgttcaccgacttcgacagccagaccaacgtgtcccagagcaaggactccgacgtgtacatcaccgataagtgcgtgctggacatgcggagcatggacttcaagagcaactccgccgtggcctggtccaacaagtccgatttcgcctgcgccaacgccttcaacaacagcattatccccgaggacacattcttcccaagccccgagagcagctgcgacgtgaagctggtggaaaagagcttcgagacagacaccaacctgaacttccagaacctgagcgtgatcggcttcagaatcctgctgctgaaagtggccggctttaacctgctgatgaccctgcggctgtggtccagc

SEQ ID NO: 3896 - DNA, 2919 bp, Artificial Sequence
  Synthetic Polynucloetide
atgaccatccggctgctgtgctatatgggcttctacttcctcggagccggcctgatgggcgtgacccagacacctaagttccaggtgctgaaaaccggccagagcatgaccctgcaatgcgcccaggacatgaaccatgagtacatgagctggtacaggcaggaccctggcatgggcctgagactgatccactattctgtcggagccggcatcaccgaccagggcgaagttcctaatggctacaacgtgtccagaagcaccaccgaggacttcccactgagactgctgtctgccgctcctagccagaccagcgtgtacttttgcgccagcagctttcagaccggcgcttcctacggctacacattcggctctggcaccagactgaccgtgctcgaggacctgaagaacgtgttcccacctgaggtggccgtgttcgagcctagcgaggccgagatcagccacacccagaaagccaccctcgtgtgcctggctaccggcttctaccccgaccatgtggaactgtcttggtgggtcaacggcaaagaggtgcacagcggcgtgtgtaccgacccccagccactgaaagaacagcccgccctgaacgacagccggtactgcctgagcagcagactgagagtgtccgccaccttctggcagaacccccggaaccacttcagatgccaggtgcagttctacggcctgagcgagaacgacgagtggacccaggacagagccaagcccgtgacccagatcgtgtctgccgaagcctggggcagagccgattgcggctttaccagcgagagctaccagcagggcgtgctgagcgccaccatcctgtacgagatcctgctgggcaaggccaccctgtacgccgtgctggtgtctgccctggtgctgatggctatggtcaagcggaaggacagccggggaagggccaagcgatctggatctggagcaacaaacttctcactactcaaacaagcaggtgacgtggaggagaatcccgggcctactagtatggactggatttggcgcatccttttccttgtcggcgctgctaccggcgcccattccgggccccaggttcagctgcaagagtctggcggaggacttgctcaagctggcggaagcctgagactgtcttgtgccgcctctggcagaaccttcagcatgggctggtttagacaggcccctggcaaagagagagagttcgtcgccgccatcacatacagcggcggcagcccttactacgcctcttctgtcagaggccggttcaccatcagccgggacaacgccaagaacaccgtgtacctccagatgaacagcctgaagccagaggacaccgccgtgtactactgtgccgccaatccaacctacggcagcgactggaatgccgagaattggggccagggcacccaagtgacagtgtctagtggatccggcggcggaggatctggcggaggcggatctgggggcggaggctctttcgaaatcctgaacgtggaacagagccctcagagcctgcatgtgcaagagggcgacagcaccaacttcacctgtagcttccccagcagcaacttctacgccctgcactggtacagatgggagacagccaagtctcccgaggcactgttcgtgatgaccctgaacggcgacgagaagaagaagggcagaatcagcgccacactgaacaccaaagagggctactcctacctgtacatcaagggcagccagcctgaggacagcgccacttatctgtgcgccagaaacaccggcaaccagttctactttggcaccggcacaagcctgacagtgatccccaacatccagaaccctgatcctgccgtgtaccagctgcgggatagcaagagcagcgacaagagcgtgtgtctgttcaccgacttcgacagccagaccaacgtgtcccagagcaaggactccgacgtgtacatcaccgataagtgcgtgctggacatgcggagcatggacttcaagagcaactccgccgtggcctggtccaacaagtccgatttcgcctgcgccaacgccttcaacaacagcattatccccgaggacacattcttcccaagccccgagagcagctgcgacgtgaagctggtggaaaagagcttcgagacagacaccaacctgaacttccagaacctgagcgtgatcggcttcagaatcctgctgctgaaagtggccggctttaacctgctgatgaccctgcggctgtggtccagccgcgccaagagaagcggatctggcgtgaagcagaccctgaatttcgacctgctgaagctggctggcgacgtggaatccaacccaggcccttctagaggcgggatccacaccatggctacctacgaggtgctgtgcgaggtggcaagaaagctgggcaccgacgacagagaagtggtgctgttcctgctgaacgtgttcatccctcagcctacactggcccagctgatcggtgcactgagagccctgaaagaggaaggccggctgacctttcctctgctggccgaatgcctgttcagagccggaagaagggatctgctgcgggacctgctgcatctggaccccagatttctggaaagacacctggccggcaccatgagctacttcagcccttaccagctgaccgtgctgcacgttgacggcgaactgtgcgccagagatattcggagcctgatcttcctgagcaaggacaccatcggcagccggtctacccctcagacatttctgcactgggtgtactgcatggaaaacctggacctgctcggccccacagatgtggatgccctgatgtccatgctgagaagcctgagcagagtggacctccagagacaggtgcagacactgatgggactgcacctgagcggacctagccacagccagcactacagacacacccct

SEQ ID NO: 3897 - DNA, 2256 bp, Artificial Sequence
  Synthetic Polynucloetide
atgaccatccggctgctgtgctatatgggcttctacttcctcggagccggcctgatgggcgtgacccagacacctaagttccaggtgctgaaaaccggccagagcatgaccctgcaatgcgcccaggacatgaaccatgagtacatgagctggtacaggcaggaccctggcatgggcctgagactgatccactattctgtcggagccggcatcaccgaccagggcgaagttcctaatggctacaacgtgtccagaagcaccaccgaggacttcccactgagactgctgtctgccgctcctagccagaccagcgtgtacttttgcgccagcagctttcagaccggcgcttcctacggctacacattcggctctggcaccagactgaccgtgctcgagatccagaaccctgatcctgccgtgtaccagctgcgggatagcaagagcagcgacaagagcgtgtgtctgttcaccgacttcgacagccagaccaacgtgtcccagagcaaggactccgacgtgtacatcaccgataagtgcgtgctggacatgcggagcatggacttcaagagcaactccgccgtggcctggtccaacaagtccgatttcgcctgcgccaacgccttcaacaacagcattatccccgaggacacattcttcccaagccccgagagcagctgcgacgtgaagctggtggaaaagagcttcgagacagacaccaacctgaacttccagaacctgagcgtgatcggcttcagaatcctgctgctgaaagtggccggctttaacctgctgatgaccctgcggctgtggtccagccgcgccaagagaagcggatctggcgtgaagcagaccctgaatttcgacctgctgaagctggctggcgacgtggaatccaacccaggccctactagtatggactggatttggcgcatccttttccttgtcggcgctgctaccggcgcccattccgggccccaggttcagctgcaagagtctggcggaggacttgctcaagctggcggaagcctgagactgtcttgtgccgcctctggcagaaccttcagcatgggctggtttagacaggcccctggcaaagagagagagttcgtcgccgccatcacatacagcggcggcagcccttactacgcctcttctgtcagaggccggttcaccatcagccgggacaacgccaagaacaccgtgtacctccagatgaacagcctgaagccagaggacaccgccgtgtactactgtgccgccaatccaacctacggcagcgactggaatgccgagaattggggccagggcacccaagtgacagtgtctagtggatccggcggcggaggatctggcggaggcggatctgggggcggaggctctttcgaaatcctgaacgtggaacagagccctcagagcctgcatgtgcaagagggcgacagcaccaacttcacctgtagcttccccagcagcaacttctacgccctgcactggtacagatgggagacagccaagtctcccgaggcactgttcgtgatgaccctgaacggcgacgagaagaagaagggcagaatcagcgccacactgaacaccaaagagggctactcctacctgtacatcaagggcagccagcctgaggacagcgccacttatctgtgcgccagaaacaccggcaaccagttctactttggcaccggcacaagcctgacagtgatccccaacgaggacctgaagaacgtgttcccacctgaggtggccgtgttcgagcctagcgaggccgagatcagccacacccagaaagccaccctcgtgtgcctggctaccggcttctaccccgaccatgtggaactgtcttggtgggtcaacggcaaagaggtgcacagcggcgtgtgtaccgacccccagccactgaaagaacagcccgccctgaacgacagccggtactgcctgagcagcagactgagagtgtccgccaccttctggcagaacccccggaaccacttcagatgccaggtgcagttctacggcctgagcgagaacgacgagtggacccaggacagagccaagcccgtgacccagatcgtgtctgccgaagcctggggcagagccgattgcggctttaccagcgagagctaccagcagggcgtgctgagcgccaccatcctgtacgagatcctgctgggcaaggccaccctgtacgccgtgctggtgtctgccctggtgctgatggctatggtcaagcggaaggacagccgggga

SEQ ID NO: 3898 - DNA, 2922 bp, Artificial Sequence
  Synthetic Polynucloetide
atgaccatccggctgctgtgctatatgggcttctacttcctcggagccggcctgatgggcgtgacccagacacctaagttccaggtgctgaaaaccggccagagcatgaccctgcaatgcgcccaggacatgaaccatgagtacatgagctggtacaggcaggaccctggcatgggcctgagactgatccactattctgtcggagccggcatcaccgaccagggcgaagttcctaatggctacaacgtgtccagaagcaccaccgaggacttcccactgagactgctgtctgccgctcctagccagaccagcgtgtacttttgcgccagcagctttcagaccggcgcttcctacggctacacattcggctctggcaccagactgaccgtgctcgagatccagaaccctgatcctgccgtgtaccagctgcgggatagcaagagcagcgacaagagcgtgtgtctgttcaccgacttcgacagccagaccaacgtgtcccagagcaaggactccgacgtgtacatcaccgataagtgcgtgctggacatgcggagcatggacttcaagagcaactccgccgtggcctggtccaacaagtccgatttcgcctgcgccaacgccttcaacaacagcattatccccgaggacacattcttcccaagccccgagagcagctgcgacgtgaagctggtggaaaagagcttcgagacagacaccaacctgaacttccagaacctgagcgtgatcggcttcagaatcctgctgctgaaagtggccggctttaacctgctgatgaccctgcggctgtggtccagccgcgccaagagaagcggatctggcgtgaagcagaccctgaatttcgacctgctgaagctggctggcgacgtggaatccaacccaggccctactagtatggactggatttggcgcatccttttccttgtcggcgctgctaccggcgcccattccgggccccaggttcagctgcaagagtctggcggaggacttgctcaagctggcggaagcctgagactgtcttgtgccgcctctggcagaaccttcagcatgggctggtttagacaggcccctggcaaagagagagagttcgtcgccgccatcacatacagcggcggcagcccttactacgcctcttctgtcagaggccggttcaccatcagccgggacaacgccaagaacaccgtgtacctccagatgaacagcctgaagccagaggacaccgccgtgtactactgtgccgccaatccaacctacggcagcgactggaatgccgagaattggggccagggcacccaagtgacagtgtctagtggatccggcggcggaggatctggcggaggcggatctgggggcggaggctctttcgaaatcctgaacgtggaacagagccctcagagcctgcatgtgcaagagggcgacagcaccaacttcacctgtagcttccccagcagcaacttctacgccctgcactggtacagatgggagacagccaagtctcccgaggcactgttcgtgatgaccctgaacggcgacgagaagaagaagggcagaatcagcgccacactgaacaccaaagagggctactcctacctgtacatcaagggcagccagcctgaggacagcgccacttatctgtgcgccagaaacaccggcaaccagttctactttggcaccggcacaagcctgacagtgatccccaacgaggacctgaagaacgtgttcccacctgaggtggccgtgttcgagcctagcgaggccgagatcagccacacccagaaagccaccctcgtgtgcctggctaccggcttctaccccgaccatgtggaactgtcttggtgggtcaacggcaaagaggtgcacagcggcgtgtgtaccgacccccagccactgaaagaacagcccgccctgaacgacagccggtactgcctgagcagcagactgagagtgtccgccaccttctggcagaacccccggaaccacttcagatgccaggtgcagttctacggcctgagcgagaacgacgagtggacccaggacagagccaagcccgtgacccagatcgtgtctgccgaagcctggggcagagccgattgcggctttaccagcgagagctaccagcagggcgtgctgagcgccaccatcctgtacgagatcctgctgggcaaggccaccctgtacgccgtgctggtgtctgccctggtgctgatggctatggtcaagcggaaggacagccggggaagggccaagcgatctggatctggagcaacaaacttctcactactcaaacaagcaggtgacgtggaggagaatcccgggccttctagaggcgggatccacaccatggctacctacgaggtgctgtgcgaggtggcaagaaagctgggcaccgacgacagagaagtggtgctgttcctgctgaacgtgttcatccctcagcctacactggcccagctgatcggtgcactgagagccctgaaagaggaaggccggctgacctttcctctgctggccgaatgcctgttcagagccggaagaagggatctgctgcgggacctgctgcatctggaccccagatttctggaaagacacctggccggcaccatgagctacttcagcccttaccagctgaccgtgctgcacgttgacggcgaactgtgcgccagagatattcggagcctgatcttcctgagcaaggacaccatcggcagccggtctacccctcagacatttctgcactgggtgtactgcatggaaaacctggacctgctcggccccacagatgtggatgccctgatgtccatgctgagaagcctgagcagagtggacctccagagacaggtgcagacactgatgggactgcacctgagcggacctagccacagccagcactacagacacacccct

SEQ ID NO: 3899 - DNA, 2946 bp, Artificial Sequence
  Synthetic Polynucloetide
atgaccatccggctgctgtgctatatgggcttctacttcctcggagccggcctgatgggcgtgacccagacacctaagttccaggtgctgaaaaccggccagagcatgaccctgcaatgcgcccaggacatgaaccatgagtacatgagctggtacaggcaggaccctggcatgggcctgagactgatccactattctgtcggagccggcatcaccgaccagggcgaagttcctaatggctacaacgtgtccagaagcaccaccgaggacttcccactgagactgctgtctgccgctcctagccagaccagcgtgtacttttgcgccagcagctttcagaccggcgcttcctacggctacacattcggctctggcaccagactgaccgtgctcgaggacctgaagaacgtgttcccacctgaggtggccgtgttcgagcctagcgaggccgagatcagccacacccagaaagccaccctcgtgtgcctggctaccggcttctaccccgaccatgtggaactgtcttggtgggtcaacggcaaagaggtgcacagcggcgtgtctaccgacccccagccactgaaagaacagcccgccctgaacgacagccggtactgcctgagcagcagactgagagtgtccgccaccttctggcagaacccccggaaccacttcagatgccaggtgcagttctacggcctgagcgagaacgacgagtggacccaggacagagccaagcccgtgacccagatcgtgtctgccgaagcctggggcagagccgattgcggctttaccagcgagagctaccagcagggcgtgctgagcgccaccatcctgtacgagatcctgctgggcaaggccaccctgtacgccgtgctggtgtctgccctggtgctgatggctatggtcaagcggaaggacagccggggaagggccaagcgatctggatctggagcaacaaacttctcactactcaaacaagcaggtgacgtggaggagaatcccgggcctactagtatggactggatttggcgcatccttttccttgtcggcgctgctaccggcgcccattccgggccccaggttcagctgcaagagtctggcggaggacttgctcaagctggcggaagcctgagactgtcttgtgccgcctctggcagaaccttcagcatgggctggtttagacaggcccctggcaaagagagagagttcgtcgccgccatcacatacagcggcggcagcccttactacgcctcttctgtcagaggccggttcaccatcagccgggacaacgccaagaacaccgtgtacctccagatgaacagcctgaagccagaggacaccgccgtgtactactgtgccgccaatccaacctacggcagcgactggaatgccgagaattggggccagggcacccaagtgacagtgtctagtggatccggcggcggaggatctggcggaggcggatctgggggcggaggctctttcgaaatcctgaacgtggaacagagccctcagagcctgcatgtgcaagagggcgacagcaccaacttcacctgtagcttccccagcagcaacttctacgccctgcactggtacagatgggagacagccaagtctcccgaggcactgttcgtgatgaccctgaacggcgacgagaagaagaagggcagaatcagcgccacactgaacaccaaagagggctactcctacctgtacatcaagggcagccagcctgaggacagcgccacttatctgtgcgccagaaacaccggcaaccagttctactttggcaccggcacaagcctgacagtgatccccaacatccagaaccctgatcctgccgtgtaccagctgcgggatagcaagagcagcgacaagagcgtgtgtctgttcaccgacttcgacagccagaccaacgtgtcccagagcaaggactccgacgtgtacatcaccgataagaccgtgctggacatgcggagcatggacttcaagagcaactccgccgtggcctggtccaacaagtccgatttcgcctgcgccaacgccttcaacaacagcattatccccgaggacacattcttcccaagccccgagagcagctgcgacgtgaagctggtggaaaagagcttcgagacagacaccaacctgaacttccagaacctgagcgtgatcggcttcagaatcctgctgctgaaagtggccggctttaacctgctgatgaccctgcggctgtggtccagccgcgccaagagaagcggatctggcgtgaagcagaccctgaatttcgacctgctgaagctggctggcgacgtggaatccaacccaggcccttctagaggccatatgaccgagtacaagcccacggtgcgcctcgccacccgcgacgacgtccccagggccgtacgcaccctcgccgccgcgttcgccgactaccccgccacgcgccacaccgtcgatccggaccgccacatcgagcgggtcaccgagctgcaagaactcttcctcacgcgcgtcgggctcgacatcggcaaggtgtgggtcgcggacgacggcgccgcggtggcggtctggaccacgccggagagcgtcgaagcgggggcggtgttcgccgagatcggcccgcgcatggccgagttgagcggttcccggctggccgcgcagcaacagatggaaggcctcctggcgccgcaccggcccaaggagcccgcgtggttcctggccaccgtcggcgtctcgcccgaccaccagggcaagggtctgggcagcgccgtcgtgctccccggagtggaggcggccgagcgcgccggggtgcccgccttcctggagacctccgcgccccgcaacctccccttctacgagcggctcggcttcaccgtcaccgccgacgtcgaggtgcccgaaggaccgcgcacctggtgcatgacccgcaagcccggtgcctga

SEQ ID NO: 3900 - DNA, 3192 bp, Artificial Sequence
  Synthetic Polynucloetide
atgaccatccggctgctgtgctatatgggcttctacttcctcggagccggcctgatgggcgtgacccagacacctaagttccaggtgctgaaaaccggccagagcatgaccctgcaatgcgcccaggacatgaaccatgagtacatgagctggtacaggcaggaccctggcatgggcctgagactgatccactattctgtcggagccggcatcaccgaccagggcgaagttcctaatggctacaacgtgtccagaagcaccaccgaggacttcccactgagactgctgtctgccgctcctagccagaccagcgtgtacttttgcgccagcagctttcagaccggcgcttcctacggctacacattcggctctggcaccagactgaccgtgctcgaggacctgaagaacgtgttcccacctgaggtggccgtgttcgagcctagcgaggccgagatcagccacacccagaaagccaccctcgtgtgcctggctaccggcttctaccccgaccatgtggaactgtcttggtgggtcaacggcaaagaggtgcacagcggcgtgtctaccgacccccagccactgaaagaacagcccgccctgaacgacagccggtactgcctgagcagcagactgagagtgtccgccaccttctggcagaacccccggaaccacttcagatgccaggtgcagttctacggcctgagcgagaacgacgagtggacccaggacagagccaagcccgtgacccagatcgtgtctgccgaagcctggggcagagccgattgcggctttaccagcgagagctaccagcagggcgtgctgagcgccaccatcctgtacgagatcctgctgggcaaggccaccctgtacgccgtgctggtgtctgccctggtgctgatggctatggtcaagcggaaggacagccggggaagggccaagcgatctggatctggagcaacaaacttctcactactcaaacaagcaggtgacgtggaggagaatcccgggcctactagtatggactggatttggcgcatccttttccttgtcggcgctgctaccggcgcccattccgggccccaggttcagctgcaagagtctggcggaggacttgctcaagctggcggaagcctgagactgtcttgtgccgcctctggcagaaccttcagcatgggctggtttagacaggcccctggcaaagagagagagttcgtcgccgccatcacatacagcggcggcagcccttactacgcctcttctgtcagaggccggttcaccatcagccgggacaacgccaagaacaccgtgtacctccagatgaacagcctgaagccagaggacaccgccgtgtactactgtgccgccaatccaacctacggcagcgactggaatgccgagaattggggccagggcacccaagtgacagtgtctagtggatccggcggcggaggatctggcggaggcggatctgggggcggaggctctttcgaaatcctgaacgtggaacagagccctcagagcctgcatgtgcaagagggcgacagcaccaacttcacctgtagcttccccagcagcaacttctacgccctgcactggtacagatgggagacagccaagtctcccgaggcactgttcgtgatgaccctgaacggcgacgagaagaagaagggcagaatcagcgccacactgaacaccaaagagggctactcctacctgtacatcaagggcagccagcctgaggacagcgccacttatctgtgcgccagaaacaccggcaaccagttctactttggcaccggcacaagcctgacagtgatccccaacgagcagaaactgatctcggaagaggatgggagcggcaccccattcccttctctggcccctcccatcatgctgctggtggacggcaagcagcagatggtggtcgtgtgcctggtgctggatgtggccccacctggactggacagccccatctggtttagcgccggcaatggctctgccctggacgcctttacctacggcccaagccctgccaccgatggcacctggacaaatctggcccacctgagcctgcccagcgaggaactggcttcttgggagcctctcgtgtgccacacaggacctggcgctgagggacacagcagatccacccagcctatgcacctgtctggcgaggccagcaccgccagaacctgtcctcaggaacctctgagaggcacccctggcggagcactgtggctgggagtgctgagactgctgctgttcaagctgctgctgtttgacctgctgctgacctgctcctgtctgtgcgatcctgccggccctctgccttctcctgccaccaccacaagactgagagccctgggcagccacagactgcaccctgccacagagacaggcggcagagaggccacaagcagccctagaccccagcccagagacagaagatggggcgataccccccctggcagaaagcctggatctccagtccgcgccaagagaagcggatctggcgtgaagcagaccctgaatttcgacctgctgaagctggctggcgacgtggaatccaacccaggcccttctagaggccatatgaccgagtacaagcccacggtgcgcctcgccacccgcgacgacgtccccagggccgtacgcaccctcgccgccgcgttcgccgactaccccgccacgcgccacaccgtcgatccggaccgccacatcgagcgggtcaccgagctgcaagaactcttcctcacgcgcgtcgggctcgacatcggcaaggtgtgggtcgcggacgacggcgccgcggtggcggtctggaccacgccggagagcgtcgaagcgggggcggtgttcgccgagatcggcccgcgcatggccgagttgagcggttcccggctggccgcgcagcaacagatggaaggcctcctggcgccgcaccggcccaaggagcccgcgtggttcctggccaccgtcggcgtctcgcccgaccaccagggcaagggtctgggcagcgccgtcgtgctccccggagtggaggcggccgagcgcgccggggtgcccgccttcctggagacctccgcgccccgcaacctccccttctacgagcggctcggcttcaccgtcaccgccgacgtcgaggtgcccgaaggaccgcgcacctggtgcatgacccgcaagcccggtgcctga

SEQ ID NO: 3901 - DNA, 3057 bp, Artificial Sequence
  Synthetic Polynucloetide
atgaccatccggctgctgtgctatatgggcttctacttcctcggagccggcctgatgggcgtgacccagacacctaagttccaggtgctgaaaaccggccagagcatgaccctgcaatgcgcccaggacatgaaccatgagtacatgagctggtacaggcaggaccctggcatgggcctgagactgatccactattctgtcggagccggcatcaccgaccagggcgaagttcctaatggctacaacgtgtccagaagcaccaccgaggacttcccactgagactgctgtctgccgctcctagccagaccagcgtgtacttttgcgccagcagctttcagaccggcgcttcctacggctacacattcggctctggcaccagactgaccgtgctcgaggggaaaccaattcccaaccctcttctgggactggattcaaccggcagcggcgacaagcagctggacgccgacgtgtcccccaagcctaccatcttcctgccctctatcgccgagacaaagctccagaaggccggcacctacctgtgcctgctggaaaagttcttcccagatgtgattaagatccactggcaggaaaagaagtccaacaccatcctgggcagccaggaaggcaacaccatgaagaccaacgacacctacatgaagttcagctggctgaccgtgcccgagaagtccctggacaaagaacacagatgcatcgtgcggcacgaaaacaacaagaacggcgtggaccaggaaatcatcttcccacccatcaagaccgatgtgattacaatggaccccaaggacaactgctccaaggacgccaacgataccctgctgctccagctgaccaacaccagcgcctactacatgtacttgttgctgctgctgaagtccgtggtgtacttcgccatcatcacatgctgcctgctgcggagaaccgccttctgctgcaacggcgagaagtctagggccaagcgatctggatctggagcaacaaacttctcactactcaaacaagcaggtgacgtggaggagaatcccgggcctactagtatggactggatttggcgcatccttttccttgtcggcgctgctaccggcgcccattccgggccccaggttcagctgcaagagtctggcggaggacttgctcaagctggcggaagcctgagactgtcttgtgccgcctctggcagaaccttcagcatgggctggtttagacaggcccctggcaaagagagagagttcgtcgccgccatcacatacagcggcggcagcccttactacgcctcttctgtcagaggccggttcaccatcagccgggacaacgccaagaacaccgtgtacctccagatgaacagcctgaagccagaggacaccgccgtgtactactgtgccgccaatccaacctacggcagcgactggaatgccgagaattggggccagggcacccaagtgacagtgtctagtggatccggcggcggaggatctggcggaggcggatctgggggcggaggctctttcgaaatcctgaacgtggaacagagccctcagagcctgcatgtgcaagagggcgacagcaccaacttcacctgtagcttccccagcagcaacttctacgccctgcactggtacagatgggagacagccaagtctcccgaggcactgttcgtgatgaccctgaacggcgacgagaagaagaagggcagaatcagcgccacactgaacaccaaagagggctactcctacctgtacatcaagggcagccagcctgaggacagcgccacttatctgtgcgccagaaacaccggcaaccagttctactttggcaccggcacaagcctgacagtgatccccaacgagcagaaactgatctcggaagaggatgggagcggcagccagcctcacaccaagcccagcgtgttcgtgatgaagaacggcaccaacgtggcctgcctcgtgaaagagttctaccccaaggacatcaggatcaacctggtgtccagcaagaagatcaccgagttcgaccccgccatcgtgatctcccccagcggcaagtacaacgccgtgaagctggggaagtacgaggacagcaacagcgtgacctgctccgtgcagcacgacaacaagaccgtgcacagcaccgactttgaagtgaaaaccgactccaccgaccacgtgaagcccaaagagacagagaacaccaagcagcccagcaagagctgccacaagcccaaggccatcgtgcacaccgagaaagtgaacatgatgagcctgaccgtgctgggcctgcggatgctgttcgccaaaaccgtggccgtgaacttcctgctgaccgccaagctgttcttcctccgcgccaagagaagcggatctggcgtgaagcagaccctgaatttcgacctgctgaagctggctggcgacgtggaatccaacccaggcccttctagaggccatatgaccgagtacaagcccacggtgcgcctcgccacccgcgacgacgtccccagggccgtacgcaccctcgccgccgcgttcgccgactaccccgccacgcgccacaccgtcgatccggaccgccacatcgagcgggtcaccgagctgcaagaactcttcctcacgcgcgtcgggctcgacatcggcaaggtgtgggtcgcggacgacggcgccgcggtggcggtctggaccacgccggagagcgtcgaagcgggggcggtgttcgccgagatcggcccgcgcatggccgagttgagcggttcccggctggccgcgcagcaacagatggaaggcctcctggcgccgcaccggcccaaggagcccgcgtggttcctggccaccgtcggcgtctcgcccgaccaccagggcaagggtctgggcagcgccgtcgtgctccccggagtggaggcggccgagcgcgccggggtgcccgccttcctggagacctccgcgccccgcaacctccccttctacgagcggctcggcttcaccgtcaccgccgacgtcgaggtgcccgaaggaccgcgcacctggtgcatgacccgcaagcccggtgcctga

SEQ ID NO: 3902 - DNA, 2268 bp, Artificial Sequence
  Synthetic Polynucloetide
atgaccatccggctgctgtgctatatgggcttctacttcctcggagccggcctgatgggcgtgacccagacacctaagttccaggtgctgaaaaccggccagagcatgaccctgcaatgcgcccaggacatgaaccatgagtacatgagctggtacaggcaggaccctggcatgggcctgagactgatccactattctgtcggagccggcatcaccgaccagggcgaagttcctaatggctacaacgtgtccagaagcaccaccgaggacttcccactgagactgctgtctgccgctcctagccagaccagcgtgtacttttgcgccagcagctttcagaccggcgcttcctacggctacacattcggctctggcaccagactgaccgtgctcgagagccagcctcacaccaagcccagcgtgttcgtgatgaagaacggcaccaacgtggcctgcctcgtgaaagagttctaccccaaggacatcaggatcaacctggtgtccagcaagaagatcaccgagttcgaccccgccatcgtgatctcccccagcggcaagtacaacgccgtgaagctggggaagtacgaggacagcaacagcgtgacctgctccgtgcagcacgacaacaagaccgtgcacagcaccgactttgaagtgaaaaccgactccaccgaccacgtgaagcccaaagagacagagaacaccaagcagcccagcaagagctgccacaagcccaaggccatcgtgcacaccgagaaagtgaacatgatgagcctgaccgtgctgggcctgcggatgctgttcgccaaaaccgtggccgtgaacttcctgctgaccgccaagctgttcttcctcagggccaagcgatctggatctggagcaacaaacttctcactactcaaacaagcaggtgacgtggaggagaatcccgggcctactagtatggactggatttggcgcatccttttccttgtcggcgctgctaccggcgcccattccgggccccaggttcagctgcaagagtctggcggaggacttgctcaagctggcggaagcctgagactgtcttgtgccgcctctggcagaaccttcagcatgggctggtttagacaggcccctggcaaagagagagagttcgtcgccgccatcacatacagcggcggcagcccttactacgcctcttctgtcagaggccggttcaccatcagccgggacaacgccaagaacaccgtgtacctccagatgaacagcctgaagccagaggacaccgccgtgtactactgtgccgccaatccaacctacggcagcgactggaatgccgagaattggggccagggcacccaagtgacagtgtctagtggatccggcggcggaggatctggcggaggcggatctgggggcggaggctctttcgaaatcctgaacgtggaacagagccctcagagcctgcatgtgcaagagggcgacagcaccaacttcacctgtagcttccccagcagcaacttctacgccctgcactggtacagatgggagacagccaagtctcccgaggcactgttcgtgatgaccctgaacggcgacgagaagaagaagggcagaatcagcgccacactgaacaccaaagagggctactcctacctgtacatcaagggcagccagcctgaggacagcgccacttatctgtgcgccagaaacaccggcaaccagttctactttggcaccggcacaagcctgacagtgatccccaacgacaagcagctggacgccgacgtgtcccccaagcctaccatcttcctgccctctatcgccgagacaaagctccagaaggccggcacctacctgtgcctgctggaaaagttcttcccagatgtgattaagatccactggcaggaaaagaagtccaacaccatcctgggcagccaggaaggcaacaccatgaagaccaacgacacctacatgaagttcagctggctgaccgtgcccgagaagtccctggacaaagaacacagatgcatcgtgcggcacgaaaacaacaagaacggcgtggaccaggaaatcatcttcccacccatcaagaccgatgtgattacaatggaccccaaggacaactgctccaaggacgccaacgataccctgctgctccagctgaccaacaccagcgcctactacatgtacttgttgctgctgctgaagtccgtggtgtacttcgccatcatcacatgctgcctgctgcggagaaccgccttctgctgcaacggcgagaagtct

SEQ ID NO: 3903 - DNA, 3483 bp, Artificial Sequence
  Synthetic Polynucloetide
atgaccatccggctgctgtgctatatgggcttctacttcctcggagccggcctgatgggcgtgacccagacacctaagttccaggtgctgaaaaccggccagagcatgaccctgcaatgcgcccaggacatgaaccatgagtacatgagctggtacaggcaggaccctggcatgggcctgagactgatccactattctgtcggagccggcatcaccgaccagggcgaagttcctaatggctacaacgtgtccagaagcaccaccgaggacttcccactgagactgctgtctgccgctcctagccagaccagcgtgtacttttgcgccagcagctttcagaccggcgcttcctacggctacacattcggctctggcaccagactgaccgtgggacagcctaaggccaatcctaccgtgacactgttccctccaagcagcgaagaactccaggccaacaaggccacacttgtgtgcctgatctccgacttctaccctggggctgtgacagtggcttggaaggccgatggatctcctgtgaaagccggcgtggaaaccaccaagccatccaagcagagcaacaacaaatacgccgccagctcctacctgagcctgacacctgagcagtggaagtcccacagatcctacagctgccaagtgacccacgaaggcagcaccgtggaaaagacagtggcccctacagagtgcagcggatcccagagcttcggcctgctggaccccaagctgtgctacctgctggatggcatcctgttcatctacggcgtgatcctgaccgccctgttcctgagagtgaagttcagcagaagcgccgacgcccctgcctaccagcagggacagaaccaactgtacaacgagctgaacctgggcagacgggaagagtacgacgtgctggacaagcggagaggcagggaccctgagatgggcggaaagccccagcggagaaagaacccccaggaaggactgtataacgaactccagaaagacaagatggccgaagcctacagcgagatcggcatgaagggcgagcggagaagaggcaagggccacgatggcctgtaccagggcctgagcaccgccaccaaggacacctatgacgccctgcacatgcaggccctgcctccaagaagggccaagcgatctggatctggagcaacaaacttctcactactcaaacaagcaggtgacgtggaggagaatcccgggcctactagtatggactggatttggcgcatccttttccttgtcggcgctgctaccggcgcccattccgggccccaggttcagctgcaagagtctggcggaggacttgctcaagctggcggaagcctgagactgtcttgtgccgcctctggcagaaccttcagcatgggctggtttagacaggcccctggcaaagagagagagttcgtcgccgccatcacatacagcggcggcagcccttactacgcctcttctgtcagaggccggttcaccatcagccgggacaacgccaagaacaccgtgtacctccagatgaacagcctgaagccagaggacaccgccgtgtactactgtgccgccaatccaacctacggcagcgactggaatgccgagaattggggccagggcacccaagtgacagtgtctagtggatccggcggcggaggatctggcggaggcggatctgggggcggaggctctttcgaaatcctgaacgtggaacagagccctcagagcctgcatgtgcaagagggcgacagcaccaacttcacctgtagcttccccagcagcaacttctacgccctgcactggtacagatgggagacagccaagtctcccgaggcactgttcgtgatgaccctgaacggcgacgagaagaagaagggcagaatcagcgccacactgaacaccaaagagggctactcctacctgtacatcaagggcagccagcctgaggacagcgccacttatctgtgcgccagaaacaccggcaaccagttctactttggcaccggcacaagcctgacagtgatccccaacgcctctacaaagggaccctccgtgtttcctctggctcccagcagcaagtctacaagcggaggaacagccgctctgggctgcctggtcaaggattactttcccgagcctgtgaccgtgtcctggaatagcggagcactgacaagcggcgtgcacacctttccagccgtgctgcaaagcagcggcctgtactctctgagcagcgtggtcacagtgcctagctctagcctgggcacccagacctacatctgcaatgtgaaccacaagcctagcaacaccaaggtggacaagagagtggaacccaagagctgtggtacccagagttttgggttgttggaccctaaattgtgctatctgttggacggaatcctgttcatttacggagtgatcctgaccgcattgttcctgcgggttaagttttccagatccgcagacgcacccgcttaccaacaagggcagaaccaactctacaatgaacttaatttggggcggagggaagagtacgacgttctggacaaaaggaggggacgagatcccgagatgggcggaaagcctcagcgaaggaagaatccgcaagaggggctttataacgaactccagaaagataaaatggcagaagcctatagtgagattgggatgaagggagaaaggaggaggggtaaaggtcacgatgggttgtaccaaggattgagcacagccactaaagatacctatgatgcgctccacatgcaggccctgccgccaagacgcgccaagagaagcggatctggcgtgaagcagaccctgaatttcgacctgctgaagctggctggcgacgtggaatccaacccaggcccttctagaggccatatgaccgagtacaagcccacggtgcgcctcgccacccgcgacgacgtccccagggccgtacgcaccctcgccgccgcgttcgccgactaccccgccacgcgccacaccgtcgatccggaccgccacatcgagcgggtcaccgagctgcaagaactcttcctcacgcgcgtcgggctcgacatcggcaaggtgtgggtcgcggacgacggcgccgcggtggcggtctggaccacgccggagagcgtcgaagcgggggcggtgttcgccgagatcggcccgcgcatggccgagttgagcggttcccggctggccgcgcagcaacagatggaaggcctcctggcgccgcaccggcccaaggagcccgcgtggttcctggccaccgtcggcgtctcgcccgaccaccagggcaagggtctgggcagcgccgtcgtgctccccggagtggaggcggccgagcgcgccggggtgcccgccttcctggagacctccgcgccccgcaacctccccttctacgagcggctcggcttcaccgtcaccgccgacgtcgaggtgcccgaaggaccgcgcacctggtgcatgacccgcaagcccggtgcctga

SEQ ID NO: 3904 - DNA, 2832 bp, Artificial Sequence
  Synthetic Polynucloetide
atgaccatccggctgctgtgctatatgggcttctacttcctcggagccggcctgatgggcgtgacccagacacctaagttccaggtgctgaaaaccggccagagcatgaccctgcaatgcgcccaggacatgaaccatgagtacatgagctggtacaggcaggaccctggcatgggcctgagactgatccactattctgtcggagccggcatcaccgaccagggcgaagttcctaatggctacaacgtgtccagaagcaccaccgaggacttcccactgagactgctgtctgccgctcctagccagaccagcgtgtacttttgcgccagcagctttcagaccggcgcttcctacggctacacattcggctctggcaccagactgaccgtgctcgaggacctgaagaacgtgttcccacctgaggtggccgtgttcgagcctagcgaggccgagatcagccacacccagaaagccaccctcgtgtgcctggctaccggcttctaccccgaccatgtggaactgtcttggtgggtcaacggcaaagaggtgcacagcggcgtgtctaccgacccccagccactgaaagaacagcccgccctgaacgacagccggtactgcctgagcagcagactgagagtgtccgccaccttctggcagaacccccggaaccacttcagatgccaggtgcagttctacggcctgagcgagaacgacgagtggacccaggacagagccaagcccgtgacccagatcgtgtctgccgaagcctggggcagagccgattgcggatcccagagcttcggcctgctggaccccaagctgtgctacctgctggatggcatcctgttcatctacggcgtgatcctgaccgccctgttcctgagagtgaagttcagcagaagcgccgacgcccctgcctaccagcagggacagaaccaactgtacaacgagctgaacctgggcagacgggaagagtacgacgtgctggacaagcggagaggcagggaccctgagatgggcggaaagccccagcggagaaagaacccccaggaaggactgtataacgaactccagaaagacaagatggccgaagcctacagcgagatcggcatgaagggcgagcggagaagaggcaagggccacgatggcctgtaccagggcctgagcaccgccaccaaggacacctatgacgccctgcacatgcaggccctgcctccaagaagggccaagcgatctggatctggagcaacaaacttctcactactcaaacaagcaggtgacgtggaggagaatcccgggcctactagtatggactggatttggcgcatccttttccttgtcggcgctgctaccggcgcccattccgggccccaggttcagctgcaagagtctggcggaggacttgctcaagctggcggaagcctgagactgtcttgtgccgcctctggcagaaccttcagcatgggctggtttagacaggcccctggcaaagagagagagttcgtcgccgccatcacatacagcggcggcagcccttactacgcctcttctgtcagaggccggttcaccatcagccgggacaacgccaagaacaccgtgtacctccagatgaacagcctgaagccagaggacaccgccgtgtactactgtgccgccaatccaacctacggcagcgactggaatgccgagaattggggccagggcacccaagtgacagtgtctagtggatccggcggcggaggatctggcggaggcggatctgggggcggaggctctttcgaaatcctgaacgtggaacagagccctcagagcctgcatgtgcaagagggcgacagcaccaacttcacctgtagcttccccagcagcaacttctacgccctgcactggtacagatgggagacagccaagtctcccgaggcactgttcgtgatgaccctgaacggcgacgagaagaagaagggcagaatcagcgccacactgaacaccaaagagggctactcctacctgtacatcaagggcagccagcctgaggacagcgccacttatctgtgcgccagaaacaccggcaaccagttctactttggcaccggcacaagcctgacagtgatccccaacatccagaaccctgatcctgccgtgtaccagctgcgggatagcaagagcagcgacaagagcgtgtgtctgttcaccgacttcgacagccagaccaacgtgtcccagagcaaggactccgacgtgtacatcaccgataagaccgtgctggacatgcggagcatggacttcaagagcaactccgccgtggcctggtccaacaagtccgatttcgcctgcgccaacgccttcaacaacagcattatccccgaggacacattcttcccaagccccgagagcagctgcggtacccagagttttgggttgttggaccctaaattgtgctatctgttggacggaatcctgttcatttacggagtgatcctgaccgcattgttcctgcgggttaagttttccagatccgcagacgcacccgcttaccaacaagggcagaaccaactctacaatgaacttaatttggggcggagggaagagtacgacgttctggacaaaaggaggggacgagatcccgagatgggcggaaagcctcagcgaaggaagaatccgcaagaggggctttataacgaactccagaaagataaaatggcagaagcctatagtgagattgggatgaagggagaaaggaggaggggtaaaggtcacgatgggttgtaccaaggattgagcacagccactaaagatacctatgatgcgctccacatgcaggccctgccgccaaga

SEQ ID NO: 3905 - DNA, 2832 bp, Artificial Sequence
  Synthetic Polynucloetide
atgaccatccggctgctgtgctatatgggcttctacttcctcggagccggcctgatgggcgtgacccagacacctaagttccaggtgctgaaaaccggccagagcatgaccctgcaatgcgcccaggacatgaaccatgagtacatgagctggtacaggcaggaccctggcatgggcctgagactgatccactattctgtcggagccggcatcaccgaccagggcgaagttcctaatggctacaacgtgtccagaagcaccaccgaggacttcccactgagactgctgtctgccgctcctagccagaccagcgtgtacttttgcgccagcagctttcagaccggcgcttcctacggctacacattcggctctggcaccagactgaccgtgctcgaggacctgaagaacgtgttcccacctgaggtggccgtgttcgagcctagcaaggccgagatcgcccacacccagaaagccaccctcgtgtgcctggctaccggcttctaccccgaccatgtggaactgtcttggtgggtcaacggcaaagaggtgcacagcggcgtgtgtaccgacccccagccactgaaagaacagcccgccctgaacgacagccggtactgcctgagcagcagactgagagtgtccgccaccttctggcagaacccccggaaccacttcagatgccaggtgcagttctacggcctgagcgagaacgacgagtggacccaggacagagccaagcccgtgacccagatcgtgtctgccgaagcctggggcagagccgattgcggatcccagagcttcggcctgctggaccccaagctgtgctacctgctggatggcatcctgttcatctacggcgtgatcctgaccgccctgttcctgagagtgaagttcagcagaagcgccgacgcccctgcctaccagcagggacagaaccaactgtacaacgagctgaacctgggcagacgggaagagtacgacgtgctggacaagcggagaggcagggaccctgagatgggcggaaagccccagcggagaaagaacccccaggaaggactgtataacgaactccagaaagacaagatggccgaagcctacagcgagatcggcatgaagggcgagcggagaagaggcaagggccacgatggcctgtaccagggcctgagcaccgccaccaaggacacctatgacgccctgcacatgcaggccctgcctccaagaagggccaagcgatctggatctggagcaacaaacttctcactactcaaacaagcaggtgacgtggaggagaatcccgggcctactagtatggactggatttggcgcatccttttccttgtcggcgctgctaccggcgcccattccgggccccaggttcagctgcaagagtctggcggaggacttgctcaagctggcggaagcctgagactgtcttgtgccgcctctggcagaaccttcagcatgggctggtttagacaggcccctggcaaagagagagagttcgtcgccgccatcacatacagcggcggcagcccttactacgcctcttctgtcagaggccggttcaccatcagccgggacaacgccaagaacaccgtgtacctccagatgaacagcctgaagccagaggacaccgccgtgtactactgtgccgccaatccaacctacggcagcgactggaatgccgagaattggggccagggcacccaagtgacagtgtctagtggatccggcggcggaggatctggcggaggcggatctgggggcggaggctctttcgaaatcctgaacgtggaacagagccctcagagcctgcatgtgcaagagggcgacagcaccaacttcacctgtagcttccccagcagcaacttctacgccctgcactggtacagatgggagacagccaagtctcccgaggcactgttcgtgatgaccctgaacggcgacgagaagaagaagggcagaatcagcgccacactgaacaccaaagagggctactcctacctgtacatcaagggcagccagcctgaggacagcgccacttatctgtgcgccagaaacaccggcaaccagttctactttggcaccggcacaagcctgacagtgatccccaacatccagaaccctgatcctgccgtgtaccagctgcgggatagcaagagcagcgacaagagcgtgtgtctgttcaccgacttcgacagccagaccaacgtgtcccagagcaaggactccgacgtgtacatcaccgataagtgcgtgctggacatgcggagcatggacttcaagagcaactccgccgtggcctggtccaacaagtccgatttcgcctgcgccaacgccttcaacaacagcattatccccgaggacacattcttcccaagcagcgacgtgccctgcggtacccagagttttgggttgttggaccctaaattgtgctatctgttggacggaatcctgttcatttacggagtgatcctgaccgcattgttcctgcgggttaagttttccagatccgcagacgcacccgcttaccaacaagggcagaaccaactctacaatgaacttaatttggggcggagggaagagtacgacgttctggacaaaaggaggggacgagatcccgagatgggcggaaagcctcagcgaaggaagaatccgcaagaggggctttataacgaactccagaaagataaaatggcagaagcctatagtgagattgggatgaagggagaaaggaggaggggtaaaggtcacgatgggttgtaccaaggattgagcacagccactaaagatacctatgatgcgctccacatgcaggccctgccgccaaga

SEQ ID NO: 3906 - DNA, 3045 bp, Artificial Sequence
  Synthetic Polynucloetide
atgaccatccggctgctgtgctatatgggcttctacttcctcggagccggcctgatgggcgtgacccagacacctaagttccaggtgctgaaaaccggccagagcatgaccctgcaatgcgcccaggacatgaaccatgagtacatgagctggtacaggcaggaccctggcatgggcctgagactgatccactattctgtcggagccggcatcaccgaccagggcgaagttcctaatggctacaacgtgtccagaagcaccaccgaggacttcccactgagactgctgtctgccgctcctagccagaccagcgtgtacttttgcgccagcagctttcagaccggcgcttcctacggctacacattcggctctggcaccagactgaccgtgctcgaggggaaaccaattcccaaccctcttctgggactggattcaaccggcagcggcgaggacctgaagaacgtgttcccacctgaggtggccgtgttcgagcctagcgaggccgagatcagccacacccagaaagccaccctcgtgtgcctggctaccggcttctaccccgaccatgtggaactgtcttggtgggtcaacggcaaagaggtgcacagcggcgtgtctaccgacccccagccactgaaagaacagcccgccctgaacgacagccggtactgcctgagcagcagactgagagtgtccgccaccttctggcagaacccccggaaccacttcagatgccaggtgcagttctacggcctgagcgagaacgacgagtggacccaggacagagccaagcccgtgacccagatcgtgtctgccgaagcctggggcagagccgattgcggatcccagagcttcggcctgctggaccccaagctgtgctacctgctggatggcatcctgttcatctacggcgtgatcctgaccgccctgttcctgagagtgaagttcagcagaagcgccgacgcccctgcctaccagcagggacagaaccaactgtacaacgagctgaacctgggcagacgggaagagtacgacgtgctggacaagcggagaggcagggaccctgagatgggcggaaagccccagcggagaaagaacccccaggaaggactgtataacgaactccagaaagacaagatggccgaagcctacagcgagatcggcatgaagggcgagcggagaagaggcaagggccacgatggcctgtaccagggcctgagcaccgccaccaaggacacctatgacgccctgcacatgcaggccctgcctccaagaagggccaagcgatctggatctggagcaacaaacttctcactactcaaacaagcaggtgacgtggaggagaatcccgggcctactagtatggactggatttggcgcatccttttccttgtcggcgctgctaccggcgcccattccgggccccaggttcagctgcaagagtctggcggaggacttgctcaagctggcggaagcctgagactgtcttgtgccgcctctggcagaaccttcagcatgggctggtttagacaggcccctggcaaagagagagagttcgtcgccgccatcacatacagcggcggcagcccttactacgcctcttctgtcagaggccggttcaccatcagccgggacaacgccaagaacaccgtgtacctccagatgaacagcctgaagccagaggacaccgccgtgtactactgtgccgccaatccaacctacggcagcgactggaatgccgagaattggggccagggcacccaagtgacagtgtctagtggatccggcggcggaggatctggcggaggcggatctgggggcggaggctctttcgaaatcctgaacgtggaacagagccctcagagcctgcatgtgcaagagggcgacagcaccaacttcacctgtagcttccccagcagcaacttctacgccctgcactggtacagatgggagacagccaagtctcccgaggcactgttcgtgatgaccctgaacggcgacgagaagaagaagggcagaatcagcgccacactgaacaccaaagagggctactcctacctgtacatcaagggcagccagcctgaggacagcgccacttatctgtgcgccagaaacaccggcaaccagttctactttggcaccggcacaagcctgacagtgatccccaacgagcagaaactgatctcggaagaggatgggagcggcatccagaaccctgatcctgccgtgtaccagctgcgggatagcaagagcagcgacaagagcgtgtgtctgttcaccgacttcgacagccagaccaacgtgtcccagagcaaggactccgacgtgtacatcaccgataagaccgtgctggacatgcggagcatggacttcaagagcaactccgccgtggcctggtccaacaagtccgatttcgcctgcgccaacgccttcaacaacagcattatccccgaggacacattcttcccaagccccgagagcagctgcggtacccagagttttgggttgttggaccctaaattgtgctatctgttggacggaatcctgttcatttacggagtgatcctgaccgcattgttcctgaggagcaagcggtcacggctgctccacagcgattacatgaatatgacaccacgaagaccgggtcctactcgcaaacactaccaaccctacgcacctccccgcgactttgcagcgtaccgatctcgggttaagttttccagatccgcagacgcacccgcttaccaacaagggcagaaccaactctacaatgaacttaatttggggcggagggaagagtacgacgttctggacaaaaggaggggacgagatcccgagatgggcggaaagcctcagcgaaggaagaatccgcaagaggggctttataacgaactccagaaagataaaatggcagaagcctatagtgagattgggatgaagggagaaaggaggaggggtaaaggtcacgatgggttgtaccaaggattgagcacagccactaaagatacctatgatgcgctccacatgcaggccctgccgccaaga

SEQ ID NO: 3907 - DNA, 3168 bp, Artificial Sequence
  Synthetic Polynucloetide
atgaccatccggctgctgtgctatatgggcttctacttcctcggagccggcctgatgggcgtgacccagacacctaagttccaggtgctgaaaaccggccagagcatgaccctgcaatgcgcccaggacatgaaccatgagtacatgagctggtacaggcaggaccctggcatgggcctgagactgatccactattctgtcggagccggcatcaccgaccagggcgaagttcctaatggctacaacgtgtccagaagcaccaccgaggacttcccactgagactgctgtctgccgctcctagccagaccagcgtgtacttttgcgccagcagctttcagaccggcgcttcctacggctacacattcggctctggcaccagactgaccgtgctcgaggggaaaccaattcccaaccctcttctgggactggattcaaccggcagcggcgaggacctgaagaacgtgttcccacctgaggtggccgtgttcgagcctagcgaggccgagatcagccacacccagaaagccaccctcgtgtgcctggctaccggcttctaccccgaccatgtggaactgtcttggtgggtcaacggcaaagaggtgcacagcggcgtgtctaccgacccccagccactgaaagaacagcccgccctgaacgacagccggtactgcctgagcagcagactgagagtgtccgccaccttctggcagaacccccggaaccacttcagatgccaggtgcagttctacggcctgagcgagaacgacgagtggacccaggacagagccaagcccgtgacccagatcgtgtctgccgaagcctggggcagagccgattgcggatcccagagcttcggcctgctggaccccaagctgtgctacctgctggatggcatcctgttcatctacggcgtgatcctgaccgccctgttcctgaggagtaagaggagcaggctcctgcacagtgactacatgaacatgactccacgccgccccggacccacccgcaagcattaccagccctatgccccaccacgcgacttcgcagcctatcgctccagagtgaagttcagcagaagcgccgacgcccctgcctaccagcagggacagaaccaactgtacaacgagctgaacctgggcagacgggaagagtacgacgtgctggacaagcggagaggcagggaccctgagatgggcggaaagccccagcggagaaagaacccccaggaaggactgtataacgaactccagaaagacaagatggccgaagcctacagcgagatcggcatgaagggcgagcggagaagaggcaagggccacgatggcctgtaccagggcctgagcaccgccaccaaggacacctatgacgccctgcacatgcaggccctgcctccaagaagggccaagcgatctggatctggagcaacaaacttctcactactcaaacaagcaggtgacgtggaggagaatcccgggcctactagtatggactggatttggcgcatccttttccttgtcggcgctgctaccggcgcccattccgggccccaggttcagctgcaagagtctggcggaggacttgctcaagctggcggaagcctgagactgtcttgtgccgcctctggcagaaccttcagcatgggctggtttagacaggcccctggcaaagagagagagttcgtcgccgccatcacatacagcggcggcagcccttactacgcctcttctgtcagaggccggttcaccatcagccgggacaacgccaagaacaccgtgtacctccagatgaacagcctgaagccagaggacaccgccgtgtactactgtgccgccaatccaacctacggcagcgactggaatgccgagaattggggccagggcacccaagtgacagtgtctagtggatccggcggcggaggatctggcggaggcggatctgggggcggaggctctttcgaaatcctgaacgtggaacagagccctcagagcctgcatgtgcaagagggcgacagcaccaacttcacctgtagcttccccagcagcaacttctacgccctgcactggtacagatgggagacagccaagtctcccgaggcactgttcgtgatgaccctgaacggcgacgagaagaagaagggcagaatcagcgccacactgaacaccaaagagggctactcctacctgtacatcaagggcagccagcctgaggacagcgccacttatctgtgcgccagaaacaccggcaaccagttctactttggcaccggcacaagcctgacagtgatccccaacgagcagaaactgatctcggaagaggatgggagcggcatccagaaccctgatcctgccgtgtaccagctgcgggatagcaagagcagcgacaagagcgtgtgtctgttcaccgacttcgacagccagaccaacgtgtcccagagcaaggactccgacgtgtacatcaccgataagaccgtgctggacatgcggagcatggacttcaagagcaactccgccgtggcctggtccaacaagtccgatttcgcctgcgccaacgccttcaacaacagcattatccccgaggacacattcttcccaagccccgagagcagctgcggtacccagagttttgggttgttggaccctaaattgtgctatctgttggacggaatcctgttcatttacggagtgatcctgaccgcattgttcctgaggagcaagcggtcacggctgctccacagcgattacatgaatatgacaccacgaagaccgggtcctactcgcaaacactaccaaccctacgcacctccccgcgactttgcagcgtaccgatctcgggttaagttttccagatccgcagacgcacccgcttaccaacaagggcagaaccaactctacaatgaacttaatttggggcggagggaagagtacgacgttctggacaaaaggaggggacgagatcccgagatgggcggaaagcctcagcgaaggaagaatccgcaagaggggctttataacgaactccagaaagataaaatggcagaagcctatagtgagattgggatgaagggagaaaggaggaggggtaaaggtcacgatgggttgtaccaaggattgagcacagccactaaagatacctatgatgcgctccacatgcaggccctgccgccaaga

SEQ ID NO: 3908 - DNA, 3051 bp, Artificial Sequence
  Synthetic Polynucloetide
atgaccatccggctgctgtgctatatgggcttctacttcctcggagccggcctgatgggcgtgacccagacacctaagttccaggtgctgaaaaccggccagagcatgaccctgcaatgcgcccaggacatgaaccatgagtacatgagctggtacaggcaggaccctggcatgggcctgagactgatccactattctgtcggagccggcatcaccgaccagggcgaagttcctaatggctacaacgtgtccagaagcaccaccgaggacttcccactgagactgctgtctgccgctcctagccagaccagcgtgtacttttgcgccagcagctttcagaccggcgcttcctacggctacacattcggctctggcaccagactgaccgtgctcgaggggaaaccaattcccaaccctcttctgggactggattcaaccggcagcggcgaggacctgaagaacgtgttcccacctgaggtggccgtgttcgagcctagcgaggccgagatcagccacacccagaaagccaccctcgtgtgcctggctaccggcttctaccccgaccatgtggaactgtcttggtgggtcaacggcaaagaggtgcacagcggcgtgtctaccgacccccagccactgaaagaacagcccgccctgaacgacagccggtactgcctgagcagcagactgagagtgtccgccaccttctggcagaacccccggaaccacttcagatgccaggtgcagttctacggcctgagcgagaacgacgagtggacccaggacagagccaagcccgtgacccagatcgtgtctgccgaagcctggggcagagccgattgcggatcccagagcttcggcctgctggaccccaagctgtgctacctgctggatggcatcctgttcatctacggcgtgatcctgaccgccctgttcctgagagtgaagttcagcagaagcgccgacgcccctgcctaccagcagggacagaaccaactgtacaacgagctgaacctgggcagacgggaagagtacgacgtgctggacaagcggagaggcagggaccctgagatgggcggaaagccccagcggagaaagaacccccaggaaggactgtataacgaactccagaaagacaagatggccgaagcctacagcgagatcggcatgaagggcgagcggagaagaggcaagggccacgatggcctgtaccagggcctgagcaccgccaccaaggacacctatgacgccctgcacatgcaggccctgcctccaagaagggccaagcgatctggatctggagcaacaaacttctcactactcaaacaagcaggtgacgtggaggagaatcccgggcctactagtatggactggatttggcgcatccttttccttgtcggcgctgctaccggcgcccattccgggccccaggttcagctgcaagagtctggcggaggacttgctcaagctggcggaagcctgagactgtcttgtgccgcctctggcagaaccttcagcatgggctggtttagacaggcccctggcaaagagagagagttcgtcgccgccatcacatacagcggcggcagcccttactacgcctcttctgtcagaggccggttcaccatcagccgggacaacgccaagaacaccgtgtacctccagatgaacagcctgaagccagaggacaccgccgtgtactactgtgccgccaatccaacctacggcagcgactggaatgccgagaattggggccagggcacccaagtgacagtgtctagtggatccggcggcggaggatctggcggaggcggatctgggggcggaggctctttcgaaatcctgaacgtggaacagagccctcagagcctgcatgtgcaagagggcgacagcaccaacttcacctgtagcttccccagcagcaacttctacgccctgcactggtacagatgggagacagccaagtctcccgaggcactgttcgtgatgaccctgaacggcgacgagaagaagaagggcagaatcagcgccacactgaacaccaaagagggctactcctacctgtacatcaagggcagccagcctgaggacagcgccacttatctgtgcgccagaaacaccggcaaccagttctactttggcaccggcacaagcctgacagtgatccccaacgagcagaaactgatctcggaagaggatctggggagcggcatccagaaccctgatcctgccgtgtaccagctgcgggatagcaagagcagcgacaagagcgtgtgtctgttcaccgacttcgacagccagaccaacgtgtcccagagcaaggactccgacgtgtacatcaccgataagaccgtgctggacatgcggagcatggacttcaagagcaactccgccgtggcctggtccaacaagtccgatttcgcctgcgccaacgccttcaacaacagcattatccccgaggacacattcttcccaagccccgagagcagctgcggtacccagagttttgggttgttggaccctaaattgtgctatctgttggacggaatcctgttcatttacggagtgatcctgaccgcattgttcctgaagagaggccggaagaagctgctgtacatcttcaagcagcctttcatgcggcccgtgcagaccacccaggaagaggacggctgctcctgccggttccccgaggaagaagaaggcggctgcgagctgcgggttaagttttccagatccgcagacgcacccgcttaccaacaagggcagaaccaactctacaatgaacttaatttggggcggagggaagagtacgacgttctggacaaaaggaggggacgagatcccgagatgggcggaaagcctcagcgaaggaagaatccgcaagaggggctttataacgaactccagaaagataaaatggcagaagcctatagtgagattgggatgaagggagaaaggaggaggggtaaaggtcacgatgggttgtaccaaggattgagcacagccactaaagatacctatgatgcgctccacatgcaggccctgccgccaaga

SEQ ID NO: 3909 - DNA, 3177 bp, Artificial Sequence
  Synthetic Polynucloetide
atgaccatccggctgctgtgctatatgggcttctacttcctcggagccggcctgatgggcgtgacccagacacctaagttccaggtgctgaaaaccggccagagcatgaccctgcaatgcgcccaggacatgaaccatgagtacatgagctggtacaggcaggaccctggcatgggcctgagactgatccactattctgtcggagccggcatcaccgaccagggcgaagttcctaatggctacaacgtgtccagaagcaccaccgaggacttcccactgagactgctgtctgccgctcctagccagaccagcgtgtacttttgcgccagcagctttcagaccggcgcttcctacggctacacattcggctctggcaccagactgaccgtgctcgaggggaaaccaattcccaaccctcttctgggactggattcaaccggcagcggcgaggacctgaagaacgtgttcccacctgaggtggccgtgttcgagcctagcgaggccgagatcagccacacccagaaagccaccctcgtgtgcctggctaccggcttctaccccgaccatgtggaactgtcttggtgggtcaacggcaaagaggtgcacagcggcgtgtctaccgacccccagccactgaaagaacagcccgccctgaacgacagccggtactgcctgagcagcagactgagagtgtccgccaccttctggcagaacccccggaaccacttcagatgccaggtgcagttctacggcctgagcgagaacgacgagtggacccaggacagagccaagcccgtgacccagatcgtgtctgccgaagcctggggcagagccgattgcggatcccagagcttcggcctgctggaccccaagctgtgctacctgctggatggcatcctgttcatctacggcgtgatcctgaccgccctgttcctgaaacggggcagaaagaaactcctgtatatattcaaacaaccatttatgagaccagtacaaactactcaagaggaagatggctgtagctgccgatttccagaagaagaagaaggaggatgtgaactgagagtgaagttcagcagaagcgccgacgcccctgcctaccagcagggacagaaccaactgtacaacgagctgaacctgggcagacgggaagagtacgacgtgctggacaagcggagaggcagggaccctgagatgggcggaaagccccagcggagaaagaacccccaggaaggactgtataacgaactccagaaagacaagatggccgaagcctacagcgagatcggcatgaagggcgagcggagaagaggcaagggccacgatggcctgtaccagggcctgagcaccgccaccaaggacacctatgacgccctgcacatgcaggccctgcctccaagaagggccaagcgatctggatctggagcaacaaacttctcactactcaaacaagcaggtgacgtggaggagaatcccgggcctactagtatggactggatttggcgcatccttttccttgtcggcgctgctaccggcgcccattccgggccccaggttcagctgcaagagtctggcggaggacttgctcaagctggcggaagcctgagactgtcttgtgccgcctctggcagaaccttcagcatgggctggtttagacaggcccctggcaaagagagagagttcgtcgccgccatcacatacagcggcggcagcccttactacgcctcttctgtcagaggccggttcaccatcagccgggacaacgccaagaacaccgtgtacctccagatgaacagcctgaagccagaggacaccgccgtgtactactgtgccgccaatccaacctacggcagcgactggaatgccgagaattggggccagggcacccaagtgacagtgtctagtggatccggcggcggaggatctggcggaggcggatctgggggcggaggctctttcgaaatcctgaacgtggaacagagccctcagagcctgcatgtgcaagagggcgacagcaccaacttcacctgtagcttccccagcagcaacttctacgccctgcactggtacagatgggagacagccaagtctcccgaggcactgttcgtgatgaccctgaacggcgacgagaagaagaagggcagaatcagcgccacactgaacaccaaagagggctactcctacctgtacatcaagggcagccagcctgaggacagcgccacttatctgtgcgccagaaacaccggcaaccagttctactttggcaccggcacaagcctgacagtgatccccaacgagcagaaactgatctcggaagaggatctggggagcggcatccagaaccctgatcctgccgtgtaccagctgcgggatagcaagagcagcgacaagagcgtgtgtctgttcaccgacttcgacagccagaccaacgtgtcccagagcaaggactccgacgtgtacatcaccgataagaccgtgctggacatgcggagcatggacttcaagagcaactccgccgtggcctggtccaacaagtccgatttcgcctgcgccaacgccttcaacaacagcattatccccgaggacacattcttcccaagccccgagagcagctgcggtacccagagttttgggttgttggaccctaaattgtgctatctgttggacggaatcctgttcatttacggagtgatcctgaccgcattgttcctgaagagaggccggaagaagctgctgtacatcttcaagcagcctttcatgcggcccgtgcagaccacccaggaagaggacggctgctcctgccggttccccgaggaagaagaaggcggctgcgagctgcgggttaagttttccagatccgcagacgcacccgcttaccaacaagggcagaaccaactctacaatgaacttaatttggggcggagggaagagtacgacgttctggacaaaaggaggggacgagatcccgagatgggcggaaagcctcagcgaaggaagaatccgcaagaggggctttataacgaactccagaaagataaaatggcagaagcctatagtgagattgggatgaagggagaaaggaggaggggtaaaggtcacgatgggttgtaccaaggattgagcacagccactaaagatacctatgatgcgctccacatgcaggccctgccgccaaga

SEQ ID NO: 3910 - DNA, 2850 bp, Artificial Sequence
  Synthetic Polynucloetide
atgaccatccggctgctgtgctatatgggcttctacttcctcggagccggcctgatgggcgtgacccagacacctaagttccaggtgctgaaaaccggccagagcatgaccctgcaatgcgcccaggacatgaaccatgagtacatgagctggtacaggcaggaccctggcatgggcctgagactgatccactattctgtcggagccggcatcaccgaccagggcgaagttcctaatggctacaacgtgtccagaagcaccaccgaggacttcccactgagactgctgtctgccgctcctagccagaccagcgtgtacttttgcgccagcagctttcagaccggcgcttcctacggctacacattcggctctggcaccagactgaccgtgctcgagcagagcttcggcctgctggaccccaagctgtgctacctgctggatggcatcctgttcatctacggcgtgatcctgaccgccctgttcctgagagtgaagttcagcagaagcgccgacgcccctgcctaccagcagggacagaaccaactgtacaacgagctgaacctgggcagacgggaagagtacgacgtgctggacaagcggagaggcagggaccctgagatgggcggaaagccccagcggagaaagaacccccaggaaggactgtataacgaactccagaaagacaagatggccgaagcctacagcgagatcggcatgaagggcgagcggagaagaggcaagggccacgatggcctgtaccagggcctgagcaccgccaccaaggacacctatgacgccctgcacatgcaggccctgcctccaagaagggccaagcgatctggatctggagcaacaaacttctcactactcaaacaagcaggtgacgtggaggagaatcccgggcctactagtatggactggatttggcgcatccttttccttgtcggcgctgctaccggcgcccattccgggccccaggttcagctgcaagagtctggcggaggacttgctcaagctggcggaagcctgagactgtcttgtgccgcctctggcagaaccttcagcatgggctggtttagacaggcccctggcaaagagagagagttcgtcgccgccatcacatacagcggcggcagcccttactacgcctcttctgtcagaggccggttcaccatcagccgggacaacgccaagaacaccgtgtacctccagatgaacagcctgaagccagaggacaccgccgtgtactactgtgccgccaatccaacctacggcagcgactggaatgccgagaattggggccagggcacccaagtgacagtgtctagtggatccggcggcggaggatctggcggaggcggatctgggggcggaggctctttcgaaatcctgaacgtggaacagagccctcagagcctgcatgtgcaagagggcgacagcaccaacttcacctgtagcttccccagcagcaacttctacgccctgcactggtacagatgggagacagccaagtctcccgaggcactgttcgtgatgaccctgaacggcgacgagaagaagaagggcagaatcagcgccacactgaacaccaaagagggctactcctacctgtacatcaagggcagccagcctgaggacagcgccacttatctgtgcgccagaaacaccggcaaccagttctactttggcaccggcacaagcctgacagtgatccccaaccagagttttgggttgttggaccctaaattgtgctatctgttggacggaatcctgttcatttacggagtgatcctgaccgcattgttcctgcgggttaagttttccagatccgcagacgcacccgcttaccaacaagggcagaaccaactctacaatgaacttaatttggggcggagggaagagtacgacgttctggacaaaaggaggggacgagatcccgagatgggcggaaagcctcagcgaaggaagaatccgcaagaggggctttataacgaactccagaaagataaaatggcagaagcctatagtgagattgggatgaagggagaaaggaggaggggtaaaggtcacgatgggttgtaccaaggattgagcacagccactaaagatacctatgatgcgctccacatgcaggccctgccgccaagacgcgccaagagaagcggatctggcgtgaagcagaccctgaatttcgacctgctgaagctggctggcgacgtggaatccaacccaggcccttctagaggccatatgaccgagtacaagcccacggtgcgcctcgccacccgcgacgacgtccccagggccgtacgcaccctcgccgccgcgttcgccgactaccccgccacgcgccacaccgtcgatccggaccgccacatcgagcgggtcaccgagctgcaagaactcttcctcacgcgcgtcgggctcgacatcggcaaggtgtgggtcgcggacgacggcgccgcggtggcggtctggaccacgccggagagcgtcgaagcgggggcggtgttcgccgagatcggcccgcgcatggccgagttgagcggttcccggctggccgcgcagcaacagatggaaggcctcctggcgccgcaccggcccaaggagcccgcgtggttcctggccaccgtcggcgtctcgcccgaccaccagggcaagggtctgggcagcgccgtcgtgctccccggagtggaggcggccgagcgcgccggggtgcccgccttcctggagacctccgcgccccgcaacctccccttctacgagcggctcggcttcaccgtcaccgccgacgtcgaggtgcccgaaggaccgcgcacctggtgcatgacccgcaagcccggtgcctga

SEQ ID NO: 3911 - DNA, 2322 bp, Artificial Sequence
  Synthetic Polynucloetide
atgaccatccggctgctgtgctatatgggcttctacttcctcggagccggcctgatgggcgtgacccagacacctaagttccaggtgctgaaaaccggccagagcatgaccctgcaatgcgcccaggacatgaaccatgagtacatgagctggtacaggcaggaccctggcatgggcctgagactgatccactattctgtcggagccggcatcaccgaccagggcgaagttcctaatggctacaacgtgtccagaagcaccaccgaggacttcccactgagactgctgtctgccgctcctagccagaccagcgtgtacttttgcgccagcagctttcagaccggcgcttcctacggctacacattcggctctggcaccagactgaccgtgctcgagggacagcctaaggccaatcctaccgtgacactgttccctccaagcagcgaagaactccaggccaacaaggccacacttgtgtgcctgatctccgacttctaccctggggctgtgacagtggcttggaaggccgatggatctcctgtgaaagccggcgtggaaaccaccaagccatccaagcagagcaacaacaaatacgccgccagctcctacctgagcctgacacctgagcagtggaagtcccacagatcctacagctgccaagtgacccacgaaggcagcaccgtggaaaagacagtggcccctacagagtgcagccccatcaagaccgatgtgattacaatggaccccaaggacaactgctccaaggacgccaacgataccctgctgctccagctgaccaacaccagcgcctactacatgtacttgttgctgctgctgaagtccgtggtgtacttcgccatcatcacatgctgcctgctgcggagaaccgccttctgctgcaacggcgagaagtctagggccaagcgatctggatctggagcaacaaacttctcactactcaaacaagcaggtgacgtggaggagaatcccgggcctactagtatggactggatttggcgcatccttttccttgtcggcgctgctaccggcgcccattccgggccccaggttcagctgcaagagtctggcggaggacttgctcaagctggcggaagcctgagactgtcttgtgccgcctctggcagaaccttcagcatgggctggtttagacaggcccctggcaaagagagagagttcgtcgccgccatcacatacagcggcggcagcccttactacgcctcttctgtcagaggccggttcaccatcagccgggacaacgccaagaacaccgtgtacctccagatgaacagcctgaagccagaggacaccgccgtgtactactgtgccgccaatccaacctacggcagcgactggaatgccgagaattggggccagggcacccaagtgacagtgtctagtggatccggcggcggaggatctggcggaggcggatctgggggcggaggctctttcgaaatcctgaacgtggaacagagccctcagagcctgcatgtgcaagagggcgacagcaccaacttcacctgtagcttccccagcagcaacttctacgccctgcactggtacagatgggagacagccaagtctcccgaggcactgttcgtgatgaccctgaacggcgacgagaagaagaagggcagaatcagcgccacactgaacaccaaagagggctactcctacctgtacatcaagggcagccagcctgaggacagcgccacttatctgtgcgccagaaacaccggcaaccagttctactttggcaccggcacaagcctgacagtgatccccaacgcctctacaaagggaccctccgtgtttcctctggctcccagcagcaagtctacaagcggaggaacagccgctctgggctgcctggtcaaggattactttcccgagcctgtgaccgtgtcctggaatagcggagcactgacaagcggcgtgcacacctttccagccgtgctgcaaagcagcggcctgtactctctgagcagcgtggtcacagtgcctagctctagcctgggcacccagacctacatctgcaatgtgaaccacaagcctagcaacaccaaggtggacaagagagtggaacccaagagctgtgaagtgaaaaccgactccaccgaccacgtgaagcccaaagagacagagaacaccaagcagcccagcaagagctgccacaagcccaaggccatcgtgcacaccgagaaagtgaacatgatgagcctgaccgtgctgggcctgcggatgctgttcgccaaaaccgtggccgtgaacttcctgctgaccgccaagctgttcttcctc

SEQ ID NO: 3912 - DNA, 2256 bp, Artificial Sequence
  Synthetic Polynucloetide
atgaccatccggctgctgtgctatatgggcttctacttcctcggagccggcctgatgggcgtgacccagacacctaagttccaggtgctgaaaaccggccagagcatgaccctgcaatgcgcccaggacatgaaccatgagtacatgagctggtacaggcaggaccctggcatgggcctgagactgatccactattctgtcggagccggcatcaccgaccagggcgaagttcctaatggctacaacgtgtccagaagcaccaccgaggacttcccactgagactgctgtctgccgctcctagccagaccagcgtgtacttttgcgccagcagctttcagaccggcgcttcctacggctacacattcggctctggcaccagactgaccgtgctcgagggacagcctaaggccaatcctaccgtgacactgttccctccaagcagcgaagaactccaggccaacaaggccacacttgtgtgcctgatctccgacttctaccctggggctgtgacagtggcttggaaggccgatggatctcctgtgaaagccggcgtggaaaccaccaagccatccaagcagagcaacaacaaatacgccgccagctcctacctgagcctgacacctgagcagtggaagtcccacagatcctacagctgccaagtgacccacgaaggcagcaccgtggaaaagacagtggcccctacagagtgcagcggcagagccgattgcggcatcaccagcgccagctaccaccagggcgtgctgagcgccaccatcctgtacgagatcctgctgggcaaggccaccctgtacgccgtgctggtgtctgccctggtgctgatggctatggtcaagcggaaggacagccggggaagggccaagcgatctggatctggagcaacaaacttctcactactcaaacaagcaggtgacgtggaggagaatcccgggcctactagtatggactggatttggcgcatccttttccttgtcggcgctgctaccggcgcccattccgggccccaggttcagctgcaagagtctggcggaggacttgctcaagctggcggaagcctgagactgtcttgtgccgcctctggcagaaccttcagcatgggctggtttagacaggcccctggcaaagagagagagttcgtcgccgccatcacatacagcggcggcagcccttactacgcctcttctgtcagaggccggttcaccatcagccgggacaacgccaagaacaccgtgtacctccagatgaacagcctgaagccagaggacaccgccgtgtactactgtgccgccaatccaacctacggcagcgactggaatgccgagaattggggccagggcacccaagtgacagtgtctagtggatccggcggcggaggatctggcggaggcggatctgggggcggaggctctttcgaaatcctgaacgtggaacagagccctcagagcctgcatgtgcaagagggcgacagcaccaacttcacctgtagcttccccagcagcaacttctacgccctgcactggtacagatgggagacagccaagtctcccgaggcactgttcgtgatgaccctgaacggcgacgagaagaagaagggcagaatcagcgccacactgaacaccaaagagggctactcctacctgtacatcaagggcagccagcctgaggacagcgccacttatctgtgcgccagaaacaccggcaaccagttctactttggcaccggcacaagcctgacagtgatccccaacgcctctacaaagggaccctccgtgtttcctctggctcccagcagcaagtctacaagcggaggaacagccgctctgggctgcctggtcaaggattactttcccgagcctgtgaccgtgtcctggaatagcggagcactgacaagcggcgtgcacacctttccagccgtgctgcaaagcagcggcctgtactctctgagcagcgtggtcacagtgcctagctctagcctgggcacccagacctacatctgcaatgtgaaccacaagcctagcaacaccaaggtggacaagagagtggaacccaagagctgtatccccgaggacacattcttcccaagcagcgacgtgccctgcgacgtgaagctggtggaaaagagcttcgagacagacaccaacctgaacttccagaacctgagcgtgatcggcttcagaatcctgctgctgaaagtggccggctttaacctgctgatgaccctgcggctgtggtccagc

SEQ ID NO: 3913 - DNA, 2256 bp, Artificial Sequence
  Synthetic Polynucloetide
atgaccatccggctgctgtgctatatgggcttctacttcctcggagccggcctgatgggcgtgacccagacacctaagttccaggtgctgaaaaccggccagagcatgaccctgcaatgcgcccaggacatgaaccatgagtacatgagctggtacaggcaggaccctggcatgggcctgagactgatccactattctgtcggagccggcatcaccgaccagggcgaagttcctaatggctacaacgtgtccagaagcaccaccgaggacttcccactgagactgctgtctgccgctcctagccagaccagcgtgtacttttgcgccagcagctttcagaccggcgcttcctacggctacacattcggctctggcaccagactgaccgtgctcgagggacagcctaaggccaatcctaccgtgacactgttccctccaagcagcgaagaactccaggccaacaaggccacacttgtgtgcctgatctccgacttctaccctggggctgtgacagtggcttggaaggccgatggatctcctgtgaaagccggcgtggaaaccaccaagccatccaagcagagcaacaacaaatacgccgccagctcctacctgagcctgacacctgagcagtggaagtcccacagatcctacagctgccaagtgacccacgaaggcagcaccgtggaaaagacagtggcccctacagagtgcagcggcagagccgattgcggctttaccagcgagagctaccagcagggcgtgctgagcgccaccatcctgtacgagatcctgctgggcaaggccaccctgtacgccgtgctggtgtctgccctggtgctgatggctatggtcaagcggaaggacagccggggaagggccaagcgatctggatctggagcaacaaacttctcactactcaaacaagcaggtgacgtggaggagaatcccgggcctactagtatggactggatttggcgcatccttttccttgtcggcgctgctaccggcgcccattccgggccccaggttcagctgcaagagtctggcggaggacttgctcaagctggcggaagcctgagactgtcttgtgccgcctctggcagaaccttcagcatgggctggtttagacaggcccctggcaaagagagagagttcgtcgccgccatcacatacagcggcggcagcccttactacgcctcttctgtcagaggccggttcaccatcagccgggacaacgccaagaacaccgtgtacctccagatgaacagcctgaagccagaggacaccgccgtgtactactgtgccgccaatccaacctacggcagcgactggaatgccgagaattggggccagggcacccaagtgacagtgtctagtggatccggcggcggaggatctggcggaggcggatctgggggcggaggctctttcgaaatcctgaacgtggaacagagccctcagagcctgcatgtgcaagagggcgacagcaccaacttcacctgtagcttccccagcagcaacttctacgccctgcactggtacagatgggagacagccaagtctcccgaggcactgttcgtgatgaccctgaacggcgacgagaagaagaagggcagaatcagcgccacactgaacaccaaagagggctactcctacctgtacatcaagggcagccagcctgaggacagcgccacttatctgtgcgccagaaacaccggcaaccagttctactttggcaccggcacaagcctgacagtgatccccaacgcctctacaaagggaccctccgtgtttcctctggctcccagcagcaagtctacaagcggaggaacagccgctctgggctgcctggtcaaggattactttcccgagcctgtgaccgtgtcctggaatagcggagcactgacaagcggcgtgcacacctttccagccgtgctgcaaagcagcggcctgtactctctgagcagcgtggtcacagtgcctagctctagcctgggcacccagacctacatctgcaatgtgaaccacaagcctagcaacaccaaggtggacaagagagtggaacccaagagctgtatccccgaggacacattcttcccaagccccgagagcagctgcgacgtgaagctggtggaaaagagcttcgagacagacaccaacctgaacttccagaacctgagcgtgatcggcttcagaatcctgctgctgaaagtggccggctttaacctgctgatgaccctgcggctgtggtccagc

SEQ ID NO: 3914 - DNA, 1758 bp, Artificial Sequence
  Synthetic Polynucloetide
atggactggatttggcgcatccttttccttgtcggcgctgctaccggcgcccattccgggccccaggttcagctgcaagagtctggcggaggacttgctcaagctggcggaagcctgagactgtcttgtgccgcctctggcagaaccttcagcatgggctggtttagacaggcccctggcaaagagagagagttcgtcgccgccatcacatacagcggcggcagcccttactacgcctcttctgtcagaggccggttcaccatcagccgggacaacgccaagaacaccgtgtacctccagatgaacagcctgaagccagaggacaccgccgtgtactactgtgccgccaatccaacctacggcagcgactggaatgccgagaattggggccagggcacccaagtgacagtgtctagtggatccggcggcggaggatctggcggaggcggatctgggggcggaggctctttcgaaatcctgaacgtggaacagagccctcagagcctgcatgtgcaagagggcgacagcaccaacttcacctgtagcttccccagcagcaacttctacgccctgcactggtacagatgggagacagccaagtctcccgaggcactgttcgtgatgaccctgaacggcgacgagaagaagaagggcagaatcagcgccacactgaacaccaaagagggctactcctacctgtacatcaagggcagccagcctgaggacagcgccacttatctgtgcgccagaaacaccggcaaccagttctactttggcaccggcacaagcctgacagtgatccccaacggcggaggcggaagtggaggcggaggatctggcggcggaggctctggcgtgacccagacacctaagttccaggtgctgaaaaccggccagagcatgaccctgcaatgcgcccaggacatgaaccatgagtacatgagctggtacaggcaggaccctggcatgggcctgagactgatccactattctgtcggagccggcatcaccgaccagggcgaagttcctaatggctacaacgtgtccagaagcaccaccgaggacttcccactgagactgctgtctgccgctcctagccagaccagcgtgtacttttgcgccagcagctttcagaccggcgcttcctacggctacacattcggctctggcaccagactgaccgtgacgcgtggcggaggcagcgacggtaacgaggagatgggaggaatcactcaaaccccttacaaagtctcaatttcaggaacaactgttatccttacatgtccccagtatcctggcagcgagatcctttggcagcataacgacaagaatatagggggagatgaagacgataagaatatcggatctgacgaggatcacttgagcctgaaagagttctccgagcttgaacaaagcggatattatgtgtgctatccgcgcgggtcaaagccggaagacgctaacttttacctttatctccgagccagagtgtgcgaaaattgcatggaaatggacgttatgtccgttgctacaatagttatcgtagatatatgcatcacgggtggactgcttctgctggtttattattggtccaagaatagaaaggccaaagctaaacccgtgaccagaggcgctggcgcaggcggaaggcaaaggggacaaaacaaagaacggccaccaccagtgccaaatccagattatgagcctattcggaaaggacagagggacctgtactctggcctgaatcagagaagaatc

SEQ ID NO: 3915 - DNA, 1653 bp, Artificial Sequence
  Synthetic Polynucloetide
atggactggatttggcgcatccttttccttgtcggcgctgctaccggcgcccattccgggccccaggttcagctgcaagagtctggcggaggacttgctcaagctggcggaagcctgagactgtcttgtgccgcctctggcagaaccttcagcatgggctggtttagacaggcccctggcaaagagagagagttcgtcgccgccatcacatacagcggcggcagcccttactacgcctcttctgtcagaggccggttcaccatcagccgggacaacgccaagaacaccgtgtacctccagatgaacagcctgaagccagaggacaccgccgtgtactactgtgccgccaatccaacctacggcagcgactggaatgccgagaattggggccagggcacccaagtgacagtgtctagtggatccggcggcggaggatctggcggaggcggatctgggggcggaggctctttcgaaatcctgaacgtggaacagagccctcagagcctgcatgtgcaagagggcgacagcaccaacttcacctgtagcttccccagcagcaacttctacgccctgcactggtacagatgggagacagccaagtctcccgaggcactgttcgtgatgaccctgaacggcgacgagaagaagaagggcagaatcagcgccacactgaacaccaaagagggctactcctacctgtacatcaagggcagccagcctgaggacagcgccacttatctgtgcgccagaaacaccggcaaccagttctactttggcaccggcacaagcctgacagtgatccccaacggcggaggcggaagtggaggcggaggatctggcggcggaggctctggcgtgacccagacacctaagttccaggtgctgaaaaccggccagagcatgaccctgcaatgcgcccaggacatgaaccatgagtacatgagctggtacaggcaggaccctggcatgggcctgagactgatccactattctgtcggagccggcatcaccgaccagggcgaagttcctaatggctacaacgtgtccagaagcaccaccgaggacttcccactgagactgctgtctgccgctcctagccagaccagcgtgtacttttgcgccagcagctttcagaccggcgcttcctacggctacacattcggctctggcaccagactgaccgtgacgcgtggcggaggcagcttcaagatccccatcgaggaactggaagatcgggtgttcgtgaactgcaacacctctatcacctgggtggaaggcaccgtgggaacactgctgagcgacatcaccagactggacctcggcaagcggattctggaccctcggggcatctacagatgcaacggcaccgacatctacaaggacaaagaaagcaccgtgcaggtccactacagaatgtgccagtcctgcgtggaactggaccctgctacagtggccggcatcatcgtgaccgatgtgatcgctactctgctgctggctctgggagtgttctgcttcgccggacacgaaacaggcagactgtctggcgctgccgatacacaggccctgctgagaaacgaccaagtgtatcagcccctgcgcgacagagatgatgcccagtattctcacctcggcggcaactgggctagaaacaag

SEQ ID NO: 3916 - DNA, 1683 bp, Artificial Sequence
  Synthetic Polynucloetide
atggactggatttggcgcatccttttccttgtcggcgctgctaccggcgcccattccgggccccaggttcagctgcaagagtctggcggaggacttgctcaagctggcggaagcctgagactgtcttgtgccgcctctggcagaaccttcagcatgggctggtttagacaggcccctggcaaagagagagagttcgtcgccgccatcacatacagcggcggcagcccttactacgcctcttctgtcagaggccggttcaccatcagccgggacaacgccaagaacaccgtgtacctccagatgaacagcctgaagccagaggacaccgccgtgtactactgtgccgccaatccaacctacggcagcgactggaatgccgagaattggggccagggcacccaagtgacagtgtctagtggatccggcggcggaggatctggcggaggcggatctgggggcggaggctctttcgaaatcctgaacgtggaacagagccctcagagcctgcatgtgcaagagggcgacagcaccaacttcacctgtagcttccccagcagcaacttctacgccctgcactggtacagatgggagacagccaagtctcccgaggcactgttcgtgatgaccctgaacggcgacgagaagaagaagggcagaatcagcgccacactgaacaccaaagagggctactcctacctgtacatcaagggcagccagcctgaggacagcgccacttatctgtgcgccagaaacaccggcaaccagttctactttggcaccggcacaagcctgacagtgatccccaacggcggaggcggaagtggaggcggaggatctggcggcggaggctctggcgtgacccagacacctaagttccaggtgctgaaaaccggccagagcatgaccctgcaatgcgcccaggacatgaaccatgagtacatgagctggtacaggcaggaccctggcatgggcctgagactgatccactattctgtcggagccggcatcaccgaccagggcgaagttcctaatggctacaacgtgtccagaagcaccaccgaggacttcccactgagactgctgtctgccgctcctagccagaccagcgtgtacttttgcgccagcagctttcagaccggcgcttcctacggctacacattcggctctggcaccagactgaccgtgacgcgtggcggaggcagccagagcatcaagggcaaccacctggtcaaggtgtacgactaccaagaggacggcagcgtgctgctgacatgtgatgccgaggccaagaacatcacctggtttaaggacggcaagatgatcggcttcctgaccgaggacaagaagaagtggaacctgggcagcaacgctaaggaccccagaggcatgtatcagtgcaagggcagccagaacaagagcaagcccctccaggtgtactaccggatgtgccagaactgcatcgagctgaacgccgctaccatcagcggctttctgttcgccgagatcgtgtccatcttcgtgctggccgtgggcgtgtactttatcgctggacaggatggcgtgcggcagagcagagcttccgataagcaaaccctgctgcctaacgaccagctgtaccagcctctgaaggacagagaggacgaccagtacagccacctccagggcaatcagctgagaagaaac

SEQ ID NO: 3917 - DNA, 1632 bp, Artificial Sequence
  Synthetic Polynucloetide
atggactggatttggcgcatccttttccttgtcggcgctgctaccggcgcccattccgggccccaggttcagctgcaagagtctggcggaggacttgctcaagctggcggaagcctgagactgtcttgtgccgcctctggcagaaccttcagcatgggctggtttagacaggcccctggcaaagagagagagttcgtcgccgccatcacatacagcggcggcagcccttactacgcctcttctgtcagaggccggttcaccatcagccgggacaacgccaagaacaccgtgtacctccagatgaacagcctgaagccagaggacaccgccgtgtactactgtgccgccaatccaacctacggcagcgactggaatgccgagaattggggccagggcacccaagtgacagtgtctagtggatccggcggcggaggatctggcggaggcggatctgggggcggaggctctttcgaaatcctgaacgtggaacagagccctcagagcctgcatgtgcaagagggcgacagcaccaacttcacctgtagcttccccagcagcaacttctacgccctgcactggtacagatgggagacagccaagtctcccgaggcactgttcgtgatgaccctgaacggcgacgagaagaagaagggcagaatcagcgccacactgaacaccaaagagggctactcctacctgtacatcaagggcagccagcctgaggacagcgccacttatctgtgcgccagaaacaccggcaaccagttctactttggcaccggcacaagcctgacagtgatccccaacggcggaggcggaagtggaggcggaggatctggcggcggaggctctggcgtgacccagacacctaagttccaggtgctgaaaaccggccagagcatgaccctgcaatgcgcccaggacatgaaccatgagtacatgagctggtacaggcaggaccctggcatgggcctgagactgatccactattctgtcggagccggcatcaccgaccagggcgaagttcctaatggctacaacgtgtccagaagcaccaccgaggacttcccactgagactgctgtctgccgctcctagccagaccagcgtgtacttttgcgccagcagctttcagaccggcgcttcctacggctacacattcggctctggcaccagactgaccgtgacgcgtggcggaggcagccagagttttgggttgttggaccctaaattgtgctatctgttggacggaatcctgttcatttacggagtgatcctgaccgcattgttcctgcgggttaagttttccagatccgcagacgcacccgcttaccaacaagggcagaaccaactctacaatgaacttaatttggggcggagggaagagtacgacgttctggacaaaaggaggggacgagatcccgagatgggcggaaagcctcagcgaaggaagaatccgcaagaggggctttataacgaactccagaaagataaaatggcagaagcctatagtgagattgggatgaagggagaaaggaggaggggtaaaggtcacgatgggttgtaccaaggattgagcacagccactaaagatacctatgatgcgctccacatgcaggccctgccgccaaga

SEQ ID NO: 3918 - DNA, 1728 bp, Artificial Sequence
  Synthetic Polynucloetide
atggactggatttggcgcatccttttccttgtcggcgctgctaccggcgcccattccgggccccaggttcagctgcaagagtctggcggaggacttgctcaagctggcggaagcctgagactgtcttgtgccgcctctggcagaaccttcagcatgggctggtttagacaggcccctggcaaagagagagagttcgtcgccgccatcacatacagcggcggcagcccttactacgcctcttctgtcagaggccggttcaccatcagccgggacaacgccaagaacaccgtgtacctccagatgaacagcctgaagccagaggacaccgccgtgtactactgtgccgccaatccaacctacggcagcgactggaatgccgagaattggggccagggcacccaagtgacagtgtctagtggatccggcggcggaggatctggcggaggcggatctgggggcggaggctctttcgaaatcctgaacgtggaacagagccctcagagcctgcatgtgcaagagggcgacagcaccaacttcacctgtagcttccccagcagcaacttctacgccctgcactggtacagatgggagacagccaagtctcccgaggcactgttcgtgatgaccctgaacggcgacgagaagaagaagggcagaatcagcgccacactgaacaccaaagagggctactcctacctgtacatcaagggcagccagcctgaggacagcgccacttatctgtgcgccagaaacaccggcaaccagttctactttggcaccggcacaagcctgacagtgatccccaacatccagaaccctgatcctgccgtgtaccagctgcgggatagcaagagcagcgacaagagcgtgtgtctgttcaccgacttcgacagccagaccaacgtgtcccagagcaaggactccgacgtgtacatcaccgataagaccgtgctggacatgcggagcatggacttcaagagcaactccgccgtggcctggtccaacaagtccgatttcgcctgcgccaacgccttcaacaacagcattatccccgaggacacattcttcccaagccccgagagcagctgcgacgtgaagctggtggaaaagagcttcgagacagacaccaacctgaacttccagaacctgagcgtgatcggcttcagaatcctgctgctgaaagtggccggctttaacctgctgatgaccctgcggctgtggtccagccgcgccaagagaagcggatctggcgtgaagcagaccctgaatttcgacctgctgaagctggctggcgacgtggaatccaacccaggcccttctagaggccatatggccaagcctttgtctcaagaagaatccaccctcattgaaagagcaacggctacaatcaacagcatccccatctctgaagactacagcgtcgccagcgcagctctctctagcgacggccgcatcttcactggtgtcaatgtatatcattttactgggggaccttgtgcagaactcgtggtgctgggcactgctgctgctgcggcagctggcaacctgacttgtatcgtcgcgatcggaaatgagaacaggggcatcttgagcccctgcggacggtgccgacaggtgcttctcgatctgcatcctgggatcaaagccatagtgaaggacagtgatggacagccgacggcagttgggattcgtgaattgctgccctctggttatgtgtgggagggctga

SEQ ID NO: 3919 - DNA, 1227 bp, Artificial Sequence
  Synthetic Polynucloetide
atggactggatttggcgcatccttttccttgtcggcgctgctaccggcgcccattccgggccccaggttcagctgcaagagtctggcggaggacttgctcaagctggcggaagcctgagactgtcttgtgccgcctctggcagaaccttcagcatgggctggtttagacaggcccctggcaaagagagagagttcgtcgccgccatcacatacagcggcggcagcccttactacgcctcttctgtcagaggccggttcaccatcagccgggacaacgccaagaacaccgtgtacctccagatgaacagcctgaagccagaggacaccgccgtgtactactgtgccgccaatccaacctacggcagcgactggaatgccgagaattggggccagggcacccaagtgacagtgtctagtggatccggcggcggaggatctggcggaggcggatctgggggcggaggctctttcgaaatcctgaacgtggaacagagccctcagagcctgcatgtgcaagagggcgacagcaccaacttcacctgtagcttccccagcagcaacttctacgccctgcactggtacagatgggagacagccaagtctcccgaggcactgttcgtgatgaccctgaacggcgacgagaagaagaagggcagaatcagcgccacactgaacaccaaagagggctactcctacctgtacatcaagggcagccagcctgaggacagcgccacttatctgtgcgccagaaacaccggcaaccagttctactttggcaccggcacaagcctgacagtgatccccaacatccagaaccctgatcctgccgtgtaccagctgcgggatagcaagagcagcgacaagagcgtgtgtctgttcaccgacttcgacagccagaccaacgtgtcccagagcaaggactccgacgtgtacatcaccgataagaccgtgctggacatgcggagcatggacttcaagagcaactccgccgtggcctggtccaacaagtccgatttcgcctgcgccaacgccttcaacaacagcattatccccgaggacacattcttcccaagccccgagagcagctgcgacgtgaagctggtggaaaagagcttcgagacagacaccaacctgaacttccagaacctgagcgtgatcggcttcagaatcctgctgctgaaagtggccggctttaacctgctgatgaccctgcggctgtggtccagc

SEQ ID NO: 3920 - DNA, 1764 bp, Artificial Sequence
  Synthetic Polynucloetide
atggactggatttggcgcatccttttccttgtcggcgctgctaccggcgcccattccgggccccaggttcagctgcaagagtctggcggaggacttgctcaagctggcggaagcctgagactgtcttgtgccgcctctggcagaaccttcagcatgggctggtttagacaggcccctggcaaagagagagagttcgtcgccgccatcacatacagcggcggcagcccttactacgcctcttctgtcagaggccggttcaccatcagccgggacaacgccaagaacaccgtgtacctccagatgaacagcctgaagccagaggacaccgccgtgtactactgtgccgccaatccaacctacggcagcgactggaatgccgagaattggggccagggcacccaagtgacagtgtctagtggatccggcggcggaggatctggcggaggcggatctgggggcggaggctctttcgaaatcctgaacgtggaacagagccctcagagcctgcatgtgcaagagggcgacagcaccaacttcacctgtagcttccccagcagcaacttctacgccctgcactggtacagatgggagacagccaagtctcccgaggcactgttcgtgatgaccctgaacggcgacgagaagaagaagggcagaatcagcgccacactgaacaccaaagagggctactcctacctgtacatcaagggcagccagcctgaggacagcgccacttatctgtgcgccagaaacaccggcaaccagttctactttggcaccggcacaagcctgacagtgatccccaacgagcagaaactgatctcggaagaggatgggagcggcatccagaaccctgatcctgccgtgtaccagctgcgggatagcaagagcagcgacaagagcgtgtgtctgttcaccgacttcgacagccagaccaacgtgtcccagagcaaggactccgacgtgtacatcaccgataagtgcgtgctggacatgcggagcatggacttcaagagcaactccgccgtggcctggtccaacaagtccgatttcgcctgcgccaacgccttcaacaacagcattatccccgaggacacattcttcccaagccccgagagcagctgcgacgtgaagctggtggaaaagagcttcgagacagacaccaacctgaacttccagaacctgagcgtgatcggcttcagaatcctgctgctgaaagtggccggctttaacctgctgatgaccctgcggctgtggtccagccgcgccaagagaagcggatctggcgtgaagcagaccctgaatttcgacctgctgaagctggctggcgacgtggaatccaacccaggcccttctagaggccatatggccaagcctttgtctcaagaagaatccaccctcattgaaagagcaacggctacaatcaacagcatccccatctctgaagactacagcgtcgccagcgcagctctctctagcgacggccgcatcttcactggtgtcaatgtatatcattttactgggggaccttgtgcagaactcgtggtgctgggcactgctgctgctgcggcagctggcaacctgacttgtatcgtcgcgatcggaaatgagaacaggggcatcttgagcccctgcggacggtgccgacaggtgcttctcgatctgcatcctgggatcaaagccatagtgaaggacagtgatggacagccgacggcagttgggattcgtgaattgctgccctctggttatgtgtgggagggctga

SEQ ID NO: 3921 - DNA, 1266 bp, Artificial Sequence
  Synthetic Polynucloetide
atggactggatttggcgcatccttttccttgtcggcgctgctaccggcgcccattccgggccccaggttcagctgcaagagtctggcggaggacttgctcaagctggcggaagcctgagactgtcttgtgccgcctctggcagaaccttcagcatgggctggtttagacaggcccctggcaaagagagagagttcgtcgccgccatcacatacagcggcggcagcccttactacgcctcttctgtcagaggccggttcaccatcagccgggacaacgccaagaacaccgtgtacctccagatgaacagcctgaagccagaggacaccgccgtgtactactgtgccgccaatccaacctacggcagcgactggaatgccgagaattggggccagggcacccaagtgacagtgtctagtggatccggcggcggaggatctggcggaggcggatctgggggcggaggctctttcgaaatcctgaacgtggaacagagccctcagagcctgcatgtgcaagagggcgacagcaccaacttcacctgtagcttccccagcagcaacttctacgccctgcactggtacagatgggagacagccaagtctcccgaggcactgttcgtgatgaccctgaacggcgacgagaagaagaagggcagaatcagcgccacactgaacaccaaagagggctactcctacctgtacatcaagggcagccagcctgaggacagcgccacttatctgtgcgccagaaacaccggcaaccagttctactttggcaccggcacaagcctgacagtgatccccaacgagcagaaactgatctcggaagaggatgggagcggcatccagaaccctgatcctgccgtgtaccagctgcgggatagcaagagcagcgacaagagcgtgtgtctgttcaccgacttcgacagccagaccaacgtgtcccagagcaaggactccgacgtgtacatcaccgataagtgcgtgctggacatgcggagcatggacttcaagagcaactccgccgtggcctggtccaacaagtccgatttcgcctgcgccaacgccttcaacaacagcattatccccgaggacacattcttcccaagccccgagagcagctgcgacgtgaagctggtggaaaagagcttcgagacagacaccaacctgaacttccagaacctgagcgtgatcggcttcagaatcctgctgctgaaagtggccggctttaacctgctgatgaccctgcggctgtggtccagctga

SEQ ID NO: 3922 - DNA, 1890 bp, Artificial Sequence
  Synthetic Polynucloetide
atgaccatccggctgctgtgctatatgggcttctacttcctcggagccggcctgatggcatgccaggtccagctcgtcgagtccggcggcggcctcgtccaggccggcgactccgtcaccctctcctgcaccgcctccggccgcaccttctcctcctacgccctcgcctggttccgccagcgccccggcaaggagcgcgagttcgtcgccggcctccgctggggcggccccaccaactacgccgactccgtcaaggaccgcttcaccatctccggcgactccgccaagcacaccatgtacctccagatgaactccctcaagcccgaggacaccgccgtctactactgcggctacaaccccggcggctgggccgtcccctcccagtacgagtacgactcctggggccagggcacccaggtcaccgtctcctccggtaccggcggaggcggatctggcggcggaggtagcggtggcggaggatctgaattcggcgtgacccagacacctaagttccaggtgctgaaaaccggccagagcatgaccctgcaatgcgcccaggacatgaaccatgagtacatgagctggtacaggcaggaccctggcatgggcctgagactgatccactattctgtcggagccggcatcaccgaccagggcgaagttcctaatggctacaacgtgtccagaagcaccaccgaggacttcccactgagactgctgtctgccgctcctagccagaccagcgtgtacttttgcgccagcagctttcagaccggcgcttcctacggctacacattcggctctggcaccagactgaccgtgggcggaggcggaagtggaggcggaggatctggcggcggaggctctatcctgaacgtggaacagagccctcagagcctgcatgtgcaagagggcgacagcaccaacttcacctgtagcttccccagcagcaacttctacgccctgcactggtacagatgggagacagccaagtctcccgaggcactgttcgtgatgaccctgaacggcgacgagaagaagaagggcagaatcagcgccacactgaacaccaaagagggctactcctacctgtacatcaagggcagccagcctgaggacagcgccacttatctgtgcgccagaaacaccggcaaccagttctactttggcaccggcacaagcctgacagtgatccccaacgagcagaaactgatctcggaagaggatctgaaaattgaagttatgtatcctcctccttacctagacaatgagaagagcaatggaaccattatccatgtgaaagggaaacacctttgtccaagtcccctatttcccggaccttctaagcccttttgggtgctggtggtggttgggggagtcctggcttgctatagcttgctagtaacagtggcctttattattttctgggtgaggagtaagaggagcaggctcctgcacagtgactacatgaacatgactccacgccgccccggacccacccgcaagcattaccagccctatgccccaccacgcgacttcgcagcctatcgctccagagtgaagttcagcaggagcgcagacgcccccgcgtaccagcagggccagaaccagctctataacgagctcaatctaggacgaagagaggagtacgatgttttggacaagagacgtggccgggaccctgagatggggggaaagccgagaaggaagaaccctcaggaaggcctgtacaatgaactgcagaaagataagatggcggaggcctacagtgagattgggatgaaaggcgagcgccggaggggcaaggggcacgatggcctttaccagggtctcagtacagccaccaaggacacctacgacgcccttcacatgcaggccctgccccctcgc

SEQ ID NO: 3923 - DNA, 1911 bp, Artificial Sequence
  Synthetic Polynucloetide
atgaccatccggctgctgtgctatatgggcttctacttcctcggagccggcctgatggcatgccaggtccagctcgtcgagtccggcggcggcctcgtccaggccggcgactccgtcaccctctcctgcaccgcctccggccgcaccttctcctcctacgccctcgcctggttccgccagcgccccggcaaggagcgcgagttcgtcgccggcctccgctggggcggccccaccaactacgccgactccgtcaaggaccgcttcaccatctccggcgactccgccaagcacaccatgtacctccagatgaactccctcaagcccgaggacaccgccgtctactactgcggctacaaccccggcggctgggccgtcccctcccagtacgagtacgactcctggggccagggcacccaggtcaccgtctcctccggtaccggcggaggcggatctggcggcggaggtagcggtggcggaggatctgaattcggcgtgacccagacacctaagttccaggtgctgaaaaccggccagagcatgaccctgcaatgcgcccaggacatgaaccatgagtacatgagctggtacaggcaggaccctggcatgggcctgagactgatccactattctgtcggagccggcatcaccgaccagggcgaagttcctaatggctacaacgtgtccagaagcaccaccgaggacttcccactgagactgctgtctgccgctcctagccagaccagcgtgtacttttgcgccagcagctttcagaccggcgcttcctacggctacacattcggctctggcaccagactgaccgtgggcggaggcggaagtggaggcggaggatctggcggcggaggctctatcctgaacgtggaacagagccctcagagcctgcatgtgcaagagggcgacagcaccaacttcacctgtagcttccccagcagcaacttctacgccctgcactggtacagatgggagacagccaagtctcccgaggcactgttcgtgatgaccctgaacggcgacgagaagaagaagggcagaatcagcgccacactgaacaccaaagagggctactcctacctgtacatcaagggcagccagcctgaggacagcgccacttatctgtgcgccagaaacaccggcaaccagttctactttggcaccggcacaagcctgacagtgatccccaacgagcagaaactgatctcggaagaggatctggcgaagcccaccacgacgccagcgccgcgaccaccaacaccggcgcccaccatcgcgtcgcagcccctgtccctgcgcccagaggcgtgccggccagcggcggggggcgcagtgcacacgagggggctggacttcgcctgtgacatctacatctgggcgcccttggccgggacttgtggggtccttctcctgtcactggttatcaccctttactgcaaacggggcagaaagaaactcctgtatatattcaaacaaccatttatgagaccagtacaaactactcaagaggaagatggctgtagctgccgatttccagaagaagaagaaggaggatgtgaactgagagtgaagttcagcaggagcgcagacgcccccgcgtaccagcagggccagaaccagctctataacgagctgaatctaggacgaagagaggagtacgatgttttggacaagagacgtggccgggaccctgagatggggggaaagccgagaaggaagaaccctcaggaaggcctgtacaatgaactgcagaaagataagatggcggaggcctacagtgagattgggatgaaaggcgagcgccggaggggcaaggggcacgatggcctttaccagggtctcagtacagccaccaaggacacctacgacgcccttcacatgcaggccctgccccctcgctga

SEQ ID NO: 3924 - DNA, 3150 bp, Artificial Sequence
  Synthetic Polynucloetide
atgaccatccggctgctgtgctatatgggcttctacttcctcggagccggcctgatggcatgccaggtccagctcgtcgagtccggcggcggcctcgtccaggccggcgactccgtcaccctctcctgcaccgcctccggccgcaccttctcctcctacgccctcgcctggttccgccagcgccccggcaaggagcgcgagttcgtcgccggcctccgctggggcggccccaccaactacgccgactccgtcaaggaccgcttcaccatctccggcgactccgccaagcacaccatgtacctccagatgaactccctcaagcccgaggacaccgccgtctactactgcggctacaaccccggcggctgggccgtcccctcccagtacgagtacgactcctggggccagggcacccaggtcaccgtctcctccggtaccggcggaggcggatctggcggcggaggtagcggtggcggaggatctgaattcggcgtgacccagacacctaagttccaggtgctgaaaaccggccagagcatgaccctgcaatgcgcccaggacatgaaccatgagtacatgagctggtacaggcaggaccctggcatgggcctgagactgatccactattctgtcggagccggcatcaccgaccagggcgaagttcctaatggctacaacgtgtccagaagcaccaccgaggacttcccactgagactgctgtctgccgctcctagccagaccagcgtgtacttttgcgccagcagctttcagaccggcgcttcctacggctacacattcggctctggcaccagactgaccgtgggcggaggcggaagtggaggcggaggatctggcggcggaggctctatcctgaacgtggaacagagccctcagagcctgcatgtgcaagagggcgacagcaccaacttcacctgtagcttccccagcagcaacttctacgccctgcactggtacagatgggagacagccaagtctcccgaggcactgttcgtgatgaccctgaacggcgacgagaagaagaagggcagaatcagcgccacactgaacaccaaagagggctactcctacctgtacatcaagggcagccagcctgaggacagcgccacttatctgtgcgccagaaacaccggcaaccagttctactttggcaccggcacaagcctgacagtgatccccaacgagcagaaactgatctcggaagaggatctggcgaagcccaccacgacgccagcgccgcgaccaccaacaccggcgcccaccatcgcgtcgcagcccctgtccctgcgcccagaggcgtgccggccagcggcggggggcgcagtgcacacgagggggctggacttcgcctgtgacatctacatctgggcgcccttggccgggacttgtggggtccttctcctgtcactggttatcaccctttactgcgggcgcgccagagtgaagttcagcaggagcgcagacgcccccgcgtaccagcagggccagaaccagctctataacgagctgaatctaggacgaagagaggagtacgatgttttggacaagagacgtggccgggaccctgagatggggggaaagccgagaaggaagaaccctcaggaaggcctgtacaatgaactgcagaaagataagatggcggaggcctacagtgagattgggatgaaaggcgagcgccggaggggcaaggggcacgatggcctttaccagggtctcagtacagccaccaaggacacctacgacgcccttcacatgcaggccctgccccctcgctctagaggatctggagcaacaaacttctcactactcaaacaagcaggtgacgtggaggagaatcccgggcctgggatccacatggccacttacgaggttctctgtgaggtggcgcggaaactgggcacggatgacagggaagtggtattgttcctcctaaacgtgttcatacctcaacccacactggcccaattaattggagctcttagagctttaaaggaggagggcaggttaacgtttcccctgttagcggaatgtctgtttcgtgcaggtcgcagagacctcttgcgcgacctgcttcacttagacccgcgttttttagagcgccacctagcgggcacaatgagttatttcagcccttatcagctcactgttctccacgtagacggggagctgtgtgcgagggatattaggtctttgatatttttaagcaaggacactatagggtctcgcagcacaccacagacattcttacactgggtgtactgtatggaaaacttagacctactgggtcccactgacgtggatgccctaatgtcaatgcttagatctttgtcaagagtagacctacagcgccaagtgcaaaccctaatgggccttcacctttccggcccatcacactcccaacactatcgccatacaccactcgagaccgatttctacgactacaaggacgacgatgacaagactagtggctccggcgagggcagaggaagtctactaacctgcggagatgtggaagaaaatcctggcccacatatgaccgagtacaagcccacggtgcgcctcgccacccgcgacgacgtccccagggccgtacgcaccctcgccgccgcgttcgccgactaccccgccacgcgccacaccgtcgatccggaccgccacatcgagcgggtcaccgagctgcaagaactcttcctcacgcgcgtcgggctcgacatcggcaaggtgtgggtcgcggacgacggcgccgcggtggcggtctggaccacgccggagagcgtcgaagcgggggcggtgttcgccgagatcggcccgcgcatggccgagttgagcggttcccggctggccgcgcagcaacagatggaaggcctcctggcgccgcaccggcccaaggagcccgcgtggttcctggccaccgtcggcgtctcgcccgaccaccagggcaagggtctgggcagcgccgtcgtgctccccggagtggaggcggccgagcgcgccggggtgcccgccttcctggagacctccgcgccccgcaacctccccttctacgagcggctcggcttcaccgtcaccgccgacgtcgaggtgcccgaaggaccgcgcacctggtgcatgacccgcaagcccggtgcctga

SEQ ID NO: 3925 - DNA, 2973 bp, Artificial Sequence
  Synthetic Polynucloetide
atgaccatccggctgctgtgctatatgggcttctacttcctcggagccggcctgatggcatgccaggtccagctcgtcgagtccggcggcggcctcgtccaggccggcgactccgtcaccctctcctgcaccgcctccggccgcaccttctcctcctacgccctcgcctggttccgccagcgccccggcaaggagcgcgagttcgtcgccggcctccgctggggcggccccaccaactacgccgactccgtcaaggaccgcttcaccatctccggcgactccgccaagcacaccatgtacctccagatgaactccctcaagcccgaggacaccgccgtctactactgcggctacaaccccggcggctgggccgtcccctcccagtacgagtacgactcctggggccagggcacccaggtcaccgtctcctccggtaccggcggaggcggatctggcggcggaggtagcggtggcggaggatctgaattcggcgtgacccagacacctaagttccaggtgctgaaaaccggccagagcatgaccctgcaatgcgcccaggacatgaaccatgagtacatgagctggtacaggcaggaccctggcatgggcctgagactgatccactattctgtcggagccggcatcaccgaccagggcgaagttcctaatggctacaacgtgtccagaagcaccaccgaggacttcccactgagactgctgtctgccgctcctagccagaccagcgtgtacttttgcgccagcagctttcagaccggcgcttcctacggctacacattcggctctggcaccagactgaccgtgctcgagatccagaaccctgatcctgccgtgtaccagctgcgggatagcaagagcagcgacaagagcgtgtgtctgttcaccgacttcgacagccagaccaacgtgtcccagagcaaggactccgacgtgtacatcaccgataagtgcgtgctggacatgcggagcatggacttcaagagcaactccgccgtggcctggtccaacaagtccgatttcgcctgcgccaacgccttcaacaacagcattatccccgaggacacattcttcccaagcagcgacgtgccctgcgacgtgaagctggtggaaaagagcttcgagacagacaccaacctgaacttccagaacctgagcgtgatcggcttcagaatcctgctgctgaaagtggccggctttaacctgctgatgaccctgcggctgtggtccagccgcgccaagagaagcggatctggcgtgaagcagaccctgaatttcgacctgctgaagctggctggcgacgtggaatccaacccaggccctactagtatggcctgtcctggcttcctgtgggctcttgtgatctccacctgtcttgagttcagcatgttcgaaatcctgaacgtggaacagagccctcagagcctgcatgtgcaagagggcgacagcaccaacttcacctgtagcttccccagcagcaacttctacgccctgcactggtacagatgggagacagccaagtctcccgaggcactgttcgtgatgaccctgaacggcgacgagaagaagaagggcagaatcagcgccacactgaacaccaaagagggctactcctacctgtacatcaagggcagccagcctgaggacagcgccacttatctgtgcgccagaaacaccggcaaccagttctactttggcaccggcacaagcctgacagtgatccccaacgaggacctgaagaacgtgttcccacctgaggtggccgtgttcgagcctagcaaggccgagatcgcccacacccagaaagccaccctcgtgtgcctggctaccggcttctaccccgaccatgtggaactgtcttggtgggtcaacggcaaagaggtgcacagcggcgtgtgtaccgacccccagccactgaaagaacagcccgccctgaacgacagccggtactgcctgagcagcagactgagagtgtccgccaccttctggcagaacccccggaaccacttcagatgccaggtgcagttctacggcctgagcgagaacgacgagtggacccaggacagagccaagcccgtgacccagatcgtgtctgccgaagcctggggcagagccgattgcggcatcaccagcgccagctaccaccagggcgtgctgagcgccaccatcctgtacgagatcctgctgggcaaggccaccctgtacgccgtgctggtgtctgccctggtgctgatggctatggtcaagcggaaggacagccggggaagggccaagcgatctggatctggagcaacaaacttctcactactcaaacaagcaggtgacgtggaggagaatcccgggccttctagaggccatatgaccgagtacaagcccacggtgcgcctcgccacccgcgacgacgtccccagggccgtacgcaccctcgccgccgcgttcgccgactaccccgccacgcgccacaccgtcgatccggaccgccacatcgagcgggtcaccgagctgcaagaactcttcctcacgcgcgtcgggctcgacatcggcaaggtgtgggtcgcggacgacggcgccgcggtggcggtctggaccacgccggagagcgtcgaagcgggggcggtgttcgccgagatcggcccgcgcatggccgagttgagcggttcccggctggccgcgcagcaacagatggaaggcctcctggcgccgcaccggcccaaggagcccgcgtggttcctggccaccgtcggcgtctcgcccgaccaccagggcaagggtctgggcagcgccgtcgtgctccccggagtggaggcggccgagcgcgccggggtgcccgccttcctggagacctccgcgccccgcaacctccccttctacgagcggctcggcttcaccgtcaccgccgacgtcgaggtgcccgaaggaccgcgcacctggtgcatgacccgcaagcccggtgcctga

SEQ ID NO: 3926 - DNA, 2970 bp, Artificial Sequence
  Synthetic Polynucloetide
atgaccatccggctgctgtgctatatgggcttctacttcctcggagccggcctgatggcatgccaggtccagctcgtcgagtccggcggcggcctcgtccaggccggcgactccgtcaccctctcctgcaccgcctccggccgcaccttctcctcctacgccctcgcctggttccgccagcgccccggcaaggagcgcgagttcgtcgccggcctccgctggggcggccccaccaactacgccgactccgtcaaggaccgcttcaccatctccggcgactccgccaagcacaccatgtacctccagatgaactccctcaagcccgaggacaccgccgtctactactgcggctacaaccccggcggctgggccgtcccctcccagtacgagtacgactcctggggccagggcacccaggtcaccgtctcctccggtaccggcggaggcggatctggcggcggaggtagcggtggcggaggatctgaattcggcgtgacccagacacctaagttccaggtgctgaaaaccggccagagcatgaccctgcaatgcgcccaggacatgaaccatgagtacatgagctggtacaggcaggaccctggcatgggcctgagactgatccactattctgtcggagccggcatcaccgaccagggcgaagttcctaatggctacaacgtgtccagaagcaccaccgaggacttcccactgagactgctgtctgccgctcctagccagaccagcgtgtacttttgcgccagcagctttcagaccggcgcttcctacggctacacattcggctctggcaccagactgaccgtgctcgaggacctgaagaacgtgttcccacctgaggtggccgtgttcgagcctagcaaggccgagatcgcccacacccagaaagccaccctcgtgtgcctggctaccggcttctaccccgaccatgtggaactgtcttggtgggtcaacggcaaagaggtgcacagcggcgtgtgtaccgacccccagccactgaaagaacagcccgccctgaacgacagccggtactgcctgagcagcagactgagagtgtccgccaccttctggcagaacccccggaaccacttcagatgccaggtgcagttctacggcctgagcgagaacgacgagtggacccaggacagagccaagcccgtgacccagatcgtgtctgccgaagcctggggcagagccgattgcggcatcaccagcgccagctaccaccagggcgtgctgagcgccaccatcctgtacgagatcctgctgggcaaggccaccctgtacgccgtgctggtgtctgccctggtgctgatggctatggtcaagcggaaggacagccggggaagggccaagcgatctggatctggagcaacaaacttctcactactcaaacaagcaggtgacgtggaggagaatcccgggcctactagtatggcctgtcctggcttcctgtgggctcttgtgatctccacctgtcttgagttcagcatgttcgaaatcctgaacgtggaacagagccctcagagcctgcatgtgcaagagggcgacagcaccaacttcacctgtagcttccccagcagcaacttctacgccctgcactggtacagatgggagacagccaagtctcccgaggcactgttcgtgatgaccctgaacggcgacgagaagaagaagggcagaatcagcgccacactgaacaccaaagagggctactcctacctgtacatcaagggcagccagcctgaggacagcgccacttatctgtgcgccagaaacaccggcaaccagttctactttggcaccggcacaagcctgacagtgatccccaacatccagaaccctgatcctgccgtgtaccagctgcgggatagcaagagcagcgacaagagcgtgtgtctgttcaccgacttcgacagccagaccaacgtgtcccagagcaaggactccgacgtgtacatcaccgataagtgcgtgctggacatgcggagcatggacttcaagagcaactccgccgtggcctggtccaacaagtccgatttcgcctgcgccaacgccttcaacaacagcattatccccgaggacacattcttcccaagcagcgacgtgccctgcgacgtgaagctggtggaaaagagcttcgagacagacaccaacctgaacttccagaacctgagcgtgatcggcttcagaatcctgctgctgaaagtggccggctttaacctgctgatgaccctgcggctgtggtccagccgcgccaagagaagcggatctggcgtgaagcagaccctgaatttcgacctgctgaagctggctggcgacgtggaatccaacccaggcccttctagaggccatatgaccgagtacaagcccacggtgcgcctcgccacccgcgacgacgtccccagggccgtacgcaccctcgccgccgcgttcgccgactaccccgccacgcgccacaccgtcgatccggaccgccacatcgagcgggtcaccgagctgcaagaactcttcctcacgcgcgtcgggctcgacatcggcaaggtgtgggtcgcggacgacggcgccgcggtggcggtctggaccacgccggagagcgtcgaagcgggggcggtgttcgccgagatcggcccgcgcatggccgagttgagcggttcccggctggccgcgcagcaacagatggaaggcctcctggcgccgcaccggcccaaggagcccgcgtggttcctggccaccgtcggcgtctcgcccgaccaccagggcaagggtctgggcagcgccgtcgtgctccccggagtggaggcggccgagcgcgccggggtgcccgccttcctggagacctccgcgccccgcaacctccccttctacgagcggctcggcttcaccgtcaccgccgacgtcgaggtgcccgaaggaccgcgcacctggtgcatgacccgcaagcccggtgcctga

SEQ ID NO: 3927 - DNA, 2268 bp, Artificial Sequence
  Synthetic Polynucloetide
atgaccatccggctgctgtgctatatgggcttctacttcctcggagccggcctgatggcatgccaggtccagctcgtcgagtccggcggcggcctcgtccaggccggcgactccgtcaccctctcctgcaccgcctccggccgcaccttctcctcctacgccctcgcctggttccgccagcgccccggcaaggagcgcgagttcgtcgccggcctccgctggggcggccccaccaactacgccgactccgtcaaggaccgcttcaccatctccggcgactccgccaagcacaccatgtacctccagatgaactccctcaagcccgaggacaccgccgtctactactgcggctacaaccccggcggctgggccgtcccctcccagtacgagtacgactcctggggccagggcacccaggtcaccgtctcctccggtaccggcggaggcggatctggcggcggaggtagcggtggcggaggatctgaattcggcgtgacccagacacctaagttccaggtgctgaaaaccggccagagcatgaccctgcaatgcgcccaggacatgaaccatgagtacatgagctggtacaggcaggaccctggcatgggcctgagactgatccactattctgtcggagccggcatcaccgaccagggcgaagttcctaatggctacaacgtgtccagaagcaccaccgaggacttcccactgagactgctgtctgccgctcctagccagaccagcgtgtacttttgcgccagcagctttcagaccggcgcttcctacggctacacattcggctctggcaccagactgaccgtgctcgaggacctgaagaacgtgttcccacctgaggtggccgtgttcgagcctagcgaggccgagatcagccacacccagaaagccaccctcgtgtgcctggctaccggcttctaccccgaccatgtggaactgtcttggtgggtcaacggcaaagaggtgcacagcggcgtgtgtaccgacccccagccactgaaagaacagcccgccctgaacgacagccggtactgcctgagcagcagactgagagtgtccgccaccttctggcagaacccccggaaccacttcagatgccaggtgcagttctacggcctgagcgagaacgacgagtggacccaggacagagccaagcccgtgacccagatcgtgtctgccgaagcctggggcagagccgattgcggctttaccagcgagagctaccagcagggcgtgctgagcgccaccatcctgtacgagatcctgctgggcaaggccaccctgtacgccgtgctggtgtctgccctggtgctgatggctatggtcaagcggaaggacagccggggaagggccaagcgatctggatctggagcaacaaacttctcactactcaaacaagcaggtgacgtggaggagaatcccgggcctactagtatggcctgtcctggcttcctgtgggctcttgtgatctccacctgtcttgagttcagcatgttcgaaatcctgaacgtggaacagagccctcagagcctgcatgtgcaagagggcgacagcaccaacttcacctgtagcttccccagcagcaacttctacgccctgcactggtacagatgggagacagccaagtctcccgaggcactgttcgtgatgaccctgaacggcgacgagaagaagaagggcagaatcagcgccacactgaacaccaaagagggctactcctacctgtacatcaagggcagccagcctgaggacagcgccacttatctgtgcgccagaaacaccggcaaccagttctactttggcaccggcacaagcctgacagtgatccccaacatccagaaccctgatcctgccgtgtaccagctgcgggatagcaagagcagcgacaagagcgtgtgtctgttcaccgacttcgacagccagaccaacgtgtcccagagcaaggactccgacgtgtacatcaccgataagtgcgtgctggacatgcggagcatggacttcaagagcaactccgccgtggcctggtccaacaagtccgatttcgcctgcgccaacgccttcaacaacagcattatccccgaggacacattcttcccaagccccgagagcagctgcgacgtgaagctggtggaaaagagcttcgagacagacaccaacctgaacttccagaacctgagcgtgatcggcttcagaatcctgctgctgaaagtggccggctttaacctgctgatgaccctgcggctgtggtccagc

SEQ ID NO: 3928 - DNA, 2943 bp, Artificial Sequence
  Synthetic Polynucloetide
atgaccatccggctgctgtgctatatgggcttctacttcctcggagccggcctgatggcatgccaggtccagctcgtcgagtccggcggcggcctcgtccaggccggcgactccgtcaccctctcctgcaccgcctccggccgcaccttctcctcctacgccctcgcctggttccgccagcgccccggcaaggagcgcgagttcgtcgccggcctccgctggggcggccccaccaactacgccgactccgtcaaggaccgcttcaccatctccggcgactccgccaagcacaccatgtacctccagatgaactccctcaagcccgaggacaccgccgtctactactgcggctacaaccccggcggctgggccgtcccctcccagtacgagtacgactcctggggccagggcacccaggtcaccgtctcctccggtaccggcggaggcggatctggcggcggaggtagcggtggcggaggatctgaattcggcgtgacccagacacctaagttccaggtgctgaaaaccggccagagcatgaccctgcaatgcgcccaggacatgaaccatgagtacatgagctggtacaggcaggaccctggcatgggcctgagactgatccactattctgtcggagccggcatcaccgaccagggcgaagttcctaatggctacaacgtgtccagaagcaccaccgaggacttcccactgagactgctgtctgccgctcctagccagaccagcgtgtacttttgcgccagcagctttcagaccggcgcttcctacggctacacattcggctctggcaccagactgaccgtgctcgaggacctgaagaacgtgttcccacctgaggtggccgtgttcgagcctagcgaggccgagatcagccacacccagaaagccaccctcgtgtgcctggctaccggcttctaccccgaccatgtggaactgtcttggtgggtcaacggcaaagaggtgcacagcggcgtgtgtaccgacccccagccactgaaagaacagcccgccctgaacgacagccggtactgcctgagcagcagactgagagtgtccgccaccttctggcagaacccccggaaccacttcagatgccaggtgcagttctacggcctgagcgagaacgacgagtggacccaggacagagccaagcccgtgacccagatcgtgtctgccgaagcctggggcagagccgattgcggctttaccagcgagagctaccagcagggcgtgctgagcgccaccatcctgtacgagatcctgctgggcaaggccaccctgtacgccgtgctggtgtctgccctggtgctgatggctatggtcaagcggaaggacagccggggaagggccaagcgatctggatctggagcaacaaacttctcactactcaaacaagcaggtgacgtggaggagaatcccgggcctactagtatggcctgtcctggcttcctgtgggctcttgtgatctccacctgtcttgagttcagcatgttcgaaatcctgaacgtggaacagagccctcagagcctgcatgtgcaagagggcgacagcaccaacttcacctgtagcttccccagcagcaacttctacgccctgcactggtacagatgggagacagccaagtctcccgaggcactgttcgtgatgaccctgaacggcgacgagaagaagaagggcagaatcagcgccacactgaacaccaaagagggctactcctacctgtacatcaagggcagccagcctgaggacagcgccacttatctgtgcgccagaaacaccggcaaccagttctactttggcaccggcacaagcctgacagtgatccccaacatccagaaccctgatcctgccgtgtaccagctgcgggatagcaagagcagcgacaagagcgtgtgtctgttcaccgacttcgacagccagaccaacgtgtcccagagcaaggactccgacgtgtacatcaccgataagtgcgtgctggacatgcggagcatggacttcaagagcaactccgccgtggcctggtccaacaagtccgatttcgcctgcgccaacgccttcaacaacagcattatccccgaggacacattcttcccaagccccgagagcagctgcgacgtgaagctggtggaaaagagcttcgagacagacaccaacctgaacttccagaacctgagcgtgatcggcttcagaatcctgctgctgaaagtggccggctttaacctgctgatgaccctgcggctgtggtccagccgcgccaagagaagcggatctggcgtgaagcagaccctgaatttcgacctgctgaagctggctggcgacgtggaatccaacccaggcccttctagaggcgggatccacaccatggctacctacgaggtgctgtgcgaggtggcaagaaagctgggcaccgacgacagagaagtggtgctgttcctgctgaacgtgttcatccctcagcctacactggcccagctgatcggtgcactgagagccctgaaagaggaaggccggctgacctttcctctgctggccgaatgcctgttcagagccggaagaagggatctgctgcgggacctgctgcatctggaccccagatttctggaaagacacctggccggcaccatgagctacttcagcccttaccagctgaccgtgctgcacgttgacggcgaactgtgcgccagagatattcggagcctgatcttcctgagcaaggacaccatcggcagccggtctacccctcagacatttctgcactgggtgtactgcatggaaaacctggacctgctcggccccacagatgtggatgccctgatgtccatgctgagaagcctgagcagagtggacctccagagacaggtgcagacactgatgggactgcacctgagcggacctagccacagccagcactacagacacacccct

SEQ ID NO: 3929 - DNA, 2280 bp, Artificial Sequence
  Synthetic Polynucloetide
atgaccatccggctgctgtgctatatgggcttctacttcctcggagccggcctgatggcatgccaggtccagctcgtcgagtccggcggcggcctcgtccaggccggcgactccgtcaccctctcctgcaccgcctccggccgcaccttctcctcctacgccctcgcctggttccgccagcgccccggcaaggagcgcgagttcgtcgccggcctccgctggggcggccccaccaactacgccgactccgtcaaggaccgcttcaccatctccggcgactccgccaagcacaccatgtacctccagatgaactccctcaagcccgaggacaccgccgtctactactgcggctacaaccccggcggctgggccgtcccctcccagtacgagtacgactcctggggccagggcacccaggtcaccgtctcctccggtaccggcggaggcggatctggcggcggaggtagcggtggcggaggatctgaattcggcgtgacccagacacctaagttccaggtgctgaaaaccggccagagcatgaccctgcaatgcgcccaggacatgaaccatgagtacatgagctggtacaggcaggaccctggcatgggcctgagactgatccactattctgtcggagccggcatcaccgaccagggcgaagttcctaatggctacaacgtgtccagaagcaccaccgaggacttcccactgagactgctgtctgccgctcctagccagaccagcgtgtacttttgcgccagcagctttcagaccggcgcttcctacggctacacattcggctctggcaccagactgaccgtgctcgagatccagaaccctgatcctgccgtgtaccagctgcgggatagcaagagcagcgacaagagcgtgtgtctgttcaccgacttcgacagccagaccaacgtgtcccagagcaaggactccgacgtgtacatcaccgataagtgcgtgctggacatgcggagcatggacttcaagagcaactccgccgtggcctggtccaacaagtccgatttcgcctgcgccaacgccttcaacaacagcattatccccgaggacacattcttcccaagccccgagagcagctgcgacgtgaagctggtggaaaagagcttcgagacagacaccaacctgaacttccagaacctgagcgtgatcggcttcagaatcctgctgctgaaagtggccggctttaacctgctgatgaccctgcggctgtggtccagccgcgccaagagaagcggatctggcgtgaagcagaccctgaatttcgacctgctgaagctggctggcgacgtggaatccaacccaggccctactagtatggcctgtcctggcttcctgtgggctcttgtgatctccacctgtcttgagttcagcatgttcgaaatcctgaacgtggaacagagccctcagagcctgcatgtgcaagagggcgacagcaccaacttcacctgtagcttccccagcagcaacttctacgccctgcactggtacagatgggagacagccaagtctcccgaggcactgttcgtgatgaccctgaacggcgacgagaagaagaagggcagaatcagcgccacactgaacaccaaagagggctactcctacctgtacatcaagggcagccagcctgaggacagcgccacttatctgtgcgccagaaacaccggcaaccagttctactttggcaccggcacaagcctgacagtgatccccaacgaggacctgaagaacgtgttcccacctgaggtggccgtgttcgagcctagcgaggccgagatcagccacacccagaaagccaccctcgtgtgcctggctaccggcttctaccccgaccatgtggaactgtcttggtgggtcaacggcaaagaggtgcacagcggcgtgtgtaccgacccccagccactgaaagaacagcccgccctgaacgacagccggtactgcctgagcagcagactgagagtgtccgccaccttctggcagaacccccggaaccacttcagatgccaggtgcagttctacggcctgagcgagaacgacgagtggacccaggacagagccaagcccgtgacccagatcgtgtctgccgaagcctggggcagagccgattgcggctttaccagcgagagctaccagcagggcgtgctgagcgccaccatcctgtacgagatcctgctgggcaaggccaccctgtacgccgtgctggtgtctgccctggtgctgatggctatggtcaagcggaaggacagccgggga

SEQ ID NO: 3930 - DNA, 2946 bp, Artificial Sequence
  Synthetic Polynucloetide
atgaccatccggctgctgtgctatatgggcttctacttcctcggagccggcctgatggcatgccaggtccagctcgtcgagtccggcggcggcctcgtccaggccggcgactccgtcaccctctcctgcaccgcctccggccgcaccttctcctcctacgccctcgcctggttccgccagcgccccggcaaggagcgcgagttcgtcgccggcctccgctggggcggccccaccaactacgccgactccgtcaaggaccgcttcaccatctccggcgactccgccaagcacaccatgtacctccagatgaactccctcaagcccgaggacaccgccgtctactactgcggctacaaccccggcggctgggccgtcccctcccagtacgagtacgactcctggggccagggcacccaggtcaccgtctcctccggtaccggcggaggcggatctggcggcggaggtagcggtggcggaggatctgaattcggcgtgacccagacacctaagttccaggtgctgaaaaccggccagagcatgaccctgcaatgcgcccaggacatgaaccatgagtacatgagctggtacaggcaggaccctggcatgggcctgagactgatccactattctgtcggagccggcatcaccgaccagggcgaagttcctaatggctacaacgtgtccagaagcaccaccgaggacttcccactgagactgctgtctgccgctcctagccagaccagcgtgtacttttgcgccagcagctttcagaccggcgcttcctacggctacacattcggctctggcaccagactgaccgtgctcgagatccagaaccctgatcctgccgtgtaccagctgcgggatagcaagagcagcgacaagagcgtgtgtctgttcaccgacttcgacagccagaccaacgtgtcccagagcaaggactccgacgtgtacatcaccgataagtgcgtgctggacatgcggagcatggacttcaagagcaactccgccgtggcctggtccaacaagtccgatttcgcctgcgccaacgccttcaacaacagcattatccccgaggacacattcttcccaagccccgagagcagctgcgacgtgaagctggtggaaaagagcttcgagacagacaccaacctgaacttccagaacctgagcgtgatcggcttcagaatcctgctgctgaaagtggccggctttaacctgctgatgaccctgcggctgtggtccagccgcgccaagagaagcggatctggcgtgaagcagaccctgaatttcgacctgctgaagctggctggcgacgtggaatccaacccaggccctactagtatggcctgtcctggcttcctgtgggctcttgtgatctccacctgtcttgagttcagcatgttcgaaatcctgaacgtggaacagagccctcagagcctgcatgtgcaagagggcgacagcaccaacttcacctgtagcttccccagcagcaacttctacgccctgcactggtacagatgggagacagccaagtctcccgaggcactgttcgtgatgaccctgaacggcgacgagaagaagaagggcagaatcagcgccacactgaacaccaaagagggctactcctacctgtacatcaagggcagccagcctgaggacagcgccacttatctgtgcgccagaaacaccggcaaccagttctactttggcaccggcacaagcctgacagtgatccccaacgaggacctgaagaacgtgttcccacctgaggtggccgtgttcgagcctagcgaggccgagatcagccacacccagaaagccaccctcgtgtgcctggctaccggcttctaccccgaccatgtggaactgtcttggtgggtcaacggcaaagaggtgcacagcggcgtgtgtaccgacccccagccactgaaagaacagcccgccctgaacgacagccggtactgcctgagcagcagactgagagtgtccgccaccttctggcagaacccccggaaccacttcagatgccaggtgcagttctacggcctgagcgagaacgacgagtggacccaggacagagccaagcccgtgacccagatcgtgtctgccgaagcctggggcagagccgattgcggctttaccagcgagagctaccagcagggcgtgctgagcgccaccatcctgtacgagatcctgctgggcaaggccaccctgtacgccgtgctggtgtctgccctggtgctgatggctatggtcaagcggaaggacagccggggaagggccaagcgatctggatctggagcaacaaacttctcactactcaaacaagcaggtgacgtggaggagaatcccgggccttctagaggcgggatccacaccatggctacctacgaggtgctgtgcgaggtggcaagaaagctgggcaccgacgacagagaagtggtgctgttcctgctgaacgtgttcatccctcagcctacactggcccagctgatcggtgcactgagagccctgaaagaggaaggccggctgacctttcctctgctggccgaatgcctgttcagagccggaagaagggatctgctgcgggacctgctgcatctggaccccagatttctggaaagacacctggccggcaccatgagctacttcagcccttaccagctgaccgtgctgcacgttgacggcgaactgtgcgccagagatattcggagcctgatcttcctgagcaaggacaccatcggcagccggtctacccctcagacatttctgcactgggtgtactgcatggaaaacctggacctgctcggccccacagatgtggatgccctgatgtccatgctgagaagcctgagcagagtggacctccagagacaggtgcagacactgatgggactgcacctgagcggacctagccacagccagcactacagacacacccct

SEQ ID NO: 3931 - DNA, 3096 bp, Artificial Sequence
  Synthetic Polynucloetide
atgaccatccggctgctgtgctatatgggcttctacttcctcggagccggcctgatgctcgaggggaaaccaattcccaaccctcttctgggactggattcaaccggcagcggcgaggacctgaagaacgtgttcccacctgaggtggccgtgttcgagcctagcaaggccgagatcgcccacacccagaaagccaccctcgtgtgcctggctaccggcttctaccccgaccatgtggaactgtcttggtgggtcaacggcaaagaggtgcacagcggcgtgtgtaccgacccccagccactgaaagaacagcccgccctgaacgacagccggtactgcctgagcagcagactgagagtgtccgccaccttctggcagaacccccggaaccacttcagatgccaggtgcagttctacggcctgagcgagaacgacgagtggacccaggacagagccaagcccgtgacccagatcgtgtctgccgaagcctggggcagagccgattgcggcatcaccagcgccagctaccaccagggcgtgctgagcgccaccatcctgtacgagatcctgctgggcaaggccaccctgtacgccgtgctggtgtctgccctggtgctgatggctatggtcaagcggaaggacagccggggaagggccaagcgatctggatctggagcaacaaacttctcactactcaaacaagcaggtgacgtggaggagaatcccgggcctactagcatgaccatccggctgctgtgctatatgggcttctacttcctcggagccggcctgatggcatgccaggtccagctcgtcgagtccggcggcggcctcgtccaggccggcgactccgtcaccctctcctgcaccgcctccggccgcaccttctcctcctacgccctcgcctggttccgccagcgccccggcaaggagcgcgagttcgtcgccggcctccgctggggcggccccaccaactacgccgactccgtcaaggaccgcttcaccatctccggcgactccgccaagcacaccatgtacctccagatgaactccctcaagcccgaggacaccgccgtctactactgcggctacaaccccggcggctgggccgtcccctcccagtacgagtacgactcctggggccagggcacccaggtcaccgtctcctccggtaccggcggaggcggatctggcggcggaggtagcggtggcggaggatctgaattcggcgtgacccagacacctaagttccaggtgctgaaaaccggccagagcatgaccctgcaatgcgcccaggacatgaaccatgagtacatgagctggtacaggcaggaccctggcatgggcctgagactgatccactattctgtcggagccggcatcaccgaccagggcgaagttcctaatggctacaacgtgtccagaagcaccaccgaggacttcccactgagactgctgtctgccgctcctagccagaccagcgtgtacttttgcgccagcagctttcagaccggcgcttcctacggctacacattcggctctggcaccagactgaccgtgggcggaggcggaagtggaggcggaggatctggcggcggaggctctatcctgaacgtggaacagagccctcagagcctgcatgtgcaagagggcgacagcaccaacttcacctgtagcttccccagcagcaacttctacgccctgcactggtacagatgggagacagccaagtctcccgaggcactgttcgtgatgaccctgaacggcgacgagaagaagaagggcagaatcagcgccacactgaacaccaaagagggctactcctacctgtacatcaagggcagccagcctgaggacagcgccacttatctgtgcgccagaaacaccggcaaccagttctactttggcaccggcacaagcctgacagtgatccccaacgagcagaaactgatctcggaagaggatgggagcggcatccagaaccctgatcctgccgtgtaccagctgcgggatagcaagagcagcgacaagagcgtgtgtctgttcaccgacttcgacagccagaccaacgtgtcccagagcaaggactccgacgtgtacatcaccgataagtgcgtgctggacatgcggagcatggacttcaagagcaactccgccgtggcctggtccaacaagtccgatttcgcctgcgccaacgccttcaacaacagcattatccccgaggacacattcttcccaagcagcgacgtgccctgcgacgtgaagctggtggaaaagagcttcgagacagacaccaacctgaacttccagaacctgagcgtgatcggcttcagaatcctgctgctgaaagtggccggctttaacctgctgatgaccctgcggctgtggtccagccgcgccaagagaagcggatctggcgtgaagcagaccctgaatttcgacctgctgaagctggctggcgacgtggaatccaacccaggcccttctagaggccatatgaccgagtacaagcccacggtgcgcctcgccacccgcgacgacgtccccagggccgtacgcaccctcgccgccgcgttcgccgactaccccgccacgcgccacaccgtcgatccggaccgccacatcgagcgggtcaccgagctgcaagaactcttcctcacgcgcgtcgggctcgacatcggcaaggtgtgggtcgcggacgacggcgccgcggtggcggtctggaccacgccggagagcgtcgaagcgggggcggtgttcgccgagatcggcccgcgcatggccgagttgagcggttcccggctggccgcgcagcaacagatggaaggcctcctggcgccgcaccggcccaaggagcccgcgtggttcctggccaccgtcggcgtctcgcccgaccaccagggcaagggtctgggcagcgccgtcgtgctccccggagtggaggcggccgagcgcgccggggtgcccgccttcctggagacctccgcgccccgcaacctccccttctacgagcggctcggcttcaccgtcaccgccgacgtcgaggtgcccgaaggaccgcgcacctggtgcatgacccgcaagcccggtgcctga

SEQ ID NO: 3932 - DNA, 3099 bp, Artificial Sequence
  Synthetic Polynucloetide
atgaccatccggctgctgtgctatatgggcttctacttcctcggagccggcctgatgctcgagcagaaactgatctcggaagaggatctgggctccggcgatcgccctgatcctgccgtgtaccagctgcgggatagcaagagcagcgacaagagcgtgtgtctgttcaccgacttcgacagccagaccaacgtgtcccagagcaaggactccgacgtgtacatcaccgataagtgcgtgctggacatgcggagcatggacttcaagagcaactccgccgtggcctggtccaacaagtccgatttcgcctgcgccaacgccttcaacaacagcattatccccgaggacacattcttcccaagccccgagagcagctgcgacgtgaagctggtggaaaagagcttcgagacagacaccaacctgaacttccagaacctgagcgtgatcggcttcagaatcctgctgctgaaagtggccggctttaacctgctgatgaccctgcggctgtggtccagctctagtcgcgccaagagaagcggatctggcgtgaagcagaccctgaatttcgacctgctgaagctggctggcgacgtggaatccaacccaggccccactagcatgaccatccggctgctgtgctatatgggcttctacttcctcggagccggcctgatggcatgccaggtccagctcgtcgagtccggcggcggcctcgtccaggccggcgactccgtcaccctctcctgcaccgcctccggccgcaccttctcctcctacgccctcgcctggttccgccagcgccccggcaaggagcgcgagttcgtcgccggcctccgctggggcggccccaccaactacgccgactccgtcaaggaccgcttcaccatctccggcgactccgccaagcacaccatgtacctccagatgaactccctcaagcccgaggacaccgccgtctactactgcggctacaaccccggcggctgggccgtcccctcccagtacgagtacgactcctggggccagggcacccaggtcaccgtctcctccggtaccggcggaggcggatctggcggcggaggtagcggtggcggaggatctgaattcggcgtgacccagacacctaagttccaggtgctgaaaaccggccagagcatgaccctgcaatgcgcccaggacatgaaccatgagtacatgagctggtacaggcaggaccctggcatgggcctgagactgatccactattctgtcggagccggcatcaccgaccagggcgaagttcctaatggctacaacgtgtccagaagcaccaccgaggacttcccactgagactgctgtctgccgctcctagccagaccagcgtgtacttttgcgccagcagctttcagaccggcgcttcctacggctacacattcggctctggcaccagactgaccgtgggcggaggcggaagtggaggcggaggatctggcggcggaggctctatcctgaacgtggaacagagccctcagagcctgcatgtgcaagagggcgacagcaccaacttcacctgtagcttccccagcagcaacttctacgccctgcactggtacagatgggagacagccaagtctcccgaggcactgttcgtgatgaccctgaacggcgacgagaagaagaagggcagaatcagcgccacactgaacaccaaagagggctactcctacctgtacatcaagggcagccagcctgaggacagcgccacttatctgtgcgccagaaacaccggcaaccagttctactttggcaccggcacaagcctgacagtgatccccaacgggaaaccaattcccaaccctcttctgggactggattcaaccggcagcggcgaggacctgaagaacgtgttcccacctgaggtggccgtgttcgagcctagcgaggccgagatcagccacacccagaaagccaccctcgtgtgcctggctaccggcttctaccccgaccatgtggaactgtcttggtgggtcaacggcaaagaggtgcacagcggcgtgtgtaccgacccccagccactgaaagaacagcccgccctgaacgacagccggtactgcctgagcagcagactgagagtgtccgccaccttctggcagaacccccggaaccacttcagatgccaggtgcagttctacggcctgagcgagaacgacgagtggacccaggacagagccaagcccgtgacccagatcgtgtctgccgaagcctggggcagagccgattgcggctttaccagcgagagctaccagcagggcgtgctgagcgccaccatcctgtacgagatcctgctgggcaaggccaccctgtacgccgtgctggtgtctgccctggtgctgatggctatggtcaagcggaaggacagccggggaagggccaagcgatctggatctggagcaacaaacttctcactactcaaacaagcaggtgacgtggaggagaatcccgggccttctagaggccatatgaccgagtacaagcccacggtgcgcctcgccacccgcgacgacgtccccagggccgtacgcaccctcgccgccgcgttcgccgactaccccgccacgcgccacaccgtcgatccggaccgccacatcgagcgggtcaccgagctgcaagaactcttcctcacgcgcgtcgggctcgacatcggcaaggtgtgggtcgcggacgacggcgccgcggtggcggtctggaccacgccggagagcgtcgaagcgggggcggtgttcgccgagatcggcccgcgcatggccgagttgagcggttcccggctggccgcgcagcaacagatggaaggcctcctggcgccgcaccggcccaaggagcccgcgtggttcctggccaccgtcggcgtctcgcccgaccaccagggcaagggtctgggcagcgccgtcgtgctccccggagtggaggcggccgagcgcgccggggtgcccgccttcctggagacctccgcgccccgcaacctccccttctacgagcggctcggcttcaccgtcaccgccgacgtcgaggtgcccgaaggaccgcgcacctggtgcatgacccgcaagcccggtgcctga

SEQ ID NO: 3933 - DNA, 2970 bp, Artificial Sequence
  Synthetic Polynucloetide
atgaccatccggctgctgtgctatatgggcttctacttcctcggagccggcctgatggcatgccaggtccagctcgtcgagtccggcggcggcctcgtccaggccggcgactccgtcaccctctcctgcaccgcctccggccgcaccttctcctcctacgccctcgcctggttccgccagcgccccggcaaggagcgcgagttcgtcgccggcctccgctggggcggccccaccaactacgccgactccgtcaaggaccgcttcaccatctccggcgactccgccaagcacaccatgtacctccagatgaactccctcaagcccgaggacaccgccgtctactactgcggctacaaccccggcggctgggccgtcccctcccagtacgagtacgactcctggggccagggcacccaggtcaccgtctcctccggtaccggcggaggcggatctggcggcggaggtagcggtggcggaggatctgaattcggcgtgacccagacacctaagttccaggtgctgaaaaccggccagagcatgaccctgcaatgcgcccaggacatgaaccatgagtacatgagctggtacaggcaggaccctggcatgggcctgagactgatccactattctgtcggagccggcatcaccgaccagggcgaagttcctaatggctacaacgtgtccagaagcaccaccgaggacttcccactgagactgctgtctgccgctcctagccagaccagcgtgtacttttgcgccagcagctttcagaccggcgcttcctacggctacacattcggctctggcaccagactgaccgtgctcgaggacctgaagaacgtgttcccacctgaggtggccgtgttcgagcctagcgaggccgagatcagccacacccagaaagccaccctcgtgtgcctggctaccggcttctaccccgaccatgtggaactgtcttggtgggtcaacggcaaagaggtgcacagcggcgtgtctaccgacccccagccactgaaagaacagcccgccctgaacgacagccggtactgcctgagcagcagactgagagtgtccgccaccttctggcagaacccccggaaccacttcagatgccaggtgcagttctacggcctgagcgagaacgacgagtggacccaggacagagccaagcccgtgacccagatcgtgtctgccgaagcctggggcagagccgattgcggctttaccagcgagagctaccagcagggcgtgctgagcgccaccatcctgtacgagatcctgctgggcaaggccaccctgtacgccgtgctggtgtctgccctggtgctgatggctatggtcaagcggaaggacagccggggaagggccaagcgatctggatctggagcaacaaacttctcactactcaaacaagcaggtgacgtggaggagaatcccgggcctactagtatggcctgtcctggcttcctgtgggctcttgtgatctccacctgtcttgagttcagcatgttcgaaatcctgaacgtggaacagagccctcagagcctgcatgtgcaagagggcgacagcaccaacttcacctgtagcttccccagcagcaacttctacgccctgcactggtacagatgggagacagccaagtctcccgaggcactgttcgtgatgaccctgaacggcgacgagaagaagaagggcagaatcagcgccacactgaacaccaaagagggctactcctacctgtacatcaagggcagccagcctgaggacagcgccacttatctgtgcgccagaaacaccggcaaccagttctactttggcaccggcacaagcctgacagtgatccccaacatccagaaccctgatcctgccgtgtaccagctgcgggatagcaagagcagcgacaagagcgtgtgtctgttcaccgacttcgacagccagaccaacgtgtcccagagcaaggactccgacgtgtacatcaccgataagaccgtgctggacatgcggagcatggacttcaagagcaactccgccgtggcctggtccaacaagtccgatttcgcctgcgccaacgccttcaacaacagcattatccccgaggacacattcttcccaagccccgagagcagctgcgacgtgaagctggtggaaaagagcttcgagacagacaccaacctgaacttccagaacctgagcgtgatcggcttcagaatcctgctgctgaaagtggccggctttaacctgctgatgaccctgcggctgtggtccagccgcgccaagagaagcggatctggcgtgaagcagaccctgaatttcgacctgctgaagctggctggcgacgtggaatccaacccaggcccttctagaggccatatgaccgagtacaagcccacggtgcgcctcgccacccgcgacgacgtccccagggccgtacgcaccctcgccgccgcgttcgccgactaccccgccacgcgccacaccgtcgatccggaccgccacatcgagcgggtcaccgagctgcaagaactcttcctcacgcgcgtcgggctcgacatcggcaaggtgtgggtcgcggacgacggcgccgcggtggcggtctggaccacgccggagagcgtcgaagcgggggcggtgttcgccgagatcggcccgcgcatggccgagttgagcggttcccggctggccgcgcagcaacagatggaaggcctcctggcgccgcaccggcccaaggagcccgcgtggttcctggccaccgtcggcgtctcgcccgaccaccagggcaagggtctgggcagcgccgtcgtgctccccggagtggaggcggccgagcgcgccggggtgcccgccttcctggagacctccgcgccccgcaacctccccttctacgagcggctcggcttcaccgtcaccgccgacgtcgaggtgcccgaaggaccgcgcacctggtgcatgacccgcaagcccggtgcctga

SEQ ID NO: 3934 - DNA, 3216 bp, Artificial Sequence
  Synthetic Polynucloetide
atgaccatccggctgctgtgctatatgggcttctacttcctcggagccggcctgatggcatgccaggtccagctcgtcgagtccggcggcggcctcgtccaggccggcgactccgtcaccctctcctgcaccgcctccggccgcaccttctcctcctacgccctcgcctggttccgccagcgccccggcaaggagcgcgagttcgtcgccggcctccgctggggcggccccaccaactacgccgactccgtcaaggaccgcttcaccatctccggcgactccgccaagcacaccatgtacctccagatgaactccctcaagcccgaggacaccgccgtctactactgcggctacaaccccggcggctgggccgtcccctcccagtacgagtacgactcctggggccagggcacccaggtcaccgtctcctccggtaccggcggaggcggatctggcggcggaggtagcggtggcggaggatctgaattcggcgtgacccagacacctaagttccaggtgctgaaaaccggccagagcatgaccctgcaatgcgcccaggacatgaaccatgagtacatgagctggtacaggcaggaccctggcatgggcctgagactgatccactattctgtcggagccggcatcaccgaccagggcgaagttcctaatggctacaacgtgtccagaagcaccaccgaggacttcccactgagactgctgtctgccgctcctagccagaccagcgtgtacttttgcgccagcagctttcagaccggcgcttcctacggctacacattcggctctggcaccagactgaccgtgctcgaggacctgaagaacgtgttcccacctgaggtggccgtgttcgagcctagcgaggccgagatcagccacacccagaaagccaccctcgtgtgcctggctaccggcttctaccccgaccatgtggaactgtcttggtgggtcaacggcaaagaggtgcacagcggcgtgtctaccgacccccagccactgaaagaacagcccgccctgaacgacagccggtactgcctgagcagcagactgagagtgtccgccaccttctggcagaacccccggaaccacttcagatgccaggtgcagttctacggcctgagcgagaacgacgagtggacccaggacagagccaagcccgtgacccagatcgtgtctgccgaagcctggggcagagccgattgcggctttaccagcgagagctaccagcagggcgtgctgagcgccaccatcctgtacgagatcctgctgggcaaggccaccctgtacgccgtgctggtgtctgccctggtgctgatggctatggtcaagcggaaggacagccggggaagggccaagcgatctggatctggagcaacaaacttctcactactcaaacaagcaggtgacgtggaggagaatcccgggcctactagtatggcctgtcctggcttcctgtgggctcttgtgatctccacctgtcttgagttcagcatgttcgaaatcctgaacgtggaacagagccctcagagcctgcatgtgcaagagggcgacagcaccaacttcacctgtagcttccccagcagcaacttctacgccctgcactggtacagatgggagacagccaagtctcccgaggcactgttcgtgatgaccctgaacggcgacgagaagaagaagggcagaatcagcgccacactgaacaccaaagagggctactcctacctgtacatcaagggcagccagcctgaggacagcgccacttatctgtgcgccagaaacaccggcaaccagttctactttggcaccggcacaagcctgacagtgatccccaacgagcagaaactgatctcggaagaggatgggagcggcaccccattcccttctctggcccctcccatcatgctgctggtggacggcaagcagcagatggtggtcgtgtgcctggtgctggatgtggccccacctggactggacagccccatctggtttagcgccggcaatggctctgccctggacgcctttacctacggcccaagccctgccaccgatggcacctggacaaatctggcccacctgagcctgcccagcgaggaactggcttcttgggagcctctcgtgtgccacacaggacctggcgctgagggacacagcagatccacccagcctatgcacctgtctggcgaggccagcaccgccagaacctgtcctcaggaacctctgagaggcacccctggcggagcactgtggctgggagtgctgagactgctgctgttcaagctgctgctgtttgacctgctgctgacctgctcctgtctgtgcgatcctgccggccctctgccttctcctgccaccaccacaagactgagagccctgggcagccacagactgcaccctgccacagagacaggcggcagagaggccacaagcagccctagaccccagcccagagacagaagatggggcgataccccccctggcagaaagcctggatctccagtccgcgccaagagaagcggatctggcgtgaagcagaccctgaatttcgacctgctgaagctggctggcgacgtggaatccaacccaggcccttctagaggccatatgaccgagtacaagcccacggtgcgcctcgccacccgcgacgacgtccccagggccgtacgcaccctcgccgccgcgttcgccgactaccccgccacgcgccacaccgtcgatccggaccgccacatcgagcgggtcaccgagctgcaagaactcttcctcacgcgcgtcgggctcgacatcggcaaggtgtgggtcgcggacgacggcgccgcggtggcggtctggaccacgccggagagcgtcgaagcgggggcggtgttcgccgagatcggcccgcgcatggccgagttgagcggttcccggctggccgcgcagcaacagatggaaggcctcctggcgccgcaccggcccaaggagcccgcgtggttcctggccaccgtcggcgtctcgcccgaccaccagggcaagggtctgggcagcgccgtcgtgctccccggagtggaggcggccgagcgcgccggggtgcccgccttcctggagacctccgcgccccgcaacctccccttctacgagcggctcggcttcaccgtcaccgccgacgtcgaggtgcccgaaggaccgcgcacctggtgcatgacccgcaagcccggtgcctga

SEQ ID NO: 3935 - DNA, 3261 bp, Artificial Sequence
  Synthetic Polynucloetide
atgaccatccggctgctgtgctatatgggcttctacttcctcggagccggcctgatgctcgaggacctgaagaacgtgttcccacctgaggtggccgtgttcgagcctagcgaggccgagatcagccacacccagaaagccaccctcgtgtgcctggctaccggcttctaccccgaccatgtggaactgtcttggtgggtcaacggcaaagaggtgcacagcggcgtgtctaccgacccccagccactgaaagaacagcccgccctgaacgacagccggtactgcctgagcagcagactgagagtgtccgccaccttctggcagaacccccggaaccacttcagatgccaggtgcagttctacggcctgagcgagaacgacgagtggacccaggacagagccaagcccgtgacccagatcgtgtctgccgaagcctggggcagagccgattgcggctttaccagcgagagctaccagcagggcgtgctgagcgccaccatcctgtacgagatcctgctgggcaaggccaccctgtacgccgtgctggtgtctgccctggtgctgatggctatggtcaagcggaaggacagccggggaagggccaagcgatctggatctggagcaacaaacttctcactactcaaacaagcaggtgacgtggaggagaatcccgggcctactagcatgaccatccggctgctgtgctatatgggcttctacttcctcggagccggcctgatggcatgccaggtccagctcgtcgagtccggcggcggcctcgtccaggccggcgactccgtcaccctctcctgcaccgcctccggccgcaccttctcctcctacgccctcgcctggttccgccagcgccccggcaaggagcgcgagttcgtcgccggcctccgctggggcggccccaccaactacgccgactccgtcaaggaccgcttcaccatctccggcgactccgccaagcacaccatgtacctccagatgaactccctcaagcccgaggacaccgccgtctactactgcggctacaaccccggcggctgggccgtcccctcccagtacgagtacgactcctggggccagggcacccaggtcaccgtctcctccggtaccggcggaggcggatctggcggcggaggtagcggtggcggaggatctgaattcggcgtgacccagacacctaagttccaggtgctgaaaaccggccagagcatgaccctgcaatgcgcccaggacatgaaccatgagtacatgagctggtacaggcaggaccctggcatgggcctgagactgatccactattctgtcggagccggcatcaccgaccagggcgaagttcctaatggctacaacgtgtccagaagcaccaccgaggacttcccactgagactgctgtctgccgctcctagccagaccagcgtgtacttttgcgccagcagctttcagaccggcgcttcctacggctacacattcggctctggcaccagactgaccgtgggcggaggcggaagtggaggcggaggatctggcggcggaggctctatcctgaacgtggaacagagccctcagagcctgcatgtgcaagagggcgacagcaccaacttcacctgtagcttccccagcagcaacttctacgccctgcactggtacagatgggagacagccaagtctcccgaggcactgttcgtgatgaccctgaacggcgacgagaagaagaagggcagaatcagcgccacactgaacaccaaagagggctactcctacctgtacatcaagggcagccagcctgaggacagcgccacttatctgtgcgccagaaacaccggcaaccagttctactttggcaccggcacaagcctgacagtgatccccaacgagcagaaactgatctcggaagaggatctggggagcggcaccccattcccttctctggcccctcccatcatgctgctggtggacggcaagcagcagatggtggtcgtgtgcctggtgctggatgtggccccacctggactggacagccccatctggtttagcgccggcaatggctctgccctggacgcctttacctacggcccaagccctgccaccgatggcacctggacaaatctggcccacctgagcctgcccagcgaggaactggcttcttgggagcctctcgtgtgccacacaggacctggcgctgagggacacagcagatccacccagcctatgcacctgtctggcgaggccagcaccgccagaacctgtcctcaggaacctctgagaggcacccctggcggagcactgtggctgggagtgctgagactgctgctgttcaagctgctgctgtttgacctgctgctgacctgctcctgtctgtgcgatcctgccggccctctgccttctcctgccaccaccacaagactgagagccctgggcagccacagactgcaccctgccacagagacaggcggcagagaggccacaagcagccctagaccccagcccagagacagaagatggggcgataccccccctggcagaaagcctggatctccagtccgcgccaagagaagcggatctggcgtgaagcagaccctgaatttcgacctgctgaagctggctggcgacgtggaatccaacccaggcccttctagatctagaggccatatgaccgagtacaagcccacggtgcgcctcgccacccgcgacgacgtccccagggccgtacgcaccctcgccgccgcgttcgccgactaccccgccacgcgccacaccgtcgatccggaccgccacatcgagcgggtcaccgagctgcaagaactcttcctcacgcgcgtcgggctcgacatcggcaaggtgtgggtcgcggacgacggcgccgcggtggcggtctggaccacgccggagagcgtcgaagcgggggcggtgttcgccgagatcggcccgcgcatggccgagttgagcggttcccggctggccgcgcagcaacagatggaaggcctcctggcgccgcaccggcccaaggagcccgcgtggttcctggccaccgtcggcgtctcgcccgaccaccagggcaagggtctgggcagcgccgtcgtgctccccggagtggaggcggccgagcgcgccggggtgcccgccttcctggagacctccgcgccccgcaacctccccttctacgagcggctcggcttcaccgtcaccgccgacgtcgaggtgcccgaaggaccgcgcacctggtgcatgacccgcaagcccggtgcctga

SEQ ID NO: 3936 - DNA, 3081 bp, Artificial Sequence
  Synthetic Polynucloetide
atgaccatccggctgctgtgctatatgggcttctacttcctcggagccggcctgatggcatgccaggtccagctcgtcgagtccggcggcggcctcgtccaggccggcgactccgtcaccctctcctgcaccgcctccggccgcaccttctcctcctacgccctcgcctggttccgccagcgccccggcaaggagcgcgagttcgtcgccggcctccgctggggcggccccaccaactacgccgactccgtcaaggaccgcttcaccatctccggcgactccgccaagcacaccatgtacctccagatgaactccctcaagcccgaggacaccgccgtctactactgcggctacaaccccggcggctgggccgtcccctcccagtacgagtacgactcctggggccagggcacccaggtcaccgtctcctccggtaccggcggaggcggatctggcggcggaggtagcggtggcggaggatctgaattcggcgtgacccagacacctaagttccaggtgctgaaaaccggccagagcatgaccctgcaatgcgcccaggacatgaaccatgagtacatgagctggtacaggcaggaccctggcatgggcctgagactgatccactattctgtcggagccggcatcaccgaccagggcgaagttcctaatggctacaacgtgtccagaagcaccaccgaggacttcccactgagactgctgtctgccgctcctagccagaccagcgtgtacttttgcgccagcagctttcagaccggcgcttcctacggctacacattcggctctggcaccagactgaccgtgctcgaggggaaaccaattcccaaccctcttctgggactggattcaaccggcagcggcgacaagcagctggacgccgacgtgtcccccaagcctaccatcttcctgccctctatcgccgagacaaagctccagaaggccggcacctacctgtgcctgctggaaaagttcttcccagatgtgattaagatccactggcaggaaaagaagtccaacaccatcctgggcagccaggaaggcaacaccatgaagaccaacgacacctacatgaagttcagctggctgaccgtgcccgagaagtccctggacaaagaacacagatgcatcgtgcggcacgaaaacaacaagaacggcgtggaccaggaaatcatcttcccacccatcaagaccgatgtgattacaatggaccccaaggacaactgctccaaggacgccaacgataccctgctgctccagctgaccaacaccagcgcctactacatgtacttgttgctgctgctgaagtccgtggtgtacttcgccatcatcacatgctgcctgctgcggagaaccgccttctgctgcaacggcgagaagtctagggccaagcgatctggatctggagcaacaaacttctcactactcaaacaagcaggtgacgtggaggagaatcccgggcctactagtatggcctgtcctggcttcctgtgggctcttgtgatctccacctgtcttgagttcagcatgttcgaaatcctgaacgtggaacagagccctcagagcctgcatgtgcaagagggcgacagcaccaacttcacctgtagcttccccagcagcaacttctacgccctgcactggtacagatgggagacagccaagtctcccgaggcactgttcgtgatgaccctgaacggcgacgagaagaagaagggcagaatcagcgccacactgaacaccaaagagggctactcctacctgtacatcaagggcagccagcctgaggacagcgccacttatctgtgcgccagaaacaccggcaaccagttctactttggcaccggcacaagcctgacagtgatccccaacgagcagaaactgatctcggaagaggatgggagcggcagccagcctcacaccaagcccagcgtgttcgtgatgaagaacggcaccaacgtggcctgcctcgtgaaagagttctaccccaaggacatcaggatcaacctggtgtccagcaagaagatcaccgagttcgaccccgccatcgtgatctcccccagcggcaagtacaacgccgtgaagctggggaagtacgaggacagcaacagcgtgacctgctccgtgcagcacgacaacaagaccgtgcacagcaccgactttgaagtgaaaaccgactccaccgaccacgtgaagcccaaagagacagagaacaccaagcagcccagcaagagctgccacaagcccaaggccatcgtgcacaccgagaaagtgaacatgatgagcctgaccgtgctgggcctgcggatgctgttcgccaaaaccgtggccgtgaacttcctgctgaccgccaagctgttcttcctccgcgccaagagaagcggatctggcgtgaagcagaccctgaatttcgacctgctgaagctggctggcgacgtggaatccaacccaggcccttctagaggccatatgaccgagtacaagcccacggtgcgcctcgccacccgcgacgacgtccccagggccgtacgcaccctcgccgccgcgttcgccgactaccccgccacgcgccacaccgtcgatccggaccgccacatcgagcgggtcaccgagctgcaagaactcttcctcacgcgcgtcgggctcgacatcggcaaggtgtgggtcgcggacgacggcgccgcggtggcggtctggaccacgccggagagcgtcgaagcgggggcggtgttcgccgagatcggcccgcgcatggccgagttgagcggttcccggctggccgcgcagcaacagatggaaggcctcctggcgccgcaccggcccaaggagcccgcgtggttcctggccaccgtcggcgtctcgcccgaccaccagggcaagggtctgggcagcgccgtcgtgctccccggagtggaggcggccgagcgcgccggggtgcccgccttcctggagacctccgcgccccgcaacctccccttctacgagcggctcggcttcaccgtcaccgccgacgtcgaggtgcccgaaggaccgcgcacctggtgcatgacccgcaagcccggtgcctga

SEQ ID NO: 3937 - DNA, 2292 bp, Artificial Sequence
  Synthetic Polynucloetide
atgaccatccggctgctgtgctatatgggcttctacttcctcggagccggcctgatggcatgccaggtccagctcgtcgagtccggcggcggcctcgtccaggccggcgactccgtcaccctctcctgcaccgcctccggccgcaccttctcctcctacgccctcgcctggttccgccagcgccccggcaaggagcgcgagttcgtcgccggcctccgctggggcggccccaccaactacgccgactccgtcaaggaccgcttcaccatctccggcgactccgccaagcacaccatgtacctccagatgaactccctcaagcccgaggacaccgccgtctactactgcggctacaaccccggcggctgggccgtcccctcccagtacgagtacgactcctggggccagggcacccaggtcaccgtctcctccggtaccggcggaggcggatctggcggcggaggtagcggtggcggaggatctgaattcggcgtgacccagacacctaagttccaggtgctgaaaaccggccagagcatgaccctgcaatgcgcccaggacatgaaccatgagtacatgagctggtacaggcaggaccctggcatgggcctgagactgatccactattctgtcggagccggcatcaccgaccagggcgaagttcctaatggctacaacgtgtccagaagcaccaccgaggacttcccactgagactgctgtctgccgctcctagccagaccagcgtgtacttttgcgccagcagctttcagaccggcgcttcctacggctacacattcggctctggcaccagactgaccgtgctcgagagccagcctcacaccaagcccagcgtgttcgtgatgaagaacggcaccaacgtggcctgcctcgtgaaagagttctaccccaaggacatcaggatcaacctggtgtccagcaagaagatcaccgagttcgaccccgccatcgtgatctcccccagcggcaagtacaacgccgtgaagctggggaagtacgaggacagcaacagcgtgacctgctccgtgcagcacgacaacaagaccgtgcacagcaccgactttgaagtgaaaaccgactccaccgaccacgtgaagcccaaagagacagagaacaccaagcagcccagcaagagctgccacaagcccaaggccatcgtgcacaccgagaaagtgaacatgatgagcctgaccgtgctgggcctgcggatgctgttcgccaaaaccgtggccgtgaacttcctgctgaccgccaagctgttcttcctcagggccaagcgatctggatctggagcaacaaacttctcactactcaaacaagcaggtgacgtggaggagaatcccgggcctactagtatggcctgtcctggcttcctgtgggctcttgtgatctccacctgtcttgagttcagcatgttcgaaatcctgaacgtggaacagagccctcagagcctgcatgtgcaagagggcgacagcaccaacttcacctgtagcttccccagcagcaacttctacgccctgcactggtacagatgggagacagccaagtctcccgaggcactgttcgtgatgaccctgaacggcgacgagaagaagaagggcagaatcagcgccacactgaacaccaaagagggctactcctacctgtacatcaagggcagccagcctgaggacagcgccacttatctgtgcgccagaaacaccggcaaccagttctactttggcaccggcacaagcctgacagtgatccccaacgacaagcagctggacgccgacgtgtcccccaagcctaccatcttcctgccctctatcgccgagacaaagctccagaaggccggcacctacctgtgcctgctggaaaagttcttcccagatgtgattaagatccactggcaggaaaagaagtccaacaccatcctgggcagccaggaaggcaacaccatgaagaccaacgacacctacatgaagttcagctggctgaccgtgcccgagaagtccctggacaaagaacacagatgcatcgtgcggcacgaaaacaacaagaacggcgtggaccaggaaatcatcttcccacccatcaagaccgatgtgattacaatggaccccaaggacaactgctccaaggacgccaacgataccctgctgctccagctgaccaacaccagcgcctactacatgtacttgttgctgctgctgaagtccgtggtgtacttcgccatcatcacatgctgcctgctgcggagaaccgccttctgctgcaacggcgagaagtct

SEQ ID NO: 3938 - DNA, 3117 bp, Artificial Sequence
  Synthetic Polynucloetide
atgaccatccggctgctgtgctatatgggcttctacttcctcggagccggcctgatgctcgaggggaaaccaattcccaaccctcttctgggactggattcaaccggcagcggcgacaagcagctggacgccgacgtgtcccccaagcctaccatcttcctgccctctatcgccgagacaaagctccagaaggccggcacctacctgtgcctgctggaaaagttcttcccagatgtgattaagatccactggcaggaaaagaagtccaacaccatcctgggcagccaggaaggcaacaccatgaagaccaacgacacctacatgaagttcagctggctgaccgtgcccgagaagtccctggacaaagaacacagatgcatcgtgcggcacgaaaacaacaagaacggcgtggaccaggaaatcatcttcccacccatcaagaccgatgtgattacaatggaccccaaggacaactgctccaaggacgccaacgataccctgctgctccagctgaccaacaccagcgcctactacatgtacttgttgctgctgctgaagtccgtggtgtacttcgccatcatcacatgctgcctgctgcggagaaccgccttctgctgcaacggcgagaagtctagggccaagcgatctggatctggagcaacaaacttctcactactcaaacaagcaggtgacgtggaggagaatcccgggcctactagcatgaccatccggctgctgtgctatatgggcttctacttcctcggagccggcctgatggcatgccaggtccagctcgtcgagtccggcggcggcctcgtccaggccggcgactccgtcaccctctcctgcaccgcctccggccgcaccttctcctcctacgccctcgcctggttccgccagcgccccggcaaggagcgcgagttcgtcgccggcctccgctggggcggccccaccaactacgccgactccgtcaaggaccgcttcaccatctccggcgactccgccaagcacaccatgtacctccagatgaactccctcaagcccgaggacaccgccgtctactactgcggctacaaccccggcggctgggccgtcccctcccagtacgagtacgactcctggggccagggcacccaggtcaccgtctcctccggtaccggcggaggcggatctggcggcggaggtagcggtggcggaggatctgaattcggcgtgacccagacacctaagttccaggtgctgaaaaccggccagagcatgaccctgcaatgcgcccaggacatgaaccatgagtacatgagctggtacaggcaggaccctggcatgggcctgagactgatccactattctgtcggagccggcatcaccgaccagggcgaagttcctaatggctacaacgtgtccagaagcaccaccgaggacttcccactgagactgctgtctgccgctcctagccagaccagcgtgtacttttgcgccagcagctttcagaccggcgcttcctacggctacacattcggctctggcaccagactgaccgtgggcggaggcggaagtggaggcggaggatctggcggcggaggctctatcctgaacgtggaacagagccctcagagcctgcatgtgcaagagggcgacagcaccaacttcacctgtagcttccccagcagcaacttctacgccctgcactggtacagatgggagacagccaagtctcccgaggcactgttcgtgatgaccctgaacggcgacgagaagaagaagggcagaatcagcgccacactgaacaccaaagagggctactcctacctgtacatcaagggcagccagcctgaggacagcgccacttatctgtgcgccagaaacaccggcaaccagttctactttggcaccggcacaagcctgacagtgatccccaacgagcagaaactgatctcggaagaggatgggagcggcagccagcctcacaccaagcccagcgtgttcgtgatgaagaacggcaccaacgtggcctgcctcgtgaaagagttctaccccaaggacatcaggatcaacctggtgtccagcaagaagatcaccgagttcgaccccgccatcgtgatctcccccagcggcaagtacaacgccgtgaagctggggaagtacgaggacagcaacagcgtgacctgctccgtgcagcacgacaacaagaccgtgcacagcaccgactttgaagtgaaaaccgactccaccgaccacgtgaagcccaaagagacagagaacaccaagcagcccagcaagagctgccacaagcccaaggccatcgtgcacaccgagaaagtgaacatgatgagcctgaccgtgctgggcctgcggatgctgttcgccaaaaccgtggccgtgaacttcctgctgaccgccaagctgttcttcctccgcgccaagagaagcggatctggcgtgaagcagaccctgaatttcgacctgctgaagctggctggcgacgtggaatccaacccaggcccttctagaggccatatgaccgagtacaagcccacggtgcgcctcgccacccgcgacgacgtccccagggccgtacgcaccctcgccgccgcgttcgccgactaccccgccacgcgccacaccgtcgatccggaccgccacatcgagcgggtcaccgagctgcaagaactcttcctcacgcgcgtcgggctcgacatcggcaaggtgtgggtcgcggacgacggcgccgcggtggcggtctggaccacgccggagagcgtcgaagcgggggcggtgttcgccgagatcggcccgcgcatggccgagttgagcggttcccggctggccgcgcagcaacagatggaaggcctcctggcgccgcaccggcccaaggagcccgcgtggttcctggccaccgtcggcgtctcgcccgaccaccagggcaagggtctgggcagcgccgtcgtgctccccggagtggaggcggccgagcgcgccggggtgcccgccttcctggagacctccgcgccccgcaacctccccttctacgagcggctcggcttcaccgtcaccgccgacgtcgaggtgcccgaaggaccgcgcacctggtgcatgacccgcaagcccggtgcctga

SEQ ID NO: 3939 - DNA, 3507 bp, Artificial Sequence
  Synthetic Polynucloetide
atgaccatccggctgctgtgctatatgggcttctacttcctcggagccggcctgatggcatgccaggtccagctcgtcgagtccggcggcggcctcgtccaggccggcgactccgtcaccctctcctgcaccgcctccggccgcaccttctcctcctacgccctcgcctggttccgccagcgccccggcaaggagcgcgagttcgtcgccggcctccgctggggcggccccaccaactacgccgactccgtcaaggaccgcttcaccatctccggcgactccgccaagcacaccatgtacctccagatgaactccctcaagcccgaggacaccgccgtctactactgcggctacaaccccggcggctgggccgtcccctcccagtacgagtacgactcctggggccagggcacccaggtcaccgtctcctccggtaccggcggaggcggatctggcggcggaggtagcggtggcggaggatctgaattcggcgtgacccagacacctaagttccaggtgctgaaaaccggccagagcatgaccctgcaatgcgcccaggacatgaaccatgagtacatgagctggtacaggcaggaccctggcatgggcctgagactgatccactattctgtcggagccggcatcaccgaccagggcgaagttcctaatggctacaacgtgtccagaagcaccaccgaggacttcccactgagactgctgtctgccgctcctagccagaccagcgtgtacttttgcgccagcagctttcagaccggcgcttcctacggctacacattcggctctggcaccagactgaccgtgggacagcctaaggccaatcctaccgtgacactgttccctccaagcagcgaagaactccaggccaacaaggccacacttgtgtgcctgatctccgacttctaccctggggctgtgacagtggcttggaaggccgatggatctcctgtgaaagccggcgtggaaaccaccaagccatccaagcagagcaacaacaaatacgccgccagctcctacctgagcctgacacctgagcagtggaagtcccacagatcctacagctgccaagtgacccacgaaggcagcaccgtggaaaagacagtggcccctacagagtgcagcggatcccagagcttcggcctgctggaccccaagctgtgctacctgctggatggcatcctgttcatctacggcgtgatcctgaccgccctgttcctgagagtgaagttcagcagaagcgccgacgcccctgcctaccagcagggacagaaccaactgtacaacgagctgaacctgggcagacgggaagagtacgacgtgctggacaagcggagaggcagggaccctgagatgggcggaaagccccagcggagaaagaacccccaggaaggactgtataacgaactccagaaagacaagatggccgaagcctacagcgagatcggcatgaagggcgagcggagaagaggcaagggccacgatggcctgtaccagggcctgagcaccgccaccaaggacacctatgacgccctgcacatgcaggccctgcctccaagaagggccaagcgatctggatctggagcaacaaacttctcactactcaaacaagcaggtgacgtggaggagaatcccgggcctactagtatggcctgtcctggcttcctgtgggctcttgtgatctccacctgtcttgagttcagcatgttcgaaatcctgaacgtggaacagagccctcagagcctgcatgtgcaagagggcgacagcaccaacttcacctgtagcttccccagcagcaacttctacgccctgcactggtacagatgggagacagccaagtctcccgaggcactgttcgtgatgaccctgaacggcgacgagaagaagaagggcagaatcagcgccacactgaacaccaaagagggctactcctacctgtacatcaagggcagccagcctgaggacagcgccacttatctgtgcgccagaaacaccggcaaccagttctactttggcaccggcacaagcctgacagtgatccccaacgcctctacaaagggaccctccgtgtttcctctggctcccagcagcaagtctacaagcggaggaacagccgctctgggctgcctggtcaaggattactttcccgagcctgtgaccgtgtcctggaatagcggagcactgacaagcggcgtgcacacctttccagccgtgctgcaaagcagcggcctgtactctctgagcagcgtggtcacagtgcctagctctagcctgggcacccagacctacatctgcaatgtgaaccacaagcctagcaacaccaaggtggacaagagagtggaacccaagagctgtggtacccagagttttgggttgttggaccctaaattgtgctatctgttggacggaatcctgttcatttacggagtgatcctgaccgcattgttcctgcgggttaagttttccagatccgcagacgcacccgcttaccaacaagggcagaaccaactctacaatgaacttaatttggggcggagggaagagtacgacgttctggacaaaaggaggggacgagatcccgagatgggcggaaagcctcagcgaaggaagaatccgcaagaggggctttataacgaactccagaaagataaaatggcagaagcctatagtgagattgggatgaagggagaaaggaggaggggtaaaggtcacgatgggttgtaccaaggattgagcacagccactaaagatacctatgatgcgctccacatgcaggccctgccgccaagacgcgccaagagaagcggatctggcgtgaagcagaccctgaatttcgacctgctgaagctggctggcgacgtggaatccaacccaggcccttctagaggccatatgaccgagtacaagcccacggtgcgcctcgccacccgcgacgacgtccccagggccgtacgcaccctcgccgccgcgttcgccgactaccccgccacgcgccacaccgtcgatccggaccgccacatcgagcgggtcaccgagctgcaagaactcttcctcacgcgcgtcgggctcgacatcggcaaggtgtgggtcgcggacgacggcgccgcggtggcggtctggaccacgccggagagcgtcgaagcgggggcggtgttcgccgagatcggcccgcgcatggccgagttgagcggttcccggctggccgcgcagcaacagatggaaggcctcctggcgccgcaccggcccaaggagcccgcgtggttcctggccaccgtcggcgtctcgcccgaccaccagggcaagggtctgggcagcgccgtcgtgctccccggagtggaggcggccgagcgcgccggggtgcccgccttcctggagacctccgcgccccgcaacctccccttctacgagcggctcggcttcaccgtcaccgccgacgtcgaggtgcccgaaggaccgcgcacctggtgcatgacccgcaagcccggtgcctga

SEQ ID NO: 3940 - DNA, 2856 bp, Artificial Sequence
  Synthetic Polynucloetide
atgaccatccggctgctgtgctatatgggcttctacttcctcggagccggcctgatggcatgccaggtccagctcgtcgagtccggcggcggcctcgtccaggccggcgactccgtcaccctctcctgcaccgcctccggccgcaccttctcctcctacgccctcgcctggttccgccagcgccccggcaaggagcgcgagttcgtcgccggcctccgctggggcggccccaccaactacgccgactccgtcaaggaccgcttcaccatctccggcgactccgccaagcacaccatgtacctccagatgaactccctcaagcccgaggacaccgccgtctactactgcggctacaaccccggcggctgggccgtcccctcccagtacgagtacgactcctggggccagggcacccaggtcaccgtctcctccggtaccggcggaggcggatctggcggcggaggtagcggtggcggaggatctgaattcggcgtgacccagacacctaagttccaggtgctgaaaaccggccagagcatgaccctgcaatgcgcccaggacatgaaccatgagtacatgagctggtacaggcaggaccctggcatgggcctgagactgatccactattctgtcggagccggcatcaccgaccagggcgaagttcctaatggctacaacgtgtccagaagcaccaccgaggacttcccactgagactgctgtctgccgctcctagccagaccagcgtgtacttttgcgccagcagctttcagaccggcgcttcctacggctacacattcggctctggcaccagactgaccgtgctcgaggacctgaagaacgtgttcccacctgaggtggccgtgttcgagcctagcgaggccgagatcagccacacccagaaagccaccctcgtgtgcctggctaccggcttctaccccgaccatgtggaactgtcttggtgggtcaacggcaaagaggtgcacagcggcgtgtctaccgacccccagccactgaaagaacagcccgccctgaacgacagccggtactgcctgagcagcagactgagagtgtccgccaccttctggcagaacccccggaaccacttcagatgccaggtgcagttctacggcctgagcgagaacgacgagtggacccaggacagagccaagcccgtgacccagatcgtgtctgccgaagcctggggcagagccgattgcggatcccagagcttcggcctgctggaccccaagctgtgctacctgctggatggcatcctgttcatctacggcgtgatcctgaccgccctgttcctgagagtgaagttcagcagaagcgccgacgcccctgcctaccagcagggacagaaccaactgtacaacgagctgaacctgggcagacgggaagagtacgacgtgctggacaagcggagaggcagggaccctgagatgggcggaaagccccagcggagaaagaacccccaggaaggactgtataacgaactccagaaagacaagatggccgaagcctacagcgagatcggcatgaagggcgagcggagaagaggcaagggccacgatggcctgtaccagggcctgagcaccgccaccaaggacacctatgacgccctgcacatgcaggccctgcctccaagaagggccaagcgatctggatctggagcaacaaacttctcactactcaaacaagcaggtgacgtggaggagaatcccgggcctactagtatggcctgtcctggcttcctgtgggctcttgtgatctccacctgtcttgagttcagcatgttcgaaatcctgaacgtggaacagagccctcagagcctgcatgtgcaagagggcgacagcaccaacttcacctgtagcttccccagcagcaacttctacgccctgcactggtacagatgggagacagccaagtctcccgaggcactgttcgtgatgaccctgaacggcgacgagaagaagaagggcagaatcagcgccacactgaacaccaaagagggctactcctacctgtacatcaagggcagccagcctgaggacagcgccacttatctgtgcgccagaaacaccggcaaccagttctactttggcaccggcacaagcctgacagtgatccccaacatccagaaccctgatcctgccgtgtaccagctgcgggatagcaagagcagcgacaagagcgtgtgtctgttcaccgacttcgacagccagaccaacgtgtcccagagcaaggactccgacgtgtacatcaccgataagaccgtgctggacatgcggagcatggacttcaagagcaactccgccgtggcctggtccaacaagtccgatttcgcctgcgccaacgccttcaacaacagcattatccccgaggacacattcttcccaagccccgagagcagctgcggtacccagagttttgggttgttggaccctaaattgtgctatctgttggacggaatcctgttcatttacggagtgatcctgaccgcattgttcctgcgggttaagttttccagatccgcagacgcacccgcttaccaacaagggcagaaccaactctacaatgaacttaatttggggcggagggaagagtacgacgttctggacaaaaggaggggacgagatcccgagatgggcggaaagcctcagcgaaggaagaatccgcaagaggggctttataacgaactccagaaagataaaatggcagaagcctatagtgagattgggatgaagggagaaaggaggaggggtaaaggtcacgatgggttgtaccaaggattgagcacagccactaaagatacctatgatgcgctccacatgcaggccctgccgccaaga

SEQ ID NO: 3941 - DNA, 2856 bp, Artificial Sequence
  Synthetic Polynucloetide
atgaccatccggctgctgtgctatatgggcttctacttcctcggagccggcctgatggcatgccaggtccagctcgtcgagtccggcggcggcctcgtccaggccggcgactccgtcaccctctcctgcaccgcctccggccgcaccttctcctcctacgccctcgcctggttccgccagcgccccggcaaggagcgcgagttcgtcgccggcctccgctggggcggccccaccaactacgccgactccgtcaaggaccgcttcaccatctccggcgactccgccaagcacaccatgtacctccagatgaactccctcaagcccgaggacaccgccgtctactactgcggctacaaccccggcggctgggccgtcccctcccagtacgagtacgactcctggggccagggcacccaggtcaccgtctcctccggtaccggcggaggcggatctggcggcggaggtagcggtggcggaggatctgaattcggcgtgacccagacacctaagttccaggtgctgaaaaccggccagagcatgaccctgcaatgcgcccaggacatgaaccatgagtacatgagctggtacaggcaggaccctggcatgggcctgagactgatccactattctgtcggagccggcatcaccgaccagggcgaagttcctaatggctacaacgtgtccagaagcaccaccgaggacttcccactgagactgctgtctgccgctcctagccagaccagcgtgtacttttgcgccagcagctttcagaccggcgcttcctacggctacacattcggctctggcaccagactgaccgtgctcgaggacctgaagaacgtgttcccacctgaggtggccgtgttcgagcctagcaaggccgagatcgcccacacccagaaagccaccctcgtgtgcctggctaccggcttctaccccgaccatgtggaactgtcttggtgggtcaacggcaaagaggtgcacagcggcgtgtgtaccgacccccagccactgaaagaacagcccgccctgaacgacagccggtactgcctgagcagcagactgagagtgtccgccaccttctggcagaacccccggaaccacttcagatgccaggtgcagttctacggcctgagcgagaacgacgagtggacccaggacagagccaagcccgtgacccagatcgtgtctgccgaagcctggggcagagccgattgcggatcccagagcttcggcctgctggaccccaagctgtgctacctgctggatggcatcctgttcatctacggcgtgatcctgaccgccctgttcctgagagtgaagttcagcagaagcgccgacgcccctgcctaccagcagggacagaaccaactgtacaacgagctgaacctgggcagacgggaagagtacgacgtgctggacaagcggagaggcagggaccctgagatgggcggaaagccccagcggagaaagaacccccaggaaggactgtataacgaactccagaaagacaagatggccgaagcctacagcgagatcggcatgaagggcgagcggagaagaggcaagggccacgatggcctgtaccagggcctgagcaccgccaccaaggacacctatgacgccctgcacatgcaggccctgcctccaagaagggccaagcgatctggatctggagcaacaaacttctcactactcaaacaagcaggtgacgtggaggagaatcccgggcctactagtatggcctgtcctggcttcctgtgggctcttgtgatctccacctgtcttgagttcagcatgttcgaaatcctgaacgtggaacagagccctcagagcctgcatgtgcaagagggcgacagcaccaacttcacctgtagcttccccagcagcaacttctacgccctgcactggtacagatgggagacagccaagtctcccgaggcactgttcgtgatgaccctgaacggcgacgagaagaagaagggcagaatcagcgccacactgaacaccaaagagggctactcctacctgtacatcaagggcagccagcctgaggacagcgccacttatctgtgcgccagaaacaccggcaaccagttctactttggcaccggcacaagcctgacagtgatccccaacatccagaaccctgatcctgccgtgtaccagctgcgggatagcaagagcagcgacaagagcgtgtgtctgttcaccgacttcgacagccagaccaacgtgtcccagagcaaggactccgacgtgtacatcaccgataagtgcgtgctggacatgcggagcatggacttcaagagcaactccgccgtggcctggtccaacaagtccgatttcgcctgcgccaacgccttcaacaacagcattatccccgaggacacattcttcccaagcagcgacgtgccctgcggtacccagagttttgggttgttggaccctaaattgtgctatctgttggacggaatcctgttcatttacggagtgatcctgaccgcattgttcctgcgggttaagttttccagatccgcagacgcacccgcttaccaacaagggcagaaccaactctacaatgaacttaatttggggcggagggaagagtacgacgttctggacaaaaggaggggacgagatcccgagatgggcggaaagcctcagcgaaggaagaatccgcaagaggggctttataacgaactccagaaagataaaatggcagaagcctatagtgagattgggatgaagggagaaaggaggaggggtaaaggtcacgatgggttgtaccaaggattgagcacagccactaaagatacctatgatgcgctccacatgcaggccctgccgccaaga

SEQ ID NO: 3942 - DNA, 3069 bp, Artificial Sequence
  Synthetic Polynucloetide
atgaccatccggctgctgtgctatatgggcttctacttcctcggagccggcctgatggcatgccaggtccagctcgtcgagtccggcggcggcctcgtccaggccggcgactccgtcaccctctcctgcaccgcctccggccgcaccttctcctcctacgccctcgcctggttccgccagcgccccggcaaggagcgcgagttcgtcgccggcctccgctggggcggccccaccaactacgccgactccgtcaaggaccgcttcaccatctccggcgactccgccaagcacaccatgtacctccagatgaactccctcaagcccgaggacaccgccgtctactactgcggctacaaccccggcggctgggccgtcccctcccagtacgagtacgactcctggggccagggcacccaggtcaccgtctcctccggtaccggcggaggcggatctggcggcggaggtagcggtggcggaggatctgaattcggcgtgacccagacacctaagttccaggtgctgaaaaccggccagagcatgaccctgcaatgcgcccaggacatgaaccatgagtacatgagctggtacaggcaggaccctggcatgggcctgagactgatccactattctgtcggagccggcatcaccgaccagggcgaagttcctaatggctacaacgtgtccagaagcaccaccgaggacttcccactgagactgctgtctgccgctcctagccagaccagcgtgtacttttgcgccagcagctttcagaccggcgcttcctacggctacacattcggctctggcaccagactgaccgtgctcgaggggaaaccaattcccaaccctcttctgggactggattcaaccggcagcggcgaggacctgaagaacgtgttcccacctgaggtggccgtgttcgagcctagcgaggccgagatcagccacacccagaaagccaccctcgtgtgcctggctaccggcttctaccccgaccatgtggaactgtcttggtgggtcaacggcaaagaggtgcacagcggcgtgtctaccgacccccagccactgaaagaacagcccgccctgaacgacagccggtactgcctgagcagcagactgagagtgtccgccaccttctggcagaacccccggaaccacttcagatgccaggtgcagttctacggcctgagcgagaacgacgagtggacccaggacagagccaagcccgtgacccagatcgtgtctgccgaagcctggggcagagccgattgcggatcccagagcttcggcctgctggaccccaagctgtgctacctgctggatggcatcctgttcatctacggcgtgatcctgaccgccctgttcctgagagtgaagttcagcagaagcgccgacgcccctgcctaccagcagggacagaaccaactgtacaacgagctgaacctgggcagacgggaagagtacgacgtgctggacaagcggagaggcagggaccctgagatgggcggaaagccccagcggagaaagaacccccaggaaggactgtataacgaactccagaaagacaagatggccgaagcctacagcgagatcggcatgaagggcgagcggagaagaggcaagggccacgatggcctgtaccagggcctgagcaccgccaccaaggacacctatgacgccctgcacatgcaggccctgcctccaagaagggccaagcgatctggatctggagcaacaaacttctcactactcaaacaagcaggtgacgtggaggagaatcccgggcctactagtatggcctgtcctggcttcctgtgggctcttgtgatctccacctgtcttgagttcagcatgttcgaaatcctgaacgtggaacagagccctcagagcctgcatgtgcaagagggcgacagcaccaacttcacctgtagcttccccagcagcaacttctacgccctgcactggtacagatgggagacagccaagtctcccgaggcactgttcgtgatgaccctgaacggcgacgagaagaagaagggcagaatcagcgccacactgaacaccaaagagggctactcctacctgtacatcaagggcagccagcctgaggacagcgccacttatctgtgcgccagaaacaccggcaaccagttctactttggcaccggcacaagcctgacagtgatccccaacgagcagaaactgatctcggaagaggatgggagcggcatccagaaccctgatcctgccgtgtaccagctgcgggatagcaagagcagcgacaagagcgtgtgtctgttcaccgacttcgacagccagaccaacgtgtcccagagcaaggactccgacgtgtacatcaccgataagaccgtgctggacatgcggagcatggacttcaagagcaactccgccgtggcctggtccaacaagtccgatttcgcctgcgccaacgccttcaacaacagcattatccccgaggacacattcttcccaagccccgagagcagctgcggtacccagagttttgggttgttggaccctaaattgtgctatctgttggacggaatcctgttcatttacggagtgatcctgaccgcattgttcctgaggagcaagcggtcacggctgctccacagcgattacatgaatatgacaccacgaagaccgggtcctactcgcaaacactaccaaccctacgcacctccccgcgactttgcagcgtaccgatctcgggttaagttttccagatccgcagacgcacccgcttaccaacaagggcagaaccaactctacaatgaacttaatttggggcggagggaagagtacgacgttctggacaaaaggaggggacgagatcccgagatgggcggaaagcctcagcgaaggaagaatccgcaagaggggctttataacgaactccagaaagataaaatggcagaagcctatagtgagattgggatgaagggagaaaggaggaggggtaaaggtcacgatgggttgtaccaaggattgagcacagccactaaagatacctatgatgcgctccacatgcaggccctgccgccaaga

SEQ ID NO: 3943 - DNA, 3192 bp, Artificial Sequence
  Synthetic Polynucloetide
atgaccatccggctgctgtgctatatgggcttctacttcctcggagccggcctgatggcatgccaggtccagctcgtcgagtccggcggcggcctcgtccaggccggcgactccgtcaccctctcctgcaccgcctccggccgcaccttctcctcctacgccctcgcctggttccgccagcgccccggcaaggagcgcgagttcgtcgccggcctccgctggggcggccccaccaactacgccgactccgtcaaggaccgcttcaccatctccggcgactccgccaagcacaccatgtacctccagatgaactccctcaagcccgaggacaccgccgtctactactgcggctacaaccccggcggctgggccgtcccctcccagtacgagtacgactcctggggccagggcacccaggtcaccgtctcctccggtaccggcggaggcggatctggcggcggaggtagcggtggcggaggatctgaattcggcgtgacccagacacctaagttccaggtgctgaaaaccggccagagcatgaccctgcaatgcgcccaggacatgaaccatgagtacatgagctggtacaggcaggaccctggcatgggcctgagactgatccactattctgtcggagccggcatcaccgaccagggcgaagttcctaatggctacaacgtgtccagaagcaccaccgaggacttcccactgagactgctgtctgccgctcctagccagaccagcgtgtacttttgcgccagcagctttcagaccggcgcttcctacggctacacattcggctctggcaccagactgaccgtgctcgaggggaaaccaattcccaaccctcttctgggactggattcaaccggcagcggcgaggacctgaagaacgtgttcccacctgaggtggccgtgttcgagcctagcgaggccgagatcagccacacccagaaagccaccctcgtgtgcctggctaccggcttctaccccgaccatgtggaactgtcttggtgggtcaacggcaaagaggtgcacagcggcgtgtctaccgacccccagccactgaaagaacagcccgccctgaacgacagccggtactgcctgagcagcagactgagagtgtccgccaccttctggcagaacccccggaaccacttcagatgccaggtgcagttctacggcctgagcgagaacgacgagtggacccaggacagagccaagcccgtgacccagatcgtgtctgccgaagcctggggcagagccgattgcggatcccagagcttcggcctgctggaccccaagctgtgctacctgctggatggcatcctgttcatctacggcgtgatcctgaccgccctgttcctgaggagtaagaggagcaggctcctgcacagtgactacatgaacatgactccacgccgccccggacccacccgcaagcattaccagccctatgccccaccacgcgacttcgcagcctatcgctccagagtgaagttcagcagaagcgccgacgcccctgcctaccagcagggacagaaccaactgtacaacgagctgaacctgggcagacgggaagagtacgacgtgctggacaagcggagaggcagggaccctgagatgggcggaaagccccagcggagaaagaacccccaggaaggactgtataacgaactccagaaagacaagatggccgaagcctacagcgagatcggcatgaagggcgagcggagaagaggcaagggccacgatggcctgtaccagggcctgagcaccgccaccaaggacacctatgacgccctgcacatgcaggccctgcctccaagaagggccaagcgatctggatctggagcaacaaacttctcactactcaaacaagcaggtgacgtggaggagaatcccgggcctactagtatggcctgtcctggcttcctgtgggctcttgtgatctccacctgtcttgagttcagcatgttcgaaatcctgaacgtggaacagagccctcagagcctgcatgtgcaagagggcgacagcaccaacttcacctgtagcttccccagcagcaacttctacgccctgcactggtacagatgggagacagccaagtctcccgaggcactgttcgtgatgaccctgaacggcgacgagaagaagaagggcagaatcagcgccacactgaacaccaaagagggctactcctacctgtacatcaagggcagccagcctgaggacagcgccacttatctgtgcgccagaaacaccggcaaccagttctactttggcaccggcacaagcctgacagtgatccccaacgagcagaaactgatctcggaagaggatgggagcggcatccagaaccctgatcctgccgtgtaccagctgcgggatagcaagagcagcgacaagagcgtgtgtctgttcaccgacttcgacagccagaccaacgtgtcccagagcaaggactccgacgtgtacatcaccgataagaccgtgctggacatgcggagcatggacttcaagagcaactccgccgtggcctggtccaacaagtccgatttcgcctgcgccaacgccttcaacaacagcattatccccgaggacacattcttcccaagccccgagagcagctgcggtacccagagttttgggttgttggaccctaaattgtgctatctgttggacggaatcctgttcatttacggagtgatcctgaccgcattgttcctgaggagcaagcggtcacggctgctccacagcgattacatgaatatgacaccacgaagaccgggtcctactcgcaaacactaccaaccctacgcacctccccgcgactttgcagcgtaccgatctcgggttaagttttccagatccgcagacgcacccgcttaccaacaagggcagaaccaactctacaatgaacttaatttggggcggagggaagagtacgacgttctggacaaaaggaggggacgagatcccgagatgggcggaaagcctcagcgaaggaagaatccgcaagaggggctttataacgaactccagaaagataaaatggcagaagcctatagtgagattgggatgaagggagaaaggaggaggggtaaaggtcacgatgggttgtaccaaggattgagcacagccactaaagatacctatgatgcgctccacatgcaggccctgccgccaaga

SEQ ID NO: 3944 - DNA, 3075 bp, Artificial Sequence
  Synthetic Polynucloetide
atgaccatccggctgctgtgctatatgggcttctacttcctcggagccggcctgatggcatgccaggtccagctcgtcgagtccggcggcggcctcgtccaggccggcgactccgtcaccctctcctgcaccgcctccggccgcaccttctcctcctacgccctcgcctggttccgccagcgccccggcaaggagcgcgagttcgtcgccggcctccgctggggcggccccaccaactacgccgactccgtcaaggaccgcttcaccatctccggcgactccgccaagcacaccatgtacctccagatgaactccctcaagcccgaggacaccgccgtctactactgcggctacaaccccggcggctgggccgtcccctcccagtacgagtacgactcctggggccagggcacccaggtcaccgtctcctccggtaccggcggaggcggatctggcggcggaggtagcggtggcggaggatctgaattcggcgtgacccagacacctaagttccaggtgctgaaaaccggccagagcatgaccctgcaatgcgcccaggacatgaaccatgagtacatgagctggtacaggcaggaccctggcatgggcctgagactgatccactattctgtcggagccggcatcaccgaccagggcgaagttcctaatggctacaacgtgtccagaagcaccaccgaggacttcccactgagactgctgtctgccgctcctagccagaccagcgtgtacttttgcgccagcagctttcagaccggcgcttcctacggctacacattcggctctggcaccagactgaccgtgctcgaggggaaaccaattcccaaccctcttctgggactggattcaaccggcagcggcgaggacctgaagaacgtgttcccacctgaggtggccgtgttcgagcctagcgaggccgagatcagccacacccagaaagccaccctcgtgtgcctggctaccggcttctaccccgaccatgtggaactgtcttggtgggtcaacggcaaagaggtgcacagcggcgtgtctaccgacccccagccactgaaagaacagcccgccctgaacgacagccggtactgcctgagcagcagactgagagtgtccgccaccttctggcagaacccccggaaccacttcagatgccaggtgcagttctacggcctgagcgagaacgacgagtggacccaggacagagccaagcccgtgacccagatcgtgtctgccgaagcctggggcagagccgattgcggatcccagagcttcggcctgctggaccccaagctgtgctacctgctggatggcatcctgttcatctacggcgtgatcctgaccgccctgttcctgagagtgaagttcagcagaagcgccgacgcccctgcctaccagcagggacagaaccaactgtacaacgagctgaacctgggcagacgggaagagtacgacgtgctggacaagcggagaggcagggaccctgagatgggcggaaagccccagcggagaaagaacccccaggaaggactgtataacgaactccagaaagacaagatggccgaagcctacagcgagatcggcatgaagggcgagcggagaagaggcaagggccacgatggcctgtaccagggcctgagcaccgccaccaaggacacctatgacgccctgcacatgcaggccctgcctccaagaagggccaagcgatctggatctggagcaacaaacttctcactactcaaacaagcaggtgacgtggaggagaatcccgggcctactagtatggcctgtcctggcttcctgtgggctcttgtgatctccacctgtcttgagttcagcatgttcgaaatcctgaacgtggaacagagccctcagagcctgcatgtgcaagagggcgacagcaccaacttcacctgtagcttccccagcagcaacttctacgccctgcactggtacagatgggagacagccaagtctcccgaggcactgttcgtgatgaccctgaacggcgacgagaagaagaagggcagaatcagcgccacactgaacaccaaagagggctactcctacctgtacatcaagggcagccagcctgaggacagcgccacttatctgtgcgccagaaacaccggcaaccagttctactttggcaccggcacaagcctgacagtgatccccaacgagcagaaactgatctcggaagaggatctggggagcggcatccagaaccctgatcctgccgtgtaccagctgcgggatagcaagagcagcgacaagagcgtgtgtctgttcaccgacttcgacagccagaccaacgtgtcccagagcaaggactccgacgtgtacatcaccgataagaccgtgctggacatgcggagcatggacttcaagagcaactccgccgtggcctggtccaacaagtccgatttcgcctgcgccaacgccttcaacaacagcattatccccgaggacacattcttcccaagccccgagagcagctgcggtacccagagttttgggttgttggaccctaaattgtgctatctgttggacggaatcctgttcatttacggagtgatcctgaccgcattgttcctgaagagaggccggaagaagctgctgtacatcttcaagcagcctttcatgcggcccgtgcagaccacccaggaagaggacggctgctcctgccggttccccgaggaagaagaaggcggctgcgagctgcgggttaagttttccagatccgcagacgcacccgcttaccaacaagggcagaaccaactctacaatgaacttaatttggggcggagggaagagtacgacgttctggacaaaaggaggggacgagatcccgagatgggcggaaagcctcagcgaaggaagaatccgcaagaggggctttataacgaactccagaaagataaaatggcagaagcctatagtgagattgggatgaagggagaaaggaggaggggtaaaggtcacgatgggttgtaccaaggattgagcacagccactaaagatacctatgatgcgctccacatgcaggccctgccgccaaga

SEQ ID NO: 3945 - DNA, 3201 bp, Artificial Sequence
  Synthetic Polynucloetide
atgaccatccggctgctgtgctatatgggcttctacttcctcggagccggcctgatggcatgccaggtccagctcgtcgagtccggcggcggcctcgtccaggccggcgactccgtcaccctctcctgcaccgcctccggccgcaccttctcctcctacgccctcgcctggttccgccagcgccccggcaaggagcgcgagttcgtcgccggcctccgctggggcggccccaccaactacgccgactccgtcaaggaccgcttcaccatctccggcgactccgccaagcacaccatgtacctccagatgaactccctcaagcccgaggacaccgccgtctactactgcggctacaaccccggcggctgggccgtcccctcccagtacgagtacgactcctggggccagggcacccaggtcaccgtctcctccggtaccggcggaggcggatctggcggcggaggtagcggtggcggaggatctgaattcggcgtgacccagacacctaagttccaggtgctgaaaaccggccagagcatgaccctgcaatgcgcccaggacatgaaccatgagtacatgagctggtacaggcaggaccctggcatgggcctgagactgatccactattctgtcggagccggcatcaccgaccagggcgaagttcctaatggctacaacgtgtccagaagcaccaccgaggacttcccactgagactgctgtctgccgctcctagccagaccagcgtgtacttttgcgccagcagctttcagaccggcgcttcctacggctacacattcggctctggcaccagactgaccgtgctcgaggggaaaccaattcccaaccctcttctgggactggattcaaccggcagcggcgaggacctgaagaacgtgttcccacctgaggtggccgtgttcgagcctagcgaggccgagatcagccacacccagaaagccaccctcgtgtgcctggctaccggcttctaccccgaccatgtggaactgtcttggtgggtcaacggcaaagaggtgcacagcggcgtgtctaccgacccccagccactgaaagaacagcccgccctgaacgacagccggtactgcctgagcagcagactgagagtgtccgccaccttctggcagaacccccggaaccacttcagatgccaggtgcagttctacggcctgagcgagaacgacgagtggacccaggacagagccaagcccgtgacccagatcgtgtctgccgaagcctggggcagagccgattgcggatcccagagcttcggcctgctggaccccaagctgtgctacctgctggatggcatcctgttcatctacggcgtgatcctgaccgccctgttcctgaaacggggcagaaagaaactcctgtatatattcaaacaaccatttatgagaccagtacaaactactcaagaggaagatggctgtagctgccgatttccagaagaagaagaaggaggatgtgaactgagagtgaagttcagcagaagcgccgacgcccctgcctaccagcagggacagaaccaactgtacaacgagctgaacctgggcagacgggaagagtacgacgtgctggacaagcggagaggcagggaccctgagatgggcggaaagccccagcggagaaagaacccccaggaaggactgtataacgaactccagaaagacaagatggccgaagcctacagcgagatcggcatgaagggcgagcggagaagaggcaagggccacgatggcctgtaccagggcctgagcaccgccaccaaggacacctatgacgccctgcacatgcaggccctgcctccaagaagggccaagcgatctggatctggagcaacaaacttctcactactcaaacaagcaggtgacgtggaggagaatcccgggcctactagtatggcctgtcctggcttcctgtgggctcttgtgatctccacctgtcttgagttcagcatgttcgaaatcctgaacgtggaacagagccctcagagcctgcatgtgcaagagggcgacagcaccaacttcacctgtagcttccccagcagcaacttctacgccctgcactggtacagatgggagacagccaagtctcccgaggcactgttcgtgatgaccctgaacggcgacgagaagaagaagggcagaatcagcgccacactgaacaccaaagagggctactcctacctgtacatcaagggcagccagcctgaggacagcgccacttatctgtgcgccagaaacaccggcaaccagttctactttggcaccggcacaagcctgacagtgatccccaacgagcagaaactgatctcggaagaggatctggggagcggcatccagaaccctgatcctgccgtgtaccagctgcgggatagcaagagcagcgacaagagcgtgtgtctgttcaccgacttcgacagccagaccaacgtgtcccagagcaaggactccgacgtgtacatcaccgataagaccgtgctggacatgcggagcatggacttcaagagcaactccgccgtggcctggtccaacaagtccgatttcgcctgcgccaacgccttcaacaacagcattatccccgaggacacattcttcccaagccccgagagcagctgcggtacccagagttttgggttgttggaccctaaattgtgctatctgttggacggaatcctgttcatttacggagtgatcctgaccgcattgttcctgaagagaggccggaagaagctgctgtacatcttcaagcagcctttcatgcggcccgtgcagaccacccaggaagaggacggctgctcctgccggttccccgaggaagaagaaggcggctgcgagctgcgggttaagttttccagatccgcagacgcacccgcttaccaacaagggcagaaccaactctacaatgaacttaatttggggcggagggaagagtacgacgttctggacaaaaggaggggacgagatcccgagatgggcggaaagcctcagcgaaggaagaatccgcaagaggggctttataacgaactccagaaagataaaatggcagaagcctatagtgagattgggatgaagggagaaaggaggaggggtaaaggtcacgatgggttgtaccaaggattgagcacagccactaaagatacctatgatgcgctccacatgcaggccctgccgccaaga

SEQ ID NO: 3946 - DNA, 2874 bp, Artificial Sequence
  Synthetic Polynucloetide
atgaccatccggctgctgtgctatatgggcttctacttcctcggagccggcctgatggcatgccaggtccagctcgtcgagtccggcggcggcctcgtccaggccggcgactccgtcaccctctcctgcaccgcctccggccgcaccttctcctcctacgccctcgcctggttccgccagcgccccggcaaggagcgcgagttcgtcgccggcctccgctggggcggccccaccaactacgccgactccgtcaaggaccgcttcaccatctccggcgactccgccaagcacaccatgtacctccagatgaactccctcaagcccgaggacaccgccgtctactactgcggctacaaccccggcggctgggccgtcccctcccagtacgagtacgactcctggggccagggcacccaggtcaccgtctcctccggtaccggcggaggcggatctggcggcggaggtagcggtggcggaggatctgaattcggcgtgacccagacacctaagttccaggtgctgaaaaccggccagagcatgaccctgcaatgcgcccaggacatgaaccatgagtacatgagctggtacaggcaggaccctggcatgggcctgagactgatccactattctgtcggagccggcatcaccgaccagggcgaagttcctaatggctacaacgtgtccagaagcaccaccgaggacttcccactgagactgctgtctgccgctcctagccagaccagcgtgtacttttgcgccagcagctttcagaccggcgcttcctacggctacacattcggctctggcaccagactgaccgtgctcgagcagagcttcggcctgctggaccccaagctgtgctacctgctggatggcatcctgttcatctacggcgtgatcctgaccgccctgttcctgagagtgaagttcagcagaagcgccgacgcccctgcctaccagcagggacagaaccaactgtacaacgagctgaacctgggcagacgggaagagtacgacgtgctggacaagcggagaggcagggaccctgagatgggcggaaagccccagcggagaaagaacccccaggaaggactgtataacgaactccagaaagacaagatggccgaagcctacagcgagatcggcatgaagggcgagcggagaagaggcaagggccacgatggcctgtaccagggcctgagcaccgccaccaaggacacctatgacgccctgcacatgcaggccctgcctccaagaagggccaagcgatctggatctggagcaacaaacttctcactactcaaacaagcaggtgacgtggaggagaatcccgggcctactagtatggcctgtcctggcttcctgtgggctcttgtgatctccacctgtcttgagttcagcatgttcgaaatcctgaacgtggaacagagccctcagagcctgcatgtgcaagagggcgacagcaccaacttcacctgtagcttccccagcagcaacttctacgccctgcactggtacagatgggagacagccaagtctcccgaggcactgttcgtgatgaccctgaacggcgacgagaagaagaagggcagaatcagcgccacactgaacaccaaagagggctactcctacctgtacatcaagggcagccagcctgaggacagcgccacttatctgtgcgccagaaacaccggcaaccagttctactttggcaccggcacaagcctgacagtgatccccaaccagagttttgggttgttggaccctaaattgtgctatctgttggacggaatcctgttcatttacggagtgatcctgaccgcattgttcctgcgggttaagttttccagatccgcagacgcacccgcttaccaacaagggcagaaccaactctacaatgaacttaatttggggcggagggaagagtacgacgttctggacaaaaggaggggacgagatcccgagatgggcggaaagcctcagcgaaggaagaatccgcaagaggggctttataacgaactccagaaagataaaatggcagaagcctatagtgagattgggatgaagggagaaaggaggaggggtaaaggtcacgatgggttgtaccaaggattgagcacagccactaaagatacctatgatgcgctccacatgcaggccctgccgccaagacgcgccaagagaagcggatctggcgtgaagcagaccctgaatttcgacctgctgaagctggctggcgacgtggaatccaacccaggcccttctagaggccatatgaccgagtacaagcccacggtgcgcctcgccacccgcgacgacgtccccagggccgtacgcaccctcgccgccgcgttcgccgactaccccgccacgcgccacaccgtcgatccggaccgccacatcgagcgggtcaccgagctgcaagaactcttcctcacgcgcgtcgggctcgacatcggcaaggtgtgggtcgcggacgacggcgccgcggtggcggtctggaccacgccggagagcgtcgaagcgggggcggtgttcgccgagatcggcccgcgcatggccgagttgagcggttcccggctggccgcgcagcaacagatggaaggcctcctggcgccgcaccggcccaaggagcccgcgtggttcctggccaccgtcggcgtctcgcccgaccaccagggcaagggtctgggcagcgccgtcgtgctccccggagtggaggcggccgagcgcgccggggtgcccgccttcctggagacctccgcgccccgcaacctccccttctacgagcggctcggcttcaccgtcaccgccgacgtcgaggtgcccgaaggaccgcgcacctggtgcatgacccgcaagcccggtgcctga

SEQ ID NO: 3947 - DNA, 2346 bp, Artificial Sequence
  Synthetic Polynucloetide
atgaccatccggctgctgtgctatatgggcttctacttcctcggagccggcctgatggcatgccaggtccagctcgtcgagtccggcggcggcctcgtccaggccggcgactccgtcaccctctcctgcaccgcctccggccgcaccttctcctcctacgccctcgcctggttccgccagcgccccggcaaggagcgcgagttcgtcgccggcctccgctggggcggccccaccaactacgccgactccgtcaaggaccgcttcaccatctccggcgactccgccaagcacaccatgtacctccagatgaactccctcaagcccgaggacaccgccgtctactactgcggctacaaccccggcggctgggccgtcccctcccagtacgagtacgactcctggggccagggcacccaggtcaccgtctcctccggtaccggcggaggcggatctggcggcggaggtagcggtggcggaggatctgaattcggcgtgacccagacacctaagttccaggtgctgaaaaccggccagagcatgaccctgcaatgcgcccaggacatgaaccatgagtacatgagctggtacaggcaggaccctggcatgggcctgagactgatccactattctgtcggagccggcatcaccgaccagggcgaagttcctaatggctacaacgtgtccagaagcaccaccgaggacttcccactgagactgctgtctgccgctcctagccagaccagcgtgtacttttgcgccagcagctttcagaccggcgcttcctacggctacacattcggctctggcaccagactgaccgtgctcgagggacagcctaaggccaatcctaccgtgacactgttccctccaagcagcgaagaactccaggccaacaaggccacacttgtgtgcctgatctccgacttctaccctggggctgtgacagtggcttggaaggccgatggatctcctgtgaaagccggcgtggaaaccaccaagccatccaagcagagcaacaacaaatacgccgccagctcctacctgagcctgacacctgagcagtggaagtcccacagatcctacagctgccaagtgacccacgaaggcagcaccgtggaaaagacagtggcccctacagagtgcagccccatcaagaccgatgtgattacaatggaccccaaggacaactgctccaaggacgccaacgataccctgctgctccagctgaccaacaccagcgcctactacatgtacttgttgctgctgctgaagtccgtggtgtacttcgccatcatcacatgctgcctgctgcggagaaccgccttctgctgcaacggcgagaagtctagggccaagcgatctggatctggagcaacaaacttctcactactcaaacaagcaggtgacgtggaggagaatcccgggcctactagtatggcctgtcctggcttcctgtgggctcttgtgatctccacctgtcttgagttcagcatgttcgaaatcctgaacgtggaacagagccctcagagcctgcatgtgcaagagggcgacagcaccaacttcacctgtagcttccccagcagcaacttctacgccctgcactggtacagatgggagacagccaagtctcccgaggcactgttcgtgatgaccctgaacggcgacgagaagaagaagggcagaatcagcgccacactgaacaccaaagagggctactcctacctgtacatcaagggcagccagcctgaggacagcgccacttatctgtgcgccagaaacaccggcaaccagttctactttggcaccggcacaagcctgacagtgatccccaacgcctctacaaagggaccctccgtgtttcctctggctcccagcagcaagtctacaagcggaggaacagccgctctgggctgcctggtcaaggattactttcccgagcctgtgaccgtgtcctggaatagcggagcactgacaagcggcgtgcacacctttccagccgtgctgcaaagcagcggcctgtactctctgagcagcgtggtcacagtgcctagctctagcctgggcacccagacctacatctgcaatgtgaaccacaagcctagcaacaccaaggtggacaagagagtggaacccaagagctgtgaagtgaaaaccgactccaccgaccacgtgaagcccaaagagacagagaacaccaagcagcccagcaagagctgccacaagcccaaggccatcgtgcacaccgagaaagtgaacatgatgagcctgaccgtgctgggcctgcggatgctgttcgccaaaaccgtggccgtgaacttcctgctgaccgccaagctgttcttcctc

SEQ ID NO: 3948 - DNA, 2280 bp, Artificial Sequence
  Synthetic Polynucloetide
atgaccatccggctgctgtgctatatgggcttctacttcctcggagccggcctgatggcatgccaggtccagctcgtcgagtccggcggcggcctcgtccaggccggcgactccgtcaccctctcctgcaccgcctccggccgcaccttctcctcctacgccctcgcctggttccgccagcgccccggcaaggagcgcgagttcgtcgccggcctccgctggggcggccccaccaactacgccgactccgtcaaggaccgcttcaccatctccggcgactccgccaagcacaccatgtacctccagatgaactccctcaagcccgaggacaccgccgtctactactgcggctacaaccccggcggctgggccgtcccctcccagtacgagtacgactcctggggccagggcacccaggtcaccgtctcctccggtaccggcggaggcggatctggcggcggaggtagcggtggcggaggatctgaattcggcgtgacccagacacctaagttccaggtgctgaaaaccggccagagcatgaccctgcaatgcgcccaggacatgaaccatgagtacatgagctggtacaggcaggaccctggcatgggcctgagactgatccactattctgtcggagccggcatcaccgaccagggcgaagttcctaatggctacaacgtgtccagaagcaccaccgaggacttcccactgagactgctgtctgccgctcctagccagaccagcgtgtacttttgcgccagcagctttcagaccggcgcttcctacggctacacattcggctctggcaccagactgaccgtgctcgagggacagcctaaggccaatcctaccgtgacactgttccctccaagcagcgaagaactccaggccaacaaggccacacttgtgtgcctgatctccgacttctaccctggggctgtgacagtggcttggaaggccgatggatctcctgtgaaagccggcgtggaaaccaccaagccatccaagcagagcaacaacaaatacgccgccagctcctacctgagcctgacacctgagcagtggaagtcccacagatcctacagctgccaagtgacccacgaaggcagcaccgtggaaaagacagtggcccctacagagtgcagcggcagagccgattgcggcatcaccagcgccagctaccaccagggcgtgctgagcgccaccatcctgtacgagatcctgctgggcaaggccaccctgtacgccgtgctggtgtctgccctggtgctgatggctatggtcaagcggaaggacagccggggaagggccaagcgatctggatctggagcaacaaacttctcactactcaaacaagcaggtgacgtggaggagaatcccgggcctactagtatggcctgtcctggcttcctgtgggctcttgtgatctccacctgtcttgagttcagcatgttcgaaatcctgaacgtggaacagagccctcagagcctgcatgtgcaagagggcgacagcaccaacttcacctgtagcttccccagcagcaacttctacgccctgcactggtacagatgggagacagccaagtctcccgaggcactgttcgtgatgaccctgaacggcgacgagaagaagaagggcagaatcagcgccacactgaacaccaaagagggctactcctacctgtacatcaagggcagccagcctgaggacagcgccacttatctgtgcgccagaaacaccggcaaccagttctactttggcaccggcacaagcctgacagtgatccccaacgcctctacaaagggaccctccgtgtttcctctggctcccagcagcaagtctacaagcggaggaacagccgctctgggctgcctggtcaaggattactttcccgagcctgtgaccgtgtcctggaatagcggagcactgacaagcggcgtgcacacctttccagccgtgctgcaaagcagcggcctgtactctctgagcagcgtggtcacagtgcctagctctagcctgggcacccagacctacatctgcaatgtgaaccacaagcctagcaacaccaaggtggacaagagagtggaacccaagagctgtatccccgaggacacattcttcccaagcagcgacgtgccctgcgacgtgaagctggtggaaaagagcttcgagacagacaccaacctgaacttccagaacctgagcgtgatcggcttcagaatcctgctgctgaaagtggccggctttaacctgctgatgaccctgcggctgtggtccagc

SEQ ID NO: 3949 - DNA, 2280 bp, Artificial Sequence
  Synthetic Polynucloetide
atgaccatccggctgctgtgctatatgggcttctacttcctcggagccggcctgatggcatgccaggtccagctcgtcgagtccggcggcggcctcgtccaggccggcgactccgtcaccctctcctgcaccgcctccggccgcaccttctcctcctacgccctcgcctggttccgccagcgccccggcaaggagcgcgagttcgtcgccggcctccgctggggcggccccaccaactacgccgactccgtcaaggaccgcttcaccatctccggcgactccgccaagcacaccatgtacctccagatgaactccctcaagcccgaggacaccgccgtctactactgcggctacaaccccggcggctgggccgtcccctcccagtacgagtacgactcctggggccagggcacccaggtcaccgtctcctccggtaccggcggaggcggatctggcggcggaggtagcggtggcggaggatctgaattcggcgtgacccagacacctaagttccaggtgctgaaaaccggccagagcatgaccctgcaatgcgcccaggacatgaaccatgagtacatgagctggtacaggcaggaccctggcatgggcctgagactgatccactattctgtcggagccggcatcaccgaccagggcgaagttcctaatggctacaacgtgtccagaagcaccaccgaggacttcccactgagactgctgtctgccgctcctagccagaccagcgtgtacttttgcgccagcagctttcagaccggcgcttcctacggctacacattcggctctggcaccagactgaccgtgctcgagggacagcctaaggccaatcctaccgtgacactgttccctccaagcagcgaagaactccaggccaacaaggccacacttgtgtgcctgatctccgacttctaccctggggctgtgacagtggcttggaaggccgatggatctcctgtgaaagccggcgtggaaaccaccaagccatccaagcagagcaacaacaaatacgccgccagctcctacctgagcctgacacctgagcagtggaagtcccacagatcctacagctgccaagtgacccacgaaggcagcaccgtggaaaagacagtggcccctacagagtgcagcggcagagccgattgcggctttaccagcgagagctaccagcagggcgtgctgagcgccaccatcctgtacgagatcctgctgggcaaggccaccctgtacgccgtgctggtgtctgccctggtgctgatggctatggtcaagcggaaggacagccggggaagggccaagcgatctggatctggagcaacaaacttctcactactcaaacaagcaggtgacgtggaggagaatcccgggcctactagtatggcctgtcctggcttcctgtgggctcttgtgatctccacctgtcttgagttcagcatgttcgaaatcctgaacgtggaacagagccctcagagcctgcatgtgcaagagggcgacagcaccaacttcacctgtagcttccccagcagcaacttctacgccctgcactggtacagatgggagacagccaagtctcccgaggcactgttcgtgatgaccctgaacggcgacgagaagaagaagggcagaatcagcgccacactgaacaccaaagagggctactcctacctgtacatcaagggcagccagcctgaggacagcgccacttatctgtgcgccagaaacaccggcaaccagttctactttggcaccggcacaagcctgacagtgatccccaacgcctctacaaagggaccctccgtgtttcctctggctcccagcagcaagtctacaagcggaggaacagccgctctgggctgcctggtcaaggattactttcccgagcctgtgaccgtgtcctggaatagcggagcactgacaagcggcgtgcacacctttccagccgtgctgcaaagcagcggcctgtactctctgagcagcgtggtcacagtgcctagctctagcctgggcacccagacctacatctgcaatgtgaaccacaagcctagcaacaccaaggtggacaagagagtggaacccaagagctgtatccccgaggacacattcttcccaagccccgagagcagctgcgacgtgaagctggtggaaaagagcttcgagacagacaccaacctgaacttccagaacctgagcgtgatcggcttcagaatcctgctgctgaaagtggccggctttaacctgctgatgaccctgcggctgtggtccagc

SEQ ID NO: 3950 - DNA, 1755 bp, Artificial Sequence
  Synthetic Polynucloetide
atgaccatccggctgctgtgctatatgggcttctacttcctcggagccggcctgatggcatgccaggtccagctcgtcgagtccggcggcggcctcgtccaggccggcgactccgtcaccctctcctgcaccgcctccggccgcaccttctcctcctacgccctcgcctggttccgccagcgccccggcaaggagcgcgagttcgtcgccggcctccgctggggcggccccaccaactacgccgactccgtcaaggaccgcttcaccatctccggcgactccgccaagcacaccatgtacctccagatgaactccctcaagcccgaggacaccgccgtctactactgcggctacaaccccggcggctgggccgtcccctcccagtacgagtacgactcctggggccagggcacccaggtcaccgtctcctccggtaccggcggaggcggatctggcggcggaggtagcggtggcggaggatctgaattcggcgtgacccagacacctaagttccaggtgctgaaaaccggccagagcatgaccctgcaatgcgcccaggacatgaaccatgagtacatgagctggtacaggcaggaccctggcatgggcctgagactgatccactattctgtcggagccggcatcaccgaccagggcgaagttcctaatggctacaacgtgtccagaagcaccaccgaggacttcccactgagactgctgtctgccgctcctagccagaccagcgtgtacttttgcgccagcagctttcagaccggcgcttcctacggctacacattcggctctggcaccagactgaccgtgggcggaggcggaagtggaggcggaggatctggcggcggaggctctatcctgaacgtggaacagagccctcagagcctgcatgtgcaagagggcgacagcaccaacttcacctgtagcttccccagcagcaacttctacgccctgcactggtacagatgggagacagccaagtctcccgaggcactgttcgtgatgaccctgaacggcgacgagaagaagaagggcagaatcagcgccacactgaacaccaaagagggctactcctacctgtacatcaagggcagccagcctgaggacagcgccacttatctgtgcgccagaaacaccggcaaccagttctactttggcaccggcacaagcctgacagtgatccccaacgacggtaacgaggagatgggaggaatcactcaaaccccttacaaagtctcaatttcaggaacaactgttatccttacatgtccccagtatcctggcagcgagatcctttggcagcataacgacaagaatatagggggagatgaagacgataagaatatcggatctgacgaggatcacttgagcctgaaagagttctccgagcttgaacaaagcggatattatgtgtgctatccgcgcgggtcaaagccggaagacgctaacttttacctttatctccgagccagagtgtgcgaaaattgcatggaaatggacgttatgtccgttgctacaatagttatcgtagatatatgcatcacgggtggactgcttctgctggtttattattggtccaagaatagaaaggccaaagctaaacccgtgaccagaggcgctggcgcaggcggaaggcaaaggggacaaaacaaagaacggccaccaccagtgccaaatccagattatgagcctattcggaaaggacagagggacctgtactctggcctgaatcagagaagaatc

SEQ ID NO: 3951 - DNA, 1650 bp, Artificial Sequence
  Synthetic Polynucloetide
atgaccatccggctgctgtgctatatgggcttctacttcctcggagccggcctgatggcatgccaggtccagctcgtcgagtccggcggcggcctcgtccaggccggcgactccgtcaccctctcctgcaccgcctccggccgcaccttctcctcctacgccctcgcctggttccgccagcgccccggcaaggagcgcgagttcgtcgccggcctccgctggggcggccccaccaactacgccgactccgtcaaggaccgcttcaccatctccggcgactccgccaagcacaccatgtacctccagatgaactccctcaagcccgaggacaccgccgtctactactgcggctacaaccccggcggctgggccgtcccctcccagtacgagtacgactcctggggccagggcacccaggtcaccgtctcctccggtaccggcggaggcggatctggcggcggaggtagcggtggcggaggatctgaattcggcgtgacccagacacctaagttccaggtgctgaaaaccggccagagcatgaccctgcaatgcgcccaggacatgaaccatgagtacatgagctggtacaggcaggaccctggcatgggcctgagactgatccactattctgtcggagccggcatcaccgaccagggcgaagttcctaatggctacaacgtgtccagaagcaccaccgaggacttcccactgagactgctgtctgccgctcctagccagaccagcgtgtacttttgcgccagcagctttcagaccggcgcttcctacggctacacattcggctctggcaccagactgaccgtgggcggaggcggaagtggaggcggaggatctggcggcggaggctctatcctgaacgtggaacagagccctcagagcctgcatgtgcaagagggcgacagcaccaacttcacctgtagcttccccagcagcaacttctacgccctgcactggtacagatgggagacagccaagtctcccgaggcactgttcgtgatgaccctgaacggcgacgagaagaagaagggcagaatcagcgccacactgaacaccaaagagggctactcctacctgtacatcaagggcagccagcctgaggacagcgccacttatctgtgcgccagaaacaccggcaaccagttctactttggcaccggcacaagcctgacagtgatccccaacttcaagatccccatcgaggaactggaagatcgggtgttcgtgaactgcaacacctctatcacctgggtggaaggcaccgtgggaacactgctgagcgacatcaccagactggacctcggcaagcggattctggaccctcggggcatctacagatgcaacggcaccgacatctacaaggacaaagaaagcaccgtgcaggtccactacagaatgtgccagtcctgcgtggaactggaccctgctacagtggccggcatcatcgtgaccgatgtgatcgctactctgctgctggctctgggagtgttctgcttcgccggacacgaaacaggcagactgtctggcgctgccgatacacaggccctgctgagaaacgaccaagtgtatcagcccctgcgcgacagagatgatgcccagtattctcacctcggcggcaactgggctagaaacaag

SEQ ID NO: 3952 - DNA, 1680 bp, Artificial Sequence
  Synthetic Polynucloetide
atgaccatccggctgctgtgctatatgggcttctacttcctcggagccggcctgatggcatgccaggtccagctcgtcgagtccggcggcggcctcgtccaggccggcgactccgtcaccctctcctgcaccgcctccggccgcaccttctcctcctacgccctcgcctggttccgccagcgccccggcaaggagcgcgagttcgtcgccggcctccgctggggcggccccaccaactacgccgactccgtcaaggaccgcttcaccatctccggcgactccgccaagcacaccatgtacctccagatgaactccctcaagcccgaggacaccgccgtctactactgcggctacaaccccggcggctgggccgtcccctcccagtacgagtacgactcctggggccagggcacccaggtcaccgtctcctccggtaccggcggaggcggatctggcggcggaggtagcggtggcggaggatctgaattcggcgtgacccagacacctaagttccaggtgctgaaaaccggccagagcatgaccctgcaatgcgcccaggacatgaaccatgagtacatgagctggtacaggcaggaccctggcatgggcctgagactgatccactattctgtcggagccggcatcaccgaccagggcgaagttcctaatggctacaacgtgtccagaagcaccaccgaggacttcccactgagactgctgtctgccgctcctagccagaccagcgtgtacttttgcgccagcagctttcagaccggcgcttcctacggctacacattcggctctggcaccagactgaccgtgggcggaggcggaagtggaggcggaggatctggcggcggaggctctatcctgaacgtggaacagagccctcagagcctgcatgtgcaagagggcgacagcaccaacttcacctgtagcttccccagcagcaacttctacgccctgcactggtacagatgggagacagccaagtctcccgaggcactgttcgtgatgaccctgaacggcgacgagaagaagaagggcagaatcagcgccacactgaacaccaaagagggctactcctacctgtacatcaagggcagccagcctgaggacagcgccacttatctgtgcgccagaaacaccggcaaccagttctactttggcaccggcacaagcctgacagtgatccccaaccagagcatcaagggcaaccacctggtcaaggtgtacgactaccaagaggacggcagcgtgctgctgacatgtgatgccgaggccaagaacatcacctggtttaaggacggcaagatgatcggcttcctgaccgaggacaagaagaagtggaacctgggcagcaacgctaaggaccccagaggcatgtatcagtgcaagggcagccagaacaagagcaagcccctccaggtgtactaccggatgtgccagaactgcatcgagctgaacgccgctaccatcagcggctttctgttcgccgagatcgtgtccatcttcgtgctggccgtgggcgtgtactttatcgctggacaggatggcgtgcggcagagcagagcttccgataagcaaaccctgctgcctaacgaccagctgtaccagcctctgaaggacagagaggacgaccagtacagccacctccagggcaatcagctgagaagaaac

SEQ ID NO: 3953 - DNA, 1629 bp, Artificial Sequence
  Synthetic Polynucloetide
atgaccatccggctgctgtgctatatgggcttctacttcctcggagccggcctgatggcatgccaggtccagctcgtcgagtccggcggcggcctcgtccaggccggcgactccgtcaccctctcctgcaccgcctccggccgcaccttctcctcctacgccctcgcctggttccgccagcgccccggcaaggagcgcgagttcgtcgccggcctccgctggggcggccccaccaactacgccgactccgtcaaggaccgcttcaccatctccggcgactccgccaagcacaccatgtacctccagatgaactccctcaagcccgaggacaccgccgtctactactgcggctacaaccccggcggctgggccgtcccctcccagtacgagtacgactcctggggccagggcacccaggtcaccgtctcctccggtaccggcggaggcggatctggcggcggaggtagcggtggcggaggatctgaattcggcgtgacccagacacctaagttccaggtgctgaaaaccggccagagcatgaccctgcaatgcgcccaggacatgaaccatgagtacatgagctggtacaggcaggaccctggcatgggcctgagactgatccactattctgtcggagccggcatcaccgaccagggcgaagttcctaatggctacaacgtgtccagaagcaccaccgaggacttcccactgagactgctgtctgccgctcctagccagaccagcgtgtacttttgcgccagcagctttcagaccggcgcttcctacggctacacattcggctctggcaccagactgaccgtgggcggaggcggaagtggaggcggaggatctggcggcggaggctctatcctgaacgtggaacagagccctcagagcctgcatgtgcaagagggcgacagcaccaacttcacctgtagcttccccagcagcaacttctacgccctgcactggtacagatgggagacagccaagtctcccgaggcactgttcgtgatgaccctgaacggcgacgagaagaagaagggcagaatcagcgccacactgaacaccaaagagggctactcctacctgtacatcaagggcagccagcctgaggacagcgccacttatctgtgcgccagaaacaccggcaaccagttctactttggcaccggcacaagcctgacagtgatccccaaccagagttttgggttgttggaccctaaattgtgctatctgttggacggaatcctgttcatttacggagtgatcctgaccgcattgttcctgcgggttaagttttccagatccgcagacgcacccgcttaccaacaagggcagaaccaactctacaatgaacttaatttggggcggagggaagagtacgacgttctggacaaaaggaggggacgagatcccgagatgggcggaaagcctcagcgaaggaagaatccgcaagaggggctttataacgaactccagaaagataaaatggcagaagcctatagtgagattgggatgaagggagaaaggaggaggggtaaaggtcacgatgggttgtaccaaggattgagcacagccactaaagatacctatgatgcgctccacatgcaggccctgccgccaaga

SEQ ID NO: 3954 - DNA, 2331 bp, Artificial Sequence
  Synthetic Polynucloetide
atgaccatccggctgctgtgctatatgggcttctacttcctcggagccggcctgatggcatgccaggtccagctcgtcgagtccggcggcggcctcgtccaggccggcgactccgtcaccctctcctgcaccgcctccggccgcaccttctcctcctacgccctcgcctggttccgccagcgccccggcaaggagcgcgagttcgtcgccggcctccgctggggcggccccaccaactacgccgactccgtcaaggaccgcttcaccatctccggcgactccgccaagcacaccatgtacctccagatgaactccctcaagcccgaggacaccgccgtctactactgcggctacaaccccggcggctgggccgtcccctcccagtacgagtacgactcctggggccagggcacccaggtcaccgtctcctccggtaccggcggaggcggatctggcggcggaggtagcggtggcggaggatctgaattcggcgtgacccagacacctaagttccaggtgctgaaaaccggccagagcatgaccctgcaatgcgcccaggacatgaaccatgagtacatgagctggtacaggcaggaccctggcatgggcctgagactgatccactattctgtcggagccggcatcaccgaccagggcgaagttcctaatggctacaacgtgtccagaagcaccaccgaggacttcccactgagactgctgtctgccgctcctagccagaccagcgtgtacttttgcgccagcagctttcagaccggcgcttcctacggctacacattcggctctggcaccagactgaccgtgggcggaggcggaagtggaggcggaggatctggcggcggaggctctatcctgaacgtggaacagagccctcagagcctgcatgtgcaagagggcgacagcaccaacttcacctgtagcttccccagcagcaacttctacgccctgcactggtacagatgggagacagccaagtctcccgaggcactgttcgtgatgaccctgaacggcgacgagaagaagaagggcagaatcagcgccacactgaacaccaaagagggctactcctacctgtacatcaagggcagccagcctgaggacagcgccacttatctgtgcgccagaaacaccggcaaccagttctactttggcaccggcacaagcctgacagtgatccccaacgggagcggcatccagaaccctgatcctgccgtgtaccagctgcgggatagcaagagcagcgacaagagcgtgtgtctgttcaccgacttcgacagccagaccaacgtgtcccagagcaaggactccgacgtgtacatcaccgataagaccgtgctggacatgcggagcatggacttcaagagcaactccgccgtggcctggtccaacaagtccgatttcgcctgcgccaacgccttcaacaacagcattatccccgaggacacattcttcccaagccccgagagcagctgcgacgtgaagctggtggaaaagagcttcgagacagacaccaacctgaacttccagaacctgagcgtgatcggcttcagaatcctgctgctgaaagtggccggctttaacctgctgatgaccctgcggctgtggtccagccgcgccaagagaagcggatctggcgtgaagcagaccctgaatttcgacctgctgaagctggctggcgacgtggaatccaacccaggcccttctagaggccatatgaccgagtacaagcccacggtgcgcctcgccacccgcgacgacgtccccagggccgtacgcaccctcgccgccgcgttcgccgactaccccgccacgcgccacaccgtcgatccggaccgccacatcgagcgggtcaccgagctgcaagaactcttcctcacgcgcgtcgggctcgacatcggcaaggtgtgggtcgcggacgacggcgccgcggtggcggtctggaccacgccggagagcgtcgaagcgggggcggtgttcgccgagatcggcccgcgcatggccgagttgagcggttcccggctggccgcgcagcaacagatggaaggcctcctggcgccgcaccggcccaaggagcccgcgtggttcctggccaccgtcggcgtctcgcccgaccaccagggcaagggtctgggcagcgccgtcgtgctccccggagtggaggcggccgagcgcgccggggtgcccgccttcctggagacctccgcgccccgcaacctccccttctacgagcggctcggcttcaccgtcaccgccgacgtcgaggtgcccgaaggaccgcgcacctggtgcatgacccgcaagcccggtgcctga

SEQ ID NO: 3955 - DNA, 2433 bp, Artificial Sequence
  Synthetic Polynucloetide
atgaccatccggctgctgtgctatatgggcttctacttcctcggagccggcctgatggcatgccaggtccagctcgtcgagtccggcggcggcctcgtccaggccggcgactccgtcaccctctcctgcaccgcctccggccgcaccttctcctcctacgccctcgcctggttccgccagcgccccggcaaggagcgcgagttcgtcgccggcctccgctggggcggccccaccaactacgccgactccgtcaaggaccgcttcaccatctccggcgactccgccaagcacaccatgtacctccagatgaactccctcaagcccgaggacaccgccgtctactactgcggctacaaccccggcggctgggccgtcccctcccagtacgagtacgactcctggggccagggcacccaggtcaccgtctcctccggtaccggcggaggcggatctggcggcggaggtagcggtggcggaggatctgaattcggcgtgacccagacacctaagttccaggtgctgaaaaccggccagagcatgaccctgcaatgcgcccaggacatgaaccatgagtacatgagctggtacaggcaggaccctggcatgggcctgagactgatccactattctgtcggagccggcatcaccgaccagggcgaagttcctaatggctacaacgtgtccagaagcaccaccgaggacttcccactgagactgctgtctgccgctcctagccagaccagcgtgtacttttgcgccagcagctttcagaccggcgcttcctacggctacacattcggctctggcaccagactgaccgtgggcggaggcggaagtggaggcggaggatctggcggcggaggctctatcctgaacgtggaacagagccctcagagcctgcatgtgcaagagggcgacagcaccaacttcacctgtagcttccccagcagcaacttctacgccctgcactggtacagatgggagacagccaagtctcccgaggcactgttcgtgatgaccctgaacggcgacgagaagaagaagggcagaatcagcgccacactgaacaccaaagagggctactcctacctgtacatcaagggcagccagcctgaggacagcgccacttatctgtgcgccagaaacaccggcaaccagttctactttggcaccggcacaagcctgacagtgatccccaacctcgaggacctgaagaacgtgttcccacctgaggtggccgtgttcgagcctagcgaggccgagatcagccacacccagaaagccaccctcgtgtgcctggctaccggcttctaccccgaccatgtggaactgtcttggtgggtcaacggcaaagaggtgcacagcggcgtgtctaccgacccccagccactgaaagaacagcccgccctgaacgacagccggtactgcctgagcagcagactgagagtgtccgccaccttctggcagaacccccggaaccacttcagatgccaggtgcagttctacggcctgagcgagaacgacgagtggacccaggacagagccaagcccgtgacccagatcgtgtctgccgaagcctggggcagagccgattgcggctttaccagcgagagctaccagcagggcgtgctgagcgccaccatcctgtacgagatcctgctgggcaaggccaccctgtacgccgtgctggtgtctgccctggtgctgatggctatggtcaagcggaaggacagccggggaagggccaagcgatctggatctggagcaacaaacttctcactactcaaacaagcaggtgacgtggaggagaatcccgggcctactagaggccatatgaccgagtacaagcccacggtgcgcctcgccacccgcgacgacgtccccagggccgtacgcaccctcgccgccgcgttcgccgactaccccgccacgcgccacaccgtcgatccggaccgccacatcgagcgggtcaccgagctgcaagaactcttcctcacgcgcgtcgggctcgacatcggcaaggtgtgggtcgcggacgacggcgccgcggtggcggtctggaccacgccggagagcgtcgaagcgggggcggtgttcgccgagatcggcccgcgcatggccgagttgagcggttcccggctggccgcgcagcaacagatggaaggcctcctggcgccgcaccggcccaaggagcccgcgtggttcctggccaccgtcggcgtctcgcccgaccaccagggcaagggtctgggcagcgccgtcgtgctccccggagtggaggcggccgagcgcgccggggtgcccgccttcctggagacctccgcgccccgcaacctccccttctacgagcggctcggcttcaccgtcaccgccgacgtcgaggtgcccgaaggaccgcgcacctggtgcatgacccgcaagcccggtgcctga

SEQ ID NO: 3956 - DNA, 2577 bp, Artificial Sequence
  Synthetic Polynucloetide
atgaccatccggctgctgtgctatatgggcttctacttcctcggagccggcctgatggcatgccaggtccagctcgtcgagtccggcggcggcctcgtccaggccggcgactccgtcaccctctcctgcaccgcctccggccgcaccttctcctcctacgccctcgcctggttccgccagcgccccggcaaggagcgcgagttcgtcgccggcctccgctggggcggccccaccaactacgccgactccgtcaaggaccgcttcaccatctccggcgactccgccaagcacaccatgtacctccagatgaactccctcaagcccgaggacaccgccgtctactactgcggctacaaccccggcggctgggccgtcccctcccagtacgagtacgactcctggggccagggcacccaggtcaccgtctcctccggtaccggcggaggcggatctggcggcggaggtagcggtggcggaggatctgaattcggcgtgacccagacacctaagttccaggtgctgaaaaccggccagagcatgaccctgcaatgcgcccaggacatgaaccatgagtacatgagctggtacaggcaggaccctggcatgggcctgagactgatccactattctgtcggagccggcatcaccgaccagggcgaagttcctaatggctacaacgtgtccagaagcaccaccgaggacttcccactgagactgctgtctgccgctcctagccagaccagcgtgtacttttgcgccagcagctttcagaccggcgcttcctacggctacacattcggctctggcaccagactgaccgtgggcggaggcggaagtggaggcggaggatctggcggcggaggctctatcctgaacgtggaacagagccctcagagcctgcatgtgcaagagggcgacagcaccaacttcacctgtagcttccccagcagcaacttctacgccctgcactggtacagatgggagacagccaagtctcccgaggcactgttcgtgatgaccctgaacggcgacgagaagaagaagggcagaatcagcgccacactgaacaccaaagagggctactcctacctgtacatcaagggcagccagcctgaggacagcgccacttatctgtgcgccagaaacaccggcaaccagttctactttggcaccggcacaagcctgacagtgatccccaacgagcagaaactgatctcggaagaggatctggggagcggcaccccattcccttctctggcccctcccatcatgctgctggtggacggcaagcagcagatggtggtcgtgtgcctggtgctggatgtggccccacctggactggacagccccatctggtttagcgccggcaatggctctgccctggacgcctttacctacggcccaagccctgccaccgatggcacctggacaaatctggcccacctgagcctgcccagcgaggaactggcttcttgggagcctctcgtgtgccacacaggacctggcgctgagggacacagcagatccacccagcctatgcacctgtctggcgaggccagcaccgccagaacctgtcctcaggaacctctgagaggcacccctggcggagcactgtggctgggagtgctgagactgctgctgttcaagctgctgctgtttgacctgctgctgacctgctcctgtctgtgcgatcctgccggccctctgccttctcctgccaccaccacaagactgagagccctgggcagccacagactgcaccctgccacagagacaggcggcagagaggccacaagcagccctagaccccagcccagagacagaagatggggcgataccccccctggcagaaagcctggatctccagtccgcgccaagagaagcggatctggcgtgaagcagaccctgaatttcgacctgctgaagctggctggcgacgtggaatccaacccaggcccttctagatctagaggccatatgaccgagtacaagcccacggtgcgcctcgccacccgcgacgacgtccccagggccgtacgcaccctcgccgccgcgttcgccgactaccccgccacgcgccacaccgtcgatccggaccgccacatcgagcgggtcaccgagctgcaagaactcttcctcacgcgcgtcgggctcgacatcggcaaggtgtgggtcgcggacgacggcgccgcggtggcggtctggaccacgccggagagcgtcgaagcgggggcggtgttcgccgagatcggcccgcgcatggccgagttgagcggttcccggctggccgcgcagcaacagatggaaggcctcctggcgccgcaccggcccaaggagcccgcgtggttcctggccaccgtcggcgtctcgcccgaccaccagggcaagggtctgggcagcgccgtcgtgctccccggagtggaggcggccgagcgcgccggggtgcccgccttcctggagacctccgcgccccgcaacctccccttctacgagcggctcggcttcaccgtcaccgccgacgtcgaggtgcccgaaggaccgcgcacctggtgcatgacccgcaagcccggtgcctga

SEQ ID NO: 3957 - DNA, 2055 bp, Artificial Sequence
  Synthetic Polynucloetide
atgaccatccggctgctgtgctatatgggcttctacttcctcggagccggcctgatggcatgccaggtccagctcgtcgagtccggcggcggcctcgtccaggccggcgactccgtcaccctctcctgcaccgcctccggccgcaccttctcctcctacgccctcgcctggttccgccagcgccccggcaaggagcgcgagttcgtcgccggcctccgctggggcggccccaccaactacgccgactccgtcaaggaccgcttcaccatctccggcgactccgccaagcacaccatgtacctccagatgaactccctcaagcccgaggacaccgccgtctactactgcggctacaaccccggcggctgggccgtcccctcccagtacgagtacgactcctggggccagggcacccaggtcaccgtctcctccggtaccggcggaggcggatctggcggcggaggtagcggtggcggaggatctgaattcggcgtgacccagacacctaagttccaggtgctgaaaaccggccagagcatgaccctgcaatgcgcccaggacatgaaccatgagtacatgagctggtacaggcaggaccctggcatgggcctgagactgatccactattctgtcggagccggcatcaccgaccagggcgaagttcctaatggctacaacgtgtccagaagcaccaccgaggacttcccactgagactgctgtctgccgctcctagccagaccagcgtgtacttttgcgccagcagctttcagaccggcgcttcctacggctacacattcggctctggcaccagactgaccgtgctcgaggacctgaagaacgtgttcccacctgaggtggccgtgttcgagcctagcgaggccgagatcagccacacccagaaagccaccctcgtgtgcctggctaccggcttctaccccgaccatgtggaactgtcttggtgggtcaacggcaaagaggtgcacagcggcgtgtctaccgacccccagccactgaaagaacagcccgccctgaacgacagccggtactgcctgagcagcagactgagagtgtccgccaccttctggcagaacccccggaaccacttcagatgccaggtgcagttctacggcctgagcgagaacgacgagtggacccaggacagagccaagcccgtgacccagatcgtgtctgccgaagcctggggcagagccgattgcggctttaccagcgagagctaccagcagggcgtgctgagcgccaccatcctgtacgagatcctgctgggcaaggccaccctgtacgccgtgctggtgtctgccctggtgctgatggctatggtcaagcggaaggacagccggggaagggccaagcgatctggatctggagcaacaaacttctcactactcaaacaagcaggtgacgtggaggagaatcccgggcctactagaggccatatgaccgagtacaagcccacggtgcgcctcgccacccgcgacgacgtccccagggccgtacgcaccctcgccgccgcgttcgccgactaccccgccacgcgccacaccgtcgatccggaccgccacatcgagcgggtcaccgagctgcaagaactcttcctcacgcgcgtcgggctcgacatcggcaaggtgtgggtcgcggacgacggcgccgcggtggcggtctggaccacgccggagagcgtcgaagcgggggcggtgttcgccgagatcggcccgcgcatggccgagttgagcggttcccggctggccgcgcagcaacagatggaaggcctcctggcgccgcaccggcccaaggagcccgcgtggttcctggccaccgtcggcgtctcgcccgaccaccagggcaagggtctgggcagcgccgtcgtgctccccggagtggaggcggccgagcgcgccggggtgcccgccttcctggagacctccgcgccccgcaacctccccttctacgagcggctcggcttcaccgtcaccgccgacgtcgaggtgcccgaaggaccgcgcacctggtgcatgacccgcaagcccggtgcctga

SEQ ID NO: 3958 - DNA, 1362 bp, Artificial Sequence
  Synthetic Polynucloetide
atgaccatccggctgctgtgctatatgggcttctacttcctcggagccggcctgatggcatgccaggtccagctcgtcgagtccggcggcggcctcgtccaggccggcgactccgtcaccctctcctgcaccgcctccggccgcaccttctcctcctacgccctcgcctggttccgccagcgccccggcaaggagcgcgagttcgtcgccggcctccgctggggcggccccaccaactacgccgactccgtcaaggaccgcttcaccatctccggcgactccgccaagcacaccatgtacctccagatgaactccctcaagcccgaggacaccgccgtctactactgcggctacaaccccggcggctgggccgtcccctcccagtacgagtacgactcctggggccagggcacccaggtcaccgtctcctccggtaccggcggaggcggatctggcggcggaggtagcggtggcggaggatctgaattcggcgtgacccagacacctaagttccaggtgctgaaaaccggccagagcatgaccctgcaatgcgcccaggacatgaaccatgagtacatgagctggtacaggcaggaccctggcatgggcctgagactgatccactattctgtcggagccggcatcaccgaccagggcgaagttcctaatggctacaacgtgtccagaagcaccaccgaggacttcccactgagactgctgtctgccgctcctagccagaccagcgtgtacttttgcgccagcagctttcagaccggcgcttcctacggctacacattcggctctggcaccagactgaccgtgctcgaggacctgaagaacgtgttcccacctgaggtggccgtgttcgagcctagcgaggccgagatcagccacacccagaaagccaccctcgtgtgcctggctaccggcttctaccccgaccatgtggaactgtcttggtgggtcaacggcaaagaggtgcacagcggcgtgtctaccgacccccagccactgaaagaacagcccgccctgaacgacagccggtactgcctgagcagcagactgagagtgtccgccaccttctggcagaacccccggaaccacttcagatgccaggtgcagttctacggcctgagcgagaacgacgagtggacccaggacagagccaagcccgtgacccagatcgtgtctgccgaagcctggggcagagccgattgcggctttaccagcgagagctaccagcagggcgtgctgagcgccaccatcctgtacgagatcctgctgggcaaggccaccctgtacgccgtgctggtgtctgccctggtgctgatggctatggtcaagcggaaggacagccgggga

SEQ ID NO: 3959 - DNA, 1320 bp, Artificial Sequence
  Synthetic Polynucloetide
atggcctgtcctggcttcctgtgggctcttgtgatctccacctgtcttgagttcagcatgttcgaaatcctgaacgtggaacagagccctcagagcctgcatgtgcaagagggcgacagcaccaacttcacctgtagcttccccagcagcaacttctacgccctgcactggtacagatgggagacagccaagtctcccgaggcactgttcgtgatgaccctgaacggcgacgagaagaagaagggcagaatcagcgccacactgaacaccaaagagggctactcctacctgtacatcaagggcagccagcctgaggacagcgccacttatctgtgcgccagaaacaccggcaaccagttctactttggcaccggcacaagcctgacagtgatccccaacatccagaaccctgatcctgccgtgtaccagctgcgggatagcaagagcagcgacaagagcgtgtgtctgttcaccgacttcgacagccagaccaacgtgtcccagagcaaggactccgacgtgtacatcaccgataagaccgtgctggacatgcggagcatggacttcaagagcaactccgccgtggcctggtccaacaagtccgatttcgcctgcgccaacgccttcaacaacagcattatccccgaggacacattcttcccaagccccgagagcagctgcgacgtgaagctggtggaaaagagcttcgagacagacaccaacctgaacttccagaacctgagcgtgatcggcttcagaatcctgctgctgaaagtggccggctttaacctgctgatgaccctgcggctgtggtccagccgcgccaagagaagcggatctggcgtgaagcagaccctgaatttcgacctgctgaagctggctggcgacgtggaatccaacccaggcccttctagaggccatatggccaagcctttgtctcaagaagaatccaccctcattgaaagagcaacggctacaatcaacagcatccccatctctgaagactacagcgtcgccagcgcagctctctctagcgacggccgcatcttcactggtgtcaatgtatatcattttactgggggaccttgtgcagaactcgtggtgctgggcactgctgctgctgcggcagctggcaacctgacttgtatcgtcgcgatcggaaatgagaacaggggcatcttgagcccctgcggacggtgccgacaggtgcttctcgatctgcatcctgggatcaaagccatagtgaaggacagtgatggacagccgacggcagttgggattcgtgaattgctgccctctggttatgtgtgggagggctga

SEQ ID NO: 3960 - DNA, 819 bp, Artificial Sequence
  Synthetic Polynucloetide
atggcctgtcctggcttcctgtgggctcttgtgatctccacctgtcttgagttcagcatgttcgaaatcctgaacgtggaacagagccctcagagcctgcatgtgcaagagggcgacagcaccaacttcacctgtagcttccccagcagcaacttctacgccctgcactggtacagatgggagacagccaagtctcccgaggcactgttcgtgatgaccctgaacggcgacgagaagaagaagggcagaatcagcgccacactgaacaccaaagagggctactcctacctgtacatcaagggcagccagcctgaggacagcgccacttatctgtgcgccagaaacaccggcaaccagttctactttggcaccggcacaagcctgacagtgatccccaacatccagaaccctgatcctgccgtgtaccagctgcgggatagcaagagcagcgacaagagcgtgtgtctgttcaccgacttcgacagccagaccaacgtgtcccagagcaaggactccgacgtgtacatcaccgataagaccgtgctggacatgcggagcatggacttcaagagcaactccgccgtggcctggtccaacaagtccgatttcgcctgcgccaacgccttcaacaacagcattatccccgaggacacattcttcccaagccccgagagcagctgcgacgtgaagctggtggaaaagagcttcgagacagacaccaacctgaacttccagaacctgagcgtgatcggcttcagaatcctgctgctgaaagtggccggctttaacctgctgatgaccctgcggctgtggtccagc

SEQ ID NO: 3961 - DNA, 2109 bp, Artificial Sequence
  Synthetic Polynucloetide
atgaccatccggctgctgtgctatatgggcttctacttcctcggagccggcctgatggcatgccaggtccagctcgtcgagtccggcggcggcctcgtccaggccggcgactccgtcaccctctcctgcaccgcctccggccgcaccttctcctcctacgccctcgcctggttccgccagcgccccggcaaggagcgcgagttcgtcgccggcctccgctggggcggccccaccaactacgccgactccgtcaaggaccgcttcaccatctccggcgactccgccaagcacaccatgtacctccagatgaactccctcaagcccgaggacaccgccgtctactactgcggctacaaccccggcggctgggccgtcccctcccagtacgagtacgactcctggggccagggcacccaggtcaccgtctcctccggtaccggcggaggcggatctggcggcggaggtagcggtggcggaggatctgaattcggcgtgacccagacacctaagttccaggtgctgaaaaccggccagagcatgaccctgcaatgcgcccaggacatgaaccatgagtacatgagctggtacaggcaggaccctggcatgggcctgagactgatccactattctgtcggagccggcatcaccgaccagggcgaagttcctaatggctacaacgtgtccagaagcaccaccgaggacttcccactgagactgctgtctgccgctcctagccagaccagcgtgtacttttgcgccagcagctttcagaccggcgcttcctacggctacacattcggctctggcaccagactgaccgtgctcgaggggaaaccaattcccaaccctcttctgggactggattcaaccggcagcggcgaggacctgaagaacgtgttcccacctgaggtggccgtgttcgagcctagcgaggccgagatcagccacacccagaaagccaccctcgtgtgcctggctaccggcttctaccccgaccatgtggaactgtcttggtgggtcaacggcaaagaggtgcacagcggcgtgtgtaccgacccccagccactgaaagaacagcccgccctgaacgacagccggtactgcctgagcagcagactgagagtgtccgccaccttctggcagaacccccggaaccacttcagatgccaggtgcagttctacggcctgagcgagaacgacgagtggacccaggacagagccaagcccgtgacccagatcgtgtctgccgaagcctggggcagagccgattgcggctttaccagcgagagctaccagcagggcgtgctgagcgccaccatcctgtacgagatcctgctgggcaaggccaccctgtacgccgtgctggtgtctgccctggtgctgatggctatggtcaagcggaaggacagccggggaagggccaagcgatctggatctggagcaacaaacttctcactactcaaacaagcaggtgacgtggaggagaatcccgggcctactagaggccatatgaccgagtacaagcccacggtgcgcctcgccacccgcgacgacgtccccagggccgtacgcaccctcgccgccgcgttcgccgactaccccgccacgcgccacaccgtcgatccggaccgccacatcgagcgggtcaccgagctgcaagaactcttcctcacgcgcgtcgggctcgacatcggcaaggtgtgggtcgcggacgacggcgccgcggtggcggtctggaccacgccggagagcgtcgaagcgggggcggtgttcgccgagatcggcccgcgcatggccgagttgagcggttcccggctggccgcgcagcaacagatggaaggcctcctggcgccgcaccggcccaaggagcccgcgtggttcctggccaccgtcggcgtctcgcccgaccaccagggcaagggtctgggcagcgccgtcgtgctccccggagtggaggcggccgagcgcgccggggtgcccgccttcctggagacctccgcgccccgcaacctccccttctacgagcggctcggcttcaccgtcaccgccgacgtcgaggtgcccgaaggaccgcgcacctggtgcatgacccgcaagcccggtgcctga

SEQ ID NO: 3962 - DNA, 1419 bp, Artificial Sequence
  Synthetic Polynucloetide
atgaccatccggctgctgtgctatatgggcttctacttcctcggagccggcctgatggcatgccaggtccagctcgtcgagtccggcggcggcctcgtccaggccggcgactccgtcaccctctcctgcaccgcctccggccgcaccttctcctcctacgccctcgcctggttccgccagcgccccggcaaggagcgcgagttcgtcgccggcctccgctggggcggccccaccaactacgccgactccgtcaaggaccgcttcaccatctccggcgactccgccaagcacaccatgtacctccagatgaactccctcaagcccgaggacaccgccgtctactactgcggctacaaccccggcggctgggccgtcccctcccagtacgagtacgactcctggggccagggcacccaggtcaccgtctcctccggtaccggcggaggcggatctggcggcggaggtagcggtggcggaggatctgaattcggcgtgacccagacacctaagttccaggtgctgaaaaccggccagagcatgaccctgcaatgcgcccaggacatgaaccatgagtacatgagctggtacaggcaggaccctggcatgggcctgagactgatccactattctgtcggagccggcatcaccgaccagggcgaagttcctaatggctacaacgtgtccagaagcaccaccgaggacttcccactgagactgctgtctgccgctcctagccagaccagcgtgtacttttgcgccagcagctttcagaccggcgcttcctacggctacacattcggctctggcaccagactgaccgtgctcgaggggaaaccaattcccaaccctcttctgggactggattcaaccggcagcggcgaggacctgaagaacgtgttcccacctgaggtggccgtgttcgagcctagcgaggccgagatcagccacacccagaaagccaccctcgtgtgcctggctaccggcttctaccccgaccatgtggaactgtcttggtgggtcaacggcaaagaggtgcacagcggcgtgtgtaccgacccccagccactgaaagaacagcccgccctgaacgacagccggtactgcctgagcagcagactgagagtgtccgccaccttctggcagaacccccggaaccacttcagatgccaggtgcagttctacggcctgagcgagaacgacgagtggacccaggacagagccaagcccgtgacccagatcgtgtctgccgaagcctggggcagagccgattgcggctttaccagcgagagctaccagcagggcgtgctgagcgccaccatcctgtacgagatcctgctgggcaaggccaccctgtacgccgtgctggtgtctgccctggtgctgatggctatggtcaagcggaaggacagccggggatga

SEQ ID NO: 3963 - DNA, 1356 bp, Artificial Sequence
  Synthetic Polynucloetide
atggcctgtcctggcttcctgtgggctcttgtgatctccacctgtcttgagttcagcatgttcgaaatcctgaacgtggaacagagccctcagagcctgcatgtgcaagagggcgacagcaccaacttcacctgtagcttccccagcagcaacttctacgccctgcactggtacagatgggagacagccaagtctcccgaggcactgttcgtgatgaccctgaacggcgacgagaagaagaagggcagaatcagcgccacactgaacaccaaagagggctactcctacctgtacatcaagggcagccagcctgaggacagcgccacttatctgtgcgccagaaacaccggcaaccagttctactttggcaccggcacaagcctgacagtgatccccaacgagcagaaactgatctcggaagaggatgggagcggcatccagaaccctgatcctgccgtgtaccagctgcgggatagcaagagcagcgacaagagcgtgtgtctgttcaccgacttcgacagccagaccaacgtgtcccagagcaaggactccgacgtgtacatcaccgataagtgcgtgctggacatgcggagcatggacttcaagagcaactccgccgtggcctggtccaacaagtccgatttcgcctgcgccaacgccttcaacaacagcattatccccgaggacacattcttcccaagccccgagagcagctgcgacgtgaagctggtggaaaagagcttcgagacagacaccaacctgaacttccagaacctgagcgtgatcggcttcagaatcctgctgctgaaagtggccggctttaacctgctgatgaccctgcggctgtggtccagccgcgccaagagaagcggatctggcgtgaagcagaccctgaatttcgacctgctgaagctggctggcgacgtggaatccaacccaggcccttctagaggccatatggccaagcctttgtctcaagaagaatccaccctcattgaaagagcaacggctacaatcaacagcatccccatctctgaagactacagcgtcgccagcgcagctctctctagcgacggccgcatcttcactggtgtcaatgtatatcattttactgggggaccttgtgcagaactcgtggtgctgggcactgctgctgctgcggcagctggcaacctgacttgtatcgtcgcgatcggaaatgagaacaggggcatcttgagcccctgcggacggtgccgacaggtgcttctcgatctgcatcctgggatcaaagccatagtgaaggacagtgatggacagccgacggcagttgggattcgtgaattgctgccctctggttatgtgtgggagggctga

SEQ ID NO: 3964 - DNA, 858 bp, Artificial Sequence
  Synthetic Polynucloetide
atggcctgtcctggcttcctgtgggctcttgtgatctccacctgtcttgagttcagcatgttcgaaatcctgaacgtggaacagagccctcagagcctgcatgtgcaagagggcgacagcaccaacttcacctgtagcttccccagcagcaacttctacgccctgcactggtacagatgggagacagccaagtctcccgaggcactgttcgtgatgaccctgaacggcgacgagaagaagaagggcagaatcagcgccacactgaacaccaaagagggctactcctacctgtacatcaagggcagccagcctgaggacagcgccacttatctgtgcgccagaaacaccggcaaccagttctactttggcaccggcacaagcctgacagtgatccccaacgagcagaaactgatctcggaagaggatgggagcggcatccagaaccctgatcctgccgtgtaccagctgcgggatagcaagagcagcgacaagagcgtgtgtctgttcaccgacttcgacagccagaccaacgtgtcccagagcaaggactccgacgtgtacatcaccgataagtgcgtgctggacatgcggagcatggacttcaagagcaactccgccgtggcctggtccaacaagtccgatttcgcctgcgccaacgccttcaacaacagcattatccccgaggacacattcttcccaagccccgagagcagctgcgacgtgaagctggtggaaaagagcttcgagacagacaccaacctgaacttccagaacctgagcgtgatcggcttcagaatcctgctgctgaaagtggccggctttaacctgctgatgaccctgcggctgtggtccagctga

SEQ ID NO: 3965 - DNA, 2331 bp, Artificial Sequence
  Synthetic Polynucloetide
atgaccatccggctgctgtgctatatgggcttctacttcctcggagccggcctgatggcatgccaggtccagctcgtcgagtccggcggcggcctcgtccaggccggcgactccgtcaccctctcctgcaccgcctccggccgcaccttctcctcctacgccctcgcctggttccgccagcgccccggcaaggagcgcgagttcgtcgccggcctccgctggggcggccccaccaactacgccgactccgtcaaggaccgcttcaccatctccggcgactccgccaagcacaccatgtacctccagatgaactccctcaagcccgaggacaccgccgtctactactgcggctacaaccccggcggctgggccgtcccctcccagtacgagtacgactcctggggccagggcacccaggtcaccgtctcctccggtaccggcggaggcggatctggcggcggaggtagcggtggcggaggatctgaattcggcgtgacccagacacctaagttccaggtgctgaaaaccggccagagcatgaccctgcaatgcgcccaggacatgaaccatgagtacatgagctggtacaggcaggaccctggcatgggcctgagactgatccactattctgtcggagccggcatcaccgaccagggcgaagttcctaatggctacaacgtgtccagaagcaccaccgaggacttcccactgagactgctgtctgccgctcctagccagaccagcgtgtacttttgcgccagcagctttcagaccggcgcttcctacggctacacattcggctctggcaccagactgaccgtgggcggaggcggaagtggaggcggaggatctggcggcggaggctctatcctgaacgtggaacagagccctcagagcctgcatgtgcaagagggcgacagcaccaacttcacctgtagcttccccagcagcaacttctacgccctgcactggtacagatgggagacagccaagtctcccgaggcactgttcgtgatgaccctgaacggcgacgagaagaagaagggcagaatcagcgccacactgaacaccaaagagggctactcctacctgtacatcaagggcagccagcctgaggacagcgccacttatctgtgcgccagaaacaccggcaaccagttctactttggcaccggcacaagcctgacagtgatccccaacgggagcggcatccagaaccctgatcctgccgtgtaccagctgcgggatagcaagagcagcgacaagagcgtgtgtctgttcaccgacttcgacagccagaccaacgtgtcccagagcaaggactccgacgtgtacatcaccgataagaccgtgctggacatgcggagcatggacttcaagagcaactccgccgtggcctggtccaacaagtccgatttcgcctgcgccaacgccttcaacaacagcattatccccgaggacacattcttcccaagcagcgacgtgccctgcgacgtgaagctggtggaaaagagcttcgagacagacaccaacctgaacttccagaacctgagcgtgatcggcttcagaatcctgctgctgaaagtggccggctttaacctgctgatgaccctgcggctgtggtccagccgcgccaagagaagcggatctggcgtgaagcagaccctgaatttcgacctgctgaagctggctggcgacgtggaatccaacccaggcccttctagaggccatatgaccgagtacaagcccacggtgcgcctcgccacccgcgacgacgtccccagggccgtacgcaccctcgccgccgcgttcgccgactaccccgccacgcgccacaccgtcgatccggaccgccacatcgagcgggtcaccgagctgcaagaactcttcctcacgcgcgtcgggctcgacatcggcaaggtgtgggtcgcggacgacggcgccgcggtggcggtctggaccacgccggagagcgtcgaagcgggggcggtgttcgccgagatcggcccgcgcatggccgagttgagcggttcccggctggccgcgcagcaacagatggaaggcctcctggcgccgcaccggcccaaggagcccgcgtggttcctggccaccgtcggcgtctcgcccgaccaccagggcaagggtctgggcagcgccgtcgtgctccccggagtggaggcggccgagcgcgccggggtgcccgccttcctggagacctccgcgccccgcaacctccccttctacgagcggctcggcttcaccgtcaccgccgacgtcgaggtgcccgaaggaccgcgcacctggtgcatgacccgcaagcccggtgcctga

SEQ ID NO: 3966 - DNA, 2433 bp, Artificial Sequence
  Synthetic Polynucloetide
atgaccatccggctgctgtgctatatgggcttctacttcctcggagccggcctgatggcatgccaggtccagctcgtcgagtccggcggcggcctcgtccaggccggcgactccgtcaccctctcctgcaccgcctccggccgcaccttctcctcctacgccctcgcctggttccgccagcgccccggcaaggagcgcgagttcgtcgccggcctccgctggggcggccccaccaactacgccgactccgtcaaggaccgcttcaccatctccggcgactccgccaagcacaccatgtacctccagatgaactccctcaagcccgaggacaccgccgtctactactgcggctacaaccccggcggctgggccgtcccctcccagtacgagtacgactcctggggccagggcacccaggtcaccgtctcctccggtaccggcggaggcggatctggcggcggaggtagcggtggcggaggatctgaattcggcgtgacccagacacctaagttccaggtgctgaaaaccggccagagcatgaccctgcaatgcgcccaggacatgaaccatgagtacatgagctggtacaggcaggaccctggcatgggcctgagactgatccactattctgtcggagccggcatcaccgaccagggcgaagttcctaatggctacaacgtgtccagaagcaccaccgaggacttcccactgagactgctgtctgccgctcctagccagaccagcgtgtacttttgcgccagcagctttcagaccggcgcttcctacggctacacattcggctctggcaccagactgaccgtgggcggaggcggaagtggaggcggaggatctggcggcggaggctctatcctgaacgtggaacagagccctcagagcctgcatgtgcaagagggcgacagcaccaacttcacctgtagcttccccagcagcaacttctacgccctgcactggtacagatgggagacagccaagtctcccgaggcactgttcgtgatgaccctgaacggcgacgagaagaagaagggcagaatcagcgccacactgaacaccaaagagggctactcctacctgtacatcaagggcagccagcctgaggacagcgccacttatctgtgcgccagaaacaccggcaaccagttctactttggcaccggcacaagcctgacagtgatccccaacctcgaggacctgaagaacgtgttcccacctgaggtggccgtgttcgagcctagcaaggccgagatcgcccacacccagaaagccaccctcgtgtgcctggctaccggcttctaccccgaccatgtggaactgtcttggtgggtcaacggcaaagaggtgcacagcggcgtgtctaccgacccccagccactgaaagaacagcccgccctgaacgacagccggtactgcctgagcagcagactgagagtgtccgccaccttctggcagaacccccggaaccacttcagatgccaggtgcagttctacggcctgagcgagaacgacgagtggacccaggacagagccaagcccgtgacccagatcgtgtctgccgaagcctggggcagagccgattgcggcatcaccagcgccagctaccaccagggcgtgctgagcgccaccatcctgtacgagatcctgctgggcaaggccaccctgtacgccgtgctggtgtctgccctggtgctgatggctatggtcaagcggaaggacagccggggaagggccaagcgatctggatctggagcaacaaacttctcactactcaaacaagcaggtgacgtggaggagaatcccgggcctactagaggccatatgaccgagtacaagcccacggtgcgcctcgccacccgcgacgacgtccccagggccgtacgcaccctcgccgccgcgttcgccgactaccccgccacgcgccacaccgtcgatccggaccgccacatcgagcgggtcaccgagctgcaagaactcttcctcacgcgcgtcgggctcgacatcggcaaggtgtgggtcgcggacgacggcgccgcggtggcggtctggaccacgccggagagcgtcgaagcgggggcggtgttcgccgagatcggcccgcgcatggccgagttgagcggttcccggctggccgcgcagcaacagatggaaggcctcctggcgccgcaccggcccaaggagcccgcgtggttcctggccaccgtcggcgtctcgcccgaccaccagggcaagggtctgggcagcgccgtcgtgctccccggagtggaggcggccgagcgcgccggggtgcccgccttcctggagacctccgcgccccgcaacctccccttctacgagcggctcggcttcaccgtcaccgccgacgtcgaggtgcccgaaggaccgcgcacctggtgcatgacccgcaagcccggtgcctga

SEQ ID NO: 3967 - DNA, 3381 bp, Artificial Sequence
  Synthetic Polynucloetide
atgaccatccggctgctgtgctatatgggcttctacttcctcggagccggcctgatggcatgccaggtccagctcgtcgagtccggcggcggcctcgtccaggccggcgactccgtcaccctctcctgcaccgcctccggccgcaccttctcctcctacgccctcgcctggttccgccagcgccccggcaaggagcgcgagttcgtcgccggcctccgctggggcggccccaccaactacgccgactccgtcaaggaccgcttcaccatctccggcgactccgccaagcacaccatgtacctccagatgaactccctcaagcccgaggacaccgccgtctactactgcggctacaaccccggcggctgggccgtcccctcccagtacgagtacgactcctggggccagggcacccaggtcaccgtctcctccggtaccggcggaggcggatctggcggcggaggtagcggtggcggaggatctgaattcggcgtgacccagacacctaagttccaggtgctgaaaaccggccagagcatgaccctgcaatgcgcccaggacatgaaccatgagtacatgagctggtacaggcaggaccctggcatgggcctgagactgatccactattctgtcggagccggcatcaccgaccagggcgaagttcctaatggctacaacgtgtccagaagcaccaccgaggacttcccactgagactgctgtctgccgctcctagccagaccagcgtgtacttttgcgccagcagctttcagaccggcgcttcctacggctacacattcggctctggcaccagactgaccgtgctcgagatccagaaccctgatcctgccgtgtaccagctgcgggatagcaagagcagcgacaagagcgtgtgtctgttcaccgacttcgacagccagaccaacgtgtcccagagcaaggactccgacgtgtacatcaccgataagtgcgtgctggacatgcggagcatggacttcaagagcaactccgccgtggcctggtccaacaagtccgatttcgcctgcgccaacgccttcaacaacagcattatccccgaggacacattcttcccaagcagcgacgtgccctgcgacgtgaagctggtggaaaagagcttcgagacagacaccaacctgaacttccagaacctgagcgtgatcggcttcagaatcctgctgctgaaagtggccggctttaacctgctgatgaccctgcggctgtggtccagccgcgccaagagaagcggatctggcgtgaagcagaccctgaatttcgacctgctgaagctggctggcgacgtggaatccaacccaggccctactagtatggactggatttggcgcatccttttccttgtcggcgctgctaccggcgcccattccgggccccaggttcagctgcaagagtctggcggaggacttgctcaagctggcggaagcctgagactgtcttgtgccgcctctggcagaaccttcagcatgggctggtttagacaggcccctggcaaagagagagagttcgtcgccgccatcacatacagcggcggcagcccttactacgcctcttctgtcagaggccggttcaccatcagccgggacaacgccaagaacaccgtgtacctccagatgaacagcctgaagccagaggacaccgccgtgtactactgtgccgccaatccaacctacggcagcgactggaatgccgagaattggggccagggcacccaagtgacagtgtctagtggatccggcggcggaggatctggcggaggcggatctgggggcggaggctctttcgaaatcctgaacgtggaacagagccctcagagcctgcatgtgcaagagggcgacagcaccaacttcacctgtagcttccccagcagcaacttctacgccctgcactggtacagatgggagacagccaagtctcccgaggcactgttcgtgatgaccctgaacggcgacgagaagaagaagggcagaatcagcgccacactgaacaccaaagagggctactcctacctgtacatcaagggcagccagcctgaggacagcgccacttatctgtgcgccagaaacaccggcaaccagttctactttggcaccggcacaagcctgacagtgatccccaacgaggacctgaagaacgtgttcccacctgaggtggccgtgttcgagcctagcaaggccgagatcgcccacacccagaaagccaccctcgtgtgcctggctaccggcttctaccccgaccatgtggaactgtcttggtgggtcaacggcaaagaggtgcacagcggcgtgtgtaccgacccccagccactgaaagaacagcccgccctgaacgacagccggtactgcctgagcagcagactgagagtgtccgccaccttctggcagaacccccggaaccacttcagatgccaggtgcagttctacggcctgagcgagaacgacgagtggacccaggacagagccaagcccgtgacccagatcgtgtctgccgaagcctggggcagagccgattgcggcatcaccagcgccagctaccaccagggcgtgctgagcgccaccatcctgtacgagatcctgctgggcaaggccaccctgtacgccgtgctggtgtctgccctggtgctgatggctatggtcaagcggaaggacagccggggaagggccaagcgatctggatctggagcaacaaacttctcactactcaaacaagcaggtgacgtggaggagaatcccgggccttctagaggccatatgaccgagtacaagcccacggtgcgcctcgccacccgcgacgacgtccccagggccgtacgcaccctcgccgccgcgttcgccgactaccccgccacgcgccacaccgtcgatccggaccgccacatcgagcgggtcaccgagctgcaagaactcttcctcacgcgcgtcgggctcgacatcggcaaggtgtgggtcgcggacgacggcgccgcggtggcggtctggaccacgccggagagcgtcgaagcgggggcggtgttcgccgagatcggcccgcgcatggccgagttgagcggttcccggctggccgcgcagcaacagatggaaggcctcctggcgccgcaccggcccaaggagcccgcgtggttcctggccaccgtcggcgtctcgcccgaccaccagggcaagggtctgggcagcgccgtcgtgctccccggagtggaggcggccgagcgcgccggggtgcccgccttcctggagacctccgcgccccgcaacctccccttctacgagcggctcggcttcaccgtcaccgccgacgtcgaggtgcccgaaggaccgcgcacctggtgcatgacccgcaagcccggtgcctga

SEQ ID NO: 3968 - DNA, 3378 bp, Artificial Sequence
  Synthetic Polynucloetide
atgaccatccggctgctgtgctatatgggcttctacttcctcggagccggcctgatggcatgccaggtccagctcgtcgagtccggcggcggcctcgtccaggccggcgactccgtcaccctctcctgcaccgcctccggccgcaccttctcctcctacgccctcgcctggttccgccagcgccccggcaaggagcgcgagttcgtcgccggcctccgctggggcggccccaccaactacgccgactccgtcaaggaccgcttcaccatctccggcgactccgccaagcacaccatgtacctccagatgaactccctcaagcccgaggacaccgccgtctactactgcggctacaaccccggcggctgggccgtcccctcccagtacgagtacgactcctggggccagggcacccaggtcaccgtctcctccggtaccggcggaggcggatctggcggcggaggtagcggtggcggaggatctgaattcggcgtgacccagacacctaagttccaggtgctgaaaaccggccagagcatgaccctgcaatgcgcccaggacatgaaccatgagtacatgagctggtacaggcaggaccctggcatgggcctgagactgatccactattctgtcggagccggcatcaccgaccagggcgaagttcctaatggctacaacgtgtccagaagcaccaccgaggacttcccactgagactgctgtctgccgctcctagccagaccagcgtgtacttttgcgccagcagctttcagaccggcgcttcctacggctacacattcggctctggcaccagactgaccgtgctcgaggacctgaagaacgtgttcccacctgaggtggccgtgttcgagcctagcaaggccgagatcgcccacacccagaaagccaccctcgtgtgcctggctaccggcttctaccccgaccatgtggaactgtcttggtgggtcaacggcaaagaggtgcacagcggcgtgtgtaccgacccccagccactgaaagaacagcccgccctgaacgacagccggtactgcctgagcagcagactgagagtgtccgccaccttctggcagaacccccggaaccacttcagatgccaggtgcagttctacggcctgagcgagaacgacgagtggacccaggacagagccaagcccgtgacccagatcgtgtctgccgaagcctggggcagagccgattgcggcatcaccagcgccagctaccaccagggcgtgctgagcgccaccatcctgtacgagatcctgctgggcaaggccaccctgtacgccgtgctggtgtctgccctggtgctgatggctatggtcaagcggaaggacagccggggaagggccaagcgatctggatctggagcaacaaacttctcactactcaaacaagcaggtgacgtggaggagaatcccgggcctactagtatggactggatttggcgcatccttttccttgtcggcgctgctaccggcgcccattccgggccccaggttcagctgcaagagtctggcggaggacttgctcaagctggcggaagcctgagactgtcttgtgccgcctctggcagaaccttcagcatgggctggtttagacaggcccctggcaaagagagagagttcgtcgccgccatcacatacagcggcggcagcccttactacgcctcttctgtcagaggccggttcaccatcagccgggacaacgccaagaacaccgtgtacctccagatgaacagcctgaagccagaggacaccgccgtgtactactgtgccgccaatccaacctacggcagcgactggaatgccgagaattggggccagggcacccaagtgacagtgtctagtggatccggcggcggaggatctggcggaggcggatctgggggcggaggctctttcgaaatcctgaacgtggaacagagccctcagagcctgcatgtgcaagagggcgacagcaccaacttcacctgtagcttccccagcagcaacttctacgccctgcactggtacagatgggagacagccaagtctcccgaggcactgttcgtgatgaccctgaacggcgacgagaagaagaagggcagaatcagcgccacactgaacaccaaagagggctactcctacctgtacatcaagggcagccagcctgaggacagcgccacttatctgtgcgccagaaacaccggcaaccagttctactttggcaccggcacaagcctgacagtgatccccaacatccagaaccctgatcctgccgtgtaccagctgcgggatagcaagagcagcgacaagagcgtgtgtctgttcaccgacttcgacagccagaccaacgtgtcccagagcaaggactccgacgtgtacatcaccgataagtgcgtgctggacatgcggagcatggacttcaagagcaactccgccgtggcctggtccaacaagtccgatttcgcctgcgccaacgccttcaacaacagcattatccccgaggacacattcttcccaagcagcgacgtgccctgcgacgtgaagctggtggaaaagagcttcgagacagacaccaacctgaacttccagaacctgagcgtgatcggcttcagaatcctgctgctgaaagtggccggctttaacctgctgatgaccctgcggctgtggtccagccgcgccaagagaagcggatctggcgtgaagcagaccctgaatttcgacctgctgaagctggctggcgacgtggaatccaacccaggcccttctagaggccatatgaccgagtacaagcccacggtgcgcctcgccacccgcgacgacgtccccagggccgtacgcaccctcgccgccgcgttcgccgactaccccgccacgcgccacaccgtcgatccggaccgccacatcgagcgggtcaccgagctgcaagaactcttcctcacgcgcgtcgggctcgacatcggcaaggtgtgggtcgcggacgacggcgccgcggtggcggtctggaccacgccggagagcgtcgaagcgggggcggtgttcgccgagatcggcccgcgcatggccgagttgagcggttcccggctggccgcgcagcaacagatggaaggcctcctggcgccgcaccggcccaaggagcccgcgtggttcctggccaccgtcggcgtctcgcccgaccaccagggcaagggtctgggcagcgccgtcgtgctccccggagtggaggcggccgagcgcgccggggtgcccgccttcctggagacctccgcgccccgcaacctccccttctacgagcggctcggcttcaccgtcaccgccgacgtcgaggtgcccgaaggaccgcgcacctggtgcatgacccgcaagcccggtgcctga

SEQ ID NO: 3969 - DNA, 3378 bp, Artificial Sequence
  Synthetic Polynucloetide
atgaccatccggctgctgtgctatatgggcttctacttcctcggagccggcctgatggcatgccaggtccagctcgtcgagtccggcggcggcctcgtccaggccggcgactccgtcaccctctcctgcaccgcctccggccgcaccttctcctcctacgccctcgcctggttccgccagcgccccggcaaggagcgcgagttcgtcgccggcctccgctggggcggccccaccaactacgccgactccgtcaaggaccgcttcaccatctccggcgactccgccaagcacaccatgtacctccagatgaactccctcaagcccgaggacaccgccgtctactactgcggctacaaccccggcggctgggccgtcccctcccagtacgagtacgactcctggggccagggcacccaggtcaccgtctcctccggtaccggcggaggcggatctggcggcggaggtagcggtggcggaggatctgaattcggcgtgacccagacacctaagttccaggtgctgaaaaccggccagagcatgaccctgcaatgcgcccaggacatgaaccatgagtacatgagctggtacaggcaggaccctggcatgggcctgagactgatccactattctgtcggagccggcatcaccgaccagggcgaagttcctaatggctacaacgtgtccagaagcaccaccgaggacttcccactgagactgctgtctgccgctcctagccagaccagcgtgtacttttgcgccagcagctttcagaccggcgcttcctacggctacacattcggctctggcaccagactgaccgtgctcgaggacctgaagaacgtgttcccacctgaggtggccgtgttcgagcctagcgaggccgagatcagccacacccagaaagccaccctcgtgtgcctggctaccggcttctaccccgaccatgtggaactgtcttggtgggtcaacggcaaagaggtgcacagcggcgtgtgtaccgacccccagccactgaaagaacagcccgccctgaacgacagccggtactgcctgagcagcagactgagagtgtccgccaccttctggcagaacccccggaaccacttcagatgccaggtgcagttctacggcctgagcgagaacgacgagtggacccaggacagagccaagcccgtgacccagatcgtgtctgccgaagcctggggcagagccgattgcggctttaccagcgagagctaccagcagggcgtgctgagcgccaccatcctgtacgagatcctgctgggcaaggccaccctgtacgccgtgctggtgtctgccctggtgctgatggctatggtcaagcggaaggacagccggggaagggccaagcgatctggatctggagcaacaaacttctcactactcaaacaagcaggtgacgtggaggagaatcccgggcctactagtatggactggatttggcgcatccttttccttgtcggcgctgctaccggcgcccattccgggccccaggttcagctgcaagagtctggcggaggacttgctcaagctggcggaagcctgagactgtcttgtgccgcctctggcagaaccttcagcatgggctggtttagacaggcccctggcaaagagagagagttcgtcgccgccatcacatacagcggcggcagcccttactacgcctcttctgtcagaggccggttcaccatcagccgggacaacgccaagaacaccgtgtacctccagatgaacagcctgaagccagaggacaccgccgtgtactactgtgccgccaatccaacctacggcagcgactggaatgccgagaattggggccagggcacccaagtgacagtgtctagtggatccggcggcggaggatctggcggaggcggatctgggggcggaggctctttcgaaatcctgaacgtggaacagagccctcagagcctgcatgtgcaagagggcgacagcaccaacttcacctgtagcttccccagcagcaacttctacgccctgcactggtacagatgggagacagccaagtctcccgaggcactgttcgtgatgaccctgaacggcgacgagaagaagaagggcagaatcagcgccacactgaacaccaaagagggctactcctacctgtacatcaagggcagccagcctgaggacagcgccacttatctgtgcgccagaaacaccggcaaccagttctactttggcaccggcacaagcctgacagtgatccccaacatccagaaccctgatcctgccgtgtaccagctgcgggatagcaagagcagcgacaagagcgtgtgtctgttcaccgacttcgacagccagaccaacgtgtcccagagcaaggactccgacgtgtacatcaccgataagtgcgtgctggacatgcggagcatggacttcaagagcaactccgccgtggcctggtccaacaagtccgatttcgcctgcgccaacgccttcaacaacagcattatccccgaggacacattcttcccaagccccgagagcagctgcgacgtgaagctggtggaaaagagcttcgagacagacaccaacctgaacttccagaacctgagcgtgatcggcttcagaatcctgctgctgaaagtggccggctttaacctgctgatgaccctgcggctgtggtccagccgcgccaagagaagcggatctggcgtgaagcagaccctgaatttcgacctgctgaagctggctggcgacgtggaatccaacccaggcccttctagaggccatatgaccgagtacaagcccacggtgcgcctcgccacccgcgacgacgtccccagggccgtacgcaccctcgccgccgcgttcgccgactaccccgccacgcgccacaccgtcgatccggaccgccacatcgagcgggtcaccgagctgcaagaactcttcctcacgcgcgtcgggctcgacatcggcaaggtgtgggtcgcggacgacggcgccgcggtggcggtctggaccacgccggagagcgtcgaagcgggggcggtgttcgccgagatcggcccgcgcatggccgagttgagcggttcccggctggccgcgcagcaacagatggaaggcctcctggcgccgcaccggcccaaggagcccgcgtggttcctggccaccgtcggcgtctcgcccgaccaccagggcaagggtctgggcagcgccgtcgtgctccccggagtggaggcggccgagcgcgccggggtgcccgccttcctggagacctccgcgccccgcaacctccccttctacgagcggctcggcttcaccgtcaccgccgacgtcgaggtgcccgaaggaccgcgcacctggtgcatgacccgcaagcccggtgcctga

SEQ ID NO: 3970 - DNA, 2676 bp, Artificial Sequence
  Synthetic Polynucloetide
atgaccatccggctgctgtgctatatgggcttctacttcctcggagccggcctgatggcatgccaggtccagctcgtcgagtccggcggcggcctcgtccaggccggcgactccgtcaccctctcctgcaccgcctccggccgcaccttctcctcctacgccctcgcctggttccgccagcgccccggcaaggagcgcgagttcgtcgccggcctccgctggggcggccccaccaactacgccgactccgtcaaggaccgcttcaccatctccggcgactccgccaagcacaccatgtacctccagatgaactccctcaagcccgaggacaccgccgtctactactgcggctacaaccccggcggctgggccgtcccctcccagtacgagtacgactcctggggccagggcacccaggtcaccgtctcctccggtaccggcggaggcggatctggcggcggaggtagcggtggcggaggatctgaattcggcgtgacccagacacctaagttccaggtgctgaaaaccggccagagcatgaccctgcaatgcgcccaggacatgaaccatgagtacatgagctggtacaggcaggaccctggcatgggcctgagactgatccactattctgtcggagccggcatcaccgaccagggcgaagttcctaatggctacaacgtgtccagaagcaccaccgaggacttcccactgagactgctgtctgccgctcctagccagaccagcgtgtacttttgcgccagcagctttcagaccggcgcttcctacggctacacattcggctctggcaccagactgaccgtgctcgaggacctgaagaacgtgttcccacctgaggtggccgtgttcgagcctagcgaggccgagatcagccacacccagaaagccaccctcgtgtgcctggctaccggcttctaccccgaccatgtggaactgtcttggtgggtcaacggcaaagaggtgcacagcggcgtgtgtaccgacccccagccactgaaagaacagcccgccctgaacgacagccggtactgcctgagcagcagactgagagtgtccgccaccttctggcagaacccccggaaccacttcagatgccaggtgcagttctacggcctgagcgagaacgacgagtggacccaggacagagccaagcccgtgacccagatcgtgtctgccgaagcctggggcagagccgattgcggctttaccagcgagagctaccagcagggcgtgctgagcgccaccatcctgtacgagatcctgctgggcaaggccaccctgtacgccgtgctggtgtctgccctggtgctgatggctatggtcaagcggaaggacagccggggaagggccaagcgatctggatctggagcaacaaacttctcactactcaaacaagcaggtgacgtggaggagaatcccgggcctactagtatggactggatttggcgcatccttttccttgtcggcgctgctaccggcgcccattccgggccccaggttcagctgcaagagtctggcggaggacttgctcaagctggcggaagcctgagactgtcttgtgccgcctctggcagaaccttcagcatgggctggtttagacaggcccctggcaaagagagagagttcgtcgccgccatcacatacagcggcggcagcccttactacgcctcttctgtcagaggccggttcaccatcagccgggacaacgccaagaacaccgtgtacctccagatgaacagcctgaagccagaggacaccgccgtgtactactgtgccgccaatccaacctacggcagcgactggaatgccgagaattggggccagggcacccaagtgacagtgtctagtggatccggcggcggaggatctggcggaggcggatctgggggcggaggctctttcgaaatcctgaacgtggaacagagccctcagagcctgcatgtgcaagagggcgacagcaccaacttcacctgtagcttccccagcagcaacttctacgccctgcactggtacagatgggagacagccaagtctcccgaggcactgttcgtgatgaccctgaacggcgacgagaagaagaagggcagaatcagcgccacactgaacaccaaagagggctactcctacctgtacatcaagggcagccagcctgaggacagcgccacttatctgtgcgccagaaacaccggcaaccagttctactttggcaccggcacaagcctgacagtgatccccaacatccagaaccctgatcctgccgtgtaccagctgcgggatagcaagagcagcgacaagagcgtgtgtctgttcaccgacttcgacagccagaccaacgtgtcccagagcaaggactccgacgtgtacatcaccgataagtgcgtgctggacatgcggagcatggacttcaagagcaactccgccgtggcctggtccaacaagtccgatttcgcctgcgccaacgccttcaacaacagcattatccccgaggacacattcttcccaagccccgagagcagctgcgacgtgaagctggtggaaaagagcttcgagacagacaccaacctgaacttccagaacctgagcgtgatcggcttcagaatcctgctgctgaaagtggccggctttaacctgctgatgaccctgcggctgtggtccagc

SEQ ID NO: 3971 - DNA, 3351 bp, Artificial Sequence
  Synthetic Polynucloetide
atgaccatccggctgctgtgctatatgggcttctacttcctcggagccggcctgatggcatgccaggtccagctcgtcgagtccggcggcggcctcgtccaggccggcgactccgtcaccctctcctgcaccgcctccggccgcaccttctcctcctacgccctcgcctggttccgccagcgccccggcaaggagcgcgagttcgtcgccggcctccgctggggcggccccaccaactacgccgactccgtcaaggaccgcttcaccatctccggcgactccgccaagcacaccatgtacctccagatgaactccctcaagcccgaggacaccgccgtctactactgcggctacaaccccggcggctgggccgtcccctcccagtacgagtacgactcctggggccagggcacccaggtcaccgtctcctccggtaccggcggaggcggatctggcggcggaggtagcggtggcggaggatctgaattcggcgtgacccagacacctaagttccaggtgctgaaaaccggccagagcatgaccctgcaatgcgcccaggacatgaaccatgagtacatgagctggtacaggcaggaccctggcatgggcctgagactgatccactattctgtcggagccggcatcaccgaccagggcgaagttcctaatggctacaacgtgtccagaagcaccaccgaggacttcccactgagactgctgtctgccgctcctagccagaccagcgtgtacttttgcgccagcagctttcagaccggcgcttcctacggctacacattcggctctggcaccagactgaccgtgctcgaggacctgaagaacgtgttcccacctgaggtggccgtgttcgagcctagcgaggccgagatcagccacacccagaaagccaccctcgtgtgcctggctaccggcttctaccccgaccatgtggaactgtcttggtgggtcaacggcaaagaggtgcacagcggcgtgtgtaccgacccccagccactgaaagaacagcccgccctgaacgacagccggtactgcctgagcagcagactgagagtgtccgccaccttctggcagaacccccggaaccacttcagatgccaggtgcagttctacggcctgagcgagaacgacgagtggacccaggacagagccaagcccgtgacccagatcgtgtctgccgaagcctggggcagagccgattgcggctttaccagcgagagctaccagcagggcgtgctgagcgccaccatcctgtacgagatcctgctgggcaaggccaccctgtacgccgtgctggtgtctgccctggtgctgatggctatggtcaagcggaaggacagccggggaagggccaagcgatctggatctggagcaacaaacttctcactactcaaacaagcaggtgacgtggaggagaatcccgggcctactagtatggactggatttggcgcatccttttccttgtcggcgctgctaccggcgcccattccgggccccaggttcagctgcaagagtctggcggaggacttgctcaagctggcggaagcctgagactgtcttgtgccgcctctggcagaaccttcagcatgggctggtttagacaggcccctggcaaagagagagagttcgtcgccgccatcacatacagcggcggcagcccttactacgcctcttctgtcagaggccggttcaccatcagccgggacaacgccaagaacaccgtgtacctccagatgaacagcctgaagccagaggacaccgccgtgtactactgtgccgccaatccaacctacggcagcgactggaatgccgagaattggggccagggcacccaagtgacagtgtctagtggatccggcggcggaggatctggcggaggcggatctgggggcggaggctctttcgaaatcctgaacgtggaacagagccctcagagcctgcatgtgcaagagggcgacagcaccaacttcacctgtagcttccccagcagcaacttctacgccctgcactggtacagatgggagacagccaagtctcccgaggcactgttcgtgatgaccctgaacggcgacgagaagaagaagggcagaatcagcgccacactgaacaccaaagagggctactcctacctgtacatcaagggcagccagcctgaggacagcgccacttatctgtgcgccagaaacaccggcaaccagttctactttggcaccggcacaagcctgacagtgatccccaacatccagaaccctgatcctgccgtgtaccagctgcgggatagcaagagcagcgacaagagcgtgtgtctgttcaccgacttcgacagccagaccaacgtgtcccagagcaaggactccgacgtgtacatcaccgataagtgcgtgctggacatgcggagcatggacttcaagagcaactccgccgtggcctggtccaacaagtccgatttcgcctgcgccaacgccttcaacaacagcattatccccgaggacacattcttcccaagccccgagagcagctgcgacgtgaagctggtggaaaagagcttcgagacagacaccaacctgaacttccagaacctgagcgtgatcggcttcagaatcctgctgctgaaagtggccggctttaacctgctgatgaccctgcggctgtggtccagccgcgccaagagaagcggatctggcgtgaagcagaccctgaatttcgacctgctgaagctggctggcgacgtggaatccaacccaggcccttctagaggcgggatccacaccatggctacctacgaggtgctgtgcgaggtggcaagaaagctgggcaccgacgacagagaagtggtgctgttcctgctgaacgtgttcatccctcagcctacactggcccagctgatcggtgcactgagagccctgaaagaggaaggccggctgacctttcctctgctggccgaatgcctgttcagagccggaagaagggatctgctgcgggacctgctgcatctggaccccagatttctggaaagacacctggccggcaccatgagctacttcagcccttaccagctgaccgtgctgcacgttgacggcgaactgtgcgccagagatattcggagcctgatcttcctgagcaaggacaccatcggcagccggtctacccctcagacatttctgcactgggtgtactgcatggaaaacctggacctgctcggccccacagatgtggatgccctgatgtccatgctgagaagcctgagcagagtggacctccagagacaggtgcagacactgatgggactgcacctgagcggacctagccacagccagcactacagacacacccct

SEQ ID NO: 3972 - DNA, 2688 bp, Artificial Sequence
  Synthetic Polynucloetide
atgaccatccggctgctgtgctatatgggcttctacttcctcggagccggcctgatggcatgccaggtccagctcgtcgagtccggcggcggcctcgtccaggccggcgactccgtcaccctctcctgcaccgcctccggccgcaccttctcctcctacgccctcgcctggttccgccagcgccccggcaaggagcgcgagttcgtcgccggcctccgctggggcggccccaccaactacgccgactccgtcaaggaccgcttcaccatctccggcgactccgccaagcacaccatgtacctccagatgaactccctcaagcccgaggacaccgccgtctactactgcggctacaaccccggcggctgggccgtcccctcccagtacgagtacgactcctggggccagggcacccaggtcaccgtctcctccggtaccggcggaggcggatctggcggcggaggtagcggtggcggaggatctgaattcggcgtgacccagacacctaagttccaggtgctgaaaaccggccagagcatgaccctgcaatgcgcccaggacatgaaccatgagtacatgagctggtacaggcaggaccctggcatgggcctgagactgatccactattctgtcggagccggcatcaccgaccagggcgaagttcctaatggctacaacgtgtccagaagcaccaccgaggacttcccactgagactgctgtctgccgctcctagccagaccagcgtgtacttttgcgccagcagctttcagaccggcgcttcctacggctacacattcggctctggcaccagactgaccgtgctcgagatccagaaccctgatcctgccgtgtaccagctgcgggatagcaagagcagcgacaagagcgtgtgtctgttcaccgacttcgacagccagaccaacgtgtcccagagcaaggactccgacgtgtacatcaccgataagtgcgtgctggacatgcggagcatggacttcaagagcaactccgccgtggcctggtccaacaagtccgatttcgcctgcgccaacgccttcaacaacagcattatccccgaggacacattcttcccaagccccgagagcagctgcgacgtgaagctggtggaaaagagcttcgagacagacaccaacctgaacttccagaacctgagcgtgatcggcttcagaatcctgctgctgaaagtggccggctttaacctgctgatgaccctgcggctgtggtccagccgcgccaagagaagcggatctggcgtgaagcagaccctgaatttcgacctgctgaagctggctggcgacgtggaatccaacccaggccctactagtatggactggatttggcgcatccttttccttgtcggcgctgctaccggcgcccattccgggccccaggttcagctgcaagagtctggcggaggacttgctcaagctggcggaagcctgagactgtcttgtgccgcctctggcagaaccttcagcatgggctggtttagacaggcccctggcaaagagagagagttcgtcgccgccatcacatacagcggcggcagcccttactacgcctcttctgtcagaggccggttcaccatcagccgggacaacgccaagaacaccgtgtacctccagatgaacagcctgaagccagaggacaccgccgtgtactactgtgccgccaatccaacctacggcagcgactggaatgccgagaattggggccagggcacccaagtgacagtgtctagtggatccggcggcggaggatctggcggaggcggatctgggggcggaggctctttcgaaatcctgaacgtggaacagagccctcagagcctgcatgtgcaagagggcgacagcaccaacttcacctgtagcttccccagcagcaacttctacgccctgcactggtacagatgggagacagccaagtctcccgaggcactgttcgtgatgaccctgaacggcgacgagaagaagaagggcagaatcagcgccacactgaacaccaaagagggctactcctacctgtacatcaagggcagccagcctgaggacagcgccacttatctgtgcgccagaaacaccggcaaccagttctactttggcaccggcacaagcctgacagtgatccccaacgaggacctgaagaacgtgttcccacctgaggtggccgtgttcgagcctagcgaggccgagatcagccacacccagaaagccaccctcgtgtgcctggctaccggcttctaccccgaccatgtggaactgtcttggtgggtcaacggcaaagaggtgcacagcggcgtgtgtaccgacccccagccactgaaagaacagcccgccctgaacgacagccggtactgcctgagcagcagactgagagtgtccgccaccttctggcagaacccccggaaccacttcagatgccaggtgcagttctacggcctgagcgagaacgacgagtggacccaggacagagccaagcccgtgacccagatcgtgtctgccgaagcctggggcagagccgattgcggctttaccagcgagagctaccagcagggcgtgctgagcgccaccatcctgtacgagatcctgctgggcaaggccaccctgtacgccgtgctggtgtctgccctggtgctgatggctatggtcaagcggaaggacagccgggga

SEQ ID NO: 3973 - DNA, 3354 bp, Artificial Sequence
  Synthetic Polynucloetide
atgaccatccggctgctgtgctatatgggcttctacttcctcggagccggcctgatggcatgccaggtccagctcgtcgagtccggcggcggcctcgtccaggccggcgactccgtcaccctctcctgcaccgcctccggccgcaccttctcctcctacgccctcgcctggttccgccagcgccccggcaaggagcgcgagttcgtcgccggcctccgctggggcggccccaccaactacgccgactccgtcaaggaccgcttcaccatctccggcgactccgccaagcacaccatgtacctccagatgaactccctcaagcccgaggacaccgccgtctactactgcggctacaaccccggcggctgggccgtcccctcccagtacgagtacgactcctggggccagggcacccaggtcaccgtctcctccggtaccggcggaggcggatctggcggcggaggtagcggtggcggaggatctgaattcggcgtgacccagacacctaagttccaggtgctgaaaaccggccagagcatgaccctgcaatgcgcccaggacatgaaccatgagtacatgagctggtacaggcaggaccctggcatgggcctgagactgatccactattctgtcggagccggcatcaccgaccagggcgaagttcctaatggctacaacgtgtccagaagcaccaccgaggacttcccactgagactgctgtctgccgctcctagccagaccagcgtgtacttttgcgccagcagctttcagaccggcgcttcctacggctacacattcggctctggcaccagactgaccgtgctcgagatccagaaccctgatcctgccgtgtaccagctgcgggatagcaagagcagcgacaagagcgtgtgtctgttcaccgacttcgacagccagaccaacgtgtcccagagcaaggactccgacgtgtacatcaccgataagtgcgtgctggacatgcggagcatggacttcaagagcaactccgccgtggcctggtccaacaagtccgatttcgcctgcgccaacgccttcaacaacagcattatccccgaggacacattcttcccaagccccgagagcagctgcgacgtgaagctggtggaaaagagcttcgagacagacaccaacctgaacttccagaacctgagcgtgatcggcttcagaatcctgctgctgaaagtggccggctttaacctgctgatgaccctgcggctgtggtccagccgcgccaagagaagcggatctggcgtgaagcagaccctgaatttcgacctgctgaagctggctggcgacgtggaatccaacccaggccctactagtatggactggatttggcgcatccttttccttgtcggcgctgctaccggcgcccattccgggccccaggttcagctgcaagagtctggcggaggacttgctcaagctggcggaagcctgagactgtcttgtgccgcctctggcagaaccttcagcatgggctggtttagacaggcccctggcaaagagagagagttcgtcgccgccatcacatacagcggcggcagcccttactacgcctcttctgtcagaggccggttcaccatcagccgggacaacgccaagaacaccgtgtacctccagatgaacagcctgaagccagaggacaccgccgtgtactactgtgccgccaatccaacctacggcagcgactggaatgccgagaattggggccagggcacccaagtgacagtgtctagtggatccggcggcggaggatctggcggaggcggatctgggggcggaggctctttcgaaatcctgaacgtggaacagagccctcagagcctgcatgtgcaagagggcgacagcaccaacttcacctgtagcttccccagcagcaacttctacgccctgcactggtacagatgggagacagccaagtctcccgaggcactgttcgtgatgaccctgaacggcgacgagaagaagaagggcagaatcagcgccacactgaacaccaaagagggctactcctacctgtacatcaagggcagccagcctgaggacagcgccacttatctgtgcgccagaaacaccggcaaccagttctactttggcaccggcacaagcctgacagtgatccccaacgaggacctgaagaacgtgttcccacctgaggtggccgtgttcgagcctagcgaggccgagatcagccacacccagaaagccaccctcgtgtgcctggctaccggcttctaccccgaccatgtggaactgtcttggtgggtcaacggcaaagaggtgcacagcggcgtgtgtaccgacccccagccactgaaagaacagcccgccctgaacgacagccggtactgcctgagcagcagactgagagtgtccgccaccttctggcagaacccccggaaccacttcagatgccaggtgcagttctacggcctgagcgagaacgacgagtggacccaggacagagccaagcccgtgacccagatcgtgtctgccgaagcctggggcagagccgattgcggctttaccagcgagagctaccagcagggcgtgctgagcgccaccatcctgtacgagatcctgctgggcaaggccaccctgtacgccgtgctggtgtctgccctggtgctgatggctatggtcaagcggaaggacagccggggaagggccaagcgatctggatctggagcaacaaacttctcactactcaaacaagcaggtgacgtggaggagaatcccgggccttctagaggcgggatccacaccatggctacctacgaggtgctgtgcgaggtggcaagaaagctgggcaccgacgacagagaagtggtgctgttcctgctgaacgtgttcatccctcagcctacactggcccagctgatcggtgcactgagagccctgaaagaggaaggccggctgacctttcctctgctggccgaatgcctgttcagagccggaagaagggatctgctgcgggacctgctgcatctggaccccagatttctggaaagacacctggccggcaccatgagctacttcagcccttaccagctgaccgtgctgcacgttgacggcgaactgtgcgccagagatattcggagcctgatcttcctgagcaaggacaccatcggcagccggtctacccctcagacatttctgcactgggtgtactgcatggaaaacctggacctgctcggccccacagatgtggatgccctgatgtccatgctgagaagcctgagcagagtggacctccagagacaggtgcagacactgatgggactgcacctgagcggacctagccacagccagcactacagacacacccct

SEQ ID NO: 3974 - DNA, 3378 bp, Artificial Sequence
  Synthetic Polynucloetide
atgaccatccggctgctgtgctatatgggcttctacttcctcggagccggcctgatggcatgccaggtccagctcgtcgagtccggcggcggcctcgtccaggccggcgactccgtcaccctctcctgcaccgcctccggccgcaccttctcctcctacgccctcgcctggttccgccagcgccccggcaaggagcgcgagttcgtcgccggcctccgctggggcggccccaccaactacgccgactccgtcaaggaccgcttcaccatctccggcgactccgccaagcacaccatgtacctccagatgaactccctcaagcccgaggacaccgccgtctactactgcggctacaaccccggcggctgggccgtcccctcccagtacgagtacgactcctggggccagggcacccaggtcaccgtctcctccggtaccggcggaggcggatctggcggcggaggtagcggtggcggaggatctgaattcggcgtgacccagacacctaagttccaggtgctgaaaaccggccagagcatgaccctgcaatgcgcccaggacatgaaccatgagtacatgagctggtacaggcaggaccctggcatgggcctgagactgatccactattctgtcggagccggcatcaccgaccagggcgaagttcctaatggctacaacgtgtccagaagcaccaccgaggacttcccactgagactgctgtctgccgctcctagccagaccagcgtgtacttttgcgccagcagctttcagaccggcgcttcctacggctacacattcggctctggcaccagactgaccgtgctcgaggacctgaagaacgtgttcccacctgaggtggccgtgttcgagcctagcgaggccgagatcagccacacccagaaagccaccctcgtgtgcctggctaccggcttctaccccgaccatgtggaactgtcttggtgggtcaacggcaaagaggtgcacagcggcgtgtctaccgacccccagccactgaaagaacagcccgccctgaacgacagccggtactgcctgagcagcagactgagagtgtccgccaccttctggcagaacccccggaaccacttcagatgccaggtgcagttctacggcctgagcgagaacgacgagtggacccaggacagagccaagcccgtgacccagatcgtgtctgccgaagcctggggcagagccgattgcggctttaccagcgagagctaccagcagggcgtgctgagcgccaccatcctgtacgagatcctgctgggcaaggccaccctgtacgccgtgctggtgtctgccctggtgctgatggctatggtcaagcggaaggacagccggggaagggccaagcgatctggatctggagcaacaaacttctcactactcaaacaagcaggtgacgtggaggagaatcccgggcctactagtatggactggatttggcgcatccttttccttgtcggcgctgctaccggcgcccattccgggccccaggttcagctgcaagagtctggcggaggacttgctcaagctggcggaagcctgagactgtcttgtgccgcctctggcagaaccttcagcatgggctggtttagacaggcccctggcaaagagagagagttcgtcgccgccatcacatacagcggcggcagcccttactacgcctcttctgtcagaggccggttcaccatcagccgggacaacgccaagaacaccgtgtacctccagatgaacagcctgaagccagaggacaccgccgtgtactactgtgccgccaatccaacctacggcagcgactggaatgccgagaattggggccagggcacccaagtgacagtgtctagtggatccggcggcggaggatctggcggaggcggatctgggggcggaggctctttcgaaatcctgaacgtggaacagagccctcagagcctgcatgtgcaagagggcgacagcaccaacttcacctgtagcttccccagcagcaacttctacgccctgcactggtacagatgggagacagccaagtctcccgaggcactgttcgtgatgaccctgaacggcgacgagaagaagaagggcagaatcagcgccacactgaacaccaaagagggctactcctacctgtacatcaagggcagccagcctgaggacagcgccacttatctgtgcgccagaaacaccggcaaccagttctactttggcaccggcacaagcctgacagtgatccccaacatccagaaccctgatcctgccgtgtaccagctgcgggatagcaagagcagcgacaagagcgtgtgtctgttcaccgacttcgacagccagaccaacgtgtcccagagcaaggactccgacgtgtacatcaccgataagaccgtgctggacatgcggagcatggacttcaagagcaactccgccgtggcctggtccaacaagtccgatttcgcctgcgccaacgccttcaacaacagcattatccccgaggacacattcttcccaagccccgagagcagctgcgacgtgaagctggtggaaaagagcttcgagacagacaccaacctgaacttccagaacctgagcgtgatcggcttcagaatcctgctgctgaaagtggccggctttaacctgctgatgaccctgcggctgtggtccagccgcgccaagagaagcggatctggcgtgaagcagaccctgaatttcgacctgctgaagctggctggcgacgtggaatccaacccaggcccttctagaggccatatgaccgagtacaagcccacggtgcgcctcgccacccgcgacgacgtccccagggccgtacgcaccctcgccgccgcgttcgccgactaccccgccacgcgccacaccgtcgatccggaccgccacatcgagcgggtcaccgagctgcaagaactcttcctcacgcgcgtcgggctcgacatcggcaaggtgtgggtcgcggacgacggcgccgcggtggcggtctggaccacgccggagagcgtcgaagcgggggcggtgttcgccgagatcggcccgcgcatggccgagttgagcggttcccggctggccgcgcagcaacagatggaaggcctcctggcgccgcaccggcccaaggagcccgcgtggttcctggccaccgtcggcgtctcgcccgaccaccagggcaagggtctgggcagcgccgtcgtgctccccggagtggaggcggccgagcgcgccggggtgcccgccttcctggagacctccgcgccccgcaacctccccttctacgagcggctcggcttcaccgtcaccgccgacgtcgaggtgcccgaaggaccgcgcacctggtgcatgacccgcaagcccggtgcctga

SEQ ID NO: 3975 - DNA, 3624 bp, Artificial Sequence
  Synthetic Polynucloetide
atgaccatccggctgctgtgctatatgggcttctacttcctcggagccggcctgatggcatgccaggtccagctcgtcgagtccggcggcggcctcgtccaggccggcgactccgtcaccctctcctgcaccgcctccggccgcaccttctcctcctacgccctcgcctggttccgccagcgccccggcaaggagcgcgagttcgtcgccggcctccgctggggcggccccaccaactacgccgactccgtcaaggaccgcttcaccatctccggcgactccgccaagcacaccatgtacctccagatgaactccctcaagcccgaggacaccgccgtctactactgcggctacaaccccggcggctgggccgtcccctcccagtacgagtacgactcctggggccagggcacccaggtcaccgtctcctccggtaccggcggaggcggatctggcggcggaggtagcggtggcggaggatctgaattcggcgtgacccagacacctaagttccaggtgctgaaaaccggccagagcatgaccctgcaatgcgcccaggacatgaaccatgagtacatgagctggtacaggcaggaccctggcatgggcctgagactgatccactattctgtcggagccggcatcaccgaccagggcgaagttcctaatggctacaacgtgtccagaagcaccaccgaggacttcccactgagactgctgtctgccgctcctagccagaccagcgtgtacttttgcgccagcagctttcagaccggcgcttcctacggctacacattcggctctggcaccagactgaccgtgctcgaggacctgaagaacgtgttcccacctgaggtggccgtgttcgagcctagcgaggccgagatcagccacacccagaaagccaccctcgtgtgcctggctaccggcttctaccccgaccatgtggaactgtcttggtgggtcaacggcaaagaggtgcacagcggcgtgtctaccgacccccagccactgaaagaacagcccgccctgaacgacagccggtactgcctgagcagcagactgagagtgtccgccaccttctggcagaacccccggaaccacttcagatgccaggtgcagttctacggcctgagcgagaacgacgagtggacccaggacagagccaagcccgtgacccagatcgtgtctgccgaagcctggggcagagccgattgcggctttaccagcgagagctaccagcagggcgtgctgagcgccaccatcctgtacgagatcctgctgggcaaggccaccctgtacgccgtgctggtgtctgccctggtgctgatggctatggtcaagcggaaggacagccggggaagggccaagcgatctggatctggagcaacaaacttctcactactcaaacaagcaggtgacgtggaggagaatcccgggcctactagtatggactggatttggcgcatccttttccttgtcggcgctgctaccggcgcccattccgggccccaggttcagctgcaagagtctggcggaggacttgctcaagctggcggaagcctgagactgtcttgtgccgcctctggcagaaccttcagcatgggctggtttagacaggcccctggcaaagagagagagttcgtcgccgccatcacatacagcggcggcagcccttactacgcctcttctgtcagaggccggttcaccatcagccgggacaacgccaagaacaccgtgtacctccagatgaacagcctgaagccagaggacaccgccgtgtactactgtgccgccaatccaacctacggcagcgactggaatgccgagaattggggccagggcacccaagtgacagtgtctagtggatccggcggcggaggatctggcggaggcggatctgggggcggaggctctttcgaaatcctgaacgtggaacagagccctcagagcctgcatgtgcaagagggcgacagcaccaacttcacctgtagcttccccagcagcaacttctacgccctgcactggtacagatgggagacagccaagtctcccgaggcactgttcgtgatgaccctgaacggcgacgagaagaagaagggcagaatcagcgccacactgaacaccaaagagggctactcctacctgtacatcaagggcagccagcctgaggacagcgccacttatctgtgcgccagaaacaccggcaaccagttctactttggcaccggcacaagcctgacagtgatccccaacgagcagaaactgatctcggaagaggatgggagcggcaccccattcccttctctggcccctcccatcatgctgctggtggacggcaagcagcagatggtggtcgtgtgcctggtgctggatgtggccccacctggactggacagccccatctggtttagcgccggcaatggctctgccctggacgcctttacctacggcccaagccctgccaccgatggcacctggacaaatctggcccacctgagcctgcccagcgaggaactggcttcttgggagcctctcgtgtgccacacaggacctggcgctgagggacacagcagatccacccagcctatgcacctgtctggcgaggccagcaccgccagaacctgtcctcaggaacctctgagaggcacccctggcggagcactgtggctgggagtgctgagactgctgctgttcaagctgctgctgtttgacctgctgctgacctgctcctgtctgtgcgatcctgccggccctctgccttctcctgccaccaccacaagactgagagccctgggcagccacagactgcaccctgccacagagacaggcggcagagaggccacaagcagccctagaccccagcccagagacagaagatggggcgataccccccctggcagaaagcctggatctccagtccgcgccaagagaagcggatctggcgtgaagcagaccctgaatttcgacctgctgaagctggctggcgacgtggaatccaacccaggcccttctagaggccatatgaccgagtacaagcccacggtgcgcctcgccacccgcgacgacgtccccagggccgtacgcaccctcgccgccgcgttcgccgactaccccgccacgcgccacaccgtcgatccggaccgccacatcgagcgggtcaccgagctgcaagaactcttcctcacgcgcgtcgggctcgacatcggcaaggtgtgggtcgcggacgacggcgccgcggtggcggtctggaccacgccggagagcgtcgaagcgggggcggtgttcgccgagatcggcccgcgcatggccgagttgagcggttcccggctggccgcgcagcaacagatggaaggcctcctggcgccgcaccggcccaaggagcccgcgtggttcctggccaccgtcggcgtctcgcccgaccaccagggcaagggtctgggcagcgccgtcgtgctccccggagtggaggcggccgagcgcgccggggtgcccgccttcctggagacctccgcgccccgcaacctccccttctacgagcggctcggcttcaccgtcaccgccgacgtcgaggtgcccgaaggaccgcgcacctggtgcatgacccgcaagcccggtgcctga

SEQ ID NO: 3976 - DNA, 3489 bp, Artificial Sequence
  Synthetic Polynucloetide
atgaccatccggctgctgtgctatatgggcttctacttcctcggagccggcctgatggcatgccaggtccagctcgtcgagtccggcggcggcctcgtccaggccggcgactccgtcaccctctcctgcaccgcctccggccgcaccttctcctcctacgccctcgcctggttccgccagcgccccggcaaggagcgcgagttcgtcgccggcctccgctggggcggccccaccaactacgccgactccgtcaaggaccgcttcaccatctccggcgactccgccaagcacaccatgtacctccagatgaactccctcaagcccgaggacaccgccgtctactactgcggctacaaccccggcggctgggccgtcccctcccagtacgagtacgactcctggggccagggcacccaggtcaccgtctcctccggtaccggcggaggcggatctggcggcggaggtagcggtggcggaggatctgaattcggcgtgacccagacacctaagttccaggtgctgaaaaccggccagagcatgaccctgcaatgcgcccaggacatgaaccatgagtacatgagctggtacaggcaggaccctggcatgggcctgagactgatccactattctgtcggagccggcatcaccgaccagggcgaagttcctaatggctacaacgtgtccagaagcaccaccgaggacttcccactgagactgctgtctgccgctcctagccagaccagcgtgtacttttgcgccagcagctttcagaccggcgcttcctacggctacacattcggctctggcaccagactgaccgtgctcgaggggaaaccaattcccaaccctcttctgggactggattcaaccggcagcggcgacaagcagctggacgccgacgtgtcccccaagcctaccatcttcctgccctctatcgccgagacaaagctccagaaggccggcacctacctgtgcctgctggaaaagttcttcccagatgtgattaagatccactggcaggaaaagaagtccaacaccatcctgggcagccaggaaggcaacaccatgaagaccaacgacacctacatgaagttcagctggctgaccgtgcccgagaagtccctggacaaagaacacagatgcatcgtgcggcacgaaaacaacaagaacggcgtggaccaggaaatcatcttcccacccatcaagaccgatgtgattacaatggaccccaaggacaactgctccaaggacgccaacgataccctgctgctccagctgaccaacaccagcgcctactacatgtacttgttgctgctgctgaagtccgtggtgtacttcgccatcatcacatgctgcctgctgcggagaaccgccttctgctgcaacggcgagaagtctagggccaagcgatctggatctggagcaacaaacttctcactactcaaacaagcaggtgacgtggaggagaatcccgggcctactagtatggactggatttggcgcatccttttccttgtcggcgctgctaccggcgcccattccgggccccaggttcagctgcaagagtctggcggaggacttgctcaagctggcggaagcctgagactgtcttgtgccgcctctggcagaaccttcagcatgggctggtttagacaggcccctggcaaagagagagagttcgtcgccgccatcacatacagcggcggcagcccttactacgcctcttctgtcagaggccggttcaccatcagccgggacaacgccaagaacaccgtgtacctccagatgaacagcctgaagccagaggacaccgccgtgtactactgtgccgccaatccaacctacggcagcgactggaatgccgagaattggggccagggcacccaagtgacagtgtctagtggatccggcggcggaggatctggcggaggcggatctgggggcggaggctctttcgaaatcctgaacgtggaacagagccctcagagcctgcatgtgcaagagggcgacagcaccaacttcacctgtagcttccccagcagcaacttctacgccctgcactggtacagatgggagacagccaagtctcccgaggcactgttcgtgatgaccctgaacggcgacgagaagaagaagggcagaatcagcgccacactgaacaccaaagagggctactcctacctgtacatcaagggcagccagcctgaggacagcgccacttatctgtgcgccagaaacaccggcaaccagttctactttggcaccggcacaagcctgacagtgatccccaacgagcagaaactgatctcggaagaggatgggagcggcagccagcctcacaccaagcccagcgtgttcgtgatgaagaacggcaccaacgtggcctgcctcgtgaaagagttctaccccaaggacatcaggatcaacctggtgtccagcaagaagatcaccgagttcgaccccgccatcgtgatctcccccagcggcaagtacaacgccgtgaagctggggaagtacgaggacagcaacagcgtgacctgctccgtgcagcacgacaacaagaccgtgcacagcaccgactttgaagtgaaaaccgactccaccgaccacgtgaagcccaaagagacagagaacaccaagcagcccagcaagagctgccacaagcccaaggccatcgtgcacaccgagaaagtgaacatgatgagcctgaccgtgctgggcctgcggatgctgttcgccaaaaccgtggccgtgaacttcctgctgaccgccaagctgttcttcctccgcgccaagagaagcggatctggcgtgaagcagaccctgaatttcgacctgctgaagctggctggcgacgtggaatccaacccaggcccttctagaggccatatgaccgagtacaagcccacggtgcgcctcgccacccgcgacgacgtccccagggccgtacgcaccctcgccgccgcgttcgccgactaccccgccacgcgccacaccgtcgatccggaccgccacatcgagcgggtcaccgagctgcaagaactcttcctcacgcgcgtcgggctcgacatcggcaaggtgtgggtcgcggacgacggcgccgcggtggcggtctggaccacgccggagagcgtcgaagcgggggcggtgttcgccgagatcggcccgcgcatggccgagttgagcggttcccggctggccgcgcagcaacagatggaaggcctcctggcgccgcaccggcccaaggagcccgcgtggttcctggccaccgtcggcgtctcgcccgaccaccagggcaagggtctgggcagcgccgtcgtgctccccggagtggaggcggccgagcgcgccggggtgcccgccttcctggagacctccgcgccccgcaacctccccttctacgagcggctcggcttcaccgtcaccgccgacgtcgaggtgcccgaaggaccgcgcacctggtgcatgacccgcaagcccggtgcctga

SEQ ID NO: 3977 - DNA, 2700 bp, Artificial Sequence
  Synthetic Polynucloetide
atgaccatccggctgctgtgctatatgggcttctacttcctcggagccggcctgatggcatgccaggtccagctcgtcgagtccggcggcggcctcgtccaggccggcgactccgtcaccctctcctgcaccgcctccggccgcaccttctcctcctacgccctcgcctggttccgccagcgccccggcaaggagcgcgagttcgtcgccggcctccgctggggcggccccaccaactacgccgactccgtcaaggaccgcttcaccatctccggcgactccgccaagcacaccatgtacctccagatgaactccctcaagcccgaggacaccgccgtctactactgcggctacaaccccggcggctgggccgtcccctcccagtacgagtacgactcctggggccagggcacccaggtcaccgtctcctccggtaccggcggaggcggatctggcggcggaggtagcggtggcggaggatctgaattcggcgtgacccagacacctaagttccaggtgctgaaaaccggccagagcatgaccctgcaatgcgcccaggacatgaaccatgagtacatgagctggtacaggcaggaccctggcatgggcctgagactgatccactattctgtcggagccggcatcaccgaccagggcgaagttcctaatggctacaacgtgtccagaagcaccaccgaggacttcccactgagactgctgtctgccgctcctagccagaccagcgtgtacttttgcgccagcagctttcagaccggcgcttcctacggctacacattcggctctggcaccagactgaccgtgctcgagagccagcctcacaccaagcccagcgtgttcgtgatgaagaacggcaccaacgtggcctgcctcgtgaaagagttctaccccaaggacatcaggatcaacctggtgtccagcaagaagatcaccgagttcgaccccgccatcgtgatctcccccagcggcaagtacaacgccgtgaagctggggaagtacgaggacagcaacagcgtgacctgctccgtgcagcacgacaacaagaccgtgcacagcaccgactttgaagtgaaaaccgactccaccgaccacgtgaagcccaaagagacagagaacaccaagcagcccagcaagagctgccacaagcccaaggccatcgtgcacaccgagaaagtgaacatgatgagcctgaccgtgctgggcctgcggatgctgttcgccaaaaccgtggccgtgaacttcctgctgaccgccaagctgttcttcctcagggccaagcgatctggatctggagcaacaaacttctcactactcaaacaagcaggtgacgtggaggagaatcccgggcctactagtatggactggatttggcgcatccttttccttgtcggcgctgctaccggcgcccattccgggccccaggttcagctgcaagagtctggcggaggacttgctcaagctggcggaagcctgagactgtcttgtgccgcctctggcagaaccttcagcatgggctggtttagacaggcccctggcaaagagagagagttcgtcgccgccatcacatacagcggcggcagcccttactacgcctcttctgtcagaggccggttcaccatcagccgggacaacgccaagaacaccgtgtacctccagatgaacagcctgaagccagaggacaccgccgtgtactactgtgccgccaatccaacctacggcagcgactggaatgccgagaattggggccagggcacccaagtgacagtgtctagtggatccggcggcggaggatctggcggaggcggatctgggggcggaggctctttcgaaatcctgaacgtggaacagagccctcagagcctgcatgtgcaagagggcgacagcaccaacttcacctgtagcttccccagcagcaacttctacgccctgcactggtacagatgggagacagccaagtctcccgaggcactgttcgtgatgaccctgaacggcgacgagaagaagaagggcagaatcagcgccacactgaacaccaaagagggctactcctacctgtacatcaagggcagccagcctgaggacagcgccacttatctgtgcgccagaaacaccggcaaccagttctactttggcaccggcacaagcctgacagtgatccccaacgacaagcagctggacgccgacgtgtcccccaagcctaccatcttcctgccctctatcgccgagacaaagctccagaaggccggcacctacctgtgcctgctggaaaagttcttcccagatgtgattaagatccactggcaggaaaagaagtccaacaccatcctgggcagccaggaaggcaacaccatgaagaccaacgacacctacatgaagttcagctggctgaccgtgcccgagaagtccctggacaaagaacacagatgcatcgtgcggcacgaaaacaacaagaacggcgtggaccaggaaatcatcttcccacccatcaagaccgatgtgattacaatggaccccaaggacaactgctccaaggacgccaacgataccctgctgctccagctgaccaacaccagcgcctactacatgtacttgttgctgctgctgaagtccgtggtgtacttcgccatcatcacatgctgcctgctgcggagaaccgccttctgctgcaacggcgagaagtct

SEQ ID NO: 3978 - DNA, 3915 bp, Artificial Sequence
  Synthetic Polynucloetide
atgaccatccggctgctgtgctatatgggcttctacttcctcggagccggcctgatggcatgccaggtccagctcgtcgagtccggcggcggcctcgtccaggccggcgactccgtcaccctctcctgcaccgcctccggccgcaccttctcctcctacgccctcgcctggttccgccagcgccccggcaaggagcgcgagttcgtcgccggcctccgctggggcggccccaccaactacgccgactccgtcaaggaccgcttcaccatctccggcgactccgccaagcacaccatgtacctccagatgaactccctcaagcccgaggacaccgccgtctactactgcggctacaaccccggcggctgggccgtcccctcccagtacgagtacgactcctggggccagggcacccaggtcaccgtctcctccggtaccggcggaggcggatctggcggcggaggtagcggtggcggaggatctgaattcggcgtgacccagacacctaagttccaggtgctgaaaaccggccagagcatgaccctgcaatgcgcccaggacatgaaccatgagtacatgagctggtacaggcaggaccctggcatgggcctgagactgatccactattctgtcggagccggcatcaccgaccagggcgaagttcctaatggctacaacgtgtccagaagcaccaccgaggacttcccactgagactgctgtctgccgctcctagccagaccagcgtgtacttttgcgccagcagctttcagaccggcgcttcctacggctacacattcggctctggcaccagactgaccgtgggacagcctaaggccaatcctaccgtgacactgttccctccaagcagcgaagaactccaggccaacaaggccacacttgtgtgcctgatctccgacttctaccctggggctgtgacagtggcttggaaggccgatggatctcctgtgaaagccggcgtggaaaccaccaagccatccaagcagagcaacaacaaatacgccgccagctcctacctgagcctgacacctgagcagtggaagtcccacagatcctacagctgccaagtgacccacgaaggcagcaccgtggaaaagacagtggcccctacagagtgcagcggatcccagagcttcggcctgctggaccccaagctgtgctacctgctggatggcatcctgttcatctacggcgtgatcctgaccgccctgttcctgagagtgaagttcagcagaagcgccgacgcccctgcctaccagcagggacagaaccaactgtacaacgagctgaacctgggcagacgggaagagtacgacgtgctggacaagcggagaggcagggaccctgagatgggcggaaagccccagcggagaaagaacccccaggaaggactgtataacgaactccagaaagacaagatggccgaagcctacagcgagatcggcatgaagggcgagcggagaagaggcaagggccacgatggcctgtaccagggcctgagcaccgccaccaaggacacctatgacgccctgcacatgcaggccctgcctccaagaagggccaagcgatctggatctggagcaacaaacttctcactactcaaacaagcaggtgacgtggaggagaatcccgggcctactagtatggactggatttggcgcatccttttccttgtcggcgctgctaccggcgcccattccgggccccaggttcagctgcaagagtctggcggaggacttgctcaagctggcggaagcctgagactgtcttgtgccgcctctggcagaaccttcagcatgggctggtttagacaggcccctggcaaagagagagagttcgtcgccgccatcacatacagcggcggcagcccttactacgcctcttctgtcagaggccggttcaccatcagccgggacaacgccaagaacaccgtgtacctccagatgaacagcctgaagccagaggacaccgccgtgtactactgtgccgccaatccaacctacggcagcgactggaatgccgagaattggggccagggcacccaagtgacagtgtctagtggatccggcggcggaggatctggcggaggcggatctgggggcggaggctctttcgaaatcctgaacgtggaacagagccctcagagcctgcatgtgcaagagggcgacagcaccaacttcacctgtagcttccccagcagcaacttctacgccctgcactggtacagatgggagacagccaagtctcccgaggcactgttcgtgatgaccctgaacggcgacgagaagaagaagggcagaatcagcgccacactgaacaccaaagagggctactcctacctgtacatcaagggcagccagcctgaggacagcgccacttatctgtgcgccagaaacaccggcaaccagttctactttggcaccggcacaagcctgacagtgatccccaacgcctctacaaagggaccctccgtgtttcctctggctcccagcagcaagtctacaagcggaggaacagccgctctgggctgcctggtcaaggattactttcccgagcctgtgaccgtgtcctggaatagcggagcactgacaagcggcgtgcacacctttccagccgtgctgcaaagcagcggcctgtactctctgagcagcgtggtcacagtgcctagctctagcctgggcacccagacctacatctgcaatgtgaaccacaagcctagcaacaccaaggtggacaagagagtggaacccaagagctgtggtacccagagttttgggttgttggaccctaaattgtgctatctgttggacggaatcctgttcatttacggagtgatcctgaccgcattgttcctgcgggttaagttttccagatccgcagacgcacccgcttaccaacaagggcagaaccaactctacaatgaacttaatttggggcggagggaagagtacgacgttctggacaaaaggaggggacgagatcccgagatgggcggaaagcctcagcgaaggaagaatccgcaagaggggctttataacgaactccagaaagataaaatggcagaagcctatagtgagattgggatgaagggagaaaggaggaggggtaaaggtcacgatgggttgtaccaaggattgagcacagccactaaagatacctatgatgcgctccacatgcaggccctgccgccaagacgcgccaagagaagcggatctggcgtgaagcagaccctgaatttcgacctgctgaagctggctggcgacgtggaatccaacccaggcccttctagaggccatatgaccgagtacaagcccacggtgcgcctcgccacccgcgacgacgtccccagggccgtacgcaccctcgccgccgcgttcgccgactaccccgccacgcgccacaccgtcgatccggaccgccacatcgagcgggtcaccgagctgcaagaactcttcctcacgcgcgtcgggctcgacatcggcaaggtgtgggtcgcggacgacggcgccgcggtggcggtctggaccacgccggagagcgtcgaagcgggggcggtgttcgccgagatcggcccgcgcatggccgagttgagcggttcccggctggccgcgcagcaacagatggaaggcctcctggcgccgcaccggcccaaggagcccgcgtggttcctggccaccgtcggcgtctcgcccgaccaccagggcaagggtctgggcagcgccgtcgtgctccccggagtggaggcggccgagcgcgccggggtgcccgccttcctggagacctccgcgccccgcaacctccccttctacgagcggctcggcttcaccgtcaccgccgacgtcgaggtgcccgaaggaccgcgcacctggtgcatgacccgcaagcccggtgcctga

SEQ ID NO: 3979 - DNA, 3264 bp, Artificial Sequence
  Synthetic Polynucloetide
atgaccatccggctgctgtgctatatgggcttctacttcctcggagccggcctgatggcatgccaggtccagctcgtcgagtccggcggcggcctcgtccaggccggcgactccgtcaccctctcctgcaccgcctccggccgcaccttctcctcctacgccctcgcctggttccgccagcgccccggcaaggagcgcgagttcgtcgccggcctccgctggggcggccccaccaactacgccgactccgtcaaggaccgcttcaccatctccggcgactccgccaagcacaccatgtacctccagatgaactccctcaagcccgaggacaccgccgtctactactgcggctacaaccccggcggctgggccgtcccctcccagtacgagtacgactcctggggccagggcacccaggtcaccgtctcctccggtaccggcggaggcggatctggcggcggaggtagcggtggcggaggatctgaattcggcgtgacccagacacctaagttccaggtgctgaaaaccggccagagcatgaccctgcaatgcgcccaggacatgaaccatgagtacatgagctggtacaggcaggaccctggcatgggcctgagactgatccactattctgtcggagccggcatcaccgaccagggcgaagttcctaatggctacaacgtgtccagaagcaccaccgaggacttcccactgagactgctgtctgccgctcctagccagaccagcgtgtacttttgcgccagcagctttcagaccggcgcttcctacggctacacattcggctctggcaccagactgaccgtgctcgaggacctgaagaacgtgttcccacctgaggtggccgtgttcgagcctagcgaggccgagatcagccacacccagaaagccaccctcgtgtgcctggctaccggcttctaccccgaccatgtggaactgtcttggtgggtcaacggcaaagaggtgcacagcggcgtgtctaccgacccccagccactgaaagaacagcccgccctgaacgacagccggtactgcctgagcagcagactgagagtgtccgccaccttctggcagaacccccggaaccacttcagatgccaggtgcagttctacggcctgagcgagaacgacgagtggacccaggacagagccaagcccgtgacccagatcgtgtctgccgaagcctggggcagagccgattgcggatcccagagcttcggcctgctggaccccaagctgtgctacctgctggatggcatcctgttcatctacggcgtgatcctgaccgccctgttcctgagagtgaagttcagcagaagcgccgacgcccctgcctaccagcagggacagaaccaactgtacaacgagctgaacctgggcagacgggaagagtacgacgtgctggacaagcggagaggcagggaccctgagatgggcggaaagccccagcggagaaagaacccccaggaaggactgtataacgaactccagaaagacaagatggccgaagcctacagcgagatcggcatgaagggcgagcggagaagaggcaagggccacgatggcctgtaccagggcctgagcaccgccaccaaggacacctatgacgccctgcacatgcaggccctgcctccaagaagggccaagcgatctggatctggagcaacaaacttctcactactcaaacaagcaggtgacgtggaggagaatcccgggcctactagtatggactggatttggcgcatccttttccttgtcggcgctgctaccggcgcccattccgggccccaggttcagctgcaagagtctggcggaggacttgctcaagctggcggaagcctgagactgtcttgtgccgcctctggcagaaccttcagcatgggctggtttagacaggcccctggcaaagagagagagttcgtcgccgccatcacatacagcggcggcagcccttactacgcctcttctgtcagaggccggttcaccatcagccgggacaacgccaagaacaccgtgtacctccagatgaacagcctgaagccagaggacaccgccgtgtactactgtgccgccaatccaacctacggcagcgactggaatgccgagaattggggccagggcacccaagtgacagtgtctagtggatccggcggcggaggatctggcggaggcggatctgggggcggaggctctttcgaaatcctgaacgtggaacagagccctcagagcctgcatgtgcaagagggcgacagcaccaacttcacctgtagcttccccagcagcaacttctacgccctgcactggtacagatgggagacagccaagtctcccgaggcactgttcgtgatgaccctgaacggcgacgagaagaagaagggcagaatcagcgccacactgaacaccaaagagggctactcctacctgtacatcaagggcagccagcctgaggacagcgccacttatctgtgcgccagaaacaccggcaaccagttctactttggcaccggcacaagcctgacagtgatccccaacatccagaaccctgatcctgccgtgtaccagctgcgggatagcaagagcagcgacaagagcgtgtgtctgttcaccgacttcgacagccagaccaacgtgtcccagagcaaggactccgacgtgtacatcaccgataagaccgtgctggacatgcggagcatggacttcaagagcaactccgccgtggcctggtccaacaagtccgatttcgcctgcgccaacgccttcaacaacagcattatccccgaggacacattcttcccaagccccgagagcagctgcggtacccagagttttgggttgttggaccctaaattgtgctatctgttggacggaatcctgttcatttacggagtgatcctgaccgcattgttcctgcgggttaagttttccagatccgcagacgcacccgcttaccaacaagggcagaaccaactctacaatgaacttaatttggggcggagggaagagtacgacgttctggacaaaaggaggggacgagatcccgagatgggcggaaagcctcagcgaaggaagaatccgcaagaggggctttataacgaactccagaaagataaaatggcagaagcctatagtgagattgggatgaagggagaaaggaggaggggtaaaggtcacgatgggttgtaccaaggattgagcacagccactaaagatacctatgatgcgctccacatgcaggccctgccgccaaga

SEQ ID NO: 3980 - DNA, 3264 bp, Artificial Sequence
  Synthetic Polynucloetide
atgaccatccggctgctgtgctatatgggcttctacttcctcggagccggcctgatggcatgccaggtccagctcgtcgagtccggcggcggcctcgtccaggccggcgactccgtcaccctctcctgcaccgcctccggccgcaccttctcctcctacgccctcgcctggttccgccagcgccccggcaaggagcgcgagttcgtcgccggcctccgctggggcggccccaccaactacgccgactccgtcaaggaccgcttcaccatctccggcgactccgccaagcacaccatgtacctccagatgaactccctcaagcccgaggacaccgccgtctactactgcggctacaaccccggcggctgggccgtcccctcccagtacgagtacgactcctggggccagggcacccaggtcaccgtctcctccggtaccggcggaggcggatctggcggcggaggtagcggtggcggaggatctgaattcggcgtgacccagacacctaagttccaggtgctgaaaaccggccagagcatgaccctgcaatgcgcccaggacatgaaccatgagtacatgagctggtacaggcaggaccctggcatgggcctgagactgatccactattctgtcggagccggcatcaccgaccagggcgaagttcctaatggctacaacgtgtccagaagcaccaccgaggacttcccactgagactgctgtctgccgctcctagccagaccagcgtgtacttttgcgccagcagctttcagaccggcgcttcctacggctacacattcggctctggcaccagactgaccgtgctcgaggacctgaagaacgtgttcccacctgaggtggccgtgttcgagcctagcaaggccgagatcgcccacacccagaaagccaccctcgtgtgcctggctaccggcttctaccccgaccatgtggaactgtcttggtgggtcaacggcaaagaggtgcacagcggcgtgtgtaccgacccccagccactgaaagaacagcccgccctgaacgacagccggtactgcctgagcagcagactgagagtgtccgccaccttctggcagaacccccggaaccacttcagatgccaggtgcagttctacggcctgagcgagaacgacgagtggacccaggacagagccaagcccgtgacccagatcgtgtctgccgaagcctggggcagagccgattgcggatcccagagcttcggcctgctggaccccaagctgtgctacctgctggatggcatcctgttcatctacggcgtgatcctgaccgccctgttcctgagagtgaagttcagcagaagcgccgacgcccctgcctaccagcagggacagaaccaactgtacaacgagctgaacctgggcagacgggaagagtacgacgtgctggacaagcggagaggcagggaccctgagatgggcggaaagccccagcggagaaagaacccccaggaaggactgtataacgaactccagaaagacaagatggccgaagcctacagcgagatcggcatgaagggcgagcggagaagaggcaagggccacgatggcctgtaccagggcctgagcaccgccaccaaggacacctatgacgccctgcacatgcaggccctgcctccaagaagggccaagcgatctggatctggagcaacaaacttctcactactcaaacaagcaggtgacgtggaggagaatcccgggcctactagtatggactggatttggcgcatccttttccttgtcggcgctgctaccggcgcccattccgggccccaggttcagctgcaagagtctggcggaggacttgctcaagctggcggaagcctgagactgtcttgtgccgcctctggcagaaccttcagcatgggctggtttagacaggcccctggcaaagagagagagttcgtcgccgccatcacatacagcggcggcagcccttactacgcctcttctgtcagaggccggttcaccatcagccgggacaacgccaagaacaccgtgtacctccagatgaacagcctgaagccagaggacaccgccgtgtactactgtgccgccaatccaacctacggcagcgactggaatgccgagaattggggccagggcacccaagtgacagtgtctagtggatccggcggcggaggatctggcggaggcggatctgggggcggaggctctttcgaaatcctgaacgtggaacagagccctcagagcctgcatgtgcaagagggcgacagcaccaacttcacctgtagcttccccagcagcaacttctacgccctgcactggtacagatgggagacagccaagtctcccgaggcactgttcgtgatgaccctgaacggcgacgagaagaagaagggcagaatcagcgccacactgaacaccaaagagggctactcctacctgtacatcaagggcagccagcctgaggacagcgccacttatctgtgcgccagaaacaccggcaaccagttctactttggcaccggcacaagcctgacagtgatccccaacatccagaaccctgatcctgccgtgtaccagctgcgggatagcaagagcagcgacaagagcgtgtgtctgttcaccgacttcgacagccagaccaacgtgtcccagagcaaggactccgacgtgtacatcaccgataagtgcgtgctggacatgcggagcatggacttcaagagcaactccgccgtggcctggtccaacaagtccgatttcgcctgcgccaacgccttcaacaacagcattatccccgaggacacattcttcccaagcagcgacgtgccctgcggtacccagagttttgggttgttggaccctaaattgtgctatctgttggacggaatcctgttcatttacggagtgatcctgaccgcattgttcctgcgggttaagttttccagatccgcagacgcacccgcttaccaacaagggcagaaccaactctacaatgaacttaatttggggcggagggaagagtacgacgttctggacaaaaggaggggacgagatcccgagatgggcggaaagcctcagcgaaggaagaatccgcaagaggggctttataacgaactccagaaagataaaatggcagaagcctatagtgagattgggatgaagggagaaaggaggaggggtaaaggtcacgatgggttgtaccaaggattgagcacagccactaaagatacctatgatgcgctccacatgcaggccctgccgccaaga

SEQ ID NO: 3981 - DNA, 3477 bp, Artificial Sequence
  Synthetic Polynucloetide
atgaccatccggctgctgtgctatatgggcttctacttcctcggagccggcctgatggcatgccaggtccagctcgtcgagtccggcggcggcctcgtccaggccggcgactccgtcaccctctcctgcaccgcctccggccgcaccttctcctcctacgccctcgcctggttccgccagcgccccggcaaggagcgcgagttcgtcgccggcctccgctggggcggccccaccaactacgccgactccgtcaaggaccgcttcaccatctccggcgactccgccaagcacaccatgtacctccagatgaactccctcaagcccgaggacaccgccgtctactactgcggctacaaccccggcggctgggccgtcccctcccagtacgagtacgactcctggggccagggcacccaggtcaccgtctcctccggtaccggcggaggcggatctggcggcggaggtagcggtggcggaggatctgaattcggcgtgacccagacacctaagttccaggtgctgaaaaccggccagagcatgaccctgcaatgcgcccaggacatgaaccatgagtacatgagctggtacaggcaggaccctggcatgggcctgagactgatccactattctgtcggagccggcatcaccgaccagggcgaagttcctaatggctacaacgtgtccagaagcaccaccgaggacttcccactgagactgctgtctgccgctcctagccagaccagcgtgtacttttgcgccagcagctttcagaccggcgcttcctacggctacacattcggctctggcaccagactgaccgtgctcgaggggaaaccaattcccaaccctcttctgggactggattcaaccggcagcggcgaggacctgaagaacgtgttcccacctgaggtggccgtgttcgagcctagcgaggccgagatcagccacacccagaaagccaccctcgtgtgcctggctaccggcttctaccccgaccatgtggaactgtcttggtgggtcaacggcaaagaggtgcacagcggcgtgtctaccgacccccagccactgaaagaacagcccgccctgaacgacagccggtactgcctgagcagcagactgagagtgtccgccaccttctggcagaacccccggaaccacttcagatgccaggtgcagttctacggcctgagcgagaacgacgagtggacccaggacagagccaagcccgtgacccagatcgtgtctgccgaagcctggggcagagccgattgcggatcccagagcttcggcctgctggaccccaagctgtgctacctgctggatggcatcctgttcatctacggcgtgatcctgaccgccctgttcctgagagtgaagttcagcagaagcgccgacgcccctgcctaccagcagggacagaaccaactgtacaacgagctgaacctgggcagacgggaagagtacgacgtgctggacaagcggagaggcagggaccctgagatgggcggaaagccccagcggagaaagaacccccaggaaggactgtataacgaactccagaaagacaagatggccgaagcctacagcgagatcggcatgaagggcgagcggagaagaggcaagggccacgatggcctgtaccagggcctgagcaccgccaccaaggacacctatgacgccctgcacatgcaggccctgcctccaagaagggccaagcgatctggatctggagcaacaaacttctcactactcaaacaagcaggtgacgtggaggagaatcccgggcctactagtatggactggatttggcgcatccttttccttgtcggcgctgctaccggcgcccattccgggccccaggttcagctgcaagagtctggcggaggacttgctcaagctggcggaagcctgagactgtcttgtgccgcctctggcagaaccttcagcatgggctggtttagacaggcccctggcaaagagagagagttcgtcgccgccatcacatacagcggcggcagcccttactacgcctcttctgtcagaggccggttcaccatcagccgggacaacgccaagaacaccgtgtacctccagatgaacagcctgaagccagaggacaccgccgtgtactactgtgccgccaatccaacctacggcagcgactggaatgccgagaattggggccagggcacccaagtgacagtgtctagtggatccggcggcggaggatctggcggaggcggatctgggggcggaggctctttcgaaatcctgaacgtggaacagagccctcagagcctgcatgtgcaagagggcgacagcaccaacttcacctgtagcttccccagcagcaacttctacgccctgcactggtacagatgggagacagccaagtctcccgaggcactgttcgtgatgaccctgaacggcgacgagaagaagaagggcagaatcagcgccacactgaacaccaaagagggctactcctacctgtacatcaagggcagccagcctgaggacagcgccacttatctgtgcgccagaaacaccggcaaccagttctactttggcaccggcacaagcctgacagtgatccccaacgagcagaaactgatctcggaagaggatgggagcggcatccagaaccctgatcctgccgtgtaccagctgcgggatagcaagagcagcgacaagagcgtgtgtctgttcaccgacttcgacagccagaccaacgtgtcccagagcaaggactccgacgtgtacatcaccgataagaccgtgctggacatgcggagcatggacttcaagagcaactccgccgtggcctggtccaacaagtccgatttcgcctgcgccaacgccttcaacaacagcattatccccgaggacacattcttcccaagccccgagagcagctgcggtacccagagttttgggttgttggaccctaaattgtgctatctgttggacggaatcctgttcatttacggagtgatcctgaccgcattgttcctgaggagcaagcggtcacggctgctccacagcgattacatgaatatgacaccacgaagaccgggtcctactcgcaaacactaccaaccctacgcacctccccgcgactttgcagcgtaccgatctcgggttaagttttccagatccgcagacgcacccgcttaccaacaagggcagaaccaactctacaatgaacttaatttggggcggagggaagagtacgacgttctggacaaaaggaggggacgagatcccgagatgggcggaaagcctcagcgaaggaagaatccgcaagaggggctttataacgaactccagaaagataaaatggcagaagcctatagtgagattgggatgaagggagaaaggaggaggggtaaaggtcacgatgggttgtaccaaggattgagcacagccactaaagatacctatgatgcgctccacatgcaggccctgccgccaaga

SEQ ID NO: 3982 - DNA, 3600 bp, Artificial Sequence
  Synthetic Polynucloetide
atgaccatccggctgctgtgctatatgggcttctacttcctcggagccggcctgatggcatgccaggtccagctcgtcgagtccggcggcggcctcgtccaggccggcgactccgtcaccctctcctgcaccgcctccggccgcaccttctcctcctacgccctcgcctggttccgccagcgccccggcaaggagcgcgagttcgtcgccggcctccgctggggcggccccaccaactacgccgactccgtcaaggaccgcttcaccatctccggcgactccgccaagcacaccatgtacctccagatgaactccctcaagcccgaggacaccgccgtctactactgcggctacaaccccggcggctgggccgtcccctcccagtacgagtacgactcctggggccagggcacccaggtcaccgtctcctccggtaccggcggaggcggatctggcggcggaggtagcggtggcggaggatctgaattcggcgtgacccagacacctaagttccaggtgctgaaaaccggccagagcatgaccctgcaatgcgcccaggacatgaaccatgagtacatgagctggtacaggcaggaccctggcatgggcctgagactgatccactattctgtcggagccggcatcaccgaccagggcgaagttcctaatggctacaacgtgtccagaagcaccaccgaggacttcccactgagactgctgtctgccgctcctagccagaccagcgtgtacttttgcgccagcagctttcagaccggcgcttcctacggctacacattcggctctggcaccagactgaccgtgctcgaggggaaaccaattcccaaccctcttctgggactggattcaaccggcagcggcgaggacctgaagaacgtgttcccacctgaggtggccgtgttcgagcctagcgaggccgagatcagccacacccagaaagccaccctcgtgtgcctggctaccggcttctaccccgaccatgtggaactgtcttggtgggtcaacggcaaagaggtgcacagcggcgtgtctaccgacccccagccactgaaagaacagcccgccctgaacgacagccggtactgcctgagcagcagactgagagtgtccgccaccttctggcagaacccccggaaccacttcagatgccaggtgcagttctacggcctgagcgagaacgacgagtggacccaggacagagccaagcccgtgacccagatcgtgtctgccgaagcctggggcagagccgattgcggatcccagagcttcggcctgctggaccccaagctgtgctacctgctggatggcatcctgttcatctacggcgtgatcctgaccgccctgttcctgaggagtaagaggagcaggctcctgcacagtgactacatgaacatgactccacgccgccccggacccacccgcaagcattaccagccctatgccccaccacgcgacttcgcagcctatcgctccagagtgaagttcagcagaagcgccgacgcccctgcctaccagcagggacagaaccaactgtacaacgagctgaacctgggcagacgggaagagtacgacgtgctggacaagcggagaggcagggaccctgagatgggcggaaagccccagcggagaaagaacccccaggaaggactgtataacgaactccagaaagacaagatggccgaagcctacagcgagatcggcatgaagggcgagcggagaagaggcaagggccacgatggcctgtaccagggcctgagcaccgccaccaaggacacctatgacgccctgcacatgcaggccctgcctccaagaagggccaagcgatctggatctggagcaacaaacttctcactactcaaacaagcaggtgacgtggaggagaatcccgggcctactagtatggactggatttggcgcatccttttccttgtcggcgctgctaccggcgcccattccgggccccaggttcagctgcaagagtctggcggaggacttgctcaagctggcggaagcctgagactgtcttgtgccgcctctggcagaaccttcagcatgggctggtttagacaggcccctggcaaagagagagagttcgtcgccgccatcacatacagcggcggcagcccttactacgcctcttctgtcagaggccggttcaccatcagccgggacaacgccaagaacaccgtgtacctccagatgaacagcctgaagccagaggacaccgccgtgtactactgtgccgccaatccaacctacggcagcgactggaatgccgagaattggggccagggcacccaagtgacagtgtctagtggatccggcggcggaggatctggcggaggcggatctgggggcggaggctctttcgaaatcctgaacgtggaacagagccctcagagcctgcatgtgcaagagggcgacagcaccaacttcacctgtagcttccccagcagcaacttctacgccctgcactggtacagatgggagacagccaagtctcccgaggcactgttcgtgatgaccctgaacggcgacgagaagaagaagggcagaatcagcgccacactgaacaccaaagagggctactcctacctgtacatcaagggcagccagcctgaggacagcgccacttatctgtgcgccagaaacaccggcaaccagttctactttggcaccggcacaagcctgacagtgatccccaacgagcagaaactgatctcggaagaggatgggagcggcatccagaaccctgatcctgccgtgtaccagctgcgggatagcaagagcagcgacaagagcgtgtgtctgttcaccgacttcgacagccagaccaacgtgtcccagagcaaggactccgacgtgtacatcaccgataagaccgtgctggacatgcggagcatggacttcaagagcaactccgccgtggcctggtccaacaagtccgatttcgcctgcgccaacgccttcaacaacagcattatccccgaggacacattcttcccaagccccgagagcagctgcggtacccagagttttgggttgttggaccctaaattgtgctatctgttggacggaatcctgttcatttacggagtgatcctgaccgcattgttcctgaggagcaagcggtcacggctgctccacagcgattacatgaatatgacaccacgaagaccgggtcctactcgcaaacactaccaaccctacgcacctccccgcgactttgcagcgtaccgatctcgggttaagttttccagatccgcagacgcacccgcttaccaacaagggcagaaccaactctacaatgaacttaatttggggcggagggaagagtacgacgttctggacaaaaggaggggacgagatcccgagatgggcggaaagcctcagcgaaggaagaatccgcaagaggggctttataacgaactccagaaagataaaatggcagaagcctatagtgagattgggatgaagggagaaaggaggaggggtaaaggtcacgatgggttgtaccaaggattgagcacagccactaaagatacctatgatgcgctccacatgcaggccctgccgccaaga

SEQ ID NO: 3983 - DNA, 3483 bp, Artificial Sequence
  Synthetic Polynucloetide
atgaccatccggctgctgtgctatatgggcttctacttcctcggagccggcctgatggcatgccaggtccagctcgtcgagtccggcggcggcctcgtccaggccggcgactccgtcaccctctcctgcaccgcctccggccgcaccttctcctcctacgccctcgcctggttccgccagcgccccggcaaggagcgcgagttcgtcgccggcctccgctggggcggccccaccaactacgccgactccgtcaaggaccgcttcaccatctccggcgactccgccaagcacaccatgtacctccagatgaactccctcaagcccgaggacaccgccgtctactactgcggctacaaccccggcggctgggccgtcccctcccagtacgagtacgactcctggggccagggcacccaggtcaccgtctcctccggtaccggcggaggcggatctggcggcggaggtagcggtggcggaggatctgaattcggcgtgacccagacacctaagttccaggtgctgaaaaccggccagagcatgaccctgcaatgcgcccaggacatgaaccatgagtacatgagctggtacaggcaggaccctggcatgggcctgagactgatccactattctgtcggagccggcatcaccgaccagggcgaagttcctaatggctacaacgtgtccagaagcaccaccgaggacttcccactgagactgctgtctgccgctcctagccagaccagcgtgtacttttgcgccagcagctttcagaccggcgcttcctacggctacacattcggctctggcaccagactgaccgtgctcgaggggaaaccaattcccaaccctcttctgggactggattcaaccggcagcggcgaggacctgaagaacgtgttcccacctgaggtggccgtgttcgagcctagcgaggccgagatcagccacacccagaaagccaccctcgtgtgcctggctaccggcttctaccccgaccatgtggaactgtcttggtgggtcaacggcaaagaggtgcacagcggcgtgtctaccgacccccagccactgaaagaacagcccgccctgaacgacagccggtactgcctgagcagcagactgagagtgtccgccaccttctggcagaacccccggaaccacttcagatgccaggtgcagttctacggcctgagcgagaacgacgagtggacccaggacagagccaagcccgtgacccagatcgtgtctgccgaagcctggggcagagccgattgcggatcccagagcttcggcctgctggaccccaagctgtgctacctgctggatggcatcctgttcatctacggcgtgatcctgaccgccctgttcctgagagtgaagttcagcagaagcgccgacgcccctgcctaccagcagggacagaaccaactgtacaacgagctgaacctgggcagacgggaagagtacgacgtgctggacaagcggagaggcagggaccctgagatgggcggaaagccccagcggagaaagaacccccaggaaggactgtataacgaactccagaaagacaagatggccgaagcctacagcgagatcggcatgaagggcgagcggagaagaggcaagggccacgatggcctgtaccagggcctgagcaccgccaccaaggacacctatgacgccctgcacatgcaggccctgcctccaagaagggccaagcgatctggatctggagcaacaaacttctcactactcaaacaagcaggtgacgtggaggagaatcccgggcctactagtatggactggatttggcgcatccttttccttgtcggcgctgctaccggcgcccattccgggccccaggttcagctgcaagagtctggcggaggacttgctcaagctggcggaagcctgagactgtcttgtgccgcctctggcagaaccttcagcatgggctggtttagacaggcccctggcaaagagagagagttcgtcgccgccatcacatacagcggcggcagcccttactacgcctcttctgtcagaggccggttcaccatcagccgggacaacgccaagaacaccgtgtacctccagatgaacagcctgaagccagaggacaccgccgtgtactactgtgccgccaatccaacctacggcagcgactggaatgccgagaattggggccagggcacccaagtgacagtgtctagtggatccggcggcggaggatctggcggaggcggatctgggggcggaggctctttcgaaatcctgaacgtggaacagagccctcagagcctgcatgtgcaagagggcgacagcaccaacttcacctgtagcttccccagcagcaacttctacgccctgcactggtacagatgggagacagccaagtctcccgaggcactgttcgtgatgaccctgaacggcgacgagaagaagaagggcagaatcagcgccacactgaacaccaaagagggctactcctacctgtacatcaagggcagccagcctgaggacagcgccacttatctgtgcgccagaaacaccggcaaccagttctactttggcaccggcacaagcctgacagtgatccccaacgagcagaaactgatctcggaagaggatctggggagcggcatccagaaccctgatcctgccgtgtaccagctgcgggatagcaagagcagcgacaagagcgtgtgtctgttcaccgacttcgacagccagaccaacgtgtcccagagcaaggactccgacgtgtacatcaccgataagaccgtgctggacatgcggagcatggacttcaagagcaactccgccgtggcctggtccaacaagtccgatttcgcctgcgccaacgccttcaacaacagcattatccccgaggacacattcttcccaagccccgagagcagctgcggtacccagagttttgggttgttggaccctaaattgtgctatctgttggacggaatcctgttcatttacggagtgatcctgaccgcattgttcctgaagagaggccggaagaagctgctgtacatcttcaagcagcctttcatgcggcccgtgcagaccacccaggaagaggacggctgctcctgccggttccccgaggaagaagaaggcggctgcgagctgcgggttaagttttccagatccgcagacgcacccgcttaccaacaagggcagaaccaactctacaatgaacttaatttggggcggagggaagagtacgacgttctggacaaaaggaggggacgagatcccgagatgggcggaaagcctcagcgaaggaagaatccgcaagaggggctttataacgaactccagaaagataaaatggcagaagcctatagtgagattgggatgaagggagaaaggaggaggggtaaaggtcacgatgggttgtaccaaggattgagcacagccactaaagatacctatgatgcgctccacatgcaggccctgccgccaaga

SEQ ID NO: 3984 - DNA, 3609 bp, Artificial Sequence
  Synthetic Polynucloetide
atgaccatccggctgctgtgctatatgggcttctacttcctcggagccggcctgatggcatgccaggtccagctcgtcgagtccggcggcggcctcgtccaggccggcgactccgtcaccctctcctgcaccgcctccggccgcaccttctcctcctacgccctcgcctggttccgccagcgccccggcaaggagcgcgagttcgtcgccggcctccgctggggcggccccaccaactacgccgactccgtcaaggaccgcttcaccatctccggcgactccgccaagcacaccatgtacctccagatgaactccctcaagcccgaggacaccgccgtctactactgcggctacaaccccggcggctgggccgtcccctcccagtacgagtacgactcctggggccagggcacccaggtcaccgtctcctccggtaccggcggaggcggatctggcggcggaggtagcggtggcggaggatctgaattcggcgtgacccagacacctaagttccaggtgctgaaaaccggccagagcatgaccctgcaatgcgcccaggacatgaaccatgagtacatgagctggtacaggcaggaccctggcatgggcctgagactgatccactattctgtcggagccggcatcaccgaccagggcgaagttcctaatggctacaacgtgtccagaagcaccaccgaggacttcccactgagactgctgtctgccgctcctagccagaccagcgtgtacttttgcgccagcagctttcagaccggcgcttcctacggctacacattcggctctggcaccagactgaccgtgctcgaggggaaaccaattcccaaccctcttctgggactggattcaaccggcagcggcgaggacctgaagaacgtgttcccacctgaggtggccgtgttcgagcctagcgaggccgagatcagccacacccagaaagccaccctcgtgtgcctggctaccggcttctaccccgaccatgtggaactgtcttggtgggtcaacggcaaagaggtgcacagcggcgtgtctaccgacccccagccactgaaagaacagcccgccctgaacgacagccggtactgcctgagcagcagactgagagtgtccgccaccttctggcagaacccccggaaccacttcagatgccaggtgcagttctacggcctgagcgagaacgacgagtggacccaggacagagccaagcccgtgacccagatcgtgtctgccgaagcctggggcagagccgattgcggatcccagagcttcggcctgctggaccccaagctgtgctacctgctggatggcatcctgttcatctacggcgtgatcctgaccgccctgttcctgaaacggggcagaaagaaactcctgtatatattcaaacaaccatttatgagaccagtacaaactactcaagaggaagatggctgtagctgccgatttccagaagaagaagaaggaggatgtgaactgagagtgaagttcagcagaagcgccgacgcccctgcctaccagcagggacagaaccaactgtacaacgagctgaacctgggcagacgggaagagtacgacgtgctggacaagcggagaggcagggaccctgagatgggcggaaagccccagcggagaaagaacccccaggaaggactgtataacgaactccagaaagacaagatggccgaagcctacagcgagatcggcatgaagggcgagcggagaagaggcaagggccacgatggcctgtaccagggcctgagcaccgccaccaaggacacctatgacgccctgcacatgcaggccctgcctccaagaagggccaagcgatctggatctggagcaacaaacttctcactactcaaacaagcaggtgacgtggaggagaatcccgggcctactagtatggactggatttggcgcatccttttccttgtcggcgctgctaccggcgcccattccgggccccaggttcagctgcaagagtctggcggaggacttgctcaagctggcggaagcctgagactgtcttgtgccgcctctggcagaaccttcagcatgggctggtttagacaggcccctggcaaagagagagagttcgtcgccgccatcacatacagcggcggcagcccttactacgcctcttctgtcagaggccggttcaccatcagccgggacaacgccaagaacaccgtgtacctccagatgaacagcctgaagccagaggacaccgccgtgtactactgtgccgccaatccaacctacggcagcgactggaatgccgagaattggggccagggcacccaagtgacagtgtctagtggatccggcggcggaggatctggcggaggcggatctgggggcggaggctctttcgaaatcctgaacgtggaacagagccctcagagcctgcatgtgcaagagggcgacagcaccaacttcacctgtagcttccccagcagcaacttctacgccctgcactggtacagatgggagacagccaagtctcccgaggcactgttcgtgatgaccctgaacggcgacgagaagaagaagggcagaatcagcgccacactgaacaccaaagagggctactcctacctgtacatcaagggcagccagcctgaggacagcgccacttatctgtgcgccagaaacaccggcaaccagttctactttggcaccggcacaagcctgacagtgatccccaacgagcagaaactgatctcggaagaggatctggggagcggcatccagaaccctgatcctgccgtgtaccagctgcgggatagcaagagcagcgacaagagcgtgtgtctgttcaccgacttcgacagccagaccaacgtgtcccagagcaaggactccgacgtgtacatcaccgataagaccgtgctggacatgcggagcatggacttcaagagcaactccgccgtggcctggtccaacaagtccgatttcgcctgcgccaacgccttcaacaacagcattatccccgaggacacattcttcccaagccccgagagcagctgcggtacccagagttttgggttgttggaccctaaattgtgctatctgttggacggaatcctgttcatttacggagtgatcctgaccgcattgttcctgaagagaggccggaagaagctgctgtacatcttcaagcagcctttcatgcggcccgtgcagaccacccaggaagaggacggctgctcctgccggttccccgaggaagaagaaggcggctgcgagctgcgggttaagttttccagatccgcagacgcacccgcttaccaacaagggcagaaccaactctacaatgaacttaatttggggcggagggaagagtacgacgttctggacaaaaggaggggacgagatcccgagatgggcggaaagcctcagcgaaggaagaatccgcaagaggggctttataacgaactccagaaagataaaatggcagaagcctatagtgagattgggatgaagggagaaaggaggaggggtaaaggtcacgatgggttgtaccaaggattgagcacagccactaaagatacctatgatgcgctccacatgcaggccctgccgccaaga

SEQ ID NO: 3985 - DNA, 3282 bp, Artificial Sequence
  Synthetic Polynucloetide
atgaccatccggctgctgtgctatatgggcttctacttcctcggagccggcctgatggcatgccaggtccagctcgtcgagtccggcggcggcctcgtccaggccggcgactccgtcaccctctcctgcaccgcctccggccgcaccttctcctcctacgccctcgcctggttccgccagcgccccggcaaggagcgcgagttcgtcgccggcctccgctggggcggccccaccaactacgccgactccgtcaaggaccgcttcaccatctccggcgactccgccaagcacaccatgtacctccagatgaactccctcaagcccgaggacaccgccgtctactactgcggctacaaccccggcggctgggccgtcccctcccagtacgagtacgactcctggggccagggcacccaggtcaccgtctcctccggtaccggcggaggcggatctggcggcggaggtagcggtggcggaggatctgaattcggcgtgacccagacacctaagttccaggtgctgaaaaccggccagagcatgaccctgcaatgcgcccaggacatgaaccatgagtacatgagctggtacaggcaggaccctggcatgggcctgagactgatccactattctgtcggagccggcatcaccgaccagggcgaagttcctaatggctacaacgtgtccagaagcaccaccgaggacttcccactgagactgctgtctgccgctcctagccagaccagcgtgtacttttgcgccagcagctttcagaccggcgcttcctacggctacacattcggctctggcaccagactgaccgtgctcgagcagagcttcggcctgctggaccccaagctgtgctacctgctggatggcatcctgttcatctacggcgtgatcctgaccgccctgttcctgagagtgaagttcagcagaagcgccgacgcccctgcctaccagcagggacagaaccaactgtacaacgagctgaacctgggcagacgggaagagtacgacgtgctggacaagcggagaggcagggaccctgagatgggcggaaagccccagcggagaaagaacccccaggaaggactgtataacgaactccagaaagacaagatggccgaagcctacagcgagatcggcatgaagggcgagcggagaagaggcaagggccacgatggcctgtaccagggcctgagcaccgccaccaaggacacctatgacgccctgcacatgcaggccctgcctccaagaagggccaagcgatctggatctggagcaacaaacttctcactactcaaacaagcaggtgacgtggaggagaatcccgggcctactagtatggactggatttggcgcatccttttccttgtcggcgctgctaccggcgcccattccgggccccaggttcagctgcaagagtctggcggaggacttgctcaagctggcggaagcctgagactgtcttgtgccgcctctggcagaaccttcagcatgggctggtttagacaggcccctggcaaagagagagagttcgtcgccgccatcacatacagcggcggcagcccttactacgcctcttctgtcagaggccggttcaccatcagccgggacaacgccaagaacaccgtgtacctccagatgaacagcctgaagccagaggacaccgccgtgtactactgtgccgccaatccaacctacggcagcgactggaatgccgagaattggggccagggcacccaagtgacagtgtctagtggatccggcggcggaggatctggcggaggcggatctgggggcggaggctctttcgaaatcctgaacgtggaacagagccctcagagcctgcatgtgcaagagggcgacagcaccaacttcacctgtagcttccccagcagcaacttctacgccctgcactggtacagatgggagacagccaagtctcccgaggcactgttcgtgatgaccctgaacggcgacgagaagaagaagggcagaatcagcgccacactgaacaccaaagagggctactcctacctgtacatcaagggcagccagcctgaggacagcgccacttatctgtgcgccagaaacaccggcaaccagttctactttggcaccggcacaagcctgacagtgatccccaaccagagttttgggttgttggaccctaaattgtgctatctgttggacggaatcctgttcatttacggagtgatcctgaccgcattgttcctgcgggttaagttttccagatccgcagacgcacccgcttaccaacaagggcagaaccaactctacaatgaacttaatttggggcggagggaagagtacgacgttctggacaaaaggaggggacgagatcccgagatgggcggaaagcctcagcgaaggaagaatccgcaagaggggctttataacgaactccagaaagataaaatggcagaagcctatagtgagattgggatgaagggagaaaggaggaggggtaaaggtcacgatgggttgtaccaaggattgagcacagccactaaagatacctatgatgcgctccacatgcaggccctgccgccaagacgcgccaagagaagcggatctggcgtgaagcagaccctgaatttcgacctgctgaagctggctggcgacgtggaatccaacccaggcccttctagaggccatatgaccgagtacaagcccacggtgcgcctcgccacccgcgacgacgtccccagggccgtacgcaccctcgccgccgcgttcgccgactaccccgccacgcgccacaccgtcgatccggaccgccacatcgagcgggtcaccgagctgcaagaactcttcctcacgcgcgtcgggctcgacatcggcaaggtgtgggtcgcggacgacggcgccgcggtggcggtctggaccacgccggagagcgtcgaagcgggggcggtgttcgccgagatcggcccgcgcatggccgagttgagcggttcccggctggccgcgcagcaacagatggaaggcctcctggcgccgcaccggcccaaggagcccgcgtggttcctggccaccgtcggcgtctcgcccgaccaccagggcaagggtctgggcagcgccgtcgtgctccccggagtggaggcggccgagcgcgccggggtgcccgccttcctggagacctccgcgccccgcaacctccccttctacgagcggctcggcttcaccgtcaccgccgacgtcgaggtgcccgaaggaccgcgcacctggtgcatgacccgcaagcccggtgcctga

SEQ ID NO: 3986 - DNA, 2754 bp, Artificial Sequence
  Synthetic Polynucloetide
atgaccatccggctgctgtgctatatgggcttctacttcctcggagccggcctgatggcatgccaggtccagctcgtcgagtccggcggcggcctcgtccaggccggcgactccgtcaccctctcctgcaccgcctccggccgcaccttctcctcctacgccctcgcctggttccgccagcgccccggcaaggagcgcgagttcgtcgccggcctccgctggggcggccccaccaactacgccgactccgtcaaggaccgcttcaccatctccggcgactccgccaagcacaccatgtacctccagatgaactccctcaagcccgaggacaccgccgtctactactgcggctacaaccccggcggctgggccgtcccctcccagtacgagtacgactcctggggccagggcacccaggtcaccgtctcctccggtaccggcggaggcggatctggcggcggaggtagcggtggcggaggatctgaattcggcgtgacccagacacctaagttccaggtgctgaaaaccggccagagcatgaccctgcaatgcgcccaggacatgaaccatgagtacatgagctggtacaggcaggaccctggcatgggcctgagactgatccactattctgtcggagccggcatcaccgaccagggcgaagttcctaatggctacaacgtgtccagaagcaccaccgaggacttcccactgagactgctgtctgccgctcctagccagaccagcgtgtacttttgcgccagcagctttcagaccggcgcttcctacggctacacattcggctctggcaccagactgaccgtgctcgagggacagcctaaggccaatcctaccgtgacactgttccctccaagcagcgaagaactccaggccaacaaggccacacttgtgtgcctgatctccgacttctaccctggggctgtgacagtggcttggaaggccgatggatctcctgtgaaagccggcgtggaaaccaccaagccatccaagcagagcaacaacaaatacgccgccagctcctacctgagcctgacacctgagcagtggaagtcccacagatcctacagctgccaagtgacccacgaaggcagcaccgtggaaaagacagtggcccctacagagtgcagccccatcaagaccgatgtgattacaatggaccccaaggacaactgctccaaggacgccaacgataccctgctgctccagctgaccaacaccagcgcctactacatgtacttgttgctgctgctgaagtccgtggtgtacttcgccatcatcacatgctgcctgctgcggagaaccgccttctgctgcaacggcgagaagtctagggccaagcgatctggatctggagcaacaaacttctcactactcaaacaagcaggtgacgtggaggagaatcccgggcctactagtatggactggatttggcgcatccttttccttgtcggcgctgctaccggcgcccattccgggccccaggttcagctgcaagagtctggcggaggacttgctcaagctggcggaagcctgagactgtcttgtgccgcctctggcagaaccttcagcatgggctggtttagacaggcccctggcaaagagagagagttcgtcgccgccatcacatacagcggcggcagcccttactacgcctcttctgtcagaggccggttcaccatcagccgggacaacgccaagaacaccgtgtacctccagatgaacagcctgaagccagaggacaccgccgtgtactactgtgccgccaatccaacctacggcagcgactggaatgccgagaattggggccagggcacccaagtgacagtgtctagtggatccggcggcggaggatctggcggaggcggatctgggggcggaggctctttcgaaatcctgaacgtggaacagagccctcagagcctgcatgtgcaagagggcgacagcaccaacttcacctgtagcttccccagcagcaacttctacgccctgcactggtacagatgggagacagccaagtctcccgaggcactgttcgtgatgaccctgaacggcgacgagaagaagaagggcagaatcagcgccacactgaacaccaaagagggctactcctacctgtacatcaagggcagccagcctgaggacagcgccacttatctgtgcgccagaaacaccggcaaccagttctactttggcaccggcacaagcctgacagtgatccccaacgcctctacaaagggaccctccgtgtttcctctggctcccagcagcaagtctacaagcggaggaacagccgctctgggctgcctggtcaaggattactttcccgagcctgtgaccgtgtcctggaatagcggagcactgacaagcggcgtgcacacctttccagccgtgctgcaaagcagcggcctgtactctctgagcagcgtggtcacagtgcctagctctagcctgggcacccagacctacatctgcaatgtgaaccacaagcctagcaacaccaaggtggacaagagagtggaacccaagagctgtgaagtgaaaaccgactccaccgaccacgtgaagcccaaagagacagagaacaccaagcagcccagcaagagctgccacaagcccaaggccatcgtgcacaccgagaaagtgaacatgatgagcctgaccgtgctgggcctgcggatgctgttcgccaaaaccgtggccgtgaacttcctgctgaccgccaagctgttcttcctc

SEQ ID NO: 3987 - DNA, 2688 bp, Artificial Sequence
  Synthetic Polynucloetide
atgaccatccggctgctgtgctatatgggcttctacttcctcggagccggcctgatggcatgccaggtccagctcgtcgagtccggcggcggcctcgtccaggccggcgactccgtcaccctctcctgcaccgcctccggccgcaccttctcctcctacgccctcgcctggttccgccagcgccccggcaaggagcgcgagttcgtcgccggcctccgctggggcggccccaccaactacgccgactccgtcaaggaccgcttcaccatctccggcgactccgccaagcacaccatgtacctccagatgaactccctcaagcccgaggacaccgccgtctactactgcggctacaaccccggcggctgggccgtcccctcccagtacgagtacgactcctggggccagggcacccaggtcaccgtctcctccggtaccggcggaggcggatctggcggcggaggtagcggtggcggaggatctgaattcggcgtgacccagacacctaagttccaggtgctgaaaaccggccagagcatgaccctgcaatgcgcccaggacatgaaccatgagtacatgagctggtacaggcaggaccctggcatgggcctgagactgatccactattctgtcggagccggcatcaccgaccagggcgaagttcctaatggctacaacgtgtccagaagcaccaccgaggacttcccactgagactgctgtctgccgctcctagccagaccagcgtgtacttttgcgccagcagctttcagaccggcgcttcctacggctacacattcggctctggcaccagactgaccgtgctcgagggacagcctaaggccaatcctaccgtgacactgttccctccaagcagcgaagaactccaggccaacaaggccacacttgtgtgcctgatctccgacttctaccctggggctgtgacagtggcttggaaggccgatggatctcctgtgaaagccggcgtggaaaccaccaagccatccaagcagagcaacaacaaatacgccgccagctcctacctgagcctgacacctgagcagtggaagtcccacagatcctacagctgccaagtgacccacgaaggcagcaccgtggaaaagacagtggcccctacagagtgcagcggcagagccgattgcggcatcaccagcgccagctaccaccagggcgtgctgagcgccaccatcctgtacgagatcctgctgggcaaggccaccctgtacgccgtgctggtgtctgccctggtgctgatggctatggtcaagcggaaggacagccggggaagggccaagcgatctggatctggagcaacaaacttctcactactcaaacaagcaggtgacgtggaggagaatcccgggcctactagtatggactggatttggcgcatccttttccttgtcggcgctgctaccggcgcccattccgggccccaggttcagctgcaagagtctggcggaggacttgctcaagctggcggaagcctgagactgtcttgtgccgcctctggcagaaccttcagcatgggctggtttagacaggcccctggcaaagagagagagttcgtcgccgccatcacatacagcggcggcagcccttactacgcctcttctgtcagaggccggttcaccatcagccgggacaacgccaagaacaccgtgtacctccagatgaacagcctgaagccagaggacaccgccgtgtactactgtgccgccaatccaacctacggcagcgactggaatgccgagaattggggccagggcacccaagtgacagtgtctagtggatccggcggcggaggatctggcggaggcggatctgggggcggaggctctttcgaaatcctgaacgtggaacagagccctcagagcctgcatgtgcaagagggcgacagcaccaacttcacctgtagcttccccagcagcaacttctacgccctgcactggtacagatgggagacagccaagtctcccgaggcactgttcgtgatgaccctgaacggcgacgagaagaagaagggcagaatcagcgccacactgaacaccaaagagggctactcctacctgtacatcaagggcagccagcctgaggacagcgccacttatctgtgcgccagaaacaccggcaaccagttctactttggcaccggcacaagcctgacagtgatccccaacgcctctacaaagggaccctccgtgtttcctctggctcccagcagcaagtctacaagcggaggaacagccgctctgggctgcctggtcaaggattactttcccgagcctgtgaccgtgtcctggaatagcggagcactgacaagcggcgtgcacacctttccagccgtgctgcaaagcagcggcctgtactctctgagcagcgtggtcacagtgcctagctctagcctgggcacccagacctacatctgcaatgtgaaccacaagcctagcaacaccaaggtggacaagagagtggaacccaagagctgtatccccgaggacacattcttcccaagcagcgacgtgccctgcgacgtgaagctggtggaaaagagcttcgagacagacaccaacctgaacttccagaacctgagcgtgatcggcttcagaatcctgctgctgaaagtggccggctttaacctgctgatgaccctgcggctgtggtccagc

SEQ ID NO: 3988 - DNA, 2688 bp, Artificial Sequence
  Synthetic Polynucloetide
atgaccatccggctgctgtgctatatgggcttctacttcctcggagccggcctgatggcatgccaggtccagctcgtcgagtccggcggcggcctcgtccaggccggcgactccgtcaccctctcctgcaccgcctccggccgcaccttctcctcctacgccctcgcctggttccgccagcgccccggcaaggagcgcgagttcgtcgccggcctccgctggggcggccccaccaactacgccgactccgtcaaggaccgcttcaccatctccggcgactccgccaagcacaccatgtacctccagatgaactccctcaagcccgaggacaccgccgtctactactgcggctacaaccccggcggctgggccgtcccctcccagtacgagtacgactcctggggccagggcacccaggtcaccgtctcctccggtaccggcggaggcggatctggcggcggaggtagcggtggcggaggatctgaattcggcgtgacccagacacctaagttccaggtgctgaaaaccggccagagcatgaccctgcaatgcgcccaggacatgaaccatgagtacatgagctggtacaggcaggaccctggcatgggcctgagactgatccactattctgtcggagccggcatcaccgaccagggcgaagttcctaatggctacaacgtgtccagaagcaccaccgaggacttcccactgagactgctgtctgccgctcctagccagaccagcgtgtacttttgcgccagcagctttcagaccggcgcttcctacggctacacattcggctctggcaccagactgaccgtgctcgagggacagcctaaggccaatcctaccgtgacactgttccctccaagcagcgaagaactccaggccaacaaggccacacttgtgtgcctgatctccgacttctaccctggggctgtgacagtggcttggaaggccgatggatctcctgtgaaagccggcgtggaaaccaccaagccatccaagcagagcaacaacaaatacgccgccagctcctacctgagcctgacacctgagcagtggaagtcccacagatcctacagctgccaagtgacccacgaaggcagcaccgtggaaaagacagtggcccctacagagtgcagcggcagagccgattgcggctttaccagcgagagctaccagcagggcgtgctgagcgccaccatcctgtacgagatcctgctgggcaaggccaccctgtacgccgtgctggtgtctgccctggtgctgatggctatggtcaagcggaaggacagccggggaagggccaagcgatctggatctggagcaacaaacttctcactactcaaacaagcaggtgacgtggaggagaatcccgggcctactagtatggactggatttggcgcatccttttccttgtcggcgctgctaccggcgcccattccgggccccaggttcagctgcaagagtctggcggaggacttgctcaagctggcggaagcctgagactgtcttgtgccgcctctggcagaaccttcagcatgggctggtttagacaggcccctggcaaagagagagagttcgtcgccgccatcacatacagcggcggcagcccttactacgcctcttctgtcagaggccggttcaccatcagccgggacaacgccaagaacaccgtgtacctccagatgaacagcctgaagccagaggacaccgccgtgtactactgtgccgccaatccaacctacggcagcgactggaatgccgagaattggggccagggcacccaagtgacagtgtctagtggatccggcggcggaggatctggcggaggcggatctgggggcggaggctctttcgaaatcctgaacgtggaacagagccctcagagcctgcatgtgcaagagggcgacagcaccaacttcacctgtagcttccccagcagcaacttctacgccctgcactggtacagatgggagacagccaagtctcccgaggcactgttcgtgatgaccctgaacggcgacgagaagaagaagggcagaatcagcgccacactgaacaccaaagagggctactcctacctgtacatcaagggcagccagcctgaggacagcgccacttatctgtgcgccagaaacaccggcaaccagttctactttggcaccggcacaagcctgacagtgatccccaacgcctctacaaagggaccctccgtgtttcctctggctcccagcagcaagtctacaagcggaggaacagccgctctgggctgcctggtcaaggattactttcccgagcctgtgaccgtgtcctggaatagcggagcactgacaagcggcgtgcacacctttccagccgtgctgcaaagcagcggcctgtactctctgagcagcgtggtcacagtgcctagctctagcctgggcacccagacctacatctgcaatgtgaaccacaagcctagcaacaccaaggtggacaagagagtggaacccaagagctgtatccccgaggacacattcttcccaagccccgagagcagctgcgacgtgaagctggtggaaaagagcttcgagacagacaccaacctgaacttccagaacctgagcgtgatcggcttcagaatcctgctgctgaaagtggccggctttaacctgctgatgaccctgcggctgtggtccagc

SEQ ID NO: 3989 - DNA, 1908 bp, Artificial Sequence
  Synthetic Polynucloetide
atggactggatttggcgcatccttttccttgtcggcgctgctaccggcgcccattccgggccccaggttcagctgcaagagtctggcggaggacttgctcaagctggcggaagcctgagactgtcttgtgccgcctctggcagaaccttcagcatgggctggtttagacaggcccctggcaaagagagagagttcgtcgccgccatcacatacagcggcggcagcccttactacgcctcttctgtcagaggccggttcaccatcagccgggacaacgccaagaacaccgtgtacctccagatgaacagcctgaagccagaggacaccgccgtgtactactgtgccgccaatccaacctacggcagcgactggaatgccgagaattggggccagggcacccaagtgacagtgtctagtggatccggcggcggaggatctggcggaggcggatctgggggcggaggctctttcgaacaagaagtgacacagatccctgccgctctgtctgtgcctgagggcgaaaacctggtgctgaactgctccttcaccgacagcgccatctacaacctccagtggttcaggcaggaccctggaaagggactgacaagcctgctgctgatccagagcagccagagagagcagacctccggcagactgaatgccagcctggataagagcagcggcaggtctaccctgtatatcgccgcttctcagcctggcgatagcgccacatatctgtgtgctgtgcggcctacaagcggcggcagctacatccctacatttggcagaggcaccagcctgatcgtgcacccttatggcggaggcggaagtggaggcggaggatctggcggcggaggctctaatgctggcgtgacccagacacctaagttccaggtgctgaaaaccggccagagcatgaccctgcaatgcgcccaggacatgaaccatgagtacatgagctggtacagacaggaccccggcatgggcctgagactgatccactactctgtggctatccagaccaccgaccagggcgaagtgcccaatggctacaacgtgtccagaagcaccatcgaggacttcccactgagactgctgtctgccgctcctagccagaccagcgtgtacttttgtgccagcagctacctgggcaacaccggcgagctgttttttggcgagggcagcagactgaccgtggagcagaaactgatctcggaagaggatctggcgaagcccaccacgacgccagcgccgcgaccaccaacaccggcgcccaccatcgcgtcgcagcccctgtccctgcgcccagaggcgtgccggccagcggcggggggcgcagtgcacacgagggggctggacttcgcctgtgacatctacatctgggcgcccttggccgggacttgtggggtccttctcctgtcactggttatcaccctttactgcaaacggggcagaaagaaactcctgtatatattcaaacaaccatttatgagaccagtacaaactactcaagaggaagatggctgtagctgccgatttccagaagaagaagaaggaggatgtgaactgagagtgaagttcagcaggagcgcagacgcccccgcgtaccagcagggccagaaccagctctataacgagctgaatctaggacgaagagaggagtacgatgttttggacaagagacgtggccgggaccctgagatggggggaaagccgagaaggaagaaccctcaggaaggcctgtacaatgaactgcagaaagataagatggcggaggcctacagtgagattgggatgaaaggcgagcgccggaggggcaaggggcacgatggcctttaccagggtctcagtacagccaccaaggacacctacgacgcccttcacatgcaggccctgccccctcgctga

SEQ ID NO: 3990 - DNA, 2967 bp, Artificial Sequence
  Synthetic Polynucloetide
atggccttaccagtgaccgccttgctcctgccgctggccttgctgctccacgccgccaggccgaatgctggcgtgacccagacacctaagttccaggtgctgaaaaccggccagagcatgaccctgcaatgcgcccaggacatgaaccatgagtacatgagctggtacagacaggaccccggcatgggcctgagactgatccactactctgtggctatccagaccaccgaccagggcgaagtgcccaatggctacaacgtgtccagaagcaccatcgaggacttcccactgagactgctgtctgccgctcctagccagaccagcgtgtacttttgtgccagcagctacctgggcaacaccggcgagctgttttttggcgagggcagcagactgaccgtgctcgagatccagaaccctgatcctgccgtgtaccagctgcgggatagcaagagcagcgacaagagcgtgtgtctgttcaccgacttcgacagccagaccaacgtgtcccagagcaaggactccgacgtgtacatcaccgataagtgcgtgctggacatgcggagcatggacttcaagagcaactccgccgtggcctggtccaacaagtccgatttcgcctgcgccaacgccttcaacaacagcattatccccgaggacacattcttcccaagcagcgacgtgccctgcgacgtgaagctggtggaaaagagcttcgagacagacaccaacctgaacttccagaacctgagcgtgatcggcttcagaatcctgctgctgaaagtggccggctttaacctgctgatgaccctgcggctgtggtccagccgcgccaagagaagcggatctggcgtgaagcagaccctgaatttcgacctgctgaagctggctggcgacgtggaatccaacccaggccctactagtatggactggatttggcgcatccttttccttgtcggcgctgctaccggcgcccattccgggccccaggttcagctgcaagagtctggcggaggacttgctcaagctggcggaagcctgagactgtcttgtgccgcctctggcagaaccttcagcatgggctggtttagacaggcccctggcaaagagagagagttcgtcgccgccatcacatacagcggcggcagcccttactacgcctcttctgtcagaggccggttcaccatcagccgggacaacgccaagaacaccgtgtacctccagatgaacagcctgaagccagaggacaccgccgtgtactactgtgccgccaatccaacctacggcagcgactggaatgccgagaattggggccagggcacccaagtgacagtgtctagtggatccggcggcggaggatctggcggaggcggatctgggggcggaggctctttcgaacaagaagtgacacagatccctgccgctctgtctgtgcctgagggcgaaaacctggtgctgaactgctccttcaccgacagcgccatctacaacctccagtggttcaggcaggaccctggaaagggactgacaagcctgctgctgatccagagcagccagagagagcagacctccggcagactgaatgccagcctggataagagcagcggcaggtctaccctgtatatcgccgcttctcagcctggcgatagcgccacatatctgtgtgctgtgcggcctacaagcggcggcagctacatccctacatttggcagaggcaccagcctgatcgtgcacccttatgaggacctgaagaacgtgttcccacctgaggtggccgtgttcgagcctagcaaggccgagatcgcccacacccagaaagccaccctcgtgtgcctggctaccggcttctaccccgaccatgtggaactgtcttggtgggtcaacggcaaagaggtgcacagcggcgtgtgtaccgacccccagccactgaaagaacagcccgccctgaacgacagccggtactgcctgagcagcagactgagagtgtccgccaccttctggcagaacccccggaaccacttcagatgccaggtgcagttctacggcctgagcgagaacgacgagtggacccaggacagagccaagcccgtgacccagatcgtgtctgccgaagcctggggcagagccgattgcggcatcaccagcgccagctaccaccagggcgtgctgagcgccaccatcctgtacgagatcctgctgggcaaggccaccctgtacgccgtgctggtgtctgccctggtgctgatggctatggtcaagcggaaggacagccggggaagggccaagcgatctggatctggagcaacaaacttctcactactcaaacaagcaggtgacgtggaggagaatcccgggccttctagaggccatatgaccgagtacaagcccacggtgcgcctcgccacccgcgacgacgtccccagggccgtacgcaccctcgccgccgcgttcgccgactaccccgccacgcgccacaccgtcgatccggaccgccacatcgagcgggtcaccgagctgcaagaactcttcctcacgcgcgtcgggctcgacatcggcaaggtgtgggtcgcggacgacggcgccgcggtggcggtctggaccacgccggagagcgtcgaagcgggggcggtgttcgccgagatcggcccgcgcatggccgagttgagcggttcccggctggccgcgcagcaacagatggaaggcctcctggcgccgcaccggcccaaggagcccgcgtggttcctggccaccgtcggcgtctcgcccgaccaccagggcaagggtctgggcagcgccgtcgtgctccccggagtggaggcggccgagcgcgccggggtgcccgccttcctggagacctccgcgccccgcaacctccccttctacgagcggctcggcttcaccgtcaccgccgacgtcgaggtgcccgaaggaccgcgcacctggtgcatgacccgcaagcccggtgcctga

SEQ ID NO: 3991 - DNA, 2964 bp, Artificial Sequence
  Synthetic Polynucloetide
atggccttaccagtgaccgccttgctcctgccgctggccttgctgctccacgccgccaggccgaatgctggcgtgacccagacacctaagttccaggtgctgaaaaccggccagagcatgaccctgcaatgcgcccaggacatgaaccatgagtacatgagctggtacagacaggaccccggcatgggcctgagactgatccactactctgtggctatccagaccaccgaccagggcgaagtgcccaatggctacaacgtgtccagaagcaccatcgaggacttcccactgagactgctgtctgccgctcctagccagaccagcgtgtacttttgtgccagcagctacctgggcaacaccggcgagctgttttttggcgagggcagcagactgaccgtgctcgaggacctgaagaacgtgttcccacctgaggtggccgtgttcgagcctagcaaggccgagatcgcccacacccagaaagccaccctcgtgtgcctggctaccggcttctaccccgaccatgtggaactgtcttggtgggtcaacggcaaagaggtgcacagcggcgtgtgtaccgacccccagccactgaaagaacagcccgccctgaacgacagccggtactgcctgagcagcagactgagagtgtccgccaccttctggcagaacccccggaaccacttcagatgccaggtgcagttctacggcctgagcgagaacgacgagtggacccaggacagagccaagcccgtgacccagatcgtgtctgccgaagcctggggcagagccgattgcggcatcaccagcgccagctaccaccagggcgtgctgagcgccaccatcctgtacgagatcctgctgggcaaggccaccctgtacgccgtgctggtgtctgccctggtgctgatggctatggtcaagcggaaggacagccggggaagggccaagcgatctggatctggagcaacaaacttctcactactcaaacaagcaggtgacgtggaggagaatcccgggcctactagtatggactggatttggcgcatccttttccttgtcggcgctgctaccggcgcccattccgggccccaggttcagctgcaagagtctggcggaggacttgctcaagctggcggaagcctgagactgtcttgtgccgcctctggcagaaccttcagcatgggctggtttagacaggcccctggcaaagagagagagttcgtcgccgccatcacatacagcggcggcagcccttactacgcctcttctgtcagaggccggttcaccatcagccgggacaacgccaagaacaccgtgtacctccagatgaacagcctgaagccagaggacaccgccgtgtactactgtgccgccaatccaacctacggcagcgactggaatgccgagaattggggccagggcacccaagtgacagtgtctagtggatccggcggcggaggatctggcggaggcggatctgggggcggaggctctttcgaacaagaagtgacacagatccctgccgctctgtctgtgcctgagggcgaaaacctggtgctgaactgctccttcaccgacagcgccatctacaacctccagtggttcaggcaggaccctggaaagggactgacaagcctgctgctgatccagagcagccagagagagcagacctccggcagactgaatgccagcctggataagagcagcggcaggtctaccctgtatatcgccgcttctcagcctggcgatagcgccacatatctgtgtgctgtgcggcctacaagcggcggcagctacatccctacatttggcagaggcaccagcctgatcgtgcacccttatatccagaaccctgatcctgccgtgtaccagctgcgggatagcaagagcagcgacaagagcgtgtgtctgttcaccgacttcgacagccagaccaacgtgtcccagagcaaggactccgacgtgtacatcaccgataagtgcgtgctggacatgcggagcatggacttcaagagcaactccgccgtggcctggtccaacaagtccgatttcgcctgcgccaacgccttcaacaacagcattatccccgaggacacattcttcccaagcagcgacgtgccctgcgacgtgaagctggtggaaaagagcttcgagacagacaccaacctgaacttccagaacctgagcgtgatcggcttcagaatcctgctgctgaaagtggccggctttaacctgctgatgaccctgcggctgtggtccagccgcgccaagagaagcggatctggcgtgaagcagaccctgaatttcgacctgctgaagctggctggcgacgtggaatccaacccaggcccttctagaggccatatgaccgagtacaagcccacggtgcgcctcgccacccgcgacgacgtccccagggccgtacgcaccctcgccgccgcgttcgccgactaccccgccacgcgccacaccgtcgatccggaccgccacatcgagcgggtcaccgagctgcaagaactcttcctcacgcgcgtcgggctcgacatcggcaaggtgtgggtcgcggacgacggcgccgcggtggcggtctggaccacgccggagagcgtcgaagcgggggcggtgttcgccgagatcggcccgcgcatggccgagttgagcggttcccggctggccgcgcagcaacagatggaaggcctcctggcgccgcaccggcccaaggagcccgcgtggttcctggccaccgtcggcgtctcgcccgaccaccagggcaagggtctgggcagcgccgtcgtgctccccggagtggaggcggccgagcgcgccggggtgcccgccttcctggagacctccgcgccccgcaacctccccttctacgagcggctcggcttcaccgtcaccgccgacgtcgaggtgcccgaaggaccgcgcacctggtgcatgacccgcaagcccggtgcctga

SEQ ID NO: 3992 - DNA, 2964 bp, Artificial Sequence
  Synthetic Polynucloetide
atggccttaccagtgaccgccttgctcctgccgctggccttgctgctccacgccgccaggccgaatgctggcgtgacccagacacctaagttccaggtgctgaaaaccggccagagcatgaccctgcaatgcgcccaggacatgaaccatgagtacatgagctggtacagacaggaccccggcatgggcctgagactgatccactactctgtggctatccagaccaccgaccagggcgaagtgcccaatggctacaacgtgtccagaagcaccatcgaggacttcccactgagactgctgtctgccgctcctagccagaccagcgtgtacttttgtgccagcagctacctgggcaacaccggcgagctgttttttggcgagggcagcagactgaccgtgctcgaggacctgaagaacgtgttcccacctgaggtggccgtgttcgagcctagcgaggccgagatcagccacacccagaaagccaccctcgtgtgcctggctaccggcttctaccccgaccatgtggaactgtcttggtgggtcaacggcaaagaggtgcacagcggcgtgtgtaccgacccccagccactgaaagaacagcccgccctgaacgacagccggtactgcctgagcagcagactgagagtgtccgccaccttctggcagaacccccggaaccacttcagatgccaggtgcagttctacggcctgagcgagaacgacgagtggacccaggacagagccaagcccgtgacccagatcgtgtctgccgaagcctggggcagagccgattgcggctttaccagcgagagctaccagcagggcgtgctgagcgccaccatcctgtacgagatcctgctgggcaaggccaccctgtacgccgtgctggtgtctgccctggtgctgatggctatggtcaagcggaaggacagccggggaagggccaagcgatctggatctggagcaacaaacttctcactactcaaacaagcaggtgacgtggaggagaatcccgggcctactagtatggactggatttggcgcatccttttccttgtcggcgctgctaccggcgcccattccgggccccaggttcagctgcaagagtctggcggaggacttgctcaagctggcggaagcctgagactgtcttgtgccgcctctggcagaaccttcagcatgggctggtttagacaggcccctggcaaagagagagagttcgtcgccgccatcacatacagcggcggcagcccttactacgcctcttctgtcagaggccggttcaccatcagccgggacaacgccaagaacaccgtgtacctccagatgaacagcctgaagccagaggacaccgccgtgtactactgtgccgccaatccaacctacggcagcgactggaatgccgagaattggggccagggcacccaagtgacagtgtctagtggatccggcggcggaggatctggcggaggcggatctgggggcggaggctctttcgaacaagaagtgacacagatccctgccgctctgtctgtgcctgagggcgaaaacctggtgctgaactgctccttcaccgacagcgccatctacaacctccagtggttcaggcaggaccctggaaagggactgacaagcctgctgctgatccagagcagccagagagagcagacctccggcagactgaatgccagcctggataagagcagcggcaggtctaccctgtatatcgccgcttctcagcctggcgatagcgccacatatctgtgtgctgtgcggcctacaagcggcggcagctacatccctacatttggcagaggcaccagcctgatcgtgcacccttatatccagaaccctgatcctgccgtgtaccagctgcgggatagcaagagcagcgacaagagcgtgtgtctgttcaccgacttcgacagccagaccaacgtgtcccagagcaaggactccgacgtgtacatcaccgataagtgcgtgctggacatgcggagcatggacttcaagagcaactccgccgtggcctggtccaacaagtccgatttcgcctgcgccaacgccttcaacaacagcattatccccgaggacacattcttcccaagccccgagagcagctgcgacgtgaagctggtggaaaagagcttcgagacagacaccaacctgaacttccagaacctgagcgtgatcggcttcagaatcctgctgctgaaagtggccggctttaacctgctgatgaccctgcggctgtggtccagccgcgccaagagaagcggatctggcgtgaagcagaccctgaatttcgacctgctgaagctggctggcgacgtggaatccaacccaggcccttctagaggccatatgaccgagtacaagcccacggtgcgcctcgccacccgcgacgacgtccccagggccgtacgcaccctcgccgccgcgttcgccgactaccccgccacgcgccacaccgtcgatccggaccgccacatcgagcgggtcaccgagctgcaagaactcttcctcacgcgcgtcgggctcgacatcggcaaggtgtgggtcgcggacgacggcgccgcggtggcggtctggaccacgccggagagcgtcgaagcgggggcggtgttcgccgagatcggcccgcgcatggccgagttgagcggttcccggctggccgcgcagcaacagatggaaggcctcctggcgccgcaccggcccaaggagcccgcgtggttcctggccaccgtcggcgtctcgcccgaccaccagggcaagggtctgggcagcgccgtcgtgctccccggagtggaggcggccgagcgcgccggggtgcccgccttcctggagacctccgcgccccgcaacctccccttctacgagcggctcggcttcaccgtcaccgccgacgtcgaggtgcccgaaggaccgcgcacctggtgcatgacccgcaagcccggtgcctga

SEQ ID NO: 3993 - DNA, 2262 bp, Artificial Sequence
  Synthetic Polynucloetide
atggccttaccagtgaccgccttgctcctgccgctggccttgctgctccacgccgccaggccgaatgctggcgtgacccagacacctaagttccaggtgctgaaaaccggccagagcatgaccctgcaatgcgcccaggacatgaaccatgagtacatgagctggtacagacaggaccccggcatgggcctgagactgatccactactctgtggctatccagaccaccgaccagggcgaagtgcccaatggctacaacgtgtccagaagcaccatcgaggacttcccactgagactgctgtctgccgctcctagccagaccagcgtgtacttttgtgccagcagctacctgggcaacaccggcgagctgttttttggcgagggcagcagactgaccgtgctcgaggacctgaagaacgtgttcccacctgaggtggccgtgttcgagcctagcgaggccgagatcagccacacccagaaagccaccctcgtgtgcctggctaccggcttctaccccgaccatgtggaactgtcttggtgggtcaacggcaaagaggtgcacagcggcgtgtgtaccgacccccagccactgaaagaacagcccgccctgaacgacagccggtactgcctgagcagcagactgagagtgtccgccaccttctggcagaacccccggaaccacttcagatgccaggtgcagttctacggcctgagcgagaacgacgagtggacccaggacagagccaagcccgtgacccagatcgtgtctgccgaagcctggggcagagccgattgcggctttaccagcgagagctaccagcagggcgtgctgagcgccaccatcctgtacgagatcctgctgggcaaggccaccctgtacgccgtgctggtgtctgccctggtgctgatggctatggtcaagcggaaggacagccggggaagggccaagcgatctggatctggagcaacaaacttctcactactcaaacaagcaggtgacgtggaggagaatcccgggcctactagtatggactggatttggcgcatccttttccttgtcggcgctgctaccggcgcccattccgggccccaggttcagctgcaagagtctggcggaggacttgctcaagctggcggaagcctgagactgtcttgtgccgcctctggcagaaccttcagcatgggctggtttagacaggcccctggcaaagagagagagttcgtcgccgccatcacatacagcggcggcagcccttactacgcctcttctgtcagaggccggttcaccatcagccgggacaacgccaagaacaccgtgtacctccagatgaacagcctgaagccagaggacaccgccgtgtactactgtgccgccaatccaacctacggcagcgactggaatgccgagaattggggccagggcacccaagtgacagtgtctagtggatccggcggcggaggatctggcggaggcggatctgggggcggaggctctttcgaacaagaagtgacacagatccctgccgctctgtctgtgcctgagggcgaaaacctggtgctgaactgctccttcaccgacagcgccatctacaacctccagtggttcaggcaggaccctggaaagggactgacaagcctgctgctgatccagagcagccagagagagcagacctccggcagactgaatgccagcctggataagagcagcggcaggtctaccctgtatatcgccgcttctcagcctggcgatagcgccacatatctgtgtgctgtgcggcctacaagcggcggcagctacatccctacatttggcagaggcaccagcctgatcgtgcacccttatatccagaaccctgatcctgccgtgtaccagctgcgggatagcaagagcagcgacaagagcgtgtgtctgttcaccgacttcgacagccagaccaacgtgtcccagagcaaggactccgacgtgtacatcaccgataagtgcgtgctggacatgcggagcatggacttcaagagcaactccgccgtggcctggtccaacaagtccgatttcgcctgcgccaacgccttcaacaacagcattatccccgaggacacattcttcccaagccccgagagcagctgcgacgtgaagctggtggaaaagagcttcgagacagacaccaacctgaacttccagaacctgagcgtgatcggcttcagaatcctgctgctgaaagtggccggctttaacctgctgatgaccctgcggctgtggtccagc

SEQ ID NO: 3994 - DNA, 2937 bp, Artificial Sequence
  Synthetic Polynucloetide
atggccttaccagtgaccgccttgctcctgccgctggccttgctgctccacgccgccaggccgaatgctggcgtgacccagacacctaagttccaggtgctgaaaaccggccagagcatgaccctgcaatgcgcccaggacatgaaccatgagtacatgagctggtacagacaggaccccggcatgggcctgagactgatccactactctgtggctatccagaccaccgaccagggcgaagtgcccaatggctacaacgtgtccagaagcaccatcgaggacttcccactgagactgctgtctgccgctcctagccagaccagcgtgtacttttgtgccagcagctacctgggcaacaccggcgagctgttttttggcgagggcagcagactgaccgtgctcgaggacctgaagaacgtgttcccacctgaggtggccgtgttcgagcctagcgaggccgagatcagccacacccagaaagccaccctcgtgtgcctggctaccggcttctaccccgaccatgtggaactgtcttggtgggtcaacggcaaagaggtgcacagcggcgtgtgtaccgacccccagccactgaaagaacagcccgccctgaacgacagccggtactgcctgagcagcagactgagagtgtccgccaccttctggcagaacccccggaaccacttcagatgccaggtgcagttctacggcctgagcgagaacgacgagtggacccaggacagagccaagcccgtgacccagatcgtgtctgccgaagcctggggcagagccgattgcggctttaccagcgagagctaccagcagggcgtgctgagcgccaccatcctgtacgagatcctgctgggcaaggccaccctgtacgccgtgctggtgtctgccctggtgctgatggctatggtcaagcggaaggacagccggggaagggccaagcgatctggatctggagcaacaaacttctcactactcaaacaagcaggtgacgtggaggagaatcccgggcctactagtatggactggatttggcgcatccttttccttgtcggcgctgctaccggcgcccattccgggccccaggttcagctgcaagagtctggcggaggacttgctcaagctggcggaagcctgagactgtcttgtgccgcctctggcagaaccttcagcatgggctggtttagacaggcccctggcaaagagagagagttcgtcgccgccatcacatacagcggcggcagcccttactacgcctcttctgtcagaggccggttcaccatcagccgggacaacgccaagaacaccgtgtacctccagatgaacagcctgaagccagaggacaccgccgtgtactactgtgccgccaatccaacctacggcagcgactggaatgccgagaattggggccagggcacccaagtgacagtgtctagtggatccggcggcggaggatctggcggaggcggatctgggggcggaggctctttcgaacaagaagtgacacagatccctgccgctctgtctgtgcctgagggcgaaaacctggtgctgaactgctccttcaccgacagcgccatctacaacctccagtggttcaggcaggaccctggaaagggactgacaagcctgctgctgatccagagcagccagagagagcagacctccggcagactgaatgccagcctggataagagcagcggcaggtctaccctgtatatcgccgcttctcagcctggcgatagcgccacatatctgtgtgctgtgcggcctacaagcggcggcagctacatccctacatttggcagaggcaccagcctgatcgtgcacccttatatccagaaccctgatcctgccgtgtaccagctgcgggatagcaagagcagcgacaagagcgtgtgtctgttcaccgacttcgacagccagaccaacgtgtcccagagcaaggactccgacgtgtacatcaccgataagtgcgtgctggacatgcggagcatggacttcaagagcaactccgccgtggcctggtccaacaagtccgatttcgcctgcgccaacgccttcaacaacagcattatccccgaggacacattcttcccaagccccgagagcagctgcgacgtgaagctggtggaaaagagcttcgagacagacaccaacctgaacttccagaacctgagcgtgatcggcttcagaatcctgctgctgaaagtggccggctttaacctgctgatgaccctgcggctgtggtccagccgcgccaagagaagcggatctggcgtgaagcagaccctgaatttcgacctgctgaagctggctggcgacgtggaatccaacccaggcccttctagaggcgggatccacaccatggctacctacgaggtgctgtgcgaggtggcaagaaagctgggcaccgacgacagagaagtggtgctgttcctgctgaacgtgttcatccctcagcctacactggcccagctgatcggtgcactgagagccctgaaagaggaaggccggctgacctttcctctgctggccgaatgcctgttcagagccggaagaagggatctgctgcgggacctgctgcatctggaccccagatttctggaaagacacctggccggcaccatgagctacttcagcccttaccagctgaccgtgctgcacgttgacggcgaactgtgcgccagagatattcggagcctgatcttcctgagcaaggacaccatcggcagccggtctacccctcagacatttctgcactgggtgtactgcatggaaaacctggacctgctcggccccacagatgtggatgccctgatgtccatgctgagaagcctgagcagagtggacctccagagacaggtgcagacactgatgggactgcacctgagcggacctagccacagccagcactacagacacacccct

SEQ ID NO: 3995 - DNA, 2274 bp, Artificial Sequence
  Synthetic Polynucloetide
atggccttaccagtgaccgccttgctcctgccgctggccttgctgctccacgccgccaggccgaatgctggcgtgacccagacacctaagttccaggtgctgaaaaccggccagagcatgaccctgcaatgcgcccaggacatgaaccatgagtacatgagctggtacagacaggaccccggcatgggcctgagactgatccactactctgtggctatccagaccaccgaccagggcgaagtgcccaatggctacaacgtgtccagaagcaccatcgaggacttcccactgagactgctgtctgccgctcctagccagaccagcgtgtacttttgtgccagcagctacctgggcaacaccggcgagctgttttttggcgagggcagcagactgaccgtgctcgagatccagaaccctgatcctgccgtgtaccagctgcgggatagcaagagcagcgacaagagcgtgtgtctgttcaccgacttcgacagccagaccaacgtgtcccagagcaaggactccgacgtgtacatcaccgataagtgcgtgctggacatgcggagcatggacttcaagagcaactccgccgtggcctggtccaacaagtccgatttcgcctgcgccaacgccttcaacaacagcattatccccgaggacacattcttcccaagccccgagagcagctgcgacgtgaagctggtggaaaagagcttcgagacagacaccaacctgaacttccagaacctgagcgtgatcggcttcagaatcctgctgctgaaagtggccggctttaacctgctgatgaccctgcggctgtggtccagccgcgccaagagaagcggatctggcgtgaagcagaccctgaatttcgacctgctgaagctggctggcgacgtggaatccaacccaggccctactagtatggactggatttggcgcatccttttccttgtcggcgctgctaccggcgcccattccgggccccaggttcagctgcaagagtctggcggaggacttgctcaagctggcggaagcctgagactgtcttgtgccgcctctggcagaaccttcagcatgggctggtttagacaggcccctggcaaagagagagagttcgtcgccgccatcacatacagcggcggcagcccttactacgcctcttctgtcagaggccggttcaccatcagccgggacaacgccaagaacaccgtgtacctccagatgaacagcctgaagccagaggacaccgccgtgtactactgtgccgccaatccaacctacggcagcgactggaatgccgagaattggggccagggcacccaagtgacagtgtctagtggatccggcggcggaggatctggcggaggcggatctgggggcggaggctctttcgaacaagaagtgacacagatccctgccgctctgtctgtgcctgagggcgaaaacctggtgctgaactgctccttcaccgacagcgccatctacaacctccagtggttcaggcaggaccctggaaagggactgacaagcctgctgctgatccagagcagccagagagagcagacctccggcagactgaatgccagcctggataagagcagcggcaggtctaccctgtatatcgccgcttctcagcctggcgatagcgccacatatctgtgtgctgtgcggcctacaagcggcggcagctacatccctacatttggcagaggcaccagcctgatcgtgcacccttatgaggacctgaagaacgtgttcccacctgaggtggccgtgttcgagcctagcgaggccgagatcagccacacccagaaagccaccctcgtgtgcctggctaccggcttctaccccgaccatgtggaactgtcttggtgggtcaacggcaaagaggtgcacagcggcgtgtgtaccgacccccagccactgaaagaacagcccgccctgaacgacagccggtactgcctgagcagcagactgagagtgtccgccaccttctggcagaacccccggaaccacttcagatgccaggtgcagttctacggcctgagcgagaacgacgagtggacccaggacagagccaagcccgtgacccagatcgtgtctgccgaagcctggggcagagccgattgcggctttaccagcgagagctaccagcagggcgtgctgagcgccaccatcctgtacgagatcctgctgggcaaggccaccctgtacgccgtgctggtgtctgccctggtgctgatggctatggtcaagcggaaggacagccgggga

SEQ ID NO: 3996 - DNA, 2940 bp, Artificial Sequence
  Synthetic Polynucloetide
atggccttaccagtgaccgccttgctcctgccgctggccttgctgctccacgccgccaggccgaatgctggcgtgacccagacacctaagttccaggtgctgaaaaccggccagagcatgaccctgcaatgcgcccaggacatgaaccatgagtacatgagctggtacagacaggaccccggcatgggcctgagactgatccactactctgtggctatccagaccaccgaccagggcgaagtgcccaatggctacaacgtgtccagaagcaccatcgaggacttcccactgagactgctgtctgccgctcctagccagaccagcgtgtacttttgtgccagcagctacctgggcaacaccggcgagctgttttttggcgagggcagcagactgaccgtgctcgagatccagaaccctgatcctgccgtgtaccagctgcgggatagcaagagcagcgacaagagcgtgtgtctgttcaccgacttcgacagccagaccaacgtgtcccagagcaaggactccgacgtgtacatcaccgataagtgcgtgctggacatgcggagcatggacttcaagagcaactccgccgtggcctggtccaacaagtccgatttcgcctgcgccaacgccttcaacaacagcattatccccgaggacacattcttcccaagccccgagagcagctgcgacgtgaagctggtggaaaagagcttcgagacagacaccaacctgaacttccagaacctgagcgtgatcggcttcagaatcctgctgctgaaagtggccggctttaacctgctgatgaccctgcggctgtggtccagccgcgccaagagaagcggatctggcgtgaagcagaccctgaatttcgacctgctgaagctggctggcgacgtggaatccaacccaggccctactagtatggactggatttggcgcatccttttccttgtcggcgctgctaccggcgcccattccgggccccaggttcagctgcaagagtctggcggaggacttgctcaagctggcggaagcctgagactgtcttgtgccgcctctggcagaaccttcagcatgggctggtttagacaggcccctggcaaagagagagagttcgtcgccgccatcacatacagcggcggcagcccttactacgcctcttctgtcagaggccggttcaccatcagccgggacaacgccaagaacaccgtgtacctccagatgaacagcctgaagccagaggacaccgccgtgtactactgtgccgccaatccaacctacggcagcgactggaatgccgagaattggggccagggcacccaagtgacagtgtctagtggatccggcggcggaggatctggcggaggcggatctgggggcggaggctctttcgaacaagaagtgacacagatccctgccgctctgtctgtgcctgagggcgaaaacctggtgctgaactgctccttcaccgacagcgccatctacaacctccagtggttcaggcaggaccctggaaagggactgacaagcctgctgctgatccagagcagccagagagagcagacctccggcagactgaatgccagcctggataagagcagcggcaggtctaccctgtatatcgccgcttctcagcctggcgatagcgccacatatctgtgtgctgtgcggcctacaagcggcggcagctacatccctacatttggcagaggcaccagcctgatcgtgcacccttatgaggacctgaagaacgtgttcccacctgaggtggccgtgttcgagcctagcgaggccgagatcagccacacccagaaagccaccctcgtgtgcctggctaccggcttctaccccgaccatgtggaactgtcttggtgggtcaacggcaaagaggtgcacagcggcgtgtgtaccgacccccagccactgaaagaacagcccgccctgaacgacagccggtactgcctgagcagcagactgagagtgtccgccaccttctggcagaacccccggaaccacttcagatgccaggtgcagttctacggcctgagcgagaacgacgagtggacccaggacagagccaagcccgtgacccagatcgtgtctgccgaagcctggggcagagccgattgcggctttaccagcgagagctaccagcagggcgtgctgagcgccaccatcctgtacgagatcctgctgggcaaggccaccctgtacgccgtgctggtgtctgccctggtgctgatggctatggtcaagcggaaggacagccggggaagggccaagcgatctggatctggagcaacaaacttctcactactcaaacaagcaggtgacgtggaggagaatcccgggccttctagaggcgggatccacaccatggctacctacgaggtgctgtgcgaggtggcaagaaagctgggcaccgacgacagagaagtggtgctgttcctgctgaacgtgttcatccctcagcctacactggcccagctgatcggtgcactgagagccctgaaagaggaaggccggctgacctttcctctgctggccgaatgcctgttcagagccggaagaagggatctgctgcgggacctgctgcatctggaccccagatttctggaaagacacctggccggcaccatgagctacttcagcccttaccagctgaccgtgctgcacgttgacggcgaactgtgcgccagagatattcggagcctgatcttcctgagcaaggacaccatcggcagccggtctacccctcagacatttctgcactgggtgtactgcatggaaaacctggacctgctcggccccacagatgtggatgccctgatgtccatgctgagaagcctgagcagagtggacctccagagacaggtgcagacactgatgggactgcacctgagcggacctagccacagccagcactacagacacacccct

SEQ ID NO: 3997 - DNA, 2964 bp, Artificial Sequence
  Synthetic Polynucloetide
atggccttaccagtgaccgccttgctcctgccgctggccttgctgctccacgccgccaggccgaatgctggcgtgacccagacacctaagttccaggtgctgaaaaccggccagagcatgaccctgcaatgcgcccaggacatgaaccatgagtacatgagctggtacagacaggaccccggcatgggcctgagactgatccactactctgtggctatccagaccaccgaccagggcgaagtgcccaatggctacaacgtgtccagaagcaccatcgaggacttcccactgagactgctgtctgccgctcctagccagaccagcgtgtacttttgtgccagcagctacctgggcaacaccggcgagctgttttttggcgagggcagcagactgaccgtgctcgaggacctgaagaacgtgttcccacctgaggtggccgtgttcgagcctagcgaggccgagatcagccacacccagaaagccaccctcgtgtgcctggctaccggcttctaccccgaccatgtggaactgtcttggtgggtcaacggcaaagaggtgcacagcggcgtgtctaccgacccccagccactgaaagaacagcccgccctgaacgacagccggtactgcctgagcagcagactgagagtgtccgccaccttctggcagaacccccggaaccacttcagatgccaggtgcagttctacggcctgagcgagaacgacgagtggacccaggacagagccaagcccgtgacccagatcgtgtctgccgaagcctggggcagagccgattgcggctttaccagcgagagctaccagcagggcgtgctgagcgccaccatcctgtacgagatcctgctgggcaaggccaccctgtacgccgtgctggtgtctgccctggtgctgatggctatggtcaagcggaaggacagccggggaagggccaagcgatctggatctggagcaacaaacttctcactactcaaacaagcaggtgacgtggaggagaatcccgggcctactagtatggactggatttggcgcatccttttccttgtcggcgctgctaccggcgcccattccgggccccaggttcagctgcaagagtctggcggaggacttgctcaagctggcggaagcctgagactgtcttgtgccgcctctggcagaaccttcagcatgggctggtttagacaggcccctggcaaagagagagagttcgtcgccgccatcacatacagcggcggcagcccttactacgcctcttctgtcagaggccggttcaccatcagccgggacaacgccaagaacaccgtgtacctccagatgaacagcctgaagccagaggacaccgccgtgtactactgtgccgccaatccaacctacggcagcgactggaatgccgagaattggggccagggcacccaagtgacagtgtctagtggatccggcggcggaggatctggcggaggcggatctgggggcggaggctctttcgaacaagaagtgacacagatccctgccgctctgtctgtgcctgagggcgaaaacctggtgctgaactgctccttcaccgacagcgccatctacaacctccagtggttcaggcaggaccctggaaagggactgacaagcctgctgctgatccagagcagccagagagagcagacctccggcagactgaatgccagcctggataagagcagcggcaggtctaccctgtatatcgccgcttctcagcctggcgatagcgccacatatctgtgtgctgtgcggcctacaagcggcggcagctacatccctacatttggcagaggcaccagcctgatcgtgcacccttatatccagaaccctgatcctgccgtgtaccagctgcgggatagcaagagcagcgacaagagcgtgtgtctgttcaccgacttcgacagccagaccaacgtgtcccagagcaaggactccgacgtgtacatcaccgataagaccgtgctggacatgcggagcatggacttcaagagcaactccgccgtggcctggtccaacaagtccgatttcgcctgcgccaacgccttcaacaacagcattatccccgaggacacattcttcccaagccccgagagcagctgcgacgtgaagctggtggaaaagagcttcgagacagacaccaacctgaacttccagaacctgagcgtgatcggcttcagaatcctgctgctgaaagtggccggctttaacctgctgatgaccctgcggctgtggtccagccgcgccaagagaagcggatctggcgtgaagcagaccctgaatttcgacctgctgaagctggctggcgacgtggaatccaacccaggcccttctagaggccatatgaccgagtacaagcccacggtgcgcctcgccacccgcgacgacgtccccagggccgtacgcaccctcgccgccgcgttcgccgactaccccgccacgcgccacaccgtcgatccggaccgccacatcgagcgggtcaccgagctgcaagaactcttcctcacgcgcgtcgggctcgacatcggcaaggtgtgggtcgcggacgacggcgccgcggtggcggtctggaccacgccggagagcgtcgaagcgggggcggtgttcgccgagatcggcccgcgcatggccgagttgagcggttcccggctggccgcgcagcaacagatggaaggcctcctggcgccgcaccggcccaaggagcccgcgtggttcctggccaccgtcggcgtctcgcccgaccaccagggcaagggtctgggcagcgccgtcgtgctccccggagtggaggcggccgagcgcgccggggtgcccgccttcctggagacctccgcgccccgcaacctccccttctacgagcggctcggcttcaccgtcaccgccgacgtcgaggtgcccgaaggaccgcgcacctggtgcatgacccgcaagcccggtgcctga

SEQ ID NO: 3998 - DNA, 3210 bp, Artificial Sequence
  Synthetic Polynucloetide
atggccttaccagtgaccgccttgctcctgccgctggccttgctgctccacgccgccaggccgaatgctggcgtgacccagacacctaagttccaggtgctgaaaaccggccagagcatgaccctgcaatgcgcccaggacatgaaccatgagtacatgagctggtacagacaggaccccggcatgggcctgagactgatccactactctgtggctatccagaccaccgaccagggcgaagtgcccaatggctacaacgtgtccagaagcaccatcgaggacttcccactgagactgctgtctgccgctcctagccagaccagcgtgtacttttgtgccagcagctacctgggcaacaccggcgagctgttttttggcgagggcagcagactgaccgtgctcgaggacctgaagaacgtgttcccacctgaggtggccgtgttcgagcctagcgaggccgagatcagccacacccagaaagccaccctcgtgtgcctggctaccggcttctaccccgaccatgtggaactgtcttggtgggtcaacggcaaagaggtgcacagcggcgtgtctaccgacccccagccactgaaagaacagcccgccctgaacgacagccggtactgcctgagcagcagactgagagtgtccgccaccttctggcagaacccccggaaccacttcagatgccaggtgcagttctacggcctgagcgagaacgacgagtggacccaggacagagccaagcccgtgacccagatcgtgtctgccgaagcctggggcagagccgattgcggctttaccagcgagagctaccagcagggcgtgctgagcgccaccatcctgtacgagatcctgctgggcaaggccaccctgtacgccgtgctggtgtctgccctggtgctgatggctatggtcaagcggaaggacagccggggaagggccaagcgatctggatctggagcaacaaacttctcactactcaaacaagcaggtgacgtggaggagaatcccgggcctactagtatggactggatttggcgcatccttttccttgtcggcgctgctaccggcgcccattccgggccccaggttcagctgcaagagtctggcggaggacttgctcaagctggcggaagcctgagactgtcttgtgccgcctctggcagaaccttcagcatgggctggtttagacaggcccctggcaaagagagagagttcgtcgccgccatcacatacagcggcggcagcccttactacgcctcttctgtcagaggccggttcaccatcagccgggacaacgccaagaacaccgtgtacctccagatgaacagcctgaagccagaggacaccgccgtgtactactgtgccgccaatccaacctacggcagcgactggaatgccgagaattggggccagggcacccaagtgacagtgtctagtggatccggcggcggaggatctggcggaggcggatctgggggcggaggctctttcgaacaagaagtgacacagatccctgccgctctgtctgtgcctgagggcgaaaacctggtgctgaactgctccttcaccgacagcgccatctacaacctccagtggttcaggcaggaccctggaaagggactgacaagcctgctgctgatccagagcagccagagagagcagacctccggcagactgaatgccagcctggataagagcagcggcaggtctaccctgtatatcgccgcttctcagcctggcgatagcgccacatatctgtgtgctgtgcggcctacaagcggcggcagctacatccctacatttggcagaggcaccagcctgatcgtgcacccttatgagcagaaactgatctcggaagaggatgggagcggcaccccattcccttctctggcccctcccatcatgctgctggtggacggcaagcagcagatggtggtcgtgtgcctggtgctggatgtggccccacctggactggacagccccatctggtttagcgccggcaatggctctgccctggacgcctttacctacggcccaagccctgccaccgatggcacctggacaaatctggcccacctgagcctgcccagcgaggaactggcttcttgggagcctctcgtgtgccacacaggacctggcgctgagggacacagcagatccacccagcctatgcacctgtctggcgaggccagcaccgccagaacctgtcctcaggaacctctgagaggcacccctggcggagcactgtggctgggagtgctgagactgctgctgttcaagctgctgctgtttgacctgctgctgacctgctcctgtctgtgcgatcctgccggccctctgccttctcctgccaccaccacaagactgagagccctgggcagccacagactgcaccctgccacagagacaggcggcagagaggccacaagcagccctagaccccagcccagagacagaagatggggcgataccccccctggcagaaagcctggatctccagtccgcgccaagagaagcggatctggcgtgaagcagaccctgaatttcgacctgctgaagctggctggcgacgtggaatccaacccaggcccttctagaggccatatgaccgagtacaagcccacggtgcgcctcgccacccgcgacgacgtccccagggccgtacgcaccctcgccgccgcgttcgccgactaccccgccacgcgccacaccgtcgatccggaccgccacatcgagcgggtcaccgagctgcaagaactcttcctcacgcgcgtcgggctcgacatcggcaaggtgtgggtcgcggacgacggcgccgcggtggcggtctggaccacgccggagagcgtcgaagcgggggcggtgttcgccgagatcggcccgcgcatggccgagttgagcggttcccggctggccgcgcagcaacagatggaaggcctcctggcgccgcaccggcccaaggagcccgcgtggttcctggccaccgtcggcgtctcgcccgaccaccagggcaagggtctgggcagcgccgtcgtgctccccggagtggaggcggccgagcgcgccggggtgcccgccttcctggagacctccgcgccccgcaacctccccttctacgagcggctcggcttcaccgtcaccgccgacgtcgaggtgcccgaaggaccgcgcacctggtgcatgacccgcaagcccggtgcctga

SEQ ID NO: 3999 - DNA, 3075 bp, Artificial Sequence
  Synthetic Polynucloetide
atggccttaccagtgaccgccttgctcctgccgctggccttgctgctccacgccgccaggccgaatgctggcgtgacccagacacctaagttccaggtgctgaaaaccggccagagcatgaccctgcaatgcgcccaggacatgaaccatgagtacatgagctggtacagacaggaccccggcatgggcctgagactgatccactactctgtggctatccagaccaccgaccagggcgaagtgcccaatggctacaacgtgtccagaagcaccatcgaggacttcccactgagactgctgtctgccgctcctagccagaccagcgtgtacttttgtgccagcagctacctgggcaacaccggcgagctgttttttggcgagggcagcagactgaccgtgctcgaggggaaaccaattcccaaccctcttctgggactggattcaaccggcagcggcgacaagcagctggacgccgacgtgtcccccaagcctaccatcttcctgccctctatcgccgagacaaagctccagaaggccggcacctacctgtgcctgctggaaaagttcttcccagatgtgattaagatccactggcaggaaaagaagtccaacaccatcctgggcagccaggaaggcaacaccatgaagaccaacgacacctacatgaagttcagctggctgaccgtgcccgagaagtccctggacaaagaacacagatgcatcgtgcggcacgaaaacaacaagaacggcgtggaccaggaaatcatcttcccacccatcaagaccgatgtgattacaatggaccccaaggacaactgctccaaggacgccaacgataccctgctgctccagctgaccaacaccagcgcctactacatgtacttgttgctgctgctgaagtccgtggtgtacttcgccatcatcacatgctgcctgctgcggagaaccgccttctgctgcaacggcgagaagtctagggccaagcgatctggatctggagcaacaaacttctcactactcaaacaagcaggtgacgtggaggagaatcccgggcctactagtatggactggatttggcgcatccttttccttgtcggcgctgctaccggcgcccattccgggccccaggttcagctgcaagagtctggcggaggacttgctcaagctggcggaagcctgagactgtcttgtgccgcctctggcagaaccttcagcatgggctggtttagacaggcccctggcaaagagagagagttcgtcgccgccatcacatacagcggcggcagcccttactacgcctcttctgtcagaggccggttcaccatcagccgggacaacgccaagaacaccgtgtacctccagatgaacagcctgaagccagaggacaccgccgtgtactactgtgccgccaatccaacctacggcagcgactggaatgccgagaattggggccagggcacccaagtgacagtgtctagtggatccggcggcggaggatctggcggaggcggatctgggggcggaggctctttcgaacaagaagtgacacagatccctgccgctctgtctgtgcctgagggcgaaaacctggtgctgaactgctccttcaccgacagcgccatctacaacctccagtggttcaggcaggaccctggaaagggactgacaagcctgctgctgatccagagcagccagagagagcagacctccggcagactgaatgccagcctggataagagcagcggcaggtctaccctgtatatcgccgcttctcagcctggcgatagcgccacatatctgtgtgctgtgcggcctacaagcggcggcagctacatccctacatttggcagaggcaccagcctgatcgtgcacccttatgagcagaaactgatctcggaagaggatgggagcggcagccagcctcacaccaagcccagcgtgttcgtgatgaagaacggcaccaacgtggcctgcctcgtgaaagagttctaccccaaggacatcaggatcaacctggtgtccagcaagaagatcaccgagttcgaccccgccatcgtgatctcccccagcggcaagtacaacgccgtgaagctggggaagtacgaggacagcaacagcgtgacctgctccgtgcagcacgacaacaagaccgtgcacagcaccgactttgaagtgaaaaccgactccaccgaccacgtgaagcccaaagagacagagaacaccaagcagcccagcaagagctgccacaagcccaaggccatcgtgcacaccgagaaagtgaacatgatgagcctgaccgtgctgggcctgcggatgctgttcgccaaaaccgtggccgtgaacttcctgctgaccgccaagctgttcttcctccgcgccaagagaagcggatctggcgtgaagcagaccctgaatttcgacctgctgaagctggctggcgacgtggaatccaacccaggcccttctagaggccatatgaccgagtacaagcccacggtgcgcctcgccacccgcgacgacgtccccagggccgtacgcaccctcgccgccgcgttcgccgactaccccgccacgcgccacaccgtcgatccggaccgccacatcgagcgggtcaccgagctgcaagaactcttcctcacgcgcgtcgggctcgacatcggcaaggtgtgggtcgcggacgacggcgccgcggtggcggtctggaccacgccggagagcgtcgaagcgggggcggtgttcgccgagatcggcccgcgcatggccgagttgagcggttcccggctggccgcgcagcaacagatggaaggcctcctggcgccgcaccggcccaaggagcccgcgtggttcctggccaccgtcggcgtctcgcccgaccaccagggcaagggtctgggcagcgccgtcgtgctccccggagtggaggcggccgagcgcgccggggtgcccgccttcctggagacctccgcgccccgcaacctccccttctacgagcggctcggcttcaccgtcaccgccgacgtcgaggtgcccgaaggaccgcgcacctggtgcatgacccgcaagcccggtgcctga

SEQ ID NO: 4000 - DNA, 2286 bp, Artificial Sequence
  Synthetic Polynucloetide
atggccttaccagtgaccgccttgctcctgccgctggccttgctgctccacgccgccaggccgaatgctggcgtgacccagacacctaagttccaggtgctgaaaaccggccagagcatgaccctgcaatgcgcccaggacatgaaccatgagtacatgagctggtacagacaggaccccggcatgggcctgagactgatccactactctgtggctatccagaccaccgaccagggcgaagtgcccaatggctacaacgtgtccagaagcaccatcgaggacttcccactgagactgctgtctgccgctcctagccagaccagcgtgtacttttgtgccagcagctacctgggcaacaccggcgagctgttttttggcgagggcagcagactgaccgtgctcgagagccagcctcacaccaagcccagcgtgttcgtgatgaagaacggcaccaacgtggcctgcctcgtgaaagagttctaccccaaggacatcaggatcaacctggtgtccagcaagaagatcaccgagttcgaccccgccatcgtgatctcccccagcggcaagtacaacgccgtgaagctggggaagtacgaggacagcaacagcgtgacctgctccgtgcagcacgacaacaagaccgtgcacagcaccgactttgaagtgaaaaccgactccaccgaccacgtgaagcccaaagagacagagaacaccaagcagcccagcaagagctgccacaagcccaaggccatcgtgcacaccgagaaagtgaacatgatgagcctgaccgtgctgggcctgcggatgctgttcgccaaaaccgtggccgtgaacttcctgctgaccgccaagctgttcttcctcagggccaagcgatctggatctggagcaacaaacttctcactactcaaacaagcaggtgacgtggaggagaatcccgggcctactagtatggactggatttggcgcatccttttccttgtcggcgctgctaccggcgcccattccgggccccaggttcagctgcaagagtctggcggaggacttgctcaagctggcggaagcctgagactgtcttgtgccgcctctggcagaaccttcagcatgggctggtttagacaggcccctggcaaagagagagagttcgtcgccgccatcacatacagcggcggcagcccttactacgcctcttctgtcagaggccggttcaccatcagccgggacaacgccaagaacaccgtgtacctccagatgaacagcctgaagccagaggacaccgccgtgtactactgtgccgccaatccaacctacggcagcgactggaatgccgagaattggggccagggcacccaagtgacagtgtctagtggatccggcggcggaggatctggcggaggcggatctgggggcggaggctctttcgaacaagaagtgacacagatccctgccgctctgtctgtgcctgagggcgaaaacctggtgctgaactgctccttcaccgacagcgccatctacaacctccagtggttcaggcaggaccctggaaagggactgacaagcctgctgctgatccagagcagccagagagagcagacctccggcagactgaatgccagcctggataagagcagcggcaggtctaccctgtatatcgccgcttctcagcctggcgatagcgccacatatctgtgtgctgtgcggcctacaagcggcggcagctacatccctacatttggcagaggcaccagcctgatcgtgcacccttatgacaagcagctggacgccgacgtgtcccccaagcctaccatcttcctgccctctatcgccgagacaaagctccagaaggccggcacctacctgtgcctgctggaaaagttcttcccagatgtgattaagatccactggcaggaaaagaagtccaacaccatcctgggcagccaggaaggcaacaccatgaagaccaacgacacctacatgaagttcagctggctgaccgtgcccgagaagtccctggacaaagaacacagatgcatcgtgcggcacgaaaacaacaagaacggcgtggaccaggaaatcatcttcccacccatcaagaccgatgtgattacaatggaccccaaggacaactgctccaaggacgccaacgataccctgctgctccagctgaccaacaccagcgcctactacatgtacttgttgctgctgctgaagtccgtggtgtacttcgccatcatcacatgctgcctgctgcggagaaccgccttctgctgcaacggcgagaagtct

SEQ ID NO: 4001 - DNA, 3501 bp, Artificial Sequence
  Synthetic Polynucloetide
atggccttaccagtgaccgccttgctcctgccgctggccttgctgctccacgccgccaggccgaatgctggcgtgacccagacacctaagttccaggtgctgaaaaccggccagagcatgaccctgcaatgcgcccaggacatgaaccatgagtacatgagctggtacagacaggaccccggcatgggcctgagactgatccactactctgtggctatccagaccaccgaccagggcgaagtgcccaatggctacaacgtgtccagaagcaccatcgaggacttcccactgagactgctgtctgccgctcctagccagaccagcgtgtacttttgtgccagcagctacctgggcaacaccggcgagctgttttttggcgagggcagcagactgaccgtgggacagcctaaggccaatcctaccgtgacactgttccctccaagcagcgaagaactccaggccaacaaggccacacttgtgtgcctgatctccgacttctaccctggggctgtgacagtggcttggaaggccgatggatctcctgtgaaagccggcgtggaaaccaccaagccatccaagcagagcaacaacaaatacgccgccagctcctacctgagcctgacacctgagcagtggaagtcccacagatcctacagctgccaagtgacccacgaaggcagcaccgtggaaaagacagtggcccctacagagtgcagcggatcccagagcttcggcctgctggaccccaagctgtgctacctgctggatggcatcctgttcatctacggcgtgatcctgaccgccctgttcctgagagtgaagttcagcagaagcgccgacgcccctgcctaccagcagggacagaaccaactgtacaacgagctgaacctgggcagacgggaagagtacgacgtgctggacaagcggagaggcagggaccctgagatgggcggaaagccccagcggagaaagaacccccaggaaggactgtataacgaactccagaaagacaagatggccgaagcctacagcgagatcggcatgaagggcgagcggagaagaggcaagggccacgatggcctgtaccagggcctgagcaccgccaccaaggacacctatgacgccctgcacatgcaggccctgcctccaagaagggccaagcgatctggatctggagcaacaaacttctcactactcaaacaagcaggtgacgtggaggagaatcccgggcctactagtatggactggatttggcgcatccttttccttgtcggcgctgctaccggcgcccattccgggccccaggttcagctgcaagagtctggcggaggacttgctcaagctggcggaagcctgagactgtcttgtgccgcctctggcagaaccttcagcatgggctggtttagacaggcccctggcaaagagagagagttcgtcgccgccatcacatacagcggcggcagcccttactacgcctcttctgtcagaggccggttcaccatcagccgggacaacgccaagaacaccgtgtacctccagatgaacagcctgaagccagaggacaccgccgtgtactactgtgccgccaatccaacctacggcagcgactggaatgccgagaattggggccagggcacccaagtgacagtgtctagtggatccggcggcggaggatctggcggaggcggatctgggggcggaggctctttcgaacaagaagtgacacagatccctgccgctctgtctgtgcctgagggcgaaaacctggtgctgaactgctccttcaccgacagcgccatctacaacctccagtggttcaggcaggaccctggaaagggactgacaagcctgctgctgatccagagcagccagagagagcagacctccggcagactgaatgccagcctggataagagcagcggcaggtctaccctgtatatcgccgcttctcagcctggcgatagcgccacatatctgtgtgctgtgcggcctacaagcggcggcagctacatccctacatttggcagaggcaccagcctgatcgtgcacccttatgcctctacaaagggaccctccgtgtttcctctggctcccagcagcaagtctacaagcggaggaacagccgctctgggctgcctggtcaaggattactttcccgagcctgtgaccgtgtcctggaatagcggagcactgacaagcggcgtgcacacctttccagccgtgctgcaaagcagcggcctgtactctctgagcagcgtggtcacagtgcctagctctagcctgggcacccagacctacatctgcaatgtgaaccacaagcctagcaacaccaaggtggacaagagagtggaacccaagagctgtggtacccagagttttgggttgttggaccctaaattgtgctatctgttggacggaatcctgttcatttacggagtgatcctgaccgcattgttcctgcgggttaagttttccagatccgcagacgcacccgcttaccaacaagggcagaaccaactctacaatgaacttaatttggggcggagggaagagtacgacgttctggacaaaaggaggggacgagatcccgagatgggcggaaagcctcagcgaaggaagaatccgcaagaggggctttataacgaactccagaaagataaaatggcagaagcctatagtgagattgggatgaagggagaaaggaggaggggtaaaggtcacgatgggttgtaccaaggattgagcacagccactaaagatacctatgatgcgctccacatgcaggccctgccgccaagacgcgccaagagaagcggatctggcgtgaagcagaccctgaatttcgacctgctgaagctggctggcgacgtggaatccaacccaggcccttctagaggccatatgaccgagtacaagcccacggtgcgcctcgccacccgcgacgacgtccccagggccgtacgcaccctcgccgccgcgttcgccgactaccccgccacgcgccacaccgtcgatccggaccgccacatcgagcgggtcaccgagctgcaagaactcttcctcacgcgcgtcgggctcgacatcggcaaggtgtgggtcgcggacgacggcgccgcggtggcggtctggaccacgccggagagcgtcgaagcgggggcggtgttcgccgagatcggcccgcgcatggccgagttgagcggttcccggctggccgcgcagcaacagatggaaggcctcctggcgccgcaccggcccaaggagcccgcgtggttcctggccaccgtcggcgtctcgcccgaccaccagggcaagggtctgggcagcgccgtcgtgctccccggagtggaggcggccgagcgcgccggggtgcccgccttcctggagacctccgcgccccgcaacctccccttctacgagcggctcggcttcaccgtcaccgccgacgtcgaggtgcccgaaggaccgcgcacctggtgcatgacccgcaagcccggtgcctga

SEQ ID NO: 4002 - DNA, 2850 bp, Artificial Sequence
  Synthetic Polynucloetide
atggccttaccagtgaccgccttgctcctgccgctggccttgctgctccacgccgccaggccgaatgctggcgtgacccagacacctaagttccaggtgctgaaaaccggccagagcatgaccctgcaatgcgcccaggacatgaaccatgagtacatgagctggtacagacaggaccccggcatgggcctgagactgatccactactctgtggctatccagaccaccgaccagggcgaagtgcccaatggctacaacgtgtccagaagcaccatcgaggacttcccactgagactgctgtctgccgctcctagccagaccagcgtgtacttttgtgccagcagctacctgggcaacaccggcgagctgttttttggcgagggcagcagactgaccgtgctcgaggacctgaagaacgtgttcccacctgaggtggccgtgttcgagcctagcgaggccgagatcagccacacccagaaagccaccctcgtgtgcctggctaccggcttctaccccgaccatgtggaactgtcttggtgggtcaacggcaaagaggtgcacagcggcgtgtctaccgacccccagccactgaaagaacagcccgccctgaacgacagccggtactgcctgagcagcagactgagagtgtccgccaccttctggcagaacccccggaaccacttcagatgccaggtgcagttctacggcctgagcgagaacgacgagtggacccaggacagagccaagcccgtgacccagatcgtgtctgccgaagcctggggcagagccgattgcggatcccagagcttcggcctgctggaccccaagctgtgctacctgctggatggcatcctgttcatctacggcgtgatcctgaccgccctgttcctgagagtgaagttcagcagaagcgccgacgcccctgcctaccagcagggacagaaccaactgtacaacgagctgaacctgggcagacgggaagagtacgacgtgctggacaagcggagaggcagggaccctgagatgggcggaaagccccagcggagaaagaacccccaggaaggactgtataacgaactccagaaagacaagatggccgaagcctacagcgagatcggcatgaagggcgagcggagaagaggcaagggccacgatggcctgtaccagggcctgagcaccgccaccaaggacacctatgacgccctgcacatgcaggccctgcctccaagaagggccaagcgatctggatctggagcaacaaacttctcactactcaaacaagcaggtgacgtggaggagaatcccgggcctactagtatggactggatttggcgcatccttttccttgtcggcgctgctaccggcgcccattccgggccccaggttcagctgcaagagtctggcggaggacttgctcaagctggcggaagcctgagactgtcttgtgccgcctctggcagaaccttcagcatgggctggtttagacaggcccctggcaaagagagagagttcgtcgccgccatcacatacagcggcggcagcccttactacgcctcttctgtcagaggccggttcaccatcagccgggacaacgccaagaacaccgtgtacctccagatgaacagcctgaagccagaggacaccgccgtgtactactgtgccgccaatccaacctacggcagcgactggaatgccgagaattggggccagggcacccaagtgacagtgtctagtggatccggcggcggaggatctggcggaggcggatctgggggcggaggctctttcgaacaagaagtgacacagatccctgccgctctgtctgtgcctgagggcgaaaacctggtgctgaactgctccttcaccgacagcgccatctacaacctccagtggttcaggcaggaccctggaaagggactgacaagcctgctgctgatccagagcagccagagagagcagacctccggcagactgaatgccagcctggataagagcagcggcaggtctaccctgtatatcgccgcttctcagcctggcgatagcgccacatatctgtgtgctgtgcggcctacaagcggcggcagctacatccctacatttggcagaggcaccagcctgatcgtgcacccttatatccagaaccctgatcctgccgtgtaccagctgcgggatagcaagagcagcgacaagagcgtgtgtctgttcaccgacttcgacagccagaccaacgtgtcccagagcaaggactccgacgtgtacatcaccgataagaccgtgctggacatgcggagcatggacttcaagagcaactccgccgtggcctggtccaacaagtccgatttcgcctgcgccaacgccttcaacaacagcattatccccgaggacacattcttcccaagccccgagagcagctgcggtacccagagttttgggttgttggaccctaaattgtgctatctgttggacggaatcctgttcatttacggagtgatcctgaccgcattgttcctgcgggttaagttttccagatccgcagacgcacccgcttaccaacaagggcagaaccaactctacaatgaacttaatttggggcggagggaagagtacgacgttctggacaaaaggaggggacgagatcccgagatgggcggaaagcctcagcgaaggaagaatccgcaagaggggctttataacgaactccagaaagataaaatggcagaagcctatagtgagattgggatgaagggagaaaggaggaggggtaaaggtcacgatgggttgtaccaaggattgagcacagccactaaagatacctatgatgcgctccacatgcaggccctgccgccaaga

SEQ ID NO: 4003 - DNA, 2850 bp, Artificial Sequence
  Synthetic Polynucloetide
atggccttaccagtgaccgccttgctcctgccgctggccttgctgctccacgccgccaggccgaatgctggcgtgacccagacacctaagttccaggtgctgaaaaccggccagagcatgaccctgcaatgcgcccaggacatgaaccatgagtacatgagctggtacagacaggaccccggcatgggcctgagactgatccactactctgtggctatccagaccaccgaccagggcgaagtgcccaatggctacaacgtgtccagaagcaccatcgaggacttcccactgagactgctgtctgccgctcctagccagaccagcgtgtacttttgtgccagcagctacctgggcaacaccggcgagctgttttttggcgagggcagcagactgaccgtgctcgaggacctgaagaacgtgttcccacctgaggtggccgtgttcgagcctagcaaggccgagatcgcccacacccagaaagccaccctcgtgtgcctggctaccggcttctaccccgaccatgtggaactgtcttggtgggtcaacggcaaagaggtgcacagcggcgtgtgtaccgacccccagccactgaaagaacagcccgccctgaacgacagccggtactgcctgagcagcagactgagagtgtccgccaccttctggcagaacccccggaaccacttcagatgccaggtgcagttctacggcctgagcgagaacgacgagtggacccaggacagagccaagcccgtgacccagatcgtgtctgccgaagcctggggcagagccgattgcggatcccagagcttcggcctgctggaccccaagctgtgctacctgctggatggcatcctgttcatctacggcgtgatcctgaccgccctgttcctgagagtgaagttcagcagaagcgccgacgcccctgcctaccagcagggacagaaccaactgtacaacgagctgaacctgggcagacgggaagagtacgacgtgctggacaagcggagaggcagggaccctgagatgggcggaaagccccagcggagaaagaacccccaggaaggactgtataacgaactccagaaagacaagatggccgaagcctacagcgagatcggcatgaagggcgagcggagaagaggcaagggccacgatggcctgtaccagggcctgagcaccgccaccaaggacacctatgacgccctgcacatgcaggccctgcctccaagaagggccaagcgatctggatctggagcaacaaacttctcactactcaaacaagcaggtgacgtggaggagaatcccgggcctactagtatggactggatttggcgcatccttttccttgtcggcgctgctaccggcgcccattccgggccccaggttcagctgcaagagtctggcggaggacttgctcaagctggcggaagcctgagactgtcttgtgccgcctctggcagaaccttcagcatgggctggtttagacaggcccctggcaaagagagagagttcgtcgccgccatcacatacagcggcggcagcccttactacgcctcttctgtcagaggccggttcaccatcagccgggacaacgccaagaacaccgtgtacctccagatgaacagcctgaagccagaggacaccgccgtgtactactgtgccgccaatccaacctacggcagcgactggaatgccgagaattggggccagggcacccaagtgacagtgtctagtggatccggcggcggaggatctggcggaggcggatctgggggcggaggctctttcgaacaagaagtgacacagatccctgccgctctgtctgtgcctgagggcgaaaacctggtgctgaactgctccttcaccgacagcgccatctacaacctccagtggttcaggcaggaccctggaaagggactgacaagcctgctgctgatccagagcagccagagagagcagacctccggcagactgaatgccagcctggataagagcagcggcaggtctaccctgtatatcgccgcttctcagcctggcgatagcgccacatatctgtgtgctgtgcggcctacaagcggcggcagctacatccctacatttggcagaggcaccagcctgatcgtgcacccttatatccagaaccctgatcctgccgtgtaccagctgcgggatagcaagagcagcgacaagagcgtgtgtctgttcaccgacttcgacagccagaccaacgtgtcccagagcaaggactccgacgtgtacatcaccgataagtgcgtgctggacatgcggagcatggacttcaagagcaactccgccgtggcctggtccaacaagtccgatttcgcctgcgccaacgccttcaacaacagcattatccccgaggacacattcttcccaagcagcgacgtgccctgcggtacccagagttttgggttgttggaccctaaattgtgctatctgttggacggaatcctgttcatttacggagtgatcctgaccgcattgttcctgcgggttaagttttccagatccgcagacgcacccgcttaccaacaagggcagaaccaactctacaatgaacttaatttggggcggagggaagagtacgacgttctggacaaaaggaggggacgagatcccgagatgggcggaaagcctcagcgaaggaagaatccgcaagaggggctttataacgaactccagaaagataaaatggcagaagcctatagtgagattgggatgaagggagaaaggaggaggggtaaaggtcacgatgggttgtaccaaggattgagcacagccactaaagatacctatgatgcgctccacatgcaggccctgccgccaaga

SEQ ID NO: 4004 - DNA, 3063 bp, Artificial Sequence
  Synthetic Polynucloetide
atggccttaccagtgaccgccttgctcctgccgctggccttgctgctccacgccgccaggccgaatgctggcgtgacccagacacctaagttccaggtgctgaaaaccggccagagcatgaccctgcaatgcgcccaggacatgaaccatgagtacatgagctggtacagacaggaccccggcatgggcctgagactgatccactactctgtggctatccagaccaccgaccagggcgaagtgcccaatggctacaacgtgtccagaagcaccatcgaggacttcccactgagactgctgtctgccgctcctagccagaccagcgtgtacttttgtgccagcagctacctgggcaacaccggcgagctgttttttggcgagggcagcagactgaccgtgctcgaggggaaaccaattcccaaccctcttctgggactggattcaaccggcagcggcgaggacctgaagaacgtgttcccacctgaggtggccgtgttcgagcctagcgaggccgagatcagccacacccagaaagccaccctcgtgtgcctggctaccggcttctaccccgaccatgtggaactgtcttggtgggtcaacggcaaagaggtgcacagcggcgtgtctaccgacccccagccactgaaagaacagcccgccctgaacgacagccggtactgcctgagcagcagactgagagtgtccgccaccttctggcagaacccccggaaccacttcagatgccaggtgcagttctacggcctgagcgagaacgacgagtggacccaggacagagccaagcccgtgacccagatcgtgtctgccgaagcctggggcagagccgattgcggatcccagagcttcggcctgctggaccccaagctgtgctacctgctggatggcatcctgttcatctacggcgtgatcctgaccgccctgttcctgagagtgaagttcagcagaagcgccgacgcccctgcctaccagcagggacagaaccaactgtacaacgagctgaacctgggcagacgggaagagtacgacgtgctggacaagcggagaggcagggaccctgagatgggcggaaagccccagcggagaaagaacccccaggaaggactgtataacgaactccagaaagacaagatggccgaagcctacagcgagatcggcatgaagggcgagcggagaagaggcaagggccacgatggcctgtaccagggcctgagcaccgccaccaaggacacctatgacgccctgcacatgcaggccctgcctccaagaagggccaagcgatctggatctggagcaacaaacttctcactactcaaacaagcaggtgacgtggaggagaatcccgggcctactagtatggactggatttggcgcatccttttccttgtcggcgctgctaccggcgcccattccgggccccaggttcagctgcaagagtctggcggaggacttgctcaagctggcggaagcctgagactgtcttgtgccgcctctggcagaaccttcagcatgggctggtttagacaggcccctggcaaagagagagagttcgtcgccgccatcacatacagcggcggcagcccttactacgcctcttctgtcagaggccggttcaccatcagccgggacaacgccaagaacaccgtgtacctccagatgaacagcctgaagccagaggacaccgccgtgtactactgtgccgccaatccaacctacggcagcgactggaatgccgagaattggggccagggcacccaagtgacagtgtctagtggatccggcggcggaggatctggcggaggcggatctgggggcggaggctctttcgaacaagaagtgacacagatccctgccgctctgtctgtgcctgagggcgaaaacctggtgctgaactgctccttcaccgacagcgccatctacaacctccagtggttcaggcaggaccctggaaagggactgacaagcctgctgctgatccagagcagccagagagagcagacctccggcagactgaatgccagcctggataagagcagcggcaggtctaccctgtatatcgccgcttctcagcctggcgatagcgccacatatctgtgtgctgtgcggcctacaagcggcggcagctacatccctacatttggcagaggcaccagcctgatcgtgcacccttatgagcagaaactgatctcggaagaggatgggagcggcatccagaaccctgatcctgccgtgtaccagctgcgggatagcaagagcagcgacaagagcgtgtgtctgttcaccgacttcgacagccagaccaacgtgtcccagagcaaggactccgacgtgtacatcaccgataagaccgtgctggacatgcggagcatggacttcaagagcaactccgccgtggcctggtccaacaagtccgatttcgcctgcgccaacgccttcaacaacagcattatccccgaggacacattcttcccaagccccgagagcagctgcggtacccagagttttgggttgttggaccctaaattgtgctatctgttggacggaatcctgttcatttacggagtgatcctgaccgcattgttcctgaggagcaagcggtcacggctgctccacagcgattacatgaatatgacaccacgaagaccgggtcctactcgcaaacactaccaaccctacgcacctccccgcgactttgcagcgtaccgatctcgggttaagttttccagatccgcagacgcacccgcttaccaacaagggcagaaccaactctacaatgaacttaatttggggcggagggaagagtacgacgttctggacaaaaggaggggacgagatcccgagatgggcggaaagcctcagcgaaggaagaatccgcaagaggggctttataacgaactccagaaagataaaatggcagaagcctatagtgagattgggatgaagggagaaaggaggaggggtaaaggtcacgatgggttgtaccaaggattgagcacagccactaaagatacctatgatgcgctccacatgcaggccctgccgccaaga

SEQ ID NO: 4005 - DNA, 3186 bp, Artificial Sequence
  Synthetic Polynucloetide
atggccttaccagtgaccgccttgctcctgccgctggccttgctgctccacgccgccaggccgaatgctggcgtgacccagacacctaagttccaggtgctgaaaaccggccagagcatgaccctgcaatgcgcccaggacatgaaccatgagtacatgagctggtacagacaggaccccggcatgggcctgagactgatccactactctgtggctatccagaccaccgaccagggcgaagtgcccaatggctacaacgtgtccagaagcaccatcgaggacttcccactgagactgctgtctgccgctcctagccagaccagcgtgtacttttgtgccagcagctacctgggcaacaccggcgagctgttttttggcgagggcagcagactgaccgtgctcgaggggaaaccaattcccaaccctcttctgggactggattcaaccggcagcggcgaggacctgaagaacgtgttcccacctgaggtggccgtgttcgagcctagcgaggccgagatcagccacacccagaaagccaccctcgtgtgcctggctaccggcttctaccccgaccatgtggaactgtcttggtgggtcaacggcaaagaggtgcacagcggcgtgtctaccgacccccagccactgaaagaacagcccgccctgaacgacagccggtactgcctgagcagcagactgagagtgtccgccaccttctggcagaacccccggaaccacttcagatgccaggtgcagttctacggcctgagcgagaacgacgagtggacccaggacagagccaagcccgtgacccagatcgtgtctgccgaagcctggggcagagccgattgcggatcccagagcttcggcctgctggaccccaagctgtgctacctgctggatggcatcctgttcatctacggcgtgatcctgaccgccctgttcctgaggagtaagaggagcaggctcctgcacagtgactacatgaacatgactccacgccgccccggacccacccgcaagcattaccagccctatgccccaccacgcgacttcgcagcctatcgctccagagtgaagttcagcagaagcgccgacgcccctgcctaccagcagggacagaaccaactgtacaacgagctgaacctgggcagacgggaagagtacgacgtgctggacaagcggagaggcagggaccctgagatgggcggaaagccccagcggagaaagaacccccaggaaggactgtataacgaactccagaaagacaagatggccgaagcctacagcgagatcggcatgaagggcgagcggagaagaggcaagggccacgatggcctgtaccagggcctgagcaccgccaccaaggacacctatgacgccctgcacatgcaggccctgcctccaagaagggccaagcgatctggatctggagcaacaaacttctcactactcaaacaagcaggtgacgtggaggagaatcccgggcctactagtatggactggatttggcgcatccttttccttgtcggcgctgctaccggcgcccattccgggccccaggttcagctgcaagagtctggcggaggacttgctcaagctggcggaagcctgagactgtcttgtgccgcctctggcagaaccttcagcatgggctggtttagacaggcccctggcaaagagagagagttcgtcgccgccatcacatacagcggcggcagcccttactacgcctcttctgtcagaggccggttcaccatcagccgggacaacgccaagaacaccgtgtacctccagatgaacagcctgaagccagaggacaccgccgtgtactactgtgccgccaatccaacctacggcagcgactggaatgccgagaattggggccagggcacccaagtgacagtgtctagtggatccggcggcggaggatctggcggaggcggatctgggggcggaggctctttcgaacaagaagtgacacagatccctgccgctctgtctgtgcctgagggcgaaaacctggtgctgaactgctccttcaccgacagcgccatctacaacctccagtggttcaggcaggaccctggaaagggactgacaagcctgctgctgatccagagcagccagagagagcagacctccggcagactgaatgccagcctggataagagcagcggcaggtctaccctgtatatcgccgcttctcagcctggcgatagcgccacatatctgtgtgctgtgcggcctacaagcggcggcagctacatccctacatttggcagaggcaccagcctgatcgtgcacccttatgagcagaaactgatctcggaagaggatgggagcggcatccagaaccctgatcctgccgtgtaccagctgcgggatagcaagagcagcgacaagagcgtgtgtctgttcaccgacttcgacagccagaccaacgtgtcccagagcaaggactccgacgtgtacatcaccgataagaccgtgctggacatgcggagcatggacttcaagagcaactccgccgtggcctggtccaacaagtccgatttcgcctgcgccaacgccttcaacaacagcattatccccgaggacacattcttcccaagccccgagagcagctgcggtacccagagttttgggttgttggaccctaaattgtgctatctgttggacggaatcctgttcatttacggagtgatcctgaccgcattgttcctgaggagcaagcggtcacggctgctccacagcgattacatgaatatgacaccacgaagaccgggtcctactcgcaaacactaccaaccctacgcacctccccgcgactttgcagcgtaccgatctcgggttaagttttccagatccgcagacgcacccgcttaccaacaagggcagaaccaactctacaatgaacttaatttggggcggagggaagagtacgacgttctggacaaaaggaggggacgagatcccgagatgggcggaaagcctcagcgaaggaagaatccgcaagaggggctttataacgaactccagaaagataaaatggcagaagcctatagtgagattgggatgaagggagaaaggaggaggggtaaaggtcacgatgggttgtaccaaggattgagcacagccactaaagatacctatgatgcgctccacatgcaggccctgccgccaaga

SEQ ID NO: 4006 - DNA, 3069 bp, Artificial Sequence
  Synthetic Polynucloetide
atggccttaccagtgaccgccttgctcctgccgctggccttgctgctccacgccgccaggccgaatgctggcgtgacccagacacctaagttccaggtgctgaaaaccggccagagcatgaccctgcaatgcgcccaggacatgaaccatgagtacatgagctggtacagacaggaccccggcatgggcctgagactgatccactactctgtggctatccagaccaccgaccagggcgaagtgcccaatggctacaacgtgtccagaagcaccatcgaggacttcccactgagactgctgtctgccgctcctagccagaccagcgtgtacttttgtgccagcagctacctgggcaacaccggcgagctgttttttggcgagggcagcagactgaccgtgctcgaggggaaaccaattcccaaccctcttctgggactggattcaaccggcagcggcgaggacctgaagaacgtgttcccacctgaggtggccgtgttcgagcctagcgaggccgagatcagccacacccagaaagccaccctcgtgtgcctggctaccggcttctaccccgaccatgtggaactgtcttggtgggtcaacggcaaagaggtgcacagcggcgtgtctaccgacccccagccactgaaagaacagcccgccctgaacgacagccggtactgcctgagcagcagactgagagtgtccgccaccttctggcagaacccccggaaccacttcagatgccaggtgcagttctacggcctgagcgagaacgacgagtggacccaggacagagccaagcccgtgacccagatcgtgtctgccgaagcctggggcagagccgattgcggatcccagagcttcggcctgctggaccccaagctgtgctacctgctggatggcatcctgttcatctacggcgtgatcctgaccgccctgttcctgagagtgaagttcagcagaagcgccgacgcccctgcctaccagcagggacagaaccaactgtacaacgagctgaacctgggcagacgggaagagtacgacgtgctggacaagcggagaggcagggaccctgagatgggcggaaagccccagcggagaaagaacccccaggaaggactgtataacgaactccagaaagacaagatggccgaagcctacagcgagatcggcatgaagggcgagcggagaagaggcaagggccacgatggcctgtaccagggcctgagcaccgccaccaaggacacctatgacgccctgcacatgcaggccctgcctccaagaagggccaagcgatctggatctggagcaacaaacttctcactactcaaacaagcaggtgacgtggaggagaatcccgggcctactagtatggactggatttggcgcatccttttccttgtcggcgctgctaccggcgcccattccgggccccaggttcagctgcaagagtctggcggaggacttgctcaagctggcggaagcctgagactgtcttgtgccgcctctggcagaaccttcagcatgggctggtttagacaggcccctggcaaagagagagagttcgtcgccgccatcacatacagcggcggcagcccttactacgcctcttctgtcagaggccggttcaccatcagccgggacaacgccaagaacaccgtgtacctccagatgaacagcctgaagccagaggacaccgccgtgtactactgtgccgccaatccaacctacggcagcgactggaatgccgagaattggggccagggcacccaagtgacagtgtctagtggatccggcggcggaggatctggcggaggcggatctgggggcggaggctctttcgaacaagaagtgacacagatccctgccgctctgtctgtgcctgagggcgaaaacctggtgctgaactgctccttcaccgacagcgccatctacaacctccagtggttcaggcaggaccctggaaagggactgacaagcctgctgctgatccagagcagccagagagagcagacctccggcagactgaatgccagcctggataagagcagcggcaggtctaccctgtatatcgccgcttctcagcctggcgatagcgccacatatctgtgtgctgtgcggcctacaagcggcggcagctacatccctacatttggcagaggcaccagcctgatcgtgcacccttatgagcagaaactgatctcggaagaggatctggggagcggcatccagaaccctgatcctgccgtgtaccagctgcgggatagcaagagcagcgacaagagcgtgtgtctgttcaccgacttcgacagccagaccaacgtgtcccagagcaaggactccgacgtgtacatcaccgataagaccgtgctggacatgcggagcatggacttcaagagcaactccgccgtggcctggtccaacaagtccgatttcgcctgcgccaacgccttcaacaacagcattatccccgaggacacattcttcccaagccccgagagcagctgcggtacccagagttttgggttgttggaccctaaattgtgctatctgttggacggaatcctgttcatttacggagtgatcctgaccgcattgttcctgaagagaggccggaagaagctgctgtacatcttcaagcagcctttcatgcggcccgtgcagaccacccaggaagaggacggctgctcctgccggttccccgaggaagaagaaggcggctgcgagctgcgggttaagttttccagatccgcagacgcacccgcttaccaacaagggcagaaccaactctacaatgaacttaatttggggcggagggaagagtacgacgttctggacaaaaggaggggacgagatcccgagatgggcggaaagcctcagcgaaggaagaatccgcaagaggggctttataacgaactccagaaagataaaatggcagaagcctatagtgagattgggatgaagggagaaaggaggaggggtaaaggtcacgatgggttgtaccaaggattgagcacagccactaaagatacctatgatgcgctccacatgcaggccctgccgccaaga

SEQ ID NO: 4007 - DNA, 3195 bp, Artificial Sequence
  Synthetic Polynucloetide
atggccttaccagtgaccgccttgctcctgccgctggccttgctgctccacgccgccaggccgaatgctggcgtgacccagacacctaagttccaggtgctgaaaaccggccagagcatgaccctgcaatgcgcccaggacatgaaccatgagtacatgagctggtacagacaggaccccggcatgggcctgagactgatccactactctgtggctatccagaccaccgaccagggcgaagtgcccaatggctacaacgtgtccagaagcaccatcgaggacttcccactgagactgctgtctgccgctcctagccagaccagcgtgtacttttgtgccagcagctacctgggcaacaccggcgagctgttttttggcgagggcagcagactgaccgtgctcgaggggaaaccaattcccaaccctcttctgggactggattcaaccggcagcggcgaggacctgaagaacgtgttcccacctgaggtggccgtgttcgagcctagcgaggccgagatcagccacacccagaaagccaccctcgtgtgcctggctaccggcttctaccccgaccatgtggaactgtcttggtgggtcaacggcaaagaggtgcacagcggcgtgtctaccgacccccagccactgaaagaacagcccgccctgaacgacagccggtactgcctgagcagcagactgagagtgtccgccaccttctggcagaacccccggaaccacttcagatgccaggtgcagttctacggcctgagcgagaacgacgagtggacccaggacagagccaagcccgtgacccagatcgtgtctgccgaagcctggggcagagccgattgcggatcccagagcttcggcctgctggaccccaagctgtgctacctgctggatggcatcctgttcatctacggcgtgatcctgaccgccctgttcctgaaacggggcagaaagaaactcctgtatatattcaaacaaccatttatgagaccagtacaaactactcaagaggaagatggctgtagctgccgatttccagaagaagaagaaggaggatgtgaactgagagtgaagttcagcagaagcgccgacgcccctgcctaccagcagggacagaaccaactgtacaacgagctgaacctgggcagacgggaagagtacgacgtgctggacaagcggagaggcagggaccctgagatgggcggaaagccccagcggagaaagaacccccaggaaggactgtataacgaactccagaaagacaagatggccgaagcctacagcgagatcggcatgaagggcgagcggagaagaggcaagggccacgatggcctgtaccagggcctgagcaccgccaccaaggacacctatgacgccctgcacatgcaggccctgcctccaagaagggccaagcgatctggatctggagcaacaaacttctcactactcaaacaagcaggtgacgtggaggagaatcccgggcctactagtatggactggatttggcgcatccttttccttgtcggcgctgctaccggcgcccattccgggccccaggttcagctgcaagagtctggcggaggacttgctcaagctggcggaagcctgagactgtcttgtgccgcctctggcagaaccttcagcatgggctggtttagacaggcccctggcaaagagagagagttcgtcgccgccatcacatacagcggcggcagcccttactacgcctcttctgtcagaggccggttcaccatcagccgggacaacgccaagaacaccgtgtacctccagatgaacagcctgaagccagaggacaccgccgtgtactactgtgccgccaatccaacctacggcagcgactggaatgccgagaattggggccagggcacccaagtgacagtgtctagtggatccggcggcggaggatctggcggaggcggatctgggggcggaggctctttcgaacaagaagtgacacagatccctgccgctctgtctgtgcctgagggcgaaaacctggtgctgaactgctccttcaccgacagcgccatctacaacctccagtggttcaggcaggaccctggaaagggactgacaagcctgctgctgatccagagcagccagagagagcagacctccggcagactgaatgccagcctggataagagcagcggcaggtctaccctgtatatcgccgcttctcagcctggcgatagcgccacatatctgtgtgctgtgcggcctacaagcggcggcagctacatccctacatttggcagaggcaccagcctgatcgtgcacccttatgagcagaaactgatctcggaagaggatctggggagcggcatccagaaccctgatcctgccgtgtaccagctgcgggatagcaagagcagcgacaagagcgtgtgtctgttcaccgacttcgacagccagaccaacgtgtcccagagcaaggactccgacgtgtacatcaccgataagaccgtgctggacatgcggagcatggacttcaagagcaactccgccgtggcctggtccaacaagtccgatttcgcctgcgccaacgccttcaacaacagcattatccccgaggacacattcttcccaagccccgagagcagctgcggtacccagagttttgggttgttggaccctaaattgtgctatctgttggacggaatcctgttcatttacggagtgatcctgaccgcattgttcctgaagagaggccggaagaagctgctgtacatcttcaagcagcctttcatgcggcccgtgcagaccacccaggaagaggacggctgctcctgccggttccccgaggaagaagaaggcggctgcgagctgcgggttaagttttccagatccgcagacgcacccgcttaccaacaagggcagaaccaactctacaatgaacttaatttggggcggagggaagagtacgacgttctggacaaaaggaggggacgagatcccgagatgggcggaaagcctcagcgaaggaagaatccgcaagaggggctttataacgaactccagaaagataaaatggcagaagcctatagtgagattgggatgaagggagaaaggaggaggggtaaaggtcacgatgggttgtaccaaggattgagcacagccactaaagatacctatgatgcgctccacatgcaggccctgccgccaaga

SEQ ID NO: 4008 - DNA, 2868 bp, Artificial Sequence
  Synthetic Polynucloetide
atggccttaccagtgaccgccttgctcctgccgctggccttgctgctccacgccgccaggccgaatgctggcgtgacccagacacctaagttccaggtgctgaaaaccggccagagcatgaccctgcaatgcgcccaggacatgaaccatgagtacatgagctggtacagacaggaccccggcatgggcctgagactgatccactactctgtggctatccagaccaccgaccagggcgaagtgcccaatggctacaacgtgtccagaagcaccatcgaggacttcccactgagactgctgtctgccgctcctagccagaccagcgtgtacttttgtgccagcagctacctgggcaacaccggcgagctgttttttggcgagggcagcagactgaccgtgctcgagcagagcttcggcctgctggaccccaagctgtgctacctgctggatggcatcctgttcatctacggcgtgatcctgaccgccctgttcctgagagtgaagttcagcagaagcgccgacgcccctgcctaccagcagggacagaaccaactgtacaacgagctgaacctgggcagacgggaagagtacgacgtgctggacaagcggagaggcagggaccctgagatgggcggaaagccccagcggagaaagaacccccaggaaggactgtataacgaactccagaaagacaagatggccgaagcctacagcgagatcggcatgaagggcgagcggagaagaggcaagggccacgatggcctgtaccagggcctgagcaccgccaccaaggacacctatgacgccctgcacatgcaggccctgcctccaagaagggccaagcgatctggatctggagcaacaaacttctcactactcaaacaagcaggtgacgtggaggagaatcccgggcctactagtatggactggatttggcgcatccttttccttgtcggcgctgctaccggcgcccattccgggccccaggttcagctgcaagagtctggcggaggacttgctcaagctggcggaagcctgagactgtcttgtgccgcctctggcagaaccttcagcatgggctggtttagacaggcccctggcaaagagagagagttcgtcgccgccatcacatacagcggcggcagcccttactacgcctcttctgtcagaggccggttcaccatcagccgggacaacgccaagaacaccgtgtacctccagatgaacagcctgaagccagaggacaccgccgtgtactactgtgccgccaatccaacctacggcagcgactggaatgccgagaattggggccagggcacccaagtgacagtgtctagtggatccggcggcggaggatctggcggaggcggatctgggggcggaggctctttcgaacaagaagtgacacagatccctgccgctctgtctgtgcctgagggcgaaaacctggtgctgaactgctccttcaccgacagcgccatctacaacctccagtggttcaggcaggaccctggaaagggactgacaagcctgctgctgatccagagcagccagagagagcagacctccggcagactgaatgccagcctggataagagcagcggcaggtctaccctgtatatcgccgcttctcagcctggcgatagcgccacatatctgtgtgctgtgcggcctacaagcggcggcagctacatccctacatttggcagaggcaccagcctgatcgtgcacccttatcagagttttgggttgttggaccctaaattgtgctatctgttggacggaatcctgttcatttacggagtgatcctgaccgcattgttcctgcgggttaagttttccagatccgcagacgcacccgcttaccaacaagggcagaaccaactctacaatgaacttaatttggggcggagggaagagtacgacgttctggacaaaaggaggggacgagatcccgagatgggcggaaagcctcagcgaaggaagaatccgcaagaggggctttataacgaactccagaaagataaaatggcagaagcctatagtgagattgggatgaagggagaaaggaggaggggtaaaggtcacgatgggttgtaccaaggattgagcacagccactaaagatacctatgatgcgctccacatgcaggccctgccgccaagacgcgccaagagaagcggatctggcgtgaagcagaccctgaatttcgacctgctgaagctggctggcgacgtggaatccaacccaggcccttctagaggccatatgaccgagtacaagcccacggtgcgcctcgccacccgcgacgacgtccccagggccgtacgcaccctcgccgccgcgttcgccgactaccccgccacgcgccacaccgtcgatccggaccgccacatcgagcgggtcaccgagctgcaagaactcttcctcacgcgcgtcgggctcgacatcggcaaggtgtgggtcgcggacgacggcgccgcggtggcggtctggaccacgccggagagcgtcgaagcgggggcggtgttcgccgagatcggcccgcgcatggccgagttgagcggttcccggctggccgcgcagcaacagatggaaggcctcctggcgccgcaccggcccaaggagcccgcgtggttcctggccaccgtcggcgtctcgcccgaccaccagggcaagggtctgggcagcgccgtcgtgctccccggagtggaggcggccgagcgcgccggggtgcccgccttcctggagacctccgcgccccgcaacctccccttctacgagcggctcggcttcaccgtcaccgccgacgtcgaggtgcccgaaggaccgcgcacctggtgcatgacccgcaagcccggtgcctga

SEQ ID NO: 4009 - DNA, 2340 bp, Artificial Sequence
  Synthetic Polynucloetide
atggccttaccagtgaccgccttgctcctgccgctggccttgctgctccacgccgccaggccgaatgctggcgtgacccagacacctaagttccaggtgctgaaaaccggccagagcatgaccctgcaatgcgcccaggacatgaaccatgagtacatgagctggtacagacaggaccccggcatgggcctgagactgatccactactctgtggctatccagaccaccgaccagggcgaagtgcccaatggctacaacgtgtccagaagcaccatcgaggacttcccactgagactgctgtctgccgctcctagccagaccagcgtgtacttttgtgccagcagctacctgggcaacaccggcgagctgttttttggcgagggcagcagactgaccgtgctcgagggacagcctaaggccaatcctaccgtgacactgttccctccaagcagcgaagaactccaggccaacaaggccacacttgtgtgcctgatctccgacttctaccctggggctgtgacagtggcttggaaggccgatggatctcctgtgaaagccggcgtggaaaccaccaagccatccaagcagagcaacaacaaatacgccgccagctcctacctgagcctgacacctgagcagtggaagtcccacagatcctacagctgccaagtgacccacgaaggcagcaccgtggaaaagacagtggcccctacagagtgcagccccatcaagaccgatgtgattacaatggaccccaaggacaactgctccaaggacgccaacgataccctgctgctccagctgaccaacaccagcgcctactacatgtacttgttgctgctgctgaagtccgtggtgtacttcgccatcatcacatgctgcctgctgcggagaaccgccttctgctgcaacggcgagaagtctagggccaagcgatctggatctggagcaacaaacttctcactactcaaacaagcaggtgacgtggaggagaatcccgggcctactagtatggactggatttggcgcatccttttccttgtcggcgctgctaccggcgcccattccgggccccaggttcagctgcaagagtctggcggaggacttgctcaagctggcggaagcctgagactgtcttgtgccgcctctggcagaaccttcagcatgggctggtttagacaggcccctggcaaagagagagagttcgtcgccgccatcacatacagcggcggcagcccttactacgcctcttctgtcagaggccggttcaccatcagccgggacaacgccaagaacaccgtgtacctccagatgaacagcctgaagccagaggacaccgccgtgtactactgtgccgccaatccaacctacggcagcgactggaatgccgagaattggggccagggcacccaagtgacagtgtctagtggatccggcggcggaggatctggcggaggcggatctgggggcggaggctctttcgaacaagaagtgacacagatccctgccgctctgtctgtgcctgagggcgaaaacctggtgctgaactgctccttcaccgacagcgccatctacaacctccagtggttcaggcaggaccctggaaagggactgacaagcctgctgctgatccagagcagccagagagagcagacctccggcagactgaatgccagcctggataagagcagcggcaggtctaccctgtatatcgccgcttctcagcctggcgatagcgccacatatctgtgtgctgtgcggcctacaagcggcggcagctacatccctacatttggcagaggcaccagcctgatcgtgcacccttatgcctctacaaagggaccctccgtgtttcctctggctcccagcagcaagtctacaagcggaggaacagccgctctgggctgcctggtcaaggattactttcccgagcctgtgaccgtgtcctggaatagcggagcactgacaagcggcgtgcacacctttccagccgtgctgcaaagcagcggcctgtactctctgagcagcgtggtcacagtgcctagctctagcctgggcacccagacctacatctgcaatgtgaaccacaagcctagcaacaccaaggtggacaagagagtggaacccaagagctgtgaagtgaaaaccgactccaccgaccacgtgaagcccaaagagacagagaacaccaagcagcccagcaagagctgccacaagcccaaggccatcgtgcacaccgagaaagtgaacatgatgagcctgaccgtgctgggcctgcggatgctgttcgccaaaaccgtggccgtgaacttcctgctgaccgccaagctgttcttcctc

SEQ ID NO: 4010 - DNA, 2274 bp, Artificial Sequence
  Synthetic Polynucloetide
atggccttaccagtgaccgccttgctcctgccgctggccttgctgctccacgccgccaggccgaatgctggcgtgacccagacacctaagttccaggtgctgaaaaccggccagagcatgaccctgcaatgcgcccaggacatgaaccatgagtacatgagctggtacagacaggaccccggcatgggcctgagactgatccactactctgtggctatccagaccaccgaccagggcgaagtgcccaatggctacaacgtgtccagaagcaccatcgaggacttcccactgagactgctgtctgccgctcctagccagaccagcgtgtacttttgtgccagcagctacctgggcaacaccggcgagctgttttttggcgagggcagcagactgaccgtgctcgagggacagcctaaggccaatcctaccgtgacactgttccctccaagcagcgaagaactccaggccaacaaggccacacttgtgtgcctgatctccgacttctaccctggggctgtgacagtggcttggaaggccgatggatctcctgtgaaagccggcgtggaaaccaccaagccatccaagcagagcaacaacaaatacgccgccagctcctacctgagcctgacacctgagcagtggaagtcccacagatcctacagctgccaagtgacccacgaaggcagcaccgtggaaaagacagtggcccctacagagtgcagcggcagagccgattgcggcatcaccagcgccagctaccaccagggcgtgctgagcgccaccatcctgtacgagatcctgctgggcaaggccaccctgtacgccgtgctggtgtctgccctggtgctgatggctatggtcaagcggaaggacagccggggaagggccaagcgatctggatctggagcaacaaacttctcactactcaaacaagcaggtgacgtggaggagaatcccgggcctactagtatggactggatttggcgcatccttttccttgtcggcgctgctaccggcgcccattccgggccccaggttcagctgcaagagtctggcggaggacttgctcaagctggcggaagcctgagactgtcttgtgccgcctctggcagaaccttcagcatgggctggtttagacaggcccctggcaaagagagagagttcgtcgccgccatcacatacagcggcggcagcccttactacgcctcttctgtcagaggccggttcaccatcagccgggacaacgccaagaacaccgtgtacctccagatgaacagcctgaagccagaggacaccgccgtgtactactgtgccgccaatccaacctacggcagcgactggaatgccgagaattggggccagggcacccaagtgacagtgtctagtggatccggcggcggaggatctggcggaggcggatctgggggcggaggctctttcgaacaagaagtgacacagatccctgccgctctgtctgtgcctgagggcgaaaacctggtgctgaactgctccttcaccgacagcgccatctacaacctccagtggttcaggcaggaccctggaaagggactgacaagcctgctgctgatccagagcagccagagagagcagacctccggcagactgaatgccagcctggataagagcagcggcaggtctaccctgtatatcgccgcttctcagcctggcgatagcgccacatatctgtgtgctgtgcggcctacaagcggcggcagctacatccctacatttggcagaggcaccagcctgatcgtgcacccttatgcctctacaaagggaccctccgtgtttcctctggctcccagcagcaagtctacaagcggaggaacagccgctctgggctgcctggtcaaggattactttcccgagcctgtgaccgtgtcctggaatagcggagcactgacaagcggcgtgcacacctttccagccgtgctgcaaagcagcggcctgtactctctgagcagcgtggtcacagtgcctagctctagcctgggcacccagacctacatctgcaatgtgaaccacaagcctagcaacaccaaggtggacaagagagtggaacccaagagctgtatccccgaggacacattcttcccaagcagcgacgtgccctgcgacgtgaagctggtggaaaagagcttcgagacagacaccaacctgaacttccagaacctgagcgtgatcggcttcagaatcctgctgctgaaagtggccggctttaacctgctgatgaccctgcggctgtggtccagc

SEQ ID NO: 4011 - DNA, 2274 bp, Artificial Sequence
  Synthetic Polynucloetide
atggccttaccagtgaccgccttgctcctgccgctggccttgctgctccacgccgccaggccgaatgctggcgtgacccagacacctaagttccaggtgctgaaaaccggccagagcatgaccctgcaatgcgcccaggacatgaaccatgagtacatgagctggtacagacaggaccccggcatgggcctgagactgatccactactctgtggctatccagaccaccgaccagggcgaagtgcccaatggctacaacgtgtccagaagcaccatcgaggacttcccactgagactgctgtctgccgctcctagccagaccagcgtgtacttttgtgccagcagctacctgggcaacaccggcgagctgttttttggcgagggcagcagactgaccgtgctcgagggacagcctaaggccaatcctaccgtgacactgttccctccaagcagcgaagaactccaggccaacaaggccacacttgtgtgcctgatctccgacttctaccctggggctgtgacagtggcttggaaggccgatggatctcctgtgaaagccggcgtggaaaccaccaagccatccaagcagagcaacaacaaatacgccgccagctcctacctgagcctgacacctgagcagtggaagtcccacagatcctacagctgccaagtgacccacgaaggcagcaccgtggaaaagacagtggcccctacagagtgcagcggcagagccgattgcggctttaccagcgagagctaccagcagggcgtgctgagcgccaccatcctgtacgagatcctgctgggcaaggccaccctgtacgccgtgctggtgtctgccctggtgctgatggctatggtcaagcggaaggacagccggggaagggccaagcgatctggatctggagcaacaaacttctcactactcaaacaagcaggtgacgtggaggagaatcccgggcctactagtatggactggatttggcgcatccttttccttgtcggcgctgctaccggcgcccattccgggccccaggttcagctgcaagagtctggcggaggacttgctcaagctggcggaagcctgagactgtcttgtgccgcctctggcagaaccttcagcatgggctggtttagacaggcccctggcaaagagagagagttcgtcgccgccatcacatacagcggcggcagcccttactacgcctcttctgtcagaggccggttcaccatcagccgggacaacgccaagaacaccgtgtacctccagatgaacagcctgaagccagaggacaccgccgtgtactactgtgccgccaatccaacctacggcagcgactggaatgccgagaattggggccagggcacccaagtgacagtgtctagtggatccggcggcggaggatctggcggaggcggatctgggggcggaggctctttcgaacaagaagtgacacagatccctgccgctctgtctgtgcctgagggcgaaaacctggtgctgaactgctccttcaccgacagcgccatctacaacctccagtggttcaggcaggaccctggaaagggactgacaagcctgctgctgatccagagcagccagagagagcagacctccggcagactgaatgccagcctggataagagcagcggcaggtctaccctgtatatcgccgcttctcagcctggcgatagcgccacatatctgtgtgctgtgcggcctacaagcggcggcagctacatccctacatttggcagaggcaccagcctgatcgtgcacccttatgcctctacaaagggaccctccgtgtttcctctggctcccagcagcaagtctacaagcggaggaacagccgctctgggctgcctggtcaaggattactttcccgagcctgtgaccgtgtcctggaatagcggagcactgacaagcggcgtgcacacctttccagccgtgctgcaaagcagcggcctgtactctctgagcagcgtggtcacagtgcctagctctagcctgggcacccagacctacatctgcaatgtgaaccacaagcctagcaacaccaaggtggacaagagagtggaacccaagagctgtatccccgaggacacattcttcccaagccccgagagcagctgcgacgtgaagctggtggaaaagagcttcgagacagacaccaacctgaacttccagaacctgagcgtgatcggcttcagaatcctgctgctgaaagtggccggctttaacctgctgatgaccctgcggctgtggtccagc

SEQ ID NO: 4012 - DNA, 1764 bp, Artificial Sequence
  Synthetic Polynucloetide
atggactggatttggcgcatccttttccttgtcggcgctgctaccggcgcccattccgggccccaggttcagctgcaagagtctggcggaggacttgctcaagctggcggaagcctgagactgtcttgtgccgcctctggcagaaccttcagcatgggctggtttagacaggcccctggcaaagagagagagttcgtcgccgccatcacatacagcggcggcagcccttactacgcctcttctgtcagaggccggttcaccatcagccgggacaacgccaagaacaccgtgtacctccagatgaacagcctgaagccagaggacaccgccgtgtactactgtgccgccaatccaacctacggcagcgactggaatgccgagaattggggccagggcacccaagtgacagtgtctagtggatccggcggcggaggatctggcggaggcggatctgggggcggaggctctttcgaacaagaagtgacacagatccctgccgctctgtctgtgcctgagggcgaaaacctggtgctgaactgctccttcaccgacagcgccatctacaacctccagtggttcaggcaggaccctggaaagggactgacaagcctgctgctgatccagagcagccagagagagcagacctccggcagactgaatgccagcctggataagagcagcggcaggtctaccctgtatatcgccgcttctcagcctggcgatagcgccacatatctgtgtgctgtgcggcctacaagcggcggcagctacatccctacatttggcagaggcaccagcctgatcgtgcacccttatggcggaggcggaagtggaggcggaggatctggcggcggaggctctaatgctggcgtgacccagacacctaagttccaggtgctgaaaaccggccagagcatgaccctgcaatgcgcccaggacatgaaccatgagtacatgagctggtacagacaggaccccggcatgggcctgagactgatccactactctgtggctatccagaccaccgaccagggcgaagtgcccaatggctacaacgtgtccagaagcaccatcgaggacttcccactgagactgctgtctgccgctcctagccagaccagcgtgtacttttgtgccagcagctacctgggcaacaccggcgagctgttttttggcgagggcagcagactgaccgtgggcggaggcagcgacggtaacgaggagatgggaggaatcactcaaaccccttacaaagtctcaatttcaggaacaactgttatccttacatgtccccagtatcctggcagcgagatcctttggcagcataacgacaagaatatagggggagatgaagacgataagaatatcggatctgacgaggatcacttgagcctgaaagagttctccgagcttgaacaaagcggatattatgtgtgctatccgcgcgggtcaaagccggaagacgctaacttttacctttatctccgagccagagtgtgcgaaaattgcatggaaatggacgttatgtccgttgctacaatagttatcgtagatatatgcatcacgggtggactgcttctgctggtttattattggtccaagaatagaaaggccaaagctaaacccgtgaccagaggcgctggcgcaggcggaaggcaaaggggacaaaacaaagaacggccaccaccagtgccaaatccagattatgagcctattcggaaaggacagagggacctgtactctggcctgaatcagagaagaatc

SEQ ID NO: 4013 - DNA, 1659 bp, Artificial Sequence
  Synthetic Polynucloetide
atggactggatttggcgcatccttttccttgtcggcgctgctaccggcgcccattccgggccccaggttcagctgcaagagtctggcggaggacttgctcaagctggcggaagcctgagactgtcttgtgccgcctctggcagaaccttcagcatgggctggtttagacaggcccctggcaaagagagagagttcgtcgccgccatcacatacagcggcggcagcccttactacgcctcttctgtcagaggccggttcaccatcagccgggacaacgccaagaacaccgtgtacctccagatgaacagcctgaagccagaggacaccgccgtgtactactgtgccgccaatccaacctacggcagcgactggaatgccgagaattggggccagggcacccaagtgacagtgtctagtggatccggcggcggaggatctggcggaggcggatctgggggcggaggctctttcgaacaagaagtgacacagatccctgccgctctgtctgtgcctgagggcgaaaacctggtgctgaactgctccttcaccgacagcgccatctacaacctccagtggttcaggcaggaccctggaaagggactgacaagcctgctgctgatccagagcagccagagagagcagacctccggcagactgaatgccagcctggataagagcagcggcaggtctaccctgtatatcgccgcttctcagcctggcgatagcgccacatatctgtgtgctgtgcggcctacaagcggcggcagctacatccctacatttggcagaggcaccagcctgatcgtgcacccttatggcggaggcggaagtggaggcggaggatctggcggcggaggctctaatgctggcgtgacccagacacctaagttccaggtgctgaaaaccggccagagcatgaccctgcaatgcgcccaggacatgaaccatgagtacatgagctggtacagacaggaccccggcatgggcctgagactgatccactactctgtggctatccagaccaccgaccagggcgaagtgcccaatggctacaacgtgtccagaagcaccatcgaggacttcccactgagactgctgtctgccgctcctagccagaccagcgtgtacttttgtgccagcagctacctgggcaacaccggcgagctgttttttggcgagggcagcagactgaccgtgggcggaggcagcttcaagatccccatcgaggaactggaagatcgggtgttcgtgaactgcaacacctctatcacctgggtggaaggcaccgtgggaacactgctgagcgacatcaccagactggacctcggcaagcggattctggaccctcggggcatctacagatgcaacggcaccgacatctacaaggacaaagaaagcaccgtgcaggtccactacagaatgtgccagtcctgcgtggaactggaccctgctacagtggccggcatcatcgtgaccgatgtgatcgctactctgctgctggctctgggagtgttctgcttcgccggacacgaaacaggcagactgtctggcgctgccgatacacaggccctgctgagaaacgaccaagtgtatcagcccctgcgcgacagagatgatgcccagtattctcacctcggcggcaactgggctagaaacaag

SEQ ID NO: 4014 - DNA, 1689 bp, Artificial Sequence
  Synthetic Polynucloetide
atggactggatttggcgcatccttttccttgtcggcgctgctaccggcgcccattccgggccccaggttcagctgcaagagtctggcggaggacttgctcaagctggcggaagcctgagactgtcttgtgccgcctctggcagaaccttcagcatgggctggtttagacaggcccctggcaaagagagagagttcgtcgccgccatcacatacagcggcggcagcccttactacgcctcttctgtcagaggccggttcaccatcagccgggacaacgccaagaacaccgtgtacctccagatgaacagcctgaagccagaggacaccgccgtgtactactgtgccgccaatccaacctacggcagcgactggaatgccgagaattggggccagggcacccaagtgacagtgtctagtggatccggcggcggaggatctggcggaggcggatctgggggcggaggctctttcgaacaagaagtgacacagatccctgccgctctgtctgtgcctgagggcgaaaacctggtgctgaactgctccttcaccgacagcgccatctacaacctccagtggttcaggcaggaccctggaaagggactgacaagcctgctgctgatccagagcagccagagagagcagacctccggcagactgaatgccagcctggataagagcagcggcaggtctaccctgtatatcgccgcttctcagcctggcgatagcgccacatatctgtgtgctgtgcggcctacaagcggcggcagctacatccctacatttggcagaggcaccagcctgatcgtgcacccttatggcggaggcggaagtggaggcggaggatctggcggcggaggctctaatgctggcgtgacccagacacctaagttccaggtgctgaaaaccggccagagcatgaccctgcaatgcgcccaggacatgaaccatgagtacatgagctggtacagacaggaccccggcatgggcctgagactgatccactactctgtggctatccagaccaccgaccagggcgaagtgcccaatggctacaacgtgtccagaagcaccatcgaggacttcccactgagactgctgtctgccgctcctagccagaccagcgtgtacttttgtgccagcagctacctgggcaacaccggcgagctgttttttggcgagggcagcagactgaccgtgggcggaggcagccagagcatcaagggcaaccacctggtcaaggtgtacgactaccaagaggacggcagcgtgctgctgacatgtgatgccgaggccaagaacatcacctggtttaaggacggcaagatgatcggcttcctgaccgaggacaagaagaagtggaacctgggcagcaacgctaaggaccccagaggcatgtatcagtgcaagggcagccagaacaagagcaagcccctccaggtgtactaccggatgtgccagaactgcatcgagctgaacgccgctaccatcagcggctttctgttcgccgagatcgtgtccatcttcgtgctggccgtgggcgtgtactttatcgctggacaggatggcgtgcggcagagcagagcttccgataagcaaaccctgctgcctaacgaccagctgtaccagcctctgaaggacagagaggacgaccagtacagccacctccagggcaatcagctgagaagaaac

SEQ ID NO: 4015 - DNA, 1638 bp, Artificial Sequence
  Synthetic Polynucloetide
atggactggatttggcgcatccttttccttgtcggcgctgctaccggcgcccattccgggccccaggttcagctgcaagagtctggcggaggacttgctcaagctggcggaagcctgagactgtcttgtgccgcctctggcagaaccttcagcatgggctggtttagacaggcccctggcaaagagagagagttcgtcgccgccatcacatacagcggcggcagcccttactacgcctcttctgtcagaggccggttcaccatcagccgggacaacgccaagaacaccgtgtacctccagatgaacagcctgaagccagaggacaccgccgtgtactactgtgccgccaatccaacctacggcagcgactggaatgccgagaattggggccagggcacccaagtgacagtgtctagtggatccggcggcggaggatctggcggaggcggatctgggggcggaggctctttcgaacaagaagtgacacagatccctgccgctctgtctgtgcctgagggcgaaaacctggtgctgaactgctccttcaccgacagcgccatctacaacctccagtggttcaggcaggaccctggaaagggactgacaagcctgctgctgatccagagcagccagagagagcagacctccggcagactgaatgccagcctggataagagcagcggcaggtctaccctgtatatcgccgcttctcagcctggcgatagcgccacatatctgtgtgctgtgcggcctacaagcggcggcagctacatccctacatttggcagaggcaccagcctgatcgtgcacccttatggcggaggcggaagtggaggcggaggatctggcggcggaggctctaatgctggcgtgacccagacacctaagttccaggtgctgaaaaccggccagagcatgaccctgcaatgcgcccaggacatgaaccatgagtacatgagctggtacagacaggaccccggcatgggcctgagactgatccactactctgtggctatccagaccaccgaccagggcgaagtgcccaatggctacaacgtgtccagaagcaccatcgaggacttcccactgagactgctgtctgccgctcctagccagaccagcgtgtacttttgtgccagcagctacctgggcaacaccggcgagctgttttttggcgagggcagcagactgaccgtgggcggaggcagccagagttttgggttgttggaccctaaattgtgctatctgttggacggaatcctgttcatttacggagtgatcctgaccgcattgttcctgcgggttaagttttccagatccgcagacgcacccgcttaccaacaagggcagaaccaactctacaatgaacttaatttggggcggagggaagagtacgacgttctggacaaaaggaggggacgagatcccgagatgggcggaaagcctcagcgaaggaagaatccgcaagaggggctttataacgaactccagaaagataaaatggcagaagcctatagtgagattgggatgaagggagaaaggaggaggggtaaaggtcacgatgggttgtaccaaggattgagcacagccactaaagatacctatgatgcgctccacatgcaggccctgccgccaaga

SEQ ID NO: 4016 - DNA, 1737 bp, Artificial Sequence
  Synthetic Polynucloetide
atggactggatttggcgcatccttttccttgtcggcgctgctaccggcgcccattccgggccccaggttcagctgcaagagtctggcggaggacttgctcaagctggcggaagcctgagactgtcttgtgccgcctctggcagaaccttcagcatgggctggtttagacaggcccctggcaaagagagagagttcgtcgccgccatcacatacagcggcggcagcccttactacgcctcttctgtcagaggccggttcaccatcagccgggacaacgccaagaacaccgtgtacctccagatgaacagcctgaagccagaggacaccgccgtgtactactgtgccgccaatccaacctacggcagcgactggaatgccgagaattggggccagggcacccaagtgacagtgtctagtggatccggcggcggaggatctggcggaggcggatctgggggcggaggctctttcgaacaagaagtgacacagatccctgccgctctgtctgtgcctgagggcgaaaacctggtgctgaactgctccttcaccgacagcgccatctacaacctccagtggttcaggcaggaccctggaaagggactgacaagcctgctgctgatccagagcagccagagagagcagacctccggcagactgaatgccagcctggataagagcagcggcaggtctaccctgtatatcgccgcttctcagcctggcgatagcgccacatatctgtgtgctgtgcggcctacaagcggcggcagctacatccctacatttggcagaggcaccagcctgatcgtgcacccttatatccagaaccctgatcctgccgtgtaccagctgcgggatagcaagagcagcgacaagagcgtgtgtctgttcaccgacttcgacagccagaccaacgtgtcccagagcaaggactccgacgtgtacatcaccgataagaccgtgctggacatgcggagcatggacttcaagagcaactccgccgtggcctggtccaacaagtccgatttcgcctgcgccaacgccttcaacaacagcattatccccgaggacacattcttcccaagccccgagagcagctgcgacgtgaagctggtggaaaagagcttcgagacagacaccaacctgaacttccagaacctgagcgtgatcggcttcagaatcctgctgctgaaagtggccggctttaacctgctgatgaccctgcggctgtggtccagccgcgccaagagaagcggatctggcgtgaagcagaccctgaatttcgacctgctgaagctggctggcgacgtggaatccaacccaggcccttctagaggccatatggccaagcctttgtctcaagaagaatccaccctcattgaaagagcaacggctacaatcaacagcatccccatctctgaagactacagcgtcgccagcgcagctctctctagcgacggccgcatcttcactggtgtcaatgtatatcattttactgggggaccttgtgcagaactcgtggtgctgggcactgctgctgctgcggcagctggcaacctgacttgtatcgtcgcgatcggaaatgagaacaggggcatcttgagcccctgcggacggtgccgacaggtgcttctcgatctgcatcctgggatcaaagccatagtgaaggacagtgatggacagccgacggcagttgggattcgtgaattgctgccctctggttatgtgtgggagggctga

SEQ ID NO: 4017 - DNA, 1236 bp, Artificial Sequence
  Synthetic Polynucloetide
atggactggatttggcgcatccttttccttgtcggcgctgctaccggcgcccattccgggccccaggttcagctgcaagagtctggcggaggacttgctcaagctggcggaagcctgagactgtcttgtgccgcctctggcagaaccttcagcatgggctggtttagacaggcccctggcaaagagagagagttcgtcgccgccatcacatacagcggcggcagcccttactacgcctcttctgtcagaggccggttcaccatcagccgggacaacgccaagaacaccgtgtacctccagatgaacagcctgaagccagaggacaccgccgtgtactactgtgccgccaatccaacctacggcagcgactggaatgccgagaattggggccagggcacccaagtgacagtgtctagtggatccggcggcggaggatctggcggaggcggatctgggggcggaggctctttcgaacaagaagtgacacagatccctgccgctctgtctgtgcctgagggcgaaaacctggtgctgaactgctccttcaccgacagcgccatctacaacctccagtggttcaggcaggaccctggaaagggactgacaagcctgctgctgatccagagcagccagagagagcagacctccggcagactgaatgccagcctggataagagcagcggcaggtctaccctgtatatcgccgcttctcagcctggcgatagcgccacatatctgtgtgctgtgcggcctacaagcggcggcagctacatccctacatttggcagaggcaccagcctgatcgtgcacccttatatccagaaccctgatcctgccgtgtaccagctgcgggatagcaagagcagcgacaagagcgtgtgtctgttcaccgacttcgacagccagaccaacgtgtcccagagcaaggactccgacgtgtacatcaccgataagaccgtgctggacatgcggagcatggacttcaagagcaactccgccgtggcctggtccaacaagtccgatttcgcctgcgccaacgccttcaacaacagcattatccccgaggacacattcttcccaagccccgagagcagctgcgacgtgaagctggtggaaaagagcttcgagacagacaccaacctgaacttccagaacctgagcgtgatcggcttcagaatcctgctgctgaaagtggccggctttaacctgctgatgaccctgcggctgtggtccagc

SEQ ID NO: 4018 - DNA, 1773 bp, Artificial Sequence
  Synthetic Polynucloetide
atggactggatttggcgcatccttttccttgtcggcgctgctaccggcgcccattccgggccccaggttcagctgcaagagtctggcggaggacttgctcaagctggcggaagcctgagactgtcttgtgccgcctctggcagaaccttcagcatgggctggtttagacaggcccctggcaaagagagagagttcgtcgccgccatcacatacagcggcggcagcccttactacgcctcttctgtcagaggccggttcaccatcagccgggacaacgccaagaacaccgtgtacctccagatgaacagcctgaagccagaggacaccgccgtgtactactgtgccgccaatccaacctacggcagcgactggaatgccgagaattggggccagggcacccaagtgacagtgtctagtggatccggcggcggaggatctggcggaggcggatctgggggcggaggctctttcgaacaagaagtgacacagatccctgccgctctgtctgtgcctgagggcgaaaacctggtgctgaactgctccttcaccgacagcgccatctacaacctccagtggttcaggcaggaccctggaaagggactgacaagcctgctgctgatccagagcagccagagagagcagacctccggcagactgaatgccagcctggataagagcagcggcaggtctaccctgtatatcgccgcttctcagcctggcgatagcgccacatatctgtgtgctgtgcggcctacaagcggcggcagctacatccctacatttggcagaggcaccagcctgatcgtgcacccttatgagcagaaactgatctcggaagaggatgggagcggcatccagaaccctgatcctgccgtgtaccagctgcgggatagcaagagcagcgacaagagcgtgtgtctgttcaccgacttcgacagccagaccaacgtgtcccagagcaaggactccgacgtgtacatcaccgataagtgcgtgctggacatgcggagcatggacttcaagagcaactccgccgtggcctggtccaacaagtccgatttcgcctgcgccaacgccttcaacaacagcattatccccgaggacacattcttcccaagccccgagagcagctgcgacgtgaagctggtggaaaagagcttcgagacagacaccaacctgaacttccagaacctgagcgtgatcggcttcagaatcctgctgctgaaagtggccggctttaacctgctgatgaccctgcggctgtggtccagccgcgccaagagaagcggatctggcgtgaagcagaccctgaatttcgacctgctgaagctggctggcgacgtggaatccaacccaggcccttctagaggccatatggccaagcctttgtctcaagaagaatccaccctcattgaaagagcaacggctacaatcaacagcatccccatctctgaagactacagcgtcgccagcgcagctctctctagcgacggccgcatcttcactggtgtcaatgtatatcattttactgggggaccttgtgcagaactcgtggtgctgggcactgctgctgctgcggcagctggcaacctgacttgtatcgtcgcgatcggaaatgagaacaggggcatcttgagcccctgcggacggtgccgacaggtgcttctcgatctgcatcctgggatcaaagccatagtgaaggacagtgatggacagccgacggcagttgggattcgtgaattgctgccctctggttatgtgtgggagggctga

SEQ ID NO: 4019 - DNA, 1275 bp, Artificial Sequence
  Synthetic Polynucloetide
atggactggatttggcgcatccttttccttgtcggcgctgctaccggcgcccattccgggccccaggttcagctgcaagagtctggcggaggacttgctcaagctggcggaagcctgagactgtcttgtgccgcctctggcagaaccttcagcatgggctggtttagacaggcccctggcaaagagagagagttcgtcgccgccatcacatacagcggcggcagcccttactacgcctcttctgtcagaggccggttcaccatcagccgggacaacgccaagaacaccgtgtacctccagatgaacagcctgaagccagaggacaccgccgtgtactactgtgccgccaatccaacctacggcagcgactggaatgccgagaattggggccagggcacccaagtgacagtgtctagtggatccggcggcggaggatctggcggaggcggatctgggggcggaggctctttcgaacaagaagtgacacagatccctgccgctctgtctgtgcctgagggcgaaaacctggtgctgaactgctccttcaccgacagcgccatctacaacctccagtggttcaggcaggaccctggaaagggactgacaagcctgctgctgatccagagcagccagagagagcagacctccggcagactgaatgccagcctggataagagcagcggcaggtctaccctgtatatcgccgcttctcagcctggcgatagcgccacatatctgtgtgctgtgcggcctacaagcggcggcagctacatccctacatttggcagaggcaccagcctgatcgtgcacccttatgagcagaaactgatctcggaagaggatgggagcggcatccagaaccctgatcctgccgtgtaccagctgcgggatagcaagagcagcgacaagagcgtgtgtctgttcaccgacttcgacagccagaccaacgtgtcccagagcaaggactccgacgtgtacatcaccgataagtgcgtgctggacatgcggagcatggacttcaagagcaactccgccgtggcctggtccaacaagtccgatttcgcctgcgccaacgccttcaacaacagcattatccccgaggacacattcttcccaagccccgagagcagctgcgacgtgaagctggtggaaaagagcttcgagacagacaccaacctgaacttccagaacctgagcgtgatcggcttcagaatcctgctgctgaaagtggccggctttaacctgctgatgaccctgcggctgtggtccagctga

SEQ ID NO: 4020 - DNA, 1908 bp, Artificial Sequence
  Synthetic Polynucloetide
atggccttaccagtgaccgccttgctcctgccgctggccttgctgctccacgccgccaggccggcatgccaggtccagctcgtcgagtccggcggcggcctcgtccaggccggcgactccgtcaccctctcctgcaccgcctccggccgcaccttctcctcctacgccctcgcctggttccgccagcgccccggcaaggagcgcgagttcgtcgccggcctccgctggggcggccccaccaactacgccgactccgtcaaggaccgcttcaccatctccggcgactccgccaagcacaccatgtacctccagatgaactccctcaagcccgaggacaccgccgtctactactgcggctacaaccccggcggctgggccgtcccctcccagtacgagtacgactcctggggccagggcacccaggtcaccgtctcctccggtaccggcggaggcggatctggcggcggaggtagcggtggcggaggatctgaattcaatgctggcgtgacccagacacctaagttccaggtgctgaaaaccggccagagcatgaccctgcaatgcgcccaggacatgaaccatgagtacatgagctggtacagacaggaccccggcatgggcctgagactgatccactactctgtggctatccagaccaccgaccagggcgaagtgcccaatggctacaacgtgtccagaagcaccatcgaggacttcccactgagactgctgtctgccgctcctagccagaccagcgtgtacttttgtgccagcagctacctgggcaacaccggcgagctgttttttggcgagggcagcagactgaccgtgggcggaggcggaagtggaggcggaggatctggcggcggaggctctcaagaagtgacacagatccctgccgctctgtctgtgcctgagggcgaaaacctggtgctgaactgctccttcaccgacagcgccatctacaacctccagtggttcaggcaggaccctggaaagggactgacaagcctgctgctgatccagagcagccagagagagcagacctccggcagactgaatgccagcctggataagagcagcggcaggtctaccctgtatatcgccgcttctcagcctggcgatagcgccacatatctgtgtgctgtgcggcctacaagcggcggcagctacatccctacatttggcagaggcaccagcctgatcgtgcacccttatgagcagaaactgatctcggaagaggatctgaaaattgaagttatgtatcctcctccttacctagacaatgagaagagcaatggaaccattatccatgtgaaagggaaacacctttgtccaagtcccctatttcccggaccttctaagcccttttgggtgctggtggtggttgggggagtcctggcttgctatagcttgctagtaacagtggcctttattattttctgggtgaggagtaagaggagcaggctcctgcacagtgactacatgaacatgactccacgccgccccggacccacccgcaagcattaccagccctatgccccaccacgcgacttcgcagcctatcgctccagagtgaagttcagcaggagcgcagacgcccccgcgtaccagcagggccagaaccagctctataacgagctcaatctaggacgaagagaggagtacgatgttttggacaagagacgtggccgggaccctgagatggggggaaagccgagaaggaagaaccctcaggaaggcctgtacaatgaactgcagaaagataagatggcggaggcctacagtgagattgggatgaaaggcgagcgccggaggggcaaggggcacgatggcctttaccagggtctcagtacagccaccaaggacacctacgacgcccttcacatgcaggccctgccccctcgc

SEQ ID NO: 4021 - DNA, 1929 bp, Artificial Sequence
  Synthetic Polynucloetide
atggccttaccagtgaccgccttgctcctgccgctggccttgctgctccacgccgccaggccggcatgccaggtccagctcgtcgagtccggcggcggcctcgtccaggccggcgactccgtcaccctctcctgcaccgcctccggccgcaccttctcctcctacgccctcgcctggttccgccagcgccccggcaaggagcgcgagttcgtcgccggcctccgctggggcggccccaccaactacgccgactccgtcaaggaccgcttcaccatctccggcgactccgccaagcacaccatgtacctccagatgaactccctcaagcccgaggacaccgccgtctactactgcggctacaaccccggcggctgggccgtcccctcccagtacgagtacgactcctggggccagggcacccaggtcaccgtctcctccggtaccggcggaggcggatctggcggcggaggtagcggtggcggaggatctgaattcaatgctggcgtgacccagacacctaagttccaggtgctgaaaaccggccagagcatgaccctgcaatgcgcccaggacatgaaccatgagtacatgagctggtacagacaggaccccggcatgggcctgagactgatccactactctgtggctatccagaccaccgaccagggcgaagtgcccaatggctacaacgtgtccagaagcaccatcgaggacttcccactgagactgctgtctgccgctcctagccagaccagcgtgtacttttgtgccagcagctacctgggcaacaccggcgagctgttttttggcgagggcagcagactgaccgtgggcggaggcggaagtggaggcggaggatctggcggcggaggctctcaagaagtgacacagatccctgccgctctgtctgtgcctgagggcgaaaacctggtgctgaactgctccttcaccgacagcgccatctacaacctccagtggttcaggcaggaccctggaaagggactgacaagcctgctgctgatccagagcagccagagagagcagacctccggcagactgaatgccagcctggataagagcagcggcaggtctaccctgtatatcgccgcttctcagcctggcgatagcgccacatatctgtgtgctgtgcggcctacaagcggcggcagctacatccctacatttggcagaggcaccagcctgatcgtgcacccttatgagcagaaactgatctcggaagaggatctggcgaagcccaccacgacgccagcgccgcgaccaccaacaccggcgcccaccatcgcgtcgcagcccctgtccctgcgcccagaggcgtgccggccagcggcggggggcgcagtgcacacgagggggctggacttcgcctgtgacatctacatctgggcgcccttggccgggacttgtggggtccttctcctgtcactggttatcaccctttactgcaaacggggcagaaagaaactcctgtatatattcaaacaaccatttatgagaccagtacaaactactcaagaggaagatggctgtagctgccgatttccagaagaagaagaaggaggatgtgaactgagagtgaagttcagcaggagcgcagacgcccccgcgtaccagcagggccagaaccagctctataacgagctgaatctaggacgaagagaggagtacgatgttttggacaagagacgtggccgggaccctgagatggggggaaagccgagaaggaagaaccctcaggaaggcctgtacaatgaactgcagaaagataagatggcggaggcctacagtgagattgggatgaaaggcgagcgccggaggggcaaggggcacgatggcctttaccagggtctcagtacagccaccaaggacacctacgacgcccttcacatgcaggccctgccccctcgctga

SEQ ID NO: 4022 - DNA, 3168 bp, Artificial Sequence
  Synthetic Polynucloetide
atggccttaccagtgaccgccttgctcctgccgctggccttgctgctccacgccgccaggccggcatgccaggtccagctcgtcgagtccggcggcggcctcgtccaggccggcgactccgtcaccctctcctgcaccgcctccggccgcaccttctcctcctacgccctcgcctggttccgccagcgccccggcaaggagcgcgagttcgtcgccggcctccgctggggcggccccaccaactacgccgactccgtcaaggaccgcttcaccatctccggcgactccgccaagcacaccatgtacctccagatgaactccctcaagcccgaggacaccgccgtctactactgcggctacaaccccggcggctgggccgtcccctcccagtacgagtacgactcctggggccagggcacccaggtcaccgtctcctccggtaccggcggaggcggatctggcggcggaggtagcggtggcggaggatctgaattcaatgctggcgtgacccagacacctaagttccaggtgctgaaaaccggccagagcatgaccctgcaatgcgcccaggacatgaaccatgagtacatgagctggtacagacaggaccccggcatgggcctgagactgatccactactctgtggctatccagaccaccgaccagggcgaagtgcccaatggctacaacgtgtccagaagcaccatcgaggacttcccactgagactgctgtctgccgctcctagccagaccagcgtgtacttttgtgccagcagctacctgggcaacaccggcgagctgttttttggcgagggcagcagactgaccgtgggcggaggcggaagtggaggcggaggatctggcggcggaggctctcaagaagtgacacagatccctgccgctctgtctgtgcctgagggcgaaaacctggtgctgaactgctccttcaccgacagcgccatctacaacctccagtggttcaggcaggaccctggaaagggactgacaagcctgctgctgatccagagcagccagagagagcagacctccggcagactgaatgccagcctggataagagcagcggcaggtctaccctgtatatcgccgcttctcagcctggcgatagcgccacatatctgtgtgctgtgcggcctacaagcggcggcagctacatccctacatttggcagaggcaccagcctgatcgtgcacccttatgagcagaaactgatctcggaagaggatctggcgaagcccaccacgacgccagcgccgcgaccaccaacaccggcgcccaccatcgcgtcgcagcccctgtccctgcgcccagaggcgtgccggccagcggcggggggcgcagtgcacacgagggggctggacttcgcctgtgacatctacatctgggcgcccttggccgggacttgtggggtccttctcctgtcactggttatcaccctttactgcgggcgcgccagagtgaagttcagcaggagcgcagacgcccccgcgtaccagcagggccagaaccagctctataacgagctgaatctaggacgaagagaggagtacgatgttttggacaagagacgtggccgggaccctgagatggggggaaagccgagaaggaagaaccctcaggaaggcctgtacaatgaactgcagaaagataagatggcggaggcctacagtgagattgggatgaaaggcgagcgccggaggggcaaggggcacgatggcctttaccagggtctcagtacagccaccaaggacacctacgacgcccttcacatgcaggccctgccccctcgctctagaggatctggagcaacaaacttctcactactcaaacaagcaggtgacgtggaggagaatcccgggcctgggatccacatggccacttacgaggttctctgtgaggtggcgcggaaactgggcacggatgacagggaagtggtattgttcctcctaaacgtgttcatacctcaacccacactggcccaattaattggagctcttagagctttaaaggaggagggcaggttaacgtttcccctgttagcggaatgtctgtttcgtgcaggtcgcagagacctcttgcgcgacctgcttcacttagacccgcgttttttagagcgccacctagcgggcacaatgagttatttcagcccttatcagctcactgttctccacgtagacggggagctgtgtgcgagggatattaggtctttgatatttttaagcaaggacactatagggtctcgcagcacaccacagacattcttacactgggtgtactgtatggaaaacttagacctactgggtcccactgacgtggatgccctaatgtcaatgcttagatctttgtcaagagtagacctacagcgccaagtgcaaaccctaatgggccttcacctttccggcccatcacactcccaacactatcgccatacaccactcgagaccgatttctacgactacaaggacgacgatgacaagactagtggctccggcgagggcagaggaagtctactaacctgcggagatgtggaagaaaatcctggcccacatatgaccgagtacaagcccacggtgcgcctcgccacccgcgacgacgtccccagggccgtacgcaccctcgccgccgcgttcgccgactaccccgccacgcgccacaccgtcgatccggaccgccacatcgagcgggtcaccgagctgcaagaactcttcctcacgcgcgtcgggctcgacatcggcaaggtgtgggtcgcggacgacggcgccgcggtggcggtctggaccacgccggagagcgtcgaagcgggggcggtgttcgccgagatcggcccgcgcatggccgagttgagcggttcccggctggccgcgcagcaacagatggaaggcctcctggcgccgcaccggcccaaggagcccgcgtggttcctggccaccgtcggcgtctcgcccgaccaccagggcaagggtctgggcagcgccgtcgtgctccccggagtggaggcggccgagcgcgccggggtgcccgccttcctggagacctccgcgccccgcaacctccccttctacgagcggctcggcttcaccgtcaccgccgacgtcgaggtgcccgaaggaccgcgcacctggtgcatgacccgcaagcccggtgcctga

SEQ ID NO: 4023 - DNA, 2988 bp, Artificial Sequence
  Synthetic Polynucloetide
atggccttaccagtgaccgccttgctcctgccgctggccttgctgctccacgccgccaggccggcatgccaggtccagctcgtcgagtccggcggcggcctcgtccaggccggcgactccgtcaccctctcctgcaccgcctccggccgcaccttctcctcctacgccctcgcctggttccgccagcgccccggcaaggagcgcgagttcgtcgccggcctccgctggggcggccccaccaactacgccgactccgtcaaggaccgcttcaccatctccggcgactccgccaagcacaccatgtacctccagatgaactccctcaagcccgaggacaccgccgtctactactgcggctacaaccccggcggctgggccgtcccctcccagtacgagtacgactcctggggccagggcacccaggtcaccgtctcctccggtaccggcggaggcggatctggcggcggaggtagcggtggcggaggatctgaattcaatgctggcgtgacccagacacctaagttccaggtgctgaaaaccggccagagcatgaccctgcaatgcgcccaggacatgaaccatgagtacatgagctggtacagacaggaccccggcatgggcctgagactgatccactactctgtggctatccagaccaccgaccagggcgaagtgcccaatggctacaacgtgtccagaagcaccatcgaggacttcccactgagactgctgtctgccgctcctagccagaccagcgtgtacttttgtgccagcagctacctgggcaacaccggcgagctgttttttggcgagggcagcagactgaccgtgctcgagatccagaaccctgatcctgccgtgtaccagctgcgggatagcaagagcagcgacaagagcgtgtgtctgttcaccgacttcgacagccagaccaacgtgtcccagagcaaggactccgacgtgtacatcaccgataagtgcgtgctggacatgcggagcatggacttcaagagcaactccgccgtggcctggtccaacaagtccgatttcgcctgcgccaacgccttcaacaacagcattatccccgaggacacattcttcccaagcagcgacgtgccctgcgacgtgaagctggtggaaaagagcttcgagacagacaccaacctgaacttccagaacctgagcgtgatcggcttcagaatcctgctgctgaaagtggccggctttaacctgctgatgaccctgcggctgtggtccagccgcgccaagagaagcggatctggcgtgaagcagaccctgaatttcgacctgctgaagctggctggcgacgtggaatccaacccaggccctactagtatggactggatttggcgcatccttttccttgtcggcgctgctaccggcgcgcattccttcgaacaagaagtgacacagatccctgccgctctgtctgtgcctgagggcgaaaacctggtgctgaactgctccttcaccgacagcgccatctacaacctccagtggttcaggcaggaccctggaaagggactgacaagcctgctgctgatccagagcagccagagagagcagacctccggcagactgaatgccagcctggataagagcagcggcaggtctaccctgtatatcgccgcttctcagcctggcgatagcgccacatatctgtgtgctgtgcggcctacaagcggcggcagctacatccctacatttggcagaggcaccagcctgatcgtgcacccttatgaggacctgaagaacgtgttcccacctgaggtggccgtgttcgagcctagcaaggccgagatcgcccacacccagaaagccaccctcgtgtgcctggctaccggcttctaccccgaccatgtggaactgtcttggtgggtcaacggcaaagaggtgcacagcggcgtgtgtaccgacccccagccactgaaagaacagcccgccctgaacgacagccggtactgcctgagcagcagactgagagtgtccgccaccttctggcagaacccccggaaccacttcagatgccaggtgcagttctacggcctgagcgagaacgacgagtggacccaggacagagccaagcccgtgacccagatcgtgtctgccgaagcctggggcagagccgattgcggcatcaccagcgccagctaccaccagggcgtgctgagcgccaccatcctgtacgagatcctgctgggcaaggccaccctgtacgccgtgctggtgtctgccctggtgctgatggctatggtcaagcggaaggacagccggggaagggccaagcgatctggatctggagcaacaaacttctcactactcaaacaagcaggtgacgtggaggagaatcccgggccttctagaggccatatgaccgagtacaagcccacggtgcgcctcgccacccgcgacgacgtccccagggccgtacgcaccctcgccgccgcgttcgccgactaccccgccacgcgccacaccgtcgatccggaccgccacatcgagcgggtcaccgagctgcaagaactcttcctcacgcgcgtcgggctcgacatcggcaaggtgtgggtcgcggacgacggcgccgcggtggcggtctggaccacgccggagagcgtcgaagcgggggcggtgttcgccgagatcggcccgcgcatggccgagttgagcggttcccggctggccgcgcagcaacagatggaaggcctcctggcgccgcaccggcccaaggagcccgcgtggttcctggccaccgtcggcgtctcgcccgaccaccagggcaagggtctgggcagcgccgtcgtgctccccggagtggaggcggccgagcgcgccggggtgcccgccttcctggagacctccgcgccccgcaacctccccttctacgagcggctcggcttcaccgtcaccgccgacgtcgaggtgcccgaaggaccgcgcacctggtgcatgacccgcaagcccggtgcctga

SEQ ID NO: 4024 - DNA, 2985 bp, Artificial Sequence
  Synthetic Polynucloetide
atggccttaccagtgaccgccttgctcctgccgctggccttgctgctccacgccgccaggccggcatgccaggtccagctcgtcgagtccggcggcggcctcgtccaggccggcgactccgtcaccctctcctgcaccgcctccggccgcaccttctcctcctacgccctcgcctggttccgccagcgccccggcaaggagcgcgagttcgtcgccggcctccgctggggcggccccaccaactacgccgactccgtcaaggaccgcttcaccatctccggcgactccgccaagcacaccatgtacctccagatgaactccctcaagcccgaggacaccgccgtctactactgcggctacaaccccggcggctgggccgtcccctcccagtacgagtacgactcctggggccagggcacccaggtcaccgtctcctccggtaccggcggaggcggatctggcggcggaggtagcggtggcggaggatctgaattcaatgctggcgtgacccagacacctaagttccaggtgctgaaaaccggccagagcatgaccctgcaatgcgcccaggacatgaaccatgagtacatgagctggtacagacaggaccccggcatgggcctgagactgatccactactctgtggctatccagaccaccgaccagggcgaagtgcccaatggctacaacgtgtccagaagcaccatcgaggacttcccactgagactgctgtctgccgctcctagccagaccagcgtgtacttttgtgccagcagctacctgggcaacaccggcgagctgttttttggcgagggcagcagactgaccgtgctcgaggacctgaagaacgtgttcccacctgaggtggccgtgttcgagcctagcaaggccgagatcgcccacacccagaaagccaccctcgtgtgcctggctaccggcttctaccccgaccatgtggaactgtcttggtgggtcaacggcaaagaggtgcacagcggcgtgtgtaccgacccccagccactgaaagaacagcccgccctgaacgacagccggtactgcctgagcagcagactgagagtgtccgccaccttctggcagaacccccggaaccacttcagatgccaggtgcagttctacggcctgagcgagaacgacgagtggacccaggacagagccaagcccgtgacccagatcgtgtctgccgaagcctggggcagagccgattgcggcatcaccagcgccagctaccaccagggcgtgctgagcgccaccatcctgtacgagatcctgctgggcaaggccaccctgtacgccgtgctggtgtctgccctggtgctgatggctatggtcaagcggaaggacagccggggaagggccaagcgatctggatctggagcaacaaacttctcactactcaaacaagcaggtgacgtggaggagaatcccgggcctactagtatggactggatttggcgcatccttttccttgtcggcgctgctaccggcgcgcattccttcgaacaagaagtgacacagatccctgccgctctgtctgtgcctgagggcgaaaacctggtgctgaactgctccttcaccgacagcgccatctacaacctccagtggttcaggcaggaccctggaaagggactgacaagcctgctgctgatccagagcagccagagagagcagacctccggcagactgaatgccagcctggataagagcagcggcaggtctaccctgtatatcgccgcttctcagcctggcgatagcgccacatatctgtgtgctgtgcggcctacaagcggcggcagctacatccctacatttggcagaggcaccagcctgatcgtgcacccttatatccagaaccctgatcctgccgtgtaccagctgcgggatagcaagagcagcgacaagagcgtgtgtctgttcaccgacttcgacagccagaccaacgtgtcccagagcaaggactccgacgtgtacatcaccgataagtgcgtgctggacatgcggagcatggacttcaagagcaactccgccgtggcctggtccaacaagtccgatttcgcctgcgccaacgccttcaacaacagcattatccccgaggacacattcttcccaagcagcgacgtgccctgcgacgtgaagctggtggaaaagagcttcgagacagacaccaacctgaacttccagaacctgagcgtgatcggcttcagaatcctgctgctgaaagtggccggctttaacctgctgatgaccctgcggctgtggtccagccgcgccaagagaagcggatctggcgtgaagcagaccctgaatttcgacctgctgaagctggctggcgacgtggaatccaacccaggcccttctagaggccatatgaccgagtacaagcccacggtgcgcctcgccacccgcgacgacgtccccagggccgtacgcaccctcgccgccgcgttcgccgactaccccgccacgcgccacaccgtcgatccggaccgccacatcgagcgggtcaccgagctgcaagaactcttcctcacgcgcgtcgggctcgacatcggcaaggtgtgggtcgcggacgacggcgccgcggtggcggtctggaccacgccggagagcgtcgaagcgggggcggtgttcgccgagatcggcccgcgcatggccgagttgagcggttcccggctggccgcgcagcaacagatggaaggcctcctggcgccgcaccggcccaaggagcccgcgtggttcctggccaccgtcggcgtctcgcccgaccaccagggcaagggtctgggcagcgccgtcgtgctccccggagtggaggcggccgagcgcgccggggtgcccgccttcctggagacctccgcgccccgcaacctccccttctacgagcggctcggcttcaccgtcaccgccgacgtcgaggtgcccgaaggaccgcgcacctggtgcatgacccgcaagcccggtgcctga

SEQ ID NO: 4025 - DNA, 2283 bp, Artificial Sequence
  Synthetic Polynucloetide
atggccttaccagtgaccgccttgctcctgccgctggccttgctgctccacgccgccaggccggcatgccaggtccagctcgtcgagtccggcggcggcctcgtccaggccggcgactccgtcaccctctcctgcaccgcctccggccgcaccttctcctcctacgccctcgcctggttccgccagcgccccggcaaggagcgcgagttcgtcgccggcctccgctggggcggccccaccaactacgccgactccgtcaaggaccgcttcaccatctccggcgactccgccaagcacaccatgtacctccagatgaactccctcaagcccgaggacaccgccgtctactactgcggctacaaccccggcggctgggccgtcccctcccagtacgagtacgactcctggggccagggcacccaggtcaccgtctcctccggtaccggcggaggcggatctggcggcggaggtagcggtggcggaggatctgaattcaatgctggcgtgacccagacacctaagttccaggtgctgaaaaccggccagagcatgaccctgcaatgcgcccaggacatgaaccatgagtacatgagctggtacagacaggaccccggcatgggcctgagactgatccactactctgtggctatccagaccaccgaccagggcgaagtgcccaatggctacaacgtgtccagaagcaccatcgaggacttcccactgagactgctgtctgccgctcctagccagaccagcgtgtacttttgtgccagcagctacctgggcaacaccggcgagctgttttttggcgagggcagcagactgaccgtgctcgaggacctgaagaacgtgttcccacctgaggtggccgtgttcgagcctagcgaggccgagatcagccacacccagaaagccaccctcgtgtgcctggctaccggcttctaccccgaccatgtggaactgtcttggtgggtcaacggcaaagaggtgcacagcggcgtgtgtaccgacccccagccactgaaagaacagcccgccctgaacgacagccggtactgcctgagcagcagactgagagtgtccgccaccttctggcagaacccccggaaccacttcagatgccaggtgcagttctacggcctgagcgagaacgacgagtggacccaggacagagccaagcccgtgacccagatcgtgtctgccgaagcctggggcagagccgattgcggctttaccagcgagagctaccagcagggcgtgctgagcgccaccatcctgtacgagatcctgctgggcaaggccaccctgtacgccgtgctggtgtctgccctggtgctgatggctatggtcaagcggaaggacagccggggaagggccaagcgatctggatctggagcaacaaacttctcactactcaaacaagcaggtgacgtggaggagaatcccgggcctactagtatggactggatttggcgcatccttttccttgtcggcgctgctaccggcgcgcattccttcgaacaagaagtgacacagatccctgccgctctgtctgtgcctgagggcgaaaacctggtgctgaactgctccttcaccgacagcgccatctacaacctccagtggttcaggcaggaccctggaaagggactgacaagcctgctgctgatccagagcagccagagagagcagacctccggcagactgaatgccagcctggataagagcagcggcaggtctaccctgtatatcgccgcttctcagcctggcgatagcgccacatatctgtgtgctgtgcggcctacaagcggcggcagctacatccctacatttggcagaggcaccagcctgatcgtgcacccttatatccagaaccctgatcctgccgtgtaccagctgcgggatagcaagagcagcgacaagagcgtgtgtctgttcaccgacttcgacagccagaccaacgtgtcccagagcaaggactccgacgtgtacatcaccgataagtgcgtgctggacatgcggagcatggacttcaagagcaactccgccgtggcctggtccaacaagtccgatttcgcctgcgccaacgccttcaacaacagcattatccccgaggacacattcttcccaagccccgagagcagctgcgacgtgaagctggtggaaaagagcttcgagacagacaccaacctgaacttccagaacctgagcgtgatcggcttcagaatcctgctgctgaaagtggccggctttaacctgctgatgaccctgcggctgtggtccagc

SEQ ID NO: 4026 - DNA, 2958 bp, Artificial Sequence
  Synthetic Polynucloetide
atggccttaccagtgaccgccttgctcctgccgctggccttgctgctccacgccgccaggccggcatgccaggtccagctcgtcgagtccggcggcggcctcgtccaggccggcgactccgtcaccctctcctgcaccgcctccggccgcaccttctcctcctacgccctcgcctggttccgccagcgccccggcaaggagcgcgagttcgtcgccggcctccgctggggcggccccaccaactacgccgactccgtcaaggaccgcttcaccatctccggcgactccgccaagcacaccatgtacctccagatgaactccctcaagcccgaggacaccgccgtctactactgcggctacaaccccggcggctgggccgtcccctcccagtacgagtacgactcctggggccagggcacccaggtcaccgtctcctccggtaccggcggaggcggatctggcggcggaggtagcggtggcggaggatctgaattcaatgctggcgtgacccagacacctaagttccaggtgctgaaaaccggccagagcatgaccctgcaatgcgcccaggacatgaaccatgagtacatgagctggtacagacaggaccccggcatgggcctgagactgatccactactctgtggctatccagaccaccgaccagggcgaagtgcccaatggctacaacgtgtccagaagcaccatcgaggacttcccactgagactgctgtctgccgctcctagccagaccagcgtgtacttttgtgccagcagctacctgggcaacaccggcgagctgttttttggcgagggcagcagactgaccgtgctcgaggacctgaagaacgtgttcccacctgaggtggccgtgttcgagcctagcgaggccgagatcagccacacccagaaagccaccctcgtgtgcctggctaccggcttctaccccgaccatgtggaactgtcttggtgggtcaacggcaaagaggtgcacagcggcgtgtgtaccgacccccagccactgaaagaacagcccgccctgaacgacagccggtactgcctgagcagcagactgagagtgtccgccaccttctggcagaacccccggaaccacttcagatgccaggtgcagttctacggcctgagcgagaacgacgagtggacccaggacagagccaagcccgtgacccagatcgtgtctgccgaagcctggggcagagccgattgcggctttaccagcgagagctaccagcagggcgtgctgagcgccaccatcctgtacgagatcctgctgggcaaggccaccctgtacgccgtgctggtgtctgccctggtgctgatggctatggtcaagcggaaggacagccggggaagggccaagcgatctggatctggagcaacaaacttctcactactcaaacaagcaggtgacgtggaggagaatcccgggcctactagtatggactggatttggcgcatccttttccttgtcggcgctgctaccggcgcgcattccttcgaacaagaagtgacacagatccctgccgctctgtctgtgcctgagggcgaaaacctggtgctgaactgctccttcaccgacagcgccatctacaacctccagtggttcaggcaggaccctggaaagggactgacaagcctgctgctgatccagagcagccagagagagcagacctccggcagactgaatgccagcctggataagagcagcggcaggtctaccctgtatatcgccgcttctcagcctggcgatagcgccacatatctgtgtgctgtgcggcctacaagcggcggcagctacatccctacatttggcagaggcaccagcctgatcgtgcacccttatatccagaaccctgatcctgccgtgtaccagctgcgggatagcaagagcagcgacaagagcgtgtgtctgttcaccgacttcgacagccagaccaacgtgtcccagagcaaggactccgacgtgtacatcaccgataagtgcgtgctggacatgcggagcatggacttcaagagcaactccgccgtggcctggtccaacaagtccgatttcgcctgcgccaacgccttcaacaacagcattatccccgaggacacattcttcccaagccccgagagcagctgcgacgtgaagctggtggaaaagagcttcgagacagacaccaacctgaacttccagaacctgagcgtgatcggcttcagaatcctgctgctgaaagtggccggctttaacctgctgatgaccctgcggctgtggtccagccgcgccaagagaagcggatctggcgtgaagcagaccctgaatttcgacctgctgaagctggctggcgacgtggaatccaacccaggcccttctagaggcgggatccacaccatggctacctacgaggtgctgtgcgaggtggcaagaaagctgggcaccgacgacagagaagtggtgctgttcctgctgaacgtgttcatccctcagcctacactggcccagctgatcggtgcactgagagccctgaaagaggaaggccggctgacctttcctctgctggccgaatgcctgttcagagccggaagaagggatctgctgcgggacctgctgcatctggaccccagatttctggaaagacacctggccggcaccatgagctacttcagcccttaccagctgaccgtgctgcacgttgacggcgaactgtgcgccagagatattcggagcctgatcttcctgagcaaggacaccatcggcagccggtctacccctcagacatttctgcactgggtgtactgcatggaaaacctggacctgctcggccccacagatgtggatgccctgatgtccatgctgagaagcctgagcagagtggacctccagagacaggtgcagacactgatgggactgcacctgagcggacctagccacagccagcactacagacacacccct

SEQ ID NO: 4027 - DNA, 2295 bp, Artificial Sequence
  Synthetic Polynucloetide
atggccttaccagtgaccgccttgctcctgccgctggccttgctgctccacgccgccaggccggcatgccaggtccagctcgtcgagtccggcggcggcctcgtccaggccggcgactccgtcaccctctcctgcaccgcctccggccgcaccttctcctcctacgccctcgcctggttccgccagcgccccggcaaggagcgcgagttcgtcgccggcctccgctggggcggccccaccaactacgccgactccgtcaaggaccgcttcaccatctccggcgactccgccaagcacaccatgtacctccagatgaactccctcaagcccgaggacaccgccgtctactactgcggctacaaccccggcggctgggccgtcccctcccagtacgagtacgactcctggggccagggcacccaggtcaccgtctcctccggtaccggcggaggcggatctggcggcggaggtagcggtggcggaggatctgaattcaatgctggcgtgacccagacacctaagttccaggtgctgaaaaccggccagagcatgaccctgcaatgcgcccaggacatgaaccatgagtacatgagctggtacagacaggaccccggcatgggcctgagactgatccactactctgtggctatccagaccaccgaccagggcgaagtgcccaatggctacaacgtgtccagaagcaccatcgaggacttcccactgagactgctgtctgccgctcctagccagaccagcgtgtacttttgtgccagcagctacctgggcaacaccggcgagctgttttttggcgagggcagcagactgaccgtgctcgagatccagaaccctgatcctgccgtgtaccagctgcgggatagcaagagcagcgacaagagcgtgtgtctgttcaccgacttcgacagccagaccaacgtgtcccagagcaaggactccgacgtgtacatcaccgataagtgcgtgctggacatgcggagcatggacttcaagagcaactccgccgtggcctggtccaacaagtccgatttcgcctgcgccaacgccttcaacaacagcattatccccgaggacacattcttcccaagccccgagagcagctgcgacgtgaagctggtggaaaagagcttcgagacagacaccaacctgaacttccagaacctgagcgtgatcggcttcagaatcctgctgctgaaagtggccggctttaacctgctgatgaccctgcggctgtggtccagccgcgccaagagaagcggatctggcgtgaagcagaccctgaatttcgacctgctgaagctggctggcgacgtggaatccaacccaggccctactagtatggactggatttggcgcatccttttccttgtcggcgctgctaccggcgcgcattccttcgaacaagaagtgacacagatccctgccgctctgtctgtgcctgagggcgaaaacctggtgctgaactgctccttcaccgacagcgccatctacaacctccagtggttcaggcaggaccctggaaagggactgacaagcctgctgctgatccagagcagccagagagagcagacctccggcagactgaatgccagcctggataagagcagcggcaggtctaccctgtatatcgccgcttctcagcctggcgatagcgccacatatctgtgtgctgtgcggcctacaagcggcggcagctacatccctacatttggcagaggcaccagcctgatcgtgcacccttatgaggacctgaagaacgtgttcccacctgaggtggccgtgttcgagcctagcgaggccgagatcagccacacccagaaagccaccctcgtgtgcctggctaccggcttctaccccgaccatgtggaactgtcttggtgggtcaacggcaaagaggtgcacagcggcgtgtgtaccgacccccagccactgaaagaacagcccgccctgaacgacagccggtactgcctgagcagcagactgagagtgtccgccaccttctggcagaacccccggaaccacttcagatgccaggtgcagttctacggcctgagcgagaacgacgagtggacccaggacagagccaagcccgtgacccagatcgtgtctgccgaagcctggggcagagccgattgcggctttaccagcgagagctaccagcagggcgtgctgagcgccaccatcctgtacgagatcctgctgggcaaggccaccctgtacgccgtgctggtgtctgccctggtgctgatggctatggtcaagcggaaggacagccgggga

SEQ ID NO: 4028 - DNA, 2961 bp, Artificial Sequence
  Synthetic Polynucloetide
atggccttaccagtgaccgccttgctcctgccgctggccttgctgctccacgccgccaggccggcatgccaggtccagctcgtcgagtccggcggcggcctcgtccaggccggcgactccgtcaccctctcctgcaccgcctccggccgcaccttctcctcctacgccctcgcctggttccgccagcgccccggcaaggagcgcgagttcgtcgccggcctccgctggggcggccccaccaactacgccgactccgtcaaggaccgcttcaccatctccggcgactccgccaagcacaccatgtacctccagatgaactccctcaagcccgaggacaccgccgtctactactgcggctacaaccccggcggctgggccgtcccctcccagtacgagtacgactcctggggccagggcacccaggtcaccgtctcctccggtaccggcggaggcggatctggcggcggaggtagcggtggcggaggatctgaattcaatgctggcgtgacccagacacctaagttccaggtgctgaaaaccggccagagcatgaccctgcaatgcgcccaggacatgaaccatgagtacatgagctggtacagacaggaccccggcatgggcctgagactgatccactactctgtggctatccagaccaccgaccagggcgaagtgcccaatggctacaacgtgtccagaagcaccatcgaggacttcccactgagactgctgtctgccgctcctagccagaccagcgtgtacttttgtgccagcagctacctgggcaacaccggcgagctgttttttggcgagggcagcagactgaccgtgctcgagatccagaaccctgatcctgccgtgtaccagctgcgggatagcaagagcagcgacaagagcgtgtgtctgttcaccgacttcgacagccagaccaacgtgtcccagagcaaggactccgacgtgtacatcaccgataagtgcgtgctggacatgcggagcatggacttcaagagcaactccgccgtggcctggtccaacaagtccgatttcgcctgcgccaacgccttcaacaacagcattatccccgaggacacattcttcccaagccccgagagcagctgcgacgtgaagctggtggaaaagagcttcgagacagacaccaacctgaacttccagaacctgagcgtgatcggcttcagaatcctgctgctgaaagtggccggctttaacctgctgatgaccctgcggctgtggtccagccgcgccaagagaagcggatctggcgtgaagcagaccctgaatttcgacctgctgaagctggctggcgacgtggaatccaacccaggccctactagtatggactggatttggcgcatccttttccttgtcggcgctgctaccggcgcgcattccttcgaacaagaagtgacacagatccctgccgctctgtctgtgcctgagggcgaaaacctggtgctgaactgctccttcaccgacagcgccatctacaacctccagtggttcaggcaggaccctggaaagggactgacaagcctgctgctgatccagagcagccagagagagcagacctccggcagactgaatgccagcctggataagagcagcggcaggtctaccctgtatatcgccgcttctcagcctggcgatagcgccacatatctgtgtgctgtgcggcctacaagcggcggcagctacatccctacatttggcagaggcaccagcctgatcgtgcacccttatgaggacctgaagaacgtgttcccacctgaggtggccgtgttcgagcctagcgaggccgagatcagccacacccagaaagccaccctcgtgtgcctggctaccggcttctaccccgaccatgtggaactgtcttggtgggtcaacggcaaagaggtgcacagcggcgtgtgtaccgacccccagccactgaaagaacagcccgccctgaacgacagccggtactgcctgagcagcagactgagagtgtccgccaccttctggcagaacccccggaaccacttcagatgccaggtgcagttctacggcctgagcgagaacgacgagtggacccaggacagagccaagcccgtgacccagatcgtgtctgccgaagcctggggcagagccgattgcggctttaccagcgagagctaccagcagggcgtgctgagcgccaccatcctgtacgagatcctgctgggcaaggccaccctgtacgccgtgctggtgtctgccctggtgctgatggctatggtcaagcggaaggacagccggggaagggccaagcgatctggatctggagcaacaaacttctcactactcaaacaagcaggtgacgtggaggagaatcccgggccttctagaggcgggatccacaccatggctacctacgaggtgctgtgcgaggtggcaagaaagctgggcaccgacgacagagaagtggtgctgttcctgctgaacgtgttcatccctcagcctacactggcccagctgatcggtgcactgagagccctgaaagaggaaggccggctgacctttcctctgctggccgaatgcctgttcagagccggaagaagggatctgctgcgggacctgctgcatctggaccccagatttctggaaagacacctggccggcaccatgagctacttcagcccttaccagctgaccgtgctgcacgttgacggcgaactgtgcgccagagatattcggagcctgatcttcctgagcaaggacaccatcggcagccggtctacccctcagacatttctgcactgggtgtactgcatggaaaacctggacctgctcggccccacagatgtggatgccctgatgtccatgctgagaagcctgagcagagtggacctccagagacaggtgcagacactgatgggactgcacctgagcggacctagccacagccagcactacagacacacccct

SEQ ID NO: 4029 - DNA, 3120 bp, Artificial Sequence
  Synthetic Polynucloetide
atggccttaccagtgaccgccttgctcctgccgctggccttgctgctccacgccgccaggccgctcgaggggaaaccaattcccaaccctcttctgggactggattcaaccggcagcggcgaggacctgaagaacgtgttcccacctgaggtggccgtgttcgagcctagcaaggccgagatcgcccacacccagaaagccaccctcgtgtgcctggctaccggcttctaccccgaccatgtggaactgtcttggtgggtcaacggcaaagaggtgcacagcggcgtgtgtaccgacccccagccactgaaagaacagcccgccctgaacgacagccggtactgcctgagcagcagactgagagtgtccgccaccttctggcagaacccccggaaccacttcagatgccaggtgcagttctacggcctgagcgagaacgacgagtggacccaggacagagccaagcccgtgacccagatcgtgtctgccgaagcctggggcagagccgattgcggcatcaccagcgccagctaccaccagggcgtgctgagcgccaccatcctgtacgagatcctgctgggcaaggccaccctgtacgccgtgctggtgtctgccctggtgctgatggctatggtcaagcggaaggacagccggggaagggccaagcgatctggatctggagcaacaaacttctcactactcaaacaagcaggtgacgtggaggagaatcccgggcctactagcatggccttaccagtgaccgccttgctcctgccgctggccttgctgctccacgccgccaggccggcatgccaggtccagctcgtcgagtccggcggcggcctcgtccaggccggcgactccgtcaccctctcctgcaccgcctccggccgcaccttctcctcctacgccctcgcctggttccgccagcgccccggcaaggagcgcgagttcgtcgccggcctccgctggggcggccccaccaactacgccgactccgtcaaggaccgcttcaccatctccggcgactccgccaagcacaccatgtacctccagatgaactccctcaagcccgaggacaccgccgtctactactgcggctacaaccccggcggctgggccgtcccctcccagtacgagtacgactcctggggccagggcacccaggtcaccgtctcctccggtaccggcggaggcggatctggcggcggaggtagcggtggcggaggatctgaattcaatgctggcgtgacccagacacctaagttccaggtgctgaaaaccggccagagcatgaccctgcaatgcgcccaggacatgaaccatgagtacatgagctggtacagacaggaccccggcatgggcctgagactgatccactactctgtggctatccagaccaccgaccagggcgaagtgcccaatggctacaacgtgtccagaagcaccatcgaggacttcccactgagactgctgtctgccgctcctagccagaccagcgtgtacttttgtgccagcagctacctgggcaacaccggcgagctgttttttggcgagggcagcagactgaccgtgggcggaggcggaagtggaggcggaggatctggcggcggaggctctcaagaagtgacacagatccctgccgctctgtctgtgcctgagggcgaaaacctggtgctgaactgctccttcaccgacagcgccatctacaacctccagtggttcaggcaggaccctggaaagggactgacaagcctgctgctgatccagagcagccagagagagcagacctccggcagactgaatgccagcctggataagagcagcggcaggtctaccctgtatatcgccgcttctcagcctggcgatagcgccacatatctgtgtgctgtgcggcctacaagcggcggcagctacatccctacatttggcagaggcaccagcctgatcgtgcacccttatgagcagaaactgatctcggaagaggatgggagcggcatccagaaccctgatcctgccgtgtaccagctgcgggatagcaagagcagcgacaagagcgtgtgtctgttcaccgacttcgacagccagaccaacgtgtcccagagcaaggactccgacgtgtacatcaccgataagtgcgtgctggacatgcggagcatggacttcaagagcaactccgccgtggcctggtccaacaagtccgatttcgcctgcgccaacgccttcaacaacagcattatccccgaggacacattcttcccaagcagcgacgtgccctgcgacgtgaagctggtggaaaagagcttcgagacagacaccaacctgaacttccagaacctgagcgtgatcggcttcagaatcctgctgctgaaagtggccggctttaacctgctgatgaccctgcggctgtggtccagccgcgccaagagaagcggatctggcgtgaagcagaccctgaatttcgacctgctgaagctggctggcgacgtggaatccaacccaggcccttctagaggccatatgaccgagtacaagcccacggtgcgcctcgccacccgcgacgacgtccccagggccgtacgcaccctcgccgccgcgttcgccgactaccccgccacgcgccacaccgtcgatccggaccgccacatcgagcgggtcaccgagctgcaagaactcttcctcacgcgcgtcgggctcgacatcggcaaggtgtgggtcgcggacgacggcgccgcggtggcggtctggaccacgccggagagcgtcgaagcgggggcggtgttcgccgagatcggcccgcgcatggccgagttgagcggttcccggctggccgcgcagcaacagatggaaggcctcctggcgccgcaccggcccaaggagcccgcgtggttcctggccaccgtcggcgtctcgcccgaccaccagggcaagggtctgggcagcgccgtcgtgctccccggagtggaggcggccgagcgcgccggggtgcccgccttcctggagacctccgcgccccgcaacctccccttctacgagcggctcggcttcaccgtcaccgccgacgtcgaggtgcccgaaggaccgcgcacctggtgcatgacccgcaagcccggtgcctga

SEQ ID NO: 4030 - DNA, 3123 bp, Artificial Sequence
  Synthetic Polynucloetide
atggccttaccagtgaccgccttgctcctgccgctggccttgctgctccacgccgccaggccgctcgagcagaaactgatctcggaagaggatctgggctccggcgatcgccctgatcctgccgtgtaccagctgcgggatagcaagagcagcgacaagagcgtgtgtctgttcaccgacttcgacagccagaccaacgtgtcccagagcaaggactccgacgtgtacatcaccgataagtgcgtgctggacatgcggagcatggacttcaagagcaactccgccgtggcctggtccaacaagtccgatttcgcctgcgccaacgccttcaacaacagcattatccccgaggacacattcttcccaagccccgagagcagctgcgacgtgaagctggtggaaaagagcttcgagacagacaccaacctgaacttccagaacctgagcgtgatcggcttcagaatcctgctgctgaaagtggccggctttaacctgctgatgaccctgcggctgtggtccagctctagtcgcgccaagagaagcggatctggcgtgaagcagaccctgaatttcgacctgctgaagctggctggcgacgtggaatccaacccaggccccactagcatggccttaccagtgaccgccttgctcctgccgctggccttgctgctccacgccgccaggccggcatgccaggtccagctcgtcgagtccggcggcggcctcgtccaggccggcgactccgtcaccctctcctgcaccgcctccggccgcaccttctcctcctacgccctcgcctggttccgccagcgccccggcaaggagcgcgagttcgtcgccggcctccgctggggcggccccaccaactacgccgactccgtcaaggaccgcttcaccatctccggcgactccgccaagcacaccatgtacctccagatgaactccctcaagcccgaggacaccgccgtctactactgcggctacaaccccggcggctgggccgtcccctcccagtacgagtacgactcctggggccagggcacccaggtcaccgtctcctccggtaccggcggaggcggatctggcggcggaggtagcggtggcggaggatctgaattcaatgctggcgtgacccagacacctaagttccaggtgctgaaaaccggccagagcatgaccctgcaatgcgcccaggacatgaaccatgagtacatgagctggtacagacaggaccccggcatgggcctgagactgatccactactctgtggctatccagaccaccgaccagggcgaagtgcccaatggctacaacgtgtccagaagcaccatcgaggacttcccactgagactgctgtctgccgctcctagccagaccagcgtgtacttttgtgccagcagctacctgggcaacaccggcgagctgttttttggcgagggcagcagactgaccgtgggcggaggcggaagtggaggcggaggatctggcggcggaggctctcaagaagtgacacagatccctgccgctctgtctgtgcctgagggcgaaaacctggtgctgaactgctccttcaccgacagcgccatctacaacctccagtggttcaggcaggaccctggaaagggactgacaagcctgctgctgatccagagcagccagagagagcagacctccggcagactgaatgccagcctggataagagcagcggcaggtctaccctgtatatcgccgcttctcagcctggcgatagcgccacatatctgtgtgctgtgcggcctacaagcggcggcagctacatccctacatttggcagaggcaccagcctgatcgtgcacccttatgggaaaccaattcccaaccctcttctgggactggattcaaccggcagcggcgaggacctgaagaacgtgttcccacctgaggtggccgtgttcgagcctagcgaggccgagatcagccacacccagaaagccaccctcgtgtgcctggctaccggcttctaccccgaccatgtggaactgtcttggtgggtcaacggcaaagaggtgcacagcggcgtgtgtaccgacccccagccactgaaagaacagcccgccctgaacgacagccggtactgcctgagcagcagactgagagtgtccgccaccttctggcagaacccccggaaccacttcagatgccaggtgcagttctacggcctgagcgagaacgacgagtggacccaggacagagccaagcccgtgacccagatcgtgtctgccgaagcctggggcagagccgattgcggctttaccagcgagagctaccagcagggcgtgctgagcgccaccatcctgtacgagatcctgctgggcaaggccaccctgtacgccgtgctggtgtctgccctggtgctgatggctatggtcaagcggaaggacagccggggaagggccaagcgatctggatctggagcaacaaacttctcactactcaaacaagcaggtgacgtggaggagaatcccgggccttctagaggccatatgaccgagtacaagcccacggtgcgcctcgccacccgcgacgacgtccccagggccgtacgcaccctcgccgccgcgttcgccgactaccccgccacgcgccacaccgtcgatccggaccgccacatcgagcgggtcaccgagctgcaagaactcttcctcacgcgcgtcgggctcgacatcggcaaggtgtgggtcgcggacgacggcgccgcggtggcggtctggaccacgccggagagcgtcgaagcgggggcggtgttcgccgagatcggcccgcgcatggccgagttgagcggttcccggctggccgcgcagcaacagatggaaggcctcctggcgccgcaccggcccaaggagcccgcgtggttcctggccaccgtcggcgtctcgcccgaccaccagggcaagggtctgggcagcgccgtcgtgctccccggagtggaggcggccgagcgcgccggggtgcccgccttcctggagacctccgcgccccgcaacctccccttctacgagcggctcggcttcaccgtcaccgccgacgtcgaggtgcccgaaggaccgcgcacctggtgcatgacccgcaagcccggtgcctga

SEQ ID NO: 4031 - DNA, 2985 bp, Artificial Sequence
  Synthetic Polynucloetide
atggccttaccagtgaccgccttgctcctgccgctggccttgctgctccacgccgccaggccggcatgccaggtccagctcgtcgagtccggcggcggcctcgtccaggccggcgactccgtcaccctctcctgcaccgcctccggccgcaccttctcctcctacgccctcgcctggttccgccagcgccccggcaaggagcgcgagttcgtcgccggcctccgctggggcggccccaccaactacgccgactccgtcaaggaccgcttcaccatctccggcgactccgccaagcacaccatgtacctccagatgaactccctcaagcccgaggacaccgccgtctactactgcggctacaaccccggcggctgggccgtcccctcccagtacgagtacgactcctggggccagggcacccaggtcaccgtctcctccggtaccggcggaggcggatctggcggcggaggtagcggtggcggaggatctgaattcaatgctggcgtgacccagacacctaagttccaggtgctgaaaaccggccagagcatgaccctgcaatgcgcccaggacatgaaccatgagtacatgagctggtacagacaggaccccggcatgggcctgagactgatccactactctgtggctatccagaccaccgaccagggcgaagtgcccaatggctacaacgtgtccagaagcaccatcgaggacttcccactgagactgctgtctgccgctcctagccagaccagcgtgtacttttgtgccagcagctacctgggcaacaccggcgagctgttttttggcgagggcagcagactgaccgtgctcgaggacctgaagaacgtgttcccacctgaggtggccgtgttcgagcctagcgaggccgagatcagccacacccagaaagccaccctcgtgtgcctggctaccggcttctaccccgaccatgtggaactgtcttggtgggtcaacggcaaagaggtgcacagcggcgtgtctaccgacccccagccactgaaagaacagcccgccctgaacgacagccggtactgcctgagcagcagactgagagtgtccgccaccttctggcagaacccccggaaccacttcagatgccaggtgcagttctacggcctgagcgagaacgacgagtggacccaggacagagccaagcccgtgacccagatcgtgtctgccgaagcctggggcagagccgattgcggctttaccagcgagagctaccagcagggcgtgctgagcgccaccatcctgtacgagatcctgctgggcaaggccaccctgtacgccgtgctggtgtctgccctggtgctgatggctatggtcaagcggaaggacagccggggaagggccaagcgatctggatctggagcaacaaacttctcactactcaaacaagcaggtgacgtggaggagaatcccgggcctactagtatggactggatttggcgcatccttttccttgtcggcgctgctaccggcgcgcattccttcgaacaagaagtgacacagatccctgccgctctgtctgtgcctgagggcgaaaacctggtgctgaactgctccttcaccgacagcgccatctacaacctccagtggttcaggcaggaccctggaaagggactgacaagcctgctgctgatccagagcagccagagagagcagacctccggcagactgaatgccagcctggataagagcagcggcaggtctaccctgtatatcgccgcttctcagcctggcgatagcgccacatatctgtgtgctgtgcggcctacaagcggcggcagctacatccctacatttggcagaggcaccagcctgatcgtgcacccttatatccagaaccctgatcctgccgtgtaccagctgcgggatagcaagagcagcgacaagagcgtgtgtctgttcaccgacttcgacagccagaccaacgtgtcccagagcaaggactccgacgtgtacatcaccgataagaccgtgctggacatgcggagcatggacttcaagagcaactccgccgtggcctggtccaacaagtccgatttcgcctgcgccaacgccttcaacaacagcattatccccgaggacacattcttcccaagccccgagagcagctgcgacgtgaagctggtggaaaagagcttcgagacagacaccaacctgaacttccagaacctgagcgtgatcggcttcagaatcctgctgctgaaagtggccggctttaacctgctgatgaccctgcggctgtggtccagccgcgccaagagaagcggatctggcgtgaagcagaccctgaatttcgacctgctgaagctggctggcgacgtggaatccaacccaggcccttctagaggccatatgaccgagtacaagcccacggtgcgcctcgccacccgcgacgacgtccccagggccgtacgcaccctcgccgccgcgttcgccgactaccccgccacgcgccacaccgtcgatccggaccgccacatcgagcgggtcaccgagctgcaagaactcttcctcacgcgcgtcgggctcgacatcggcaaggtgtgggtcgcggacgacggcgccgcggtggcggtctggaccacgccggagagcgtcgaagcgggggcggtgttcgccgagatcggcccgcgcatggccgagttgagcggttcccggctggccgcgcagcaacagatggaaggcctcctggcgccgcaccggcccaaggagcccgcgtggttcctggccaccgtcggcgtctcgcccgaccaccagggcaagggtctgggcagcgccgtcgtgctccccggagtggaggcggccgagcgcgccggggtgcccgccttcctggagacctccgcgccccgcaacctccccttctacgagcggctcggcttcaccgtcaccgccgacgtcgaggtgcccgaaggaccgcgcacctggtgcatgacccgcaagcccggtgcctga

SEQ ID NO: 4032 - DNA, 3231 bp, Artificial Sequence
  Synthetic Polynucloetide
atggccttaccagtgaccgccttgctcctgccgctggccttgctgctccacgccgccaggccggcatgccaggtccagctcgtcgagtccggcggcggcctcgtccaggccggcgactccgtcaccctctcctgcaccgcctccggccgcaccttctcctcctacgccctcgcctggttccgccagcgccccggcaaggagcgcgagttcgtcgccggcctccgctggggcggccccaccaactacgccgactccgtcaaggaccgcttcaccatctccggcgactccgccaagcacaccatgtacctccagatgaactccctcaagcccgaggacaccgccgtctactactgcggctacaaccccggcggctgggccgtcccctcccagtacgagtacgactcctggggccagggcacccaggtcaccgtctcctccggtaccggcggaggcggatctggcggcggaggtagcggtggcggaggatctgaattcaatgctggcgtgacccagacacctaagttccaggtgctgaaaaccggccagagcatgaccctgcaatgcgcccaggacatgaaccatgagtacatgagctggtacagacaggaccccggcatgggcctgagactgatccactactctgtggctatccagaccaccgaccagggcgaagtgcccaatggctacaacgtgtccagaagcaccatcgaggacttcccactgagactgctgtctgccgctcctagccagaccagcgtgtacttttgtgccagcagctacctgggcaacaccggcgagctgttttttggcgagggcagcagactgaccgtgctcgaggacctgaagaacgtgttcccacctgaggtggccgtgttcgagcctagcgaggccgagatcagccacacccagaaagccaccctcgtgtgcctggctaccggcttctaccccgaccatgtggaactgtcttggtgggtcaacggcaaagaggtgcacagcggcgtgtctaccgacccccagccactgaaagaacagcccgccctgaacgacagccggtactgcctgagcagcagactgagagtgtccgccaccttctggcagaacccccggaaccacttcagatgccaggtgcagttctacggcctgagcgagaacgacgagtggacccaggacagagccaagcccgtgacccagatcgtgtctgccgaagcctggggcagagccgattgcggctttaccagcgagagctaccagcagggcgtgctgagcgccaccatcctgtacgagatcctgctgggcaaggccaccctgtacgccgtgctggtgtctgccctggtgctgatggctatggtcaagcggaaggacagccggggaagggccaagcgatctggatctggagcaacaaacttctcactactcaaacaagcaggtgacgtggaggagaatcccgggcctactagtatggactggatttggcgcatccttttccttgtcggcgctgctaccggcgcgcattccttcgaacaagaagtgacacagatccctgccgctctgtctgtgcctgagggcgaaaacctggtgctgaactgctccttcaccgacagcgccatctacaacctccagtggttcaggcaggaccctggaaagggactgacaagcctgctgctgatccagagcagccagagagagcagacctccggcagactgaatgccagcctggataagagcagcggcaggtctaccctgtatatcgccgcttctcagcctggcgatagcgccacatatctgtgtgctgtgcggcctacaagcggcggcagctacatccctacatttggcagaggcaccagcctgatcgtgcacccttatgagcagaaactgatctcggaagaggatgggagcggcaccccattcccttctctggcccctcccatcatgctgctggtggacggcaagcagcagatggtggtcgtgtgcctggtgctggatgtggccccacctggactggacagccccatctggtttagcgccggcaatggctctgccctggacgcctttacctacggcccaagccctgccaccgatggcacctggacaaatctggcccacctgagcctgcccagcgaggaactggcttcttgggagcctctcgtgtgccacacaggacctggcgctgagggacacagcagatccacccagcctatgcacctgtctggcgaggccagcaccgccagaacctgtcctcaggaacctctgagaggcacccctggcggagcactgtggctgggagtgctgagactgctgctgttcaagctgctgctgtttgacctgctgctgacctgctcctgtctgtgcgatcctgccggccctctgccttctcctgccaccaccacaagactgagagccctgggcagccacagactgcaccctgccacagagacaggcggcagagaggccacaagcagccctagaccccagcccagagacagaagatggggcgataccccccctggcagaaagcctggatctccagtccgcgccaagagaagcggatctggcgtgaagcagaccctgaatttcgacctgctgaagctggctggcgacgtggaatccaacccaggcccttctagaggccatatgaccgagtacaagcccacggtgcgcctcgccacccgcgacgacgtccccagggccgtacgcaccctcgccgccgcgttcgccgactaccccgccacgcgccacaccgtcgatccggaccgccacatcgagcgggtcaccgagctgcaagaactcttcctcacgcgcgtcgggctcgacatcggcaaggtgtgggtcgcggacgacggcgccgcggtggcggtctggaccacgccggagagcgtcgaagcgggggcggtgttcgccgagatcggcccgcgcatggccgagttgagcggttcccggctggccgcgcagcaacagatggaaggcctcctggcgccgcaccggcccaaggagcccgcgtggttcctggccaccgtcggcgtctcgcccgaccaccagggcaagggtctgggcagcgccgtcgtgctccccggagtggaggcggccgagcgcgccggggtgcccgccttcctggagacctccgcgccccgcaacctccccttctacgagcggctcggcttcaccgtcaccgccgacgtcgaggtgcccgaaggaccgcgcacctggtgcatgacccgcaagcccggtgcctga

SEQ ID NO: 4033 - DNA, 3285 bp, Artificial Sequence
  Synthetic Polynucloetide
atggccttaccagtgaccgccttgctcctgccgctggccttgctgctccacgccgccaggccgctcgaggacctgaagaacgtgttcccacctgaggtggccgtgttcgagcctagcgaggccgagatcagccacacccagaaagccaccctcgtgtgcctggctaccggcttctaccccgaccatgtggaactgtcttggtgggtcaacggcaaagaggtgcacagcggcgtgtctaccgacccccagccactgaaagaacagcccgccctgaacgacagccggtactgcctgagcagcagactgagagtgtccgccaccttctggcagaacccccggaaccacttcagatgccaggtgcagttctacggcctgagcgagaacgacgagtggacccaggacagagccaagcccgtgacccagatcgtgtctgccgaagcctggggcagagccgattgcggctttaccagcgagagctaccagcagggcgtgctgagcgccaccatcctgtacgagatcctgctgggcaaggccaccctgtacgccgtgctggtgtctgccctggtgctgatggctatggtcaagcggaaggacagccggggaagggccaagcgatctggatctggagcaacaaacttctcactactcaaacaagcaggtgacgtggaggagaatcccgggcctactagcatggccttaccagtgaccgccttgctcctgccgctggccttgctgctccacgccgccaggccggcatgccaggtccagctcgtcgagtccggcggcggcctcgtccaggccggcgactccgtcaccctctcctgcaccgcctccggccgcaccttctcctcctacgccctcgcctggttccgccagcgccccggcaaggagcgcgagttcgtcgccggcctccgctggggcggccccaccaactacgccgactccgtcaaggaccgcttcaccatctccggcgactccgccaagcacaccatgtacctccagatgaactccctcaagcccgaggacaccgccgtctactactgcggctacaaccccggcggctgggccgtcccctcccagtacgagtacgactcctggggccagggcacccaggtcaccgtctcctccggtaccggcggaggcggatctggcggcggaggtagcggtggcggaggatctgaattcaatgctggcgtgacccagacacctaagttccaggtgctgaaaaccggccagagcatgaccctgcaatgcgcccaggacatgaaccatgagtacatgagctggtacagacaggaccccggcatgggcctgagactgatccactactctgtggctatccagaccaccgaccagggcgaagtgcccaatggctacaacgtgtccagaagcaccatcgaggacttcccactgagactgctgtctgccgctcctagccagaccagcgtgtacttttgtgccagcagctacctgggcaacaccggcgagctgttttttggcgagggcagcagactgaccgtgggcggaggcggaagtggaggcggaggatctggcggcggaggctctcaagaagtgacacagatccctgccgctctgtctgtgcctgagggcgaaaacctggtgctgaactgctccttcaccgacagcgccatctacaacctccagtggttcaggcaggaccctggaaagggactgacaagcctgctgctgatccagagcagccagagagagcagacctccggcagactgaatgccagcctggataagagcagcggcaggtctaccctgtatatcgccgcttctcagcctggcgatagcgccacatatctgtgtgctgtgcggcctacaagcggcggcagctacatccctacatttggcagaggcaccagcctgatcgtgcacccttatgagcagaaactgatctcggaagaggatctggggagcggcaccccattcccttctctggcccctcccatcatgctgctggtggacggcaagcagcagatggtggtcgtgtgcctggtgctggatgtggccccacctggactggacagccccatctggtttagcgccggcaatggctctgccctggacgcctttacctacggcccaagccctgccaccgatggcacctggacaaatctggcccacctgagcctgcccagcgaggaactggcttcttgggagcctctcgtgtgccacacaggacctggcgctgagggacacagcagatccacccagcctatgcacctgtctggcgaggccagcaccgccagaacctgtcctcaggaacctctgagaggcacccctggcggagcactgtggctgggagtgctgagactgctgctgttcaagctgctgctgtttgacctgctgctgacctgctcctgtctgtgcgatcctgccggccctctgccttctcctgccaccaccacaagactgagagccctgggcagccacagactgcaccctgccacagagacaggcggcagagaggccacaagcagccctagaccccagcccagagacagaagatggggcgataccccccctggcagaaagcctggatctccagtccgcgccaagagaagcggatctggcgtgaagcagaccctgaatttcgacctgctgaagctggctggcgacgtggaatccaacccaggcccttctagatctagaggccatatgaccgagtacaagcccacggtgcgcctcgccacccgcgacgacgtccccagggccgtacgcaccctcgccgccgcgttcgccgactaccccgccacgcgccacaccgtcgatccggaccgccacatcgagcgggtcaccgagctgcaagaactcttcctcacgcgcgtcgggctcgacatcggcaaggtgtgggtcgcggacgacggcgccgcggtggcggtctggaccacgccggagagcgtcgaagcgggggcggtgttcgccgagatcggcccgcgcatggccgagttgagcggttcccggctggccgcgcagcaacagatggaaggcctcctggcgccgcaccggcccaaggagcccgcgtggttcctggccaccgtcggcgtctcgcccgaccaccagggcaagggtctgggcagcgccgtcgtgctccccggagtggaggcggccgagcgcgccggggtgcccgccttcctggagacctccgcgccccgcaacctccccttctacgagcggctcggcttcaccgtcaccgccgacgtcgaggtgcccgaaggaccgcgcacctggtgcatgacccgcaagcccggtgcctga

SEQ ID NO: 4034 - DNA, 3096 bp, Artificial Sequence
  Synthetic Polynucloetide
atggccttaccagtgaccgccttgctcctgccgctggccttgctgctccacgccgccaggccggcatgccaggtccagctcgtcgagtccggcggcggcctcgtccaggccggcgactccgtcaccctctcctgcaccgcctccggccgcaccttctcctcctacgccctcgcctggttccgccagcgccccggcaaggagcgcgagttcgtcgccggcctccgctggggcggccccaccaactacgccgactccgtcaaggaccgcttcaccatctccggcgactccgccaagcacaccatgtacctccagatgaactccctcaagcccgaggacaccgccgtctactactgcggctacaaccccggcggctgggccgtcccctcccagtacgagtacgactcctggggccagggcacccaggtcaccgtctcctccggtaccggcggaggcggatctggcggcggaggtagcggtggcggaggatctgaattcaatgctggcgtgacccagacacctaagttccaggtgctgaaaaccggccagagcatgaccctgcaatgcgcccaggacatgaaccatgagtacatgagctggtacagacaggaccccggcatgggcctgagactgatccactactctgtggctatccagaccaccgaccagggcgaagtgcccaatggctacaacgtgtccagaagcaccatcgaggacttcccactgagactgctgtctgccgctcctagccagaccagcgtgtacttttgtgccagcagctacctgggcaacaccggcgagctgttttttggcgagggcagcagactgaccgtgctcgaggggaaaccaattcccaaccctcttctgggactggattcaaccggcagcggcgacaagcagctggacgccgacgtgtcccccaagcctaccatcttcctgccctctatcgccgagacaaagctccagaaggccggcacctacctgtgcctgctggaaaagttcttcccagatgtgattaagatccactggcaggaaaagaagtccaacaccatcctgggcagccaggaaggcaacaccatgaagaccaacgacacctacatgaagttcagctggctgaccgtgcccgagaagtccctggacaaagaacacagatgcatcgtgcggcacgaaaacaacaagaacggcgtggaccaggaaatcatcttcccacccatcaagaccgatgtgattacaatggaccccaaggacaactgctccaaggacgccaacgataccctgctgctccagctgaccaacaccagcgcctactacatgtacttgttgctgctgctgaagtccgtggtgtacttcgccatcatcacatgctgcctgctgcggagaaccgccttctgctgcaacggcgagaagtctagggccaagcgatctggatctggagcaacaaacttctcactactcaaacaagcaggtgacgtggaggagaatcccgggcctactagtatggactggatttggcgcatccttttccttgtcggcgctgctaccggcgcgcattccttcgaacaagaagtgacacagatccctgccgctctgtctgtgcctgagggcgaaaacctggtgctgaactgctccttcaccgacagcgccatctacaacctccagtggttcaggcaggaccctggaaagggactgacaagcctgctgctgatccagagcagccagagagagcagacctccggcagactgaatgccagcctggataagagcagcggcaggtctaccctgtatatcgccgcttctcagcctggcgatagcgccacatatctgtgtgctgtgcggcctacaagcggcggcagctacatccctacatttggcagaggcaccagcctgatcgtgcacccttatgagcagaaactgatctcggaagaggatgggagcggcagccagcctcacaccaagcccagcgtgttcgtgatgaagaacggcaccaacgtggcctgcctcgtgaaagagttctaccccaaggacatcaggatcaacctggtgtccagcaagaagatcaccgagttcgaccccgccatcgtgatctcccccagcggcaagtacaacgccgtgaagctggggaagtacgaggacagcaacagcgtgacctgctccgtgcagcacgacaacaagaccgtgcacagcaccgactttgaagtgaaaaccgactccaccgaccacgtgaagcccaaagagacagagaacaccaagcagcccagcaagagctgccacaagcccaaggccatcgtgcacaccgagaaagtgaacatgatgagcctgaccgtgctgggcctgcggatgctgttcgccaaaaccgtggccgtgaacttcctgctgaccgccaagctgttcttcctccgcgccaagagaagcggatctggcgtgaagcagaccctgaatttcgacctgctgaagctggctggcgacgtggaatccaacccaggcccttctagaggccatatgaccgagtacaagcccacggtgcgcctcgccacccgcgacgacgtccccagggccgtacgcaccctcgccgccgcgttcgccgactaccccgccacgcgccacaccgtcgatccggaccgccacatcgagcgggtcaccgagctgcaagaactcttcctcacgcgcgtcgggctcgacatcggcaaggtgtgggtcgcggacgacggcgccgcggtggcggtctggaccacgccggagagcgtcgaagcgggggcggtgttcgccgagatcggcccgcgcatggccgagttgagcggttcccggctggccgcgcagcaacagatggaaggcctcctggcgccgcaccggcccaaggagcccgcgtggttcctggccaccgtcggcgtctcgcccgaccaccagggcaagggtctgggcagcgccgtcgtgctccccggagtggaggcggccgagcgcgccggggtgcccgccttcctggagacctccgcgccccgcaacctccccttctacgagcggctcggcttcaccgtcaccgccgacgtcgaggtgcccgaaggaccgcgcacctggtgcatgacccgcaagcccggtgcctga

SEQ ID NO: 4035 - DNA, 2307 bp, Artificial Sequence
  Synthetic Polynucloetide
atggccttaccagtgaccgccttgctcctgccgctggccttgctgctccacgccgccaggccggcatgccaggtccagctcgtcgagtccggcggcggcctcgtccaggccggcgactccgtcaccctctcctgcaccgcctccggccgcaccttctcctcctacgccctcgcctggttccgccagcgccccggcaaggagcgcgagttcgtcgccggcctccgctggggcggccccaccaactacgccgactccgtcaaggaccgcttcaccatctccggcgactccgccaagcacaccatgtacctccagatgaactccctcaagcccgaggacaccgccgtctactactgcggctacaaccccggcggctgggccgtcccctcccagtacgagtacgactcctggggccagggcacccaggtcaccgtctcctccggtaccggcggaggcggatctggcggcggaggtagcggtggcggaggatctgaattcaatgctggcgtgacccagacacctaagttccaggtgctgaaaaccggccagagcatgaccctgcaatgcgcccaggacatgaaccatgagtacatgagctggtacagacaggaccccggcatgggcctgagactgatccactactctgtggctatccagaccaccgaccagggcgaagtgcccaatggctacaacgtgtccagaagcaccatcgaggacttcccactgagactgctgtctgccgctcctagccagaccagcgtgtacttttgtgccagcagctacctgggcaacaccggcgagctgttttttggcgagggcagcagactgaccgtgctcgagagccagcctcacaccaagcccagcgtgttcgtgatgaagaacggcaccaacgtggcctgcctcgtgaaagagttctaccccaaggacatcaggatcaacctggtgtccagcaagaagatcaccgagttcgaccccgccatcgtgatctcccccagcggcaagtacaacgccgtgaagctggggaagtacgaggacagcaacagcgtgacctgctccgtgcagcacgacaacaagaccgtgcacagcaccgactttgaagtgaaaaccgactccaccgaccacgtgaagcccaaagagacagagaacaccaagcagcccagcaagagctgccacaagcccaaggccatcgtgcacaccgagaaagtgaacatgatgagcctgaccgtgctgggcctgcggatgctgttcgccaaaaccgtggccgtgaacttcctgctgaccgccaagctgttcttcctcagggccaagcgatctggatctggagcaacaaacttctcactactcaaacaagcaggtgacgtggaggagaatcccgggcctactagtatggactggatttggcgcatccttttccttgtcggcgctgctaccggcgcgcattccttcgaacaagaagtgacacagatccctgccgctctgtctgtgcctgagggcgaaaacctggtgctgaactgctccttcaccgacagcgccatctacaacctccagtggttcaggcaggaccctggaaagggactgacaagcctgctgctgatccagagcagccagagagagcagacctccggcagactgaatgccagcctggataagagcagcggcaggtctaccctgtatatcgccgcttctcagcctggcgatagcgccacatatctgtgtgctgtgcggcctacaagcggcggcagctacatccctacatttggcagaggcaccagcctgatcgtgcacccttatgacaagcagctggacgccgacgtgtcccccaagcctaccatcttcctgccctctatcgccgagacaaagctccagaaggccggcacctacctgtgcctgctggaaaagttcttcccagatgtgattaagatccactggcaggaaaagaagtccaacaccatcctgggcagccaggaaggcaacaccatgaagaccaacgacacctacatgaagttcagctggctgaccgtgcccgagaagtccctggacaaagaacacagatgcatcgtgcggcacgaaaacaacaagaacggcgtggaccaggaaatcatcttcccacccatcaagaccgatgtgattacaatggaccccaaggacaactgctccaaggacgccaacgataccctgctgctccagctgaccaacaccagcgcctactacatgtacttgttgctgctgctgaagtccgtggtgtacttcgccatcatcacatgctgcctgctgcggagaaccgccttctgctgcaacggcgagaagtct

SEQ ID NO: 4036 - DNA, 3141 bp, Artificial Sequence
  Synthetic Polynucloetide
atggccttaccagtgaccgccttgctcctgccgctggccttgctgctccacgccgccaggccgctcgaggggaaaccaattcccaaccctcttctgggactggattcaaccggcagcggcgacaagcagctggacgccgacgtgtcccccaagcctaccatcttcctgccctctatcgccgagacaaagctccagaaggccggcacctacctgtgcctgctggaaaagttcttcccagatgtgattaagatccactggcaggaaaagaagtccaacaccatcctgggcagccaggaaggcaacaccatgaagaccaacgacacctacatgaagttcagctggctgaccgtgcccgagaagtccctggacaaagaacacagatgcatcgtgcggcacgaaaacaacaagaacggcgtggaccaggaaatcatcttcccacccatcaagaccgatgtgattacaatggaccccaaggacaactgctccaaggacgccaacgataccctgctgctccagctgaccaacaccagcgcctactacatgtacttgttgctgctgctgaagtccgtggtgtacttcgccatcatcacatgctgcctgctgcggagaaccgccttctgctgcaacggcgagaagtctagggccaagcgatctggatctggagcaacaaacttctcactactcaaacaagcaggtgacgtggaggagaatcccgggcctactagcatggccttaccagtgaccgccttgctcctgccgctggccttgctgctccacgccgccaggccggcatgccaggtccagctcgtcgagtccggcggcggcctcgtccaggccggcgactccgtcaccctctcctgcaccgcctccggccgcaccttctcctcctacgccctcgcctggttccgccagcgccccggcaaggagcgcgagttcgtcgccggcctccgctggggcggccccaccaactacgccgactccgtcaaggaccgcttcaccatctccggcgactccgccaagcacaccatgtacctccagatgaactccctcaagcccgaggacaccgccgtctactactgcggctacaaccccggcggctgggccgtcccctcccagtacgagtacgactcctggggccagggcacccaggtcaccgtctcctccggtaccggcggaggcggatctggcggcggaggtagcggtggcggaggatctgaattcaatgctggcgtgacccagacacctaagttccaggtgctgaaaaccggccagagcatgaccctgcaatgcgcccaggacatgaaccatgagtacatgagctggtacagacaggaccccggcatgggcctgagactgatccactactctgtggctatccagaccaccgaccagggcgaagtgcccaatggctacaacgtgtccagaagcaccatcgaggacttcccactgagactgctgtctgccgctcctagccagaccagcgtgtacttttgtgccagcagctacctgggcaacaccggcgagctgttttttggcgagggcagcagactgaccgtgggcggaggcggaagtggaggcggaggatctggcggcggaggctctcaagaagtgacacagatccctgccgctctgtctgtgcctgagggcgaaaacctggtgctgaactgctccttcaccgacagcgccatctacaacctccagtggttcaggcaggaccctggaaagggactgacaagcctgctgctgatccagagcagccagagagagcagacctccggcagactgaatgccagcctggataagagcagcggcaggtctaccctgtatatcgccgcttctcagcctggcgatagcgccacatatctgtgtgctgtgcggcctacaagcggcggcagctacatccctacatttggcagaggcaccagcctgatcgtgcacccttatgagcagaaactgatctcggaagaggatgggagcggcagccagcctcacaccaagcccagcgtgttcgtgatgaagaacggcaccaacgtggcctgcctcgtgaaagagttctaccccaaggacatcaggatcaacctggtgtccagcaagaagatcaccgagttcgaccccgccatcgtgatctcccccagcggcaagtacaacgccgtgaagctggggaagtacgaggacagcaacagcgtgacctgctccgtgcagcacgacaacaagaccgtgcacagcaccgactttgaagtgaaaaccgactccaccgaccacgtgaagcccaaagagacagagaacaccaagcagcccagcaagagctgccacaagcccaaggccatcgtgcacaccgagaaagtgaacatgatgagcctgaccgtgctgggcctgcggatgctgttcgccaaaaccgtggccgtgaacttcctgctgaccgccaagctgttcttcctccgcgccaagagaagcggatctggcgtgaagcagaccctgaatttcgacctgctgaagctggctggcgacgtggaatccaacccaggcccttctagaggccatatgaccgagtacaagcccacggtgcgcctcgccacccgcgacgacgtccccagggccgtacgcaccctcgccgccgcgttcgccgactaccccgccacgcgccacaccgtcgatccggaccgccacatcgagcgggtcaccgagctgcaagaactcttcctcacgcgcgtcgggctcgacatcggcaaggtgtgggtcgcggacgacggcgccgcggtggcggtctggaccacgccggagagcgtcgaagcgggggcggtgttcgccgagatcggcccgcgcatggccgagttgagcggttcccggctggccgcgcagcaacagatggaaggcctcctggcgccgcaccggcccaaggagcccgcgtggttcctggccaccgtcggcgtctcgcccgaccaccagggcaagggtctgggcagcgccgtcgtgctccccggagtggaggcggccgagcgcgccggggtgcccgccttcctggagacctccgcgccccgcaacctccccttctacgagcggctcggcttcaccgtcaccgccgacgtcgaggtgcccgaaggaccgcgcacctggtgcatgacccgcaagcccggtgcctga

SEQ ID NO: 4037 - DNA, 3522 bp, Artificial Sequence
  Synthetic Polynucloetide
atggccttaccagtgaccgccttgctcctgccgctggccttgctgctccacgccgccaggccggcatgccaggtccagctcgtcgagtccggcggcggcctcgtccaggccggcgactccgtcaccctctcctgcaccgcctccggccgcaccttctcctcctacgccctcgcctggttccgccagcgccccggcaaggagcgcgagttcgtcgccggcctccgctggggcggccccaccaactacgccgactccgtcaaggaccgcttcaccatctccggcgactccgccaagcacaccatgtacctccagatgaactccctcaagcccgaggacaccgccgtctactactgcggctacaaccccggcggctgggccgtcccctcccagtacgagtacgactcctggggccagggcacccaggtcaccgtctcctccggtaccggcggaggcggatctggcggcggaggtagcggtggcggaggatctgaattcaatgctggcgtgacccagacacctaagttccaggtgctgaaaaccggccagagcatgaccctgcaatgcgcccaggacatgaaccatgagtacatgagctggtacagacaggaccccggcatgggcctgagactgatccactactctgtggctatccagaccaccgaccagggcgaagtgcccaatggctacaacgtgtccagaagcaccatcgaggacttcccactgagactgctgtctgccgctcctagccagaccagcgtgtacttttgtgccagcagctacctgggcaacaccggcgagctgttttttggcgagggcagcagactgaccgtgggacagcctaaggccaatcctaccgtgacactgttccctccaagcagcgaagaactccaggccaacaaggccacacttgtgtgcctgatctccgacttctaccctggggctgtgacagtggcttggaaggccgatggatctcctgtgaaagccggcgtggaaaccaccaagccatccaagcagagcaacaacaaatacgccgccagctcctacctgagcctgacacctgagcagtggaagtcccacagatcctacagctgccaagtgacccacgaaggcagcaccgtggaaaagacagtggcccctacagagtgcagcggatcccagagcttcggcctgctggaccccaagctgtgctacctgctggatggcatcctgttcatctacggcgtgatcctgaccgccctgttcctgagagtgaagttcagcagaagcgccgacgcccctgcctaccagcagggacagaaccaactgtacaacgagctgaacctgggcagacgggaagagtacgacgtgctggacaagcggagaggcagggaccctgagatgggcggaaagccccagcggagaaagaacccccaggaaggactgtataacgaactccagaaagacaagatggccgaagcctacagcgagatcggcatgaagggcgagcggagaagaggcaagggccacgatggcctgtaccagggcctgagcaccgccaccaaggacacctatgacgccctgcacatgcaggccctgcctccaagaagggccaagcgatctggatctggagcaacaaacttctcactactcaaacaagcaggtgacgtggaggagaatcccgggcctactagtatggactggatttggcgcatccttttccttgtcggcgctgctaccggcgcgcattccttcgaacaagaagtgacacagatccctgccgctctgtctgtgcctgagggcgaaaacctggtgctgaactgctccttcaccgacagcgccatctacaacctccagtggttcaggcaggaccctggaaagggactgacaagcctgctgctgatccagagcagccagagagagcagacctccggcagactgaatgccagcctggataagagcagcggcaggtctaccctgtatatcgccgcttctcagcctggcgatagcgccacatatctgtgtgctgtgcggcctacaagcggcggcagctacatccctacatttggcagaggcaccagcctgatcgtgcacccttatgcctctacaaagggaccctccgtgtttcctctggctcccagcagcaagtctacaagcggaggaacagccgctctgggctgcctggtcaaggattactttcccgagcctgtgaccgtgtcctggaatagcggagcactgacaagcggcgtgcacacctttccagccgtgctgcaaagcagcggcctgtactctctgagcagcgtggtcacagtgcctagctctagcctgggcacccagacctacatctgcaatgtgaaccacaagcctagcaacaccaaggtggacaagagagtggaacccaagagctgtggtacccagagttttgggttgttggaccctaaattgtgctatctgttggacggaatcctgttcatttacggagtgatcctgaccgcattgttcctgcgggttaagttttccagatccgcagacgcacccgcttaccaacaagggcagaaccaactctacaatgaacttaatttggggcggagggaagagtacgacgttctggacaaaaggaggggacgagatcccgagatgggcggaaagcctcagcgaaggaagaatccgcaagaggggctttataacgaactccagaaagataaaatggcagaagcctatagtgagattgggatgaagggagaaaggaggaggggtaaaggtcacgatgggttgtaccaaggattgagcacagccactaaagatacctatgatgcgctccacatgcaggccctgccgccaagacgcgccaagagaagcggatctggcgtgaagcagaccctgaatttcgacctgctgaagctggctggcgacgtggaatccaacccaggcccttctagaggccatatgaccgagtacaagcccacggtgcgcctcgccacccgcgacgacgtccccagggccgtacgcaccctcgccgccgcgttcgccgactaccccgccacgcgccacaccgtcgatccggaccgccacatcgagcgggtcaccgagctgcaagaactcttcctcacgcgcgtcgggctcgacatcggcaaggtgtgggtcgcggacgacggcgccgcggtggcggtctggaccacgccggagagcgtcgaagcgggggcggtgttcgccgagatcggcccgcgcatggccgagttgagcggttcccggctggccgcgcagcaacagatggaaggcctcctggcgccgcaccggcccaaggagcccgcgtggttcctggccaccgtcggcgtctcgcccgaccaccagggcaagggtctgggcagcgccgtcgtgctccccggagtggaggcggccgagcgcgccggggtgcccgccttcctggagacctccgcgccccgcaacctccccttctacgagcggctcggcttcaccgtcaccgccgacgtcgaggtgcccgaaggaccgcgcacctggtgcatgacccgcaagcccggtgcctga

SEQ ID NO: 4038 - DNA, 2871 bp, Artificial Sequence
  Synthetic Polynucloetide
atggccttaccagtgaccgccttgctcctgccgctggccttgctgctccacgccgccaggccggcatgccaggtccagctcgtcgagtccggcggcggcctcgtccaggccggcgactccgtcaccctctcctgcaccgcctccggccgcaccttctcctcctacgccctcgcctggttccgccagcgccccggcaaggagcgcgagttcgtcgccggcctccgctggggcggccccaccaactacgccgactccgtcaaggaccgcttcaccatctccggcgactccgccaagcacaccatgtacctccagatgaactccctcaagcccgaggacaccgccgtctactactgcggctacaaccccggcggctgggccgtcccctcccagtacgagtacgactcctggggccagggcacccaggtcaccgtctcctccggtaccggcggaggcggatctggcggcggaggtagcggtggcggaggatctgaattcaatgctggcgtgacccagacacctaagttccaggtgctgaaaaccggccagagcatgaccctgcaatgcgcccaggacatgaaccatgagtacatgagctggtacagacaggaccccggcatgggcctgagactgatccactactctgtggctatccagaccaccgaccagggcgaagtgcccaatggctacaacgtgtccagaagcaccatcgaggacttcccactgagactgctgtctgccgctcctagccagaccagcgtgtacttttgtgccagcagctacctgggcaacaccggcgagctgttttttggcgagggcagcagactgaccgtgctcgaggacctgaagaacgtgttcccacctgaggtggccgtgttcgagcctagcgaggccgagatcagccacacccagaaagccaccctcgtgtgcctggctaccggcttctaccccgaccatgtggaactgtcttggtgggtcaacggcaaagaggtgcacagcggcgtgtctaccgacccccagccactgaaagaacagcccgccctgaacgacagccggtactgcctgagcagcagactgagagtgtccgccaccttctggcagaacccccggaaccacttcagatgccaggtgcagttctacggcctgagcgagaacgacgagtggacccaggacagagccaagcccgtgacccagatcgtgtctgccgaagcctggggcagagccgattgcggatcccagagcttcggcctgctggaccccaagctgtgctacctgctggatggcatcctgttcatctacggcgtgatcctgaccgccctgttcctgagagtgaagttcagcagaagcgccgacgcccctgcctaccagcagggacagaaccaactgtacaacgagctgaacctgggcagacgggaagagtacgacgtgctggacaagcggagaggcagggaccctgagatgggcggaaagccccagcggagaaagaacccccaggaaggactgtataacgaactccagaaagacaagatggccgaagcctacagcgagatcggcatgaagggcgagcggagaagaggcaagggccacgatggcctgtaccagggcctgagcaccgccaccaaggacacctatgacgccctgcacatgcaggccctgcctccaagaagggccaagcgatctggatctggagcaacaaacttctcactactcaaacaagcaggtgacgtggaggagaatcccgggcctactagtatggactggatttggcgcatccttttccttgtcggcgctgctaccggcgcgcattccttcgaacaagaagtgacacagatccctgccgctctgtctgtgcctgagggcgaaaacctggtgctgaactgctccttcaccgacagcgccatctacaacctccagtggttcaggcaggaccctggaaagggactgacaagcctgctgctgatccagagcagccagagagagcagacctccggcagactgaatgccagcctggataagagcagcggcaggtctaccctgtatatcgccgcttctcagcctggcgatagcgccacatatctgtgtgctgtgcggcctacaagcggcggcagctacatccctacatttggcagaggcaccagcctgatcgtgcacccttatatccagaaccctgatcctgccgtgtaccagctgcgggatagcaagagcagcgacaagagcgtgtgtctgttcaccgacttcgacagccagaccaacgtgtcccagagcaaggactccgacgtgtacatcaccgataagaccgtgctggacatgcggagcatggacttcaagagcaactccgccgtggcctggtccaacaagtccgatttcgcctgcgccaacgccttcaacaacagcattatccccgaggacacattcttcccaagccccgagagcagctgcggtacccagagttttgggttgttggaccctaaattgtgctatctgttggacggaatcctgttcatttacggagtgatcctgaccgcattgttcctgcgggttaagttttccagatccgcagacgcacccgcttaccaacaagggcagaaccaactctacaatgaacttaatttggggcggagggaagagtacgacgttctggacaaaaggaggggacgagatcccgagatgggcggaaagcctcagcgaaggaagaatccgcaagaggggctttataacgaactccagaaagataaaatggcagaagcctatagtgagattgggatgaagggagaaaggaggaggggtaaaggtcacgatgggttgtaccaaggattgagcacagccactaaagatacctatgatgcgctccacatgcaggccctgccgccaaga

SEQ ID NO: 4039 - DNA, 2871 bp, Artificial Sequence
  Synthetic Polynucloetide
atggccttaccagtgaccgccttgctcctgccgctggccttgctgctccacgccgccaggccggcatgccaggtccagctcgtcgagtccggcggcggcctcgtccaggccggcgactccgtcaccctctcctgcaccgcctccggccgcaccttctcctcctacgccctcgcctggttccgccagcgccccggcaaggagcgcgagttcgtcgccggcctccgctggggcggccccaccaactacgccgactccgtcaaggaccgcttcaccatctccggcgactccgccaagcacaccatgtacctccagatgaactccctcaagcccgaggacaccgccgtctactactgcggctacaaccccggcggctgggccgtcccctcccagtacgagtacgactcctggggccagggcacccaggtcaccgtctcctccggtaccggcggaggcggatctggcggcggaggtagcggtggcggaggatctgaattcaatgctggcgtgacccagacacctaagttccaggtgctgaaaaccggccagagcatgaccctgcaatgcgcccaggacatgaaccatgagtacatgagctggtacagacaggaccccggcatgggcctgagactgatccactactctgtggctatccagaccaccgaccagggcgaagtgcccaatggctacaacgtgtccagaagcaccatcgaggacttcccactgagactgctgtctgccgctcctagccagaccagcgtgtacttttgtgccagcagctacctgggcaacaccggcgagctgttttttggcgagggcagcagactgaccgtgctcgaggacctgaagaacgtgttcccacctgaggtggccgtgttcgagcctagcaaggccgagatcgcccacacccagaaagccaccctcgtgtgcctggctaccggcttctaccccgaccatgtggaactgtcttggtgggtcaacggcaaagaggtgcacagcggcgtgtgtaccgacccccagccactgaaagaacagcccgccctgaacgacagccggtactgcctgagcagcagactgagagtgtccgccaccttctggcagaacccccggaaccacttcagatgccaggtgcagttctacggcctgagcgagaacgacgagtggacccaggacagagccaagcccgtgacccagatcgtgtctgccgaagcctggggcagagccgattgcggatcccagagcttcggcctgctggaccccaagctgtgctacctgctggatggcatcctgttcatctacggcgtgatcctgaccgccctgttcctgagagtgaagttcagcagaagcgccgacgcccctgcctaccagcagggacagaaccaactgtacaacgagctgaacctgggcagacgggaagagtacgacgtgctggacaagcggagaggcagggaccctgagatgggcggaaagccccagcggagaaagaacccccaggaaggactgtataacgaactccagaaagacaagatggccgaagcctacagcgagatcggcatgaagggcgagcggagaagaggcaagggccacgatggcctgtaccagggcctgagcaccgccaccaaggacacctatgacgccctgcacatgcaggccctgcctccaagaagggccaagcgatctggatctggagcaacaaacttctcactactcaaacaagcaggtgacgtggaggagaatcccgggcctactagtatggactggatttggcgcatccttttccttgtcggcgctgctaccggcgcgcattccttcgaacaagaagtgacacagatccctgccgctctgtctgtgcctgagggcgaaaacctggtgctgaactgctccttcaccgacagcgccatctacaacctccagtggttcaggcaggaccctggaaagggactgacaagcctgctgctgatccagagcagccagagagagcagacctccggcagactgaatgccagcctggataagagcagcggcaggtctaccctgtatatcgccgcttctcagcctggcgatagcgccacatatctgtgtgctgtgcggcctacaagcggcggcagctacatccctacatttggcagaggcaccagcctgatcgtgcacccttatatccagaaccctgatcctgccgtgtaccagctgcgggatagcaagagcagcgacaagagcgtgtgtctgttcaccgacttcgacagccagaccaacgtgtcccagagcaaggactccgacgtgtacatcaccgataagtgcgtgctggacatgcggagcatggacttcaagagcaactccgccgtggcctggtccaacaagtccgatttcgcctgcgccaacgccttcaacaacagcattatccccgaggacacattcttcccaagcagcgacgtgccctgcggtacccagagttttgggttgttggaccctaaattgtgctatctgttggacggaatcctgttcatttacggagtgatcctgaccgcattgttcctgcgggttaagttttccagatccgcagacgcacccgcttaccaacaagggcagaaccaactctacaatgaacttaatttggggcggagggaagagtacgacgttctggacaaaaggaggggacgagatcccgagatgggcggaaagcctcagcgaaggaagaatccgcaagaggggctttataacgaactccagaaagataaaatggcagaagcctatagtgagattgggatgaagggagaaaggaggaggggtaaaggtcacgatgggttgtaccaaggattgagcacagccactaaagatacctatgatgcgctccacatgcaggccctgccgccaaga

SEQ ID NO: 4040 - DNA, 3084 bp, Artificial Sequence
  Synthetic Polynucloetide
atggccttaccagtgaccgccttgctcctgccgctggccttgctgctccacgccgccaggccggcatgccaggtccagctcgtcgagtccggcggcggcctcgtccaggccggcgactccgtcaccctctcctgcaccgcctccggccgcaccttctcctcctacgccctcgcctggttccgccagcgccccggcaaggagcgcgagttcgtcgccggcctccgctggggcggccccaccaactacgccgactccgtcaaggaccgcttcaccatctccggcgactccgccaagcacaccatgtacctccagatgaactccctcaagcccgaggacaccgccgtctactactgcggctacaaccccggcggctgggccgtcccctcccagtacgagtacgactcctggggccagggcacccaggtcaccgtctcctccggtaccggcggaggcggatctggcggcggaggtagcggtggcggaggatctgaattcaatgctggcgtgacccagacacctaagttccaggtgctgaaaaccggccagagcatgaccctgcaatgcgcccaggacatgaaccatgagtacatgagctggtacagacaggaccccggcatgggcctgagactgatccactactctgtggctatccagaccaccgaccagggcgaagtgcccaatggctacaacgtgtccagaagcaccatcgaggacttcccactgagactgctgtctgccgctcctagccagaccagcgtgtacttttgtgccagcagctacctgggcaacaccggcgagctgttttttggcgagggcagcagactgaccgtgctcgaggggaaaccaattcccaaccctcttctgggactggattcaaccggcagcggcgaggacctgaagaacgtgttcccacctgaggtggccgtgttcgagcctagcgaggccgagatcagccacacccagaaagccaccctcgtgtgcctggctaccggcttctaccccgaccatgtggaactgtcttggtgggtcaacggcaaagaggtgcacagcggcgtgtctaccgacccccagccactgaaagaacagcccgccctgaacgacagccggtactgcctgagcagcagactgagagtgtccgccaccttctggcagaacccccggaaccacttcagatgccaggtgcagttctacggcctgagcgagaacgacgagtggacccaggacagagccaagcccgtgacccagatcgtgtctgccgaagcctggggcagagccgattgcggatcccagagcttcggcctgctggaccccaagctgtgctacctgctggatggcatcctgttcatctacggcgtgatcctgaccgccctgttcctgagagtgaagttcagcagaagcgccgacgcccctgcctaccagcagggacagaaccaactgtacaacgagctgaacctgggcagacgggaagagtacgacgtgctggacaagcggagaggcagggaccctgagatgggcggaaagccccagcggagaaagaacccccaggaaggactgtataacgaactccagaaagacaagatggccgaagcctacagcgagatcggcatgaagggcgagcggagaagaggcaagggccacgatggcctgtaccagggcctgagcaccgccaccaaggacacctatgacgccctgcacatgcaggccctgcctccaagaagggccaagcgatctggatctggagcaacaaacttctcactactcaaacaagcaggtgacgtggaggagaatcccgggcctactagtatggactggatttggcgcatccttttccttgtcggcgctgctaccggcgcgcattccttcgaacaagaagtgacacagatccctgccgctctgtctgtgcctgagggcgaaaacctggtgctgaactgctccttcaccgacagcgccatctacaacctccagtggttcaggcaggaccctggaaagggactgacaagcctgctgctgatccagagcagccagagagagcagacctccggcagactgaatgccagcctggataagagcagcggcaggtctaccctgtatatcgccgcttctcagcctggcgatagcgccacatatctgtgtgctgtgcggcctacaagcggcggcagctacatccctacatttggcagaggcaccagcctgatcgtgcacccttatgagcagaaactgatctcggaagaggatgggagcggcatccagaaccctgatcctgccgtgtaccagctgcgggatagcaagagcagcgacaagagcgtgtgtctgttcaccgacttcgacagccagaccaacgtgtcccagagcaaggactccgacgtgtacatcaccgataagaccgtgctggacatgcggagcatggacttcaagagcaactccgccgtggcctggtccaacaagtccgatttcgcctgcgccaacgccttcaacaacagcattatccccgaggacacattcttcccaagccccgagagcagctgcggtacccagagttttgggttgttggaccctaaattgtgctatctgttggacggaatcctgttcatttacggagtgatcctgaccgcattgttcctgaggagcaagcggtcacggctgctccacagcgattacatgaatatgacaccacgaagaccgggtcctactcgcaaacactaccaaccctacgcacctccccgcgactttgcagcgtaccgatctcgggttaagttttccagatccgcagacgcacccgcttaccaacaagggcagaaccaactctacaatgaacttaatttggggcggagggaagagtacgacgttctggacaaaaggaggggacgagatcccgagatgggcggaaagcctcagcgaaggaagaatccgcaagaggggctttataacgaactccagaaagataaaatggcagaagcctatagtgagattgggatgaagggagaaaggaggaggggtaaaggtcacgatgggttgtaccaaggattgagcacagccactaaagatacctatgatgcgctccacatgcaggccctgccgccaaga

SEQ ID NO: 4041 - DNA, 3207 bp, Artificial Sequence
  Synthetic Polynucloetide
atggccttaccagtgaccgccttgctcctgccgctggccttgctgctccacgccgccaggccggcatgccaggtccagctcgtcgagtccggcggcggcctcgtccaggccggcgactccgtcaccctctcctgcaccgcctccggccgcaccttctcctcctacgccctcgcctggttccgccagcgccccggcaaggagcgcgagttcgtcgccggcctccgctggggcggccccaccaactacgccgactccgtcaaggaccgcttcaccatctccggcgactccgccaagcacaccatgtacctccagatgaactccctcaagcccgaggacaccgccgtctactactgcggctacaaccccggcggctgggccgtcccctcccagtacgagtacgactcctggggccagggcacccaggtcaccgtctcctccggtaccggcggaggcggatctggcggcggaggtagcggtggcggaggatctgaattcaatgctggcgtgacccagacacctaagttccaggtgctgaaaaccggccagagcatgaccctgcaatgcgcccaggacatgaaccatgagtacatgagctggtacagacaggaccccggcatgggcctgagactgatccactactctgtggctatccagaccaccgaccagggcgaagtgcccaatggctacaacgtgtccagaagcaccatcgaggacttcccactgagactgctgtctgccgctcctagccagaccagcgtgtacttttgtgccagcagctacctgggcaacaccggcgagctgttttttggcgagggcagcagactgaccgtgctcgaggggaaaccaattcccaaccctcttctgggactggattcaaccggcagcggcgaggacctgaagaacgtgttcccacctgaggtggccgtgttcgagcctagcgaggccgagatcagccacacccagaaagccaccctcgtgtgcctggctaccggcttctaccccgaccatgtggaactgtcttggtgggtcaacggcaaagaggtgcacagcggcgtgtctaccgacccccagccactgaaagaacagcccgccctgaacgacagccggtactgcctgagcagcagactgagagtgtccgccaccttctggcagaacccccggaaccacttcagatgccaggtgcagttctacggcctgagcgagaacgacgagtggacccaggacagagccaagcccgtgacccagatcgtgtctgccgaagcctggggcagagccgattgcggatcccagagcttcggcctgctggaccccaagctgtgctacctgctggatggcatcctgttcatctacggcgtgatcctgaccgccctgttcctgaggagtaagaggagcaggctcctgcacagtgactacatgaacatgactccacgccgccccggacccacccgcaagcattaccagccctatgccccaccacgcgacttcgcagcctatcgctccagagtgaagttcagcagaagcgccgacgcccctgcctaccagcagggacagaaccaactgtacaacgagctgaacctgggcagacgggaagagtacgacgtgctggacaagcggagaggcagggaccctgagatgggcggaaagccccagcggagaaagaacccccaggaaggactgtataacgaactccagaaagacaagatggccgaagcctacagcgagatcggcatgaagggcgagcggagaagaggcaagggccacgatggcctgtaccagggcctgagcaccgccaccaaggacacctatgacgccctgcacatgcaggccctgcctccaagaagggccaagcgatctggatctggagcaacaaacttctcactactcaaacaagcaggtgacgtggaggagaatcccgggcctactagtatggactggatttggcgcatccttttccttgtcggcgctgctaccggcgcgcattccttcgaacaagaagtgacacagatccctgccgctctgtctgtgcctgagggcgaaaacctggtgctgaactgctccttcaccgacagcgccatctacaacctccagtggttcaggcaggaccctggaaagggactgacaagcctgctgctgatccagagcagccagagagagcagacctccggcagactgaatgccagcctggataagagcagcggcaggtctaccctgtatatcgccgcttctcagcctggcgatagcgccacatatctgtgtgctgtgcggcctacaagcggcggcagctacatccctacatttggcagaggcaccagcctgatcgtgcacccttatgagcagaaactgatctcggaagaggatgggagcggcatccagaaccctgatcctgccgtgtaccagctgcgggatagcaagagcagcgacaagagcgtgtgtctgttcaccgacttcgacagccagaccaacgtgtcccagagcaaggactccgacgtgtacatcaccgataagaccgtgctggacatgcggagcatggacttcaagagcaactccgccgtggcctggtccaacaagtccgatttcgcctgcgccaacgccttcaacaacagcattatccccgaggacacattcttcccaagccccgagagcagctgcggtacccagagttttgggttgttggaccctaaattgtgctatctgttggacggaatcctgttcatttacggagtgatcctgaccgcattgttcctgaggagcaagcggtcacggctgctccacagcgattacatgaatatgacaccacgaagaccgggtcctactcgcaaacactaccaaccctacgcacctccccgcgactttgcagcgtaccgatctcgggttaagttttccagatccgcagacgcacccgcttaccaacaagggcagaaccaactctacaatgaacttaatttggggcggagggaagagtacgacgttctggacaaaaggaggggacgagatcccgagatgggcggaaagcctcagcgaaggaagaatccgcaagaggggctttataacgaactccagaaagataaaatggcagaagcctatagtgagattgggatgaagggagaaaggaggaggggtaaaggtcacgatgggttgtaccaaggattgagcacagccactaaagatacctatgatgcgctccacatgcaggccctgccgccaaga

SEQ ID NO: 4042 - DNA, 3090 bp, Artificial Sequence
  Synthetic Polynucloetide
atggccttaccagtgaccgccttgctcctgccgctggccttgctgctccacgccgccaggccggcatgccaggtccagctcgtcgagtccggcggcggcctcgtccaggccggcgactccgtcaccctctcctgcaccgcctccggccgcaccttctcctcctacgccctcgcctggttccgccagcgccccggcaaggagcgcgagttcgtcgccggcctccgctggggcggccccaccaactacgccgactccgtcaaggaccgcttcaccatctccggcgactccgccaagcacaccatgtacctccagatgaactccctcaagcccgaggacaccgccgtctactactgcggctacaaccccggcggctgggccgtcccctcccagtacgagtacgactcctggggccagggcacccaggtcaccgtctcctccggtaccggcggaggcggatctggcggcggaggtagcggtggcggaggatctgaattcaatgctggcgtgacccagacacctaagttccaggtgctgaaaaccggccagagcatgaccctgcaatgcgcccaggacatgaaccatgagtacatgagctggtacagacaggaccccggcatgggcctgagactgatccactactctgtggctatccagaccaccgaccagggcgaagtgcccaatggctacaacgtgtccagaagcaccatcgaggacttcccactgagactgctgtctgccgctcctagccagaccagcgtgtacttttgtgccagcagctacctgggcaacaccggcgagctgttttttggcgagggcagcagactgaccgtgctcgaggggaaaccaattcccaaccctcttctgggactggattcaaccggcagcggcgaggacctgaagaacgtgttcccacctgaggtggccgtgttcgagcctagcgaggccgagatcagccacacccagaaagccaccctcgtgtgcctggctaccggcttctaccccgaccatgtggaactgtcttggtgggtcaacggcaaagaggtgcacagcggcgtgtctaccgacccccagccactgaaagaacagcccgccctgaacgacagccggtactgcctgagcagcagactgagagtgtccgccaccttctggcagaacccccggaaccacttcagatgccaggtgcagttctacggcctgagcgagaacgacgagtggacccaggacagagccaagcccgtgacccagatcgtgtctgccgaagcctggggcagagccgattgcggatcccagagcttcggcctgctggaccccaagctgtgctacctgctggatggcatcctgttcatctacggcgtgatcctgaccgccctgttcctgagagtgaagttcagcagaagcgccgacgcccctgcctaccagcagggacagaaccaactgtacaacgagctgaacctgggcagacgggaagagtacgacgtgctggacaagcggagaggcagggaccctgagatgggcggaaagccccagcggagaaagaacccccaggaaggactgtataacgaactccagaaagacaagatggccgaagcctacagcgagatcggcatgaagggcgagcggagaagaggcaagggccacgatggcctgtaccagggcctgagcaccgccaccaaggacacctatgacgccctgcacatgcaggccctgcctccaagaagggccaagcgatctggatctggagcaacaaacttctcactactcaaacaagcaggtgacgtggaggagaatcccgggcctactagtatggactggatttggcgcatccttttccttgtcggcgctgctaccggcgcgcattccttcgaacaagaagtgacacagatccctgccgctctgtctgtgcctgagggcgaaaacctggtgctgaactgctccttcaccgacagcgccatctacaacctccagtggttcaggcaggaccctggaaagggactgacaagcctgctgctgatccagagcagccagagagagcagacctccggcagactgaatgccagcctggataagagcagcggcaggtctaccctgtatatcgccgcttctcagcctggcgatagcgccacatatctgtgtgctgtgcggcctacaagcggcggcagctacatccctacatttggcagaggcaccagcctgatcgtgcacccttatgagcagaaactgatctcggaagaggatctggggagcggcatccagaaccctgatcctgccgtgtaccagctgcgggatagcaagagcagcgacaagagcgtgtgtctgttcaccgacttcgacagccagaccaacgtgtcccagagcaaggactccgacgtgtacatcaccgataagaccgtgctggacatgcggagcatggacttcaagagcaactccgccgtggcctggtccaacaagtccgatttcgcctgcgccaacgccttcaacaacagcattatccccgaggacacattcttcccaagccccgagagcagctgcggtacccagagttttgggttgttggaccctaaattgtgctatctgttggacggaatcctgttcatttacggagtgatcctgaccgcattgttcctgaagagaggccggaagaagctgctgtacatcttcaagcagcctttcatgcggcccgtgcagaccacccaggaagaggacggctgctcctgccggttccccgaggaagaagaaggcggctgcgagctgcgggttaagttttccagatccgcagacgcacccgcttaccaacaagggcagaaccaactctacaatgaacttaatttggggcggagggaagagtacgacgttctggacaaaaggaggggacgagatcccgagatgggcggaaagcctcagcgaaggaagaatccgcaagaggggctttataacgaactccagaaagataaaatggcagaagcctatagtgagattgggatgaagggagaaaggaggaggggtaaaggtcacgatgggttgtaccaaggattgagcacagccactaaagatacctatgatgcgctccacatgcaggccctgccgccaaga

SEQ ID NO: 4043 - DNA, 3216 bp, Artificial Sequence
  Synthetic Polynucloetide
atggccttaccagtgaccgccttgctcctgccgctggccttgctgctccacgccgccaggccggcatgccaggtccagctcgtcgagtccggcggcggcctcgtccaggccggcgactccgtcaccctctcctgcaccgcctccggccgcaccttctcctcctacgccctcgcctggttccgccagcgccccggcaaggagcgcgagttcgtcgccggcctccgctggggcggccccaccaactacgccgactccgtcaaggaccgcttcaccatctccggcgactccgccaagcacaccatgtacctccagatgaactccctcaagcccgaggacaccgccgtctactactgcggctacaaccccggcggctgggccgtcccctcccagtacgagtacgactcctggggccagggcacccaggtcaccgtctcctccggtaccggcggaggcggatctggcggcggaggtagcggtggcggaggatctgaattcaatgctggcgtgacccagacacctaagttccaggtgctgaaaaccggccagagcatgaccctgcaatgcgcccaggacatgaaccatgagtacatgagctggtacagacaggaccccggcatgggcctgagactgatccactactctgtggctatccagaccaccgaccagggcgaagtgcccaatggctacaacgtgtccagaagcaccatcgaggacttcccactgagactgctgtctgccgctcctagccagaccagcgtgtacttttgtgccagcagctacctgggcaacaccggcgagctgttttttggcgagggcagcagactgaccgtgctcgaggggaaaccaattcccaaccctcttctgggactggattcaaccggcagcggcgaggacctgaagaacgtgttcccacctgaggtggccgtgttcgagcctagcgaggccgagatcagccacacccagaaagccaccctcgtgtgcctggctaccggcttctaccccgaccatgtggaactgtcttggtgggtcaacggcaaagaggtgcacagcggcgtgtctaccgacccccagccactgaaagaacagcccgccctgaacgacagccggtactgcctgagcagcagactgagagtgtccgccaccttctggcagaacccccggaaccacttcagatgccaggtgcagttctacggcctgagcgagaacgacgagtggacccaggacagagccaagcccgtgacccagatcgtgtctgccgaagcctggggcagagccgattgcggatcccagagcttcggcctgctggaccccaagctgtgctacctgctggatggcatcctgttcatctacggcgtgatcctgaccgccctgttcctgaaacggggcagaaagaaactcctgtatatattcaaacaaccatttatgagaccagtacaaactactcaagaggaagatggctgtagctgccgatttccagaagaagaagaaggaggatgtgaactgagagtgaagttcagcagaagcgccgacgcccctgcctaccagcagggacagaaccaactgtacaacgagctgaacctgggcagacgggaagagtacgacgtgctggacaagcggagaggcagggaccctgagatgggcggaaagccccagcggagaaagaacccccaggaaggactgtataacgaactccagaaagacaagatggccgaagcctacagcgagatcggcatgaagggcgagcggagaagaggcaagggccacgatggcctgtaccagggcctgagcaccgccaccaaggacacctatgacgccctgcacatgcaggccctgcctccaagaagggccaagcgatctggatctggagcaacaaacttctcactactcaaacaagcaggtgacgtggaggagaatcccgggcctactagtatggactggatttggcgcatccttttccttgtcggcgctgctaccggcgcgcattccttcgaacaagaagtgacacagatccctgccgctctgtctgtgcctgagggcgaaaacctggtgctgaactgctccttcaccgacagcgccatctacaacctccagtggttcaggcaggaccctggaaagggactgacaagcctgctgctgatccagagcagccagagagagcagacctccggcagactgaatgccagcctggataagagcagcggcaggtctaccctgtatatcgccgcttctcagcctggcgatagcgccacatatctgtgtgctgtgcggcctacaagcggcggcagctacatccctacatttggcagaggcaccagcctgatcgtgcacccttatgagcagaaactgatctcggaagaggatctggggagcggcatccagaaccctgatcctgccgtgtaccagctgcgggatagcaagagcagcgacaagagcgtgtgtctgttcaccgacttcgacagccagaccaacgtgtcccagagcaaggactccgacgtgtacatcaccgataagaccgtgctggacatgcggagcatggacttcaagagcaactccgccgtggcctggtccaacaagtccgatttcgcctgcgccaacgccttcaacaacagcattatccccgaggacacattcttcccaagccccgagagcagctgcggtacccagagttttgggttgttggaccctaaattgtgctatctgttggacggaatcctgttcatttacggagtgatcctgaccgcattgttcctgaagagaggccggaagaagctgctgtacatcttcaagcagcctttcatgcggcccgtgcagaccacccaggaagaggacggctgctcctgccggttccccgaggaagaagaaggcggctgcgagctgcgggttaagttttccagatccgcagacgcacccgcttaccaacaagggcagaaccaactctacaatgaacttaatttggggcggagggaagagtacgacgttctggacaaaaggaggggacgagatcccgagatgggcggaaagcctcagcgaaggaagaatccgcaagaggggctttataacgaactccagaaagataaaatggcagaagcctatagtgagattgggatgaagggagaaaggaggaggggtaaaggtcacgatgggttgtaccaaggattgagcacagccactaaagatacctatgatgcgctccacatgcaggccctgccgccaaga

SEQ ID NO: 4044 - DNA, 2889 bp, Artificial Sequence
  Synthetic Polynucloetide
atggccttaccagtgaccgccttgctcctgccgctggccttgctgctccacgccgccaggccggcatgccaggtccagctcgtcgagtccggcggcggcctcgtccaggccggcgactccgtcaccctctcctgcaccgcctccggccgcaccttctcctcctacgccctcgcctggttccgccagcgccccggcaaggagcgcgagttcgtcgccggcctccgctggggcggccccaccaactacgccgactccgtcaaggaccgcttcaccatctccggcgactccgccaagcacaccatgtacctccagatgaactccctcaagcccgaggacaccgccgtctactactgcggctacaaccccggcggctgggccgtcccctcccagtacgagtacgactcctggggccagggcacccaggtcaccgtctcctccggtaccggcggaggcggatctggcggcggaggtagcggtggcggaggatctgaattcaatgctggcgtgacccagacacctaagttccaggtgctgaaaaccggccagagcatgaccctgcaatgcgcccaggacatgaaccatgagtacatgagctggtacagacaggaccccggcatgggcctgagactgatccactactctgtggctatccagaccaccgaccagggcgaagtgcccaatggctacaacgtgtccagaagcaccatcgaggacttcccactgagactgctgtctgccgctcctagccagaccagcgtgtacttttgtgccagcagctacctgggcaacaccggcgagctgttttttggcgagggcagcagactgaccgtgctcgagcagagcttcggcctgctggaccccaagctgtgctacctgctggatggcatcctgttcatctacggcgtgatcctgaccgccctgttcctgagagtgaagttcagcagaagcgccgacgcccctgcctaccagcagggacagaaccaactgtacaacgagctgaacctgggcagacgggaagagtacgacgtgctggacaagcggagaggcagggaccctgagatgggcggaaagccccagcggagaaagaacccccaggaaggactgtataacgaactccagaaagacaagatggccgaagcctacagcgagatcggcatgaagggcgagcggagaagaggcaagggccacgatggcctgtaccagggcctgagcaccgccaccaaggacacctatgacgccctgcacatgcaggccctgcctccaagaagggccaagcgatctggatctggagcaacaaacttctcactactcaaacaagcaggtgacgtggaggagaatcccgggcctactagtatggactggatttggcgcatccttttccttgtcggcgctgctaccggcgcgcattccttcgaacaagaagtgacacagatccctgccgctctgtctgtgcctgagggcgaaaacctggtgctgaactgctccttcaccgacagcgccatctacaacctccagtggttcaggcaggaccctggaaagggactgacaagcctgctgctgatccagagcagccagagagagcagacctccggcagactgaatgccagcctggataagagcagcggcaggtctaccctgtatatcgccgcttctcagcctggcgatagcgccacatatctgtgtgctgtgcggcctacaagcggcggcagctacatccctacatttggcagaggcaccagcctgatcgtgcacccttatcagagttttgggttgttggaccctaaattgtgctatctgttggacggaatcctgttcatttacggagtgatcctgaccgcattgttcctgcgggttaagttttccagatccgcagacgcacccgcttaccaacaagggcagaaccaactctacaatgaacttaatttggggcggagggaagagtacgacgttctggacaaaaggaggggacgagatcccgagatgggcggaaagcctcagcgaaggaagaatccgcaagaggggctttataacgaactccagaaagataaaatggcagaagcctatagtgagattgggatgaagggagaaaggaggaggggtaaaggtcacgatgggttgtaccaaggattgagcacagccactaaagatacctatgatgcgctccacatgcaggccctgccgccaagacgcgccaagagaagcggatctggcgtgaagcagaccctgaatttcgacctgctgaagctggctggcgacgtggaatccaacccaggcccttctagaggccatatgaccgagtacaagcccacggtgcgcctcgccacccgcgacgacgtccccagggccgtacgcaccctcgccgccgcgttcgccgactaccccgccacgcgccacaccgtcgatccggaccgccacatcgagcgggtcaccgagctgcaagaactcttcctcacgcgcgtcgggctcgacatcggcaaggtgtgggtcgcggacgacggcgccgcggtggcggtctggaccacgccggagagcgtcgaagcgggggcggtgttcgccgagatcggcccgcgcatggccgagttgagcggttcccggctggccgcgcagcaacagatggaaggcctcctggcgccgcaccggcccaaggagcccgcgtggttcctggccaccgtcggcgtctcgcccgaccaccagggcaagggtctgggcagcgccgtcgtgctccccggagtggaggcggccgagcgcgccggggtgcccgccttcctggagacctccgcgccccgcaacctccccttctacgagcggctcggcttcaccgtcaccgccgacgtcgaggtgcccgaaggaccgcgcacctggtgcatgacccgcaagcccggtgcctga

SEQ ID NO: 4045 - DNA, 2361 bp, Artificial Sequence
  Synthetic Polynucloetide
atggccttaccagtgaccgccttgctcctgccgctggccttgctgctccacgccgccaggccggcatgccaggtccagctcgtcgagtccggcggcggcctcgtccaggccggcgactccgtcaccctctcctgcaccgcctccggccgcaccttctcctcctacgccctcgcctggttccgccagcgccccggcaaggagcgcgagttcgtcgccggcctccgctggggcggccccaccaactacgccgactccgtcaaggaccgcttcaccatctccggcgactccgccaagcacaccatgtacctccagatgaactccctcaagcccgaggacaccgccgtctactactgcggctacaaccccggcggctgggccgtcccctcccagtacgagtacgactcctggggccagggcacccaggtcaccgtctcctccggtaccggcggaggcggatctggcggcggaggtagcggtggcggaggatctgaattcaatgctggcgtgacccagacacctaagttccaggtgctgaaaaccggccagagcatgaccctgcaatgcgcccaggacatgaaccatgagtacatgagctggtacagacaggaccccggcatgggcctgagactgatccactactctgtggctatccagaccaccgaccagggcgaagtgcccaatggctacaacgtgtccagaagcaccatcgaggacttcccactgagactgctgtctgccgctcctagccagaccagcgtgtacttttgtgccagcagctacctgggcaacaccggcgagctgttttttggcgagggcagcagactgaccgtgctcgagggacagcctaaggccaatcctaccgtgacactgttccctccaagcagcgaagaactccaggccaacaaggccacacttgtgtgcctgatctccgacttctaccctggggctgtgacagtggcttggaaggccgatggatctcctgtgaaagccggcgtggaaaccaccaagccatccaagcagagcaacaacaaatacgccgccagctcctacctgagcctgacacctgagcagtggaagtcccacagatcctacagctgccaagtgacccacgaaggcagcaccgtggaaaagacagtggcccctacagagtgcagccccatcaagaccgatgtgattacaatggaccccaaggacaactgctccaaggacgccaacgataccctgctgctccagctgaccaacaccagcgcctactacatgtacttgttgctgctgctgaagtccgtggtgtacttcgccatcatcacatgctgcctgctgcggagaaccgccttctgctgcaacggcgagaagtctagggccaagcgatctggatctggagcaacaaacttctcactactcaaacaagcaggtgacgtggaggagaatcccgggcctactagtatggactggatttggcgcatccttttccttgtcggcgctgctaccggcgcgcattccttcgaacaagaagtgacacagatccctgccgctctgtctgtgcctgagggcgaaaacctggtgctgaactgctccttcaccgacagcgccatctacaacctccagtggttcaggcaggaccctggaaagggactgacaagcctgctgctgatccagagcagccagagagagcagacctccggcagactgaatgccagcctggataagagcagcggcaggtctaccctgtatatcgccgcttctcagcctggcgatagcgccacatatctgtgtgctgtgcggcctacaagcggcggcagctacatccctacatttggcagaggcaccagcctgatcgtgcacccttatgcctctacaaagggaccctccgtgtttcctctggctcccagcagcaagtctacaagcggaggaacagccgctctgggctgcctggtcaaggattactttcccgagcctgtgaccgtgtcctggaatagcggagcactgacaagcggcgtgcacacctttccagccgtgctgcaaagcagcggcctgtactctctgagcagcgtggtcacagtgcctagctctagcctgggcacccagacctacatctgcaatgtgaaccacaagcctagcaacaccaaggtggacaagagagtggaacccaagagctgtgaagtgaaaaccgactccaccgaccacgtgaagcccaaagagacagagaacaccaagcagcccagcaagagctgccacaagcccaaggccatcgtgcacaccgagaaagtgaacatgatgagcctgaccgtgctgggcctgcggatgctgttcgccaaaaccgtggccgtgaacttcctgctgaccgccaagctgttcttcctc

SEQ ID NO: 4046 - DNA, 2295 bp, Artificial Sequence
  Synthetic Polynucloetide
atggccttaccagtgaccgccttgctcctgccgctggccttgctgctccacgccgccaggccggcatgccaggtccagctcgtcgagtccggcggcggcctcgtccaggccggcgactccgtcaccctctcctgcaccgcctccggccgcaccttctcctcctacgccctcgcctggttccgccagcgccccggcaaggagcgcgagttcgtcgccggcctccgctggggcggccccaccaactacgccgactccgtcaaggaccgcttcaccatctccggcgactccgccaagcacaccatgtacctccagatgaactccctcaagcccgaggacaccgccgtctactactgcggctacaaccccggcggctgggccgtcccctcccagtacgagtacgactcctggggccagggcacccaggtcaccgtctcctccggtaccggcggaggcggatctggcggcggaggtagcggtggcggaggatctgaattcaatgctggcgtgacccagacacctaagttccaggtgctgaaaaccggccagagcatgaccctgcaatgcgcccaggacatgaaccatgagtacatgagctggtacagacaggaccccggcatgggcctgagactgatccactactctgtggctatccagaccaccgaccagggcgaagtgcccaatggctacaacgtgtccagaagcaccatcgaggacttcccactgagactgctgtctgccgctcctagccagaccagcgtgtacttttgtgccagcagctacctgggcaacaccggcgagctgttttttggcgagggcagcagactgaccgtgctcgagggacagcctaaggccaatcctaccgtgacactgttccctccaagcagcgaagaactccaggccaacaaggccacacttgtgtgcctgatctccgacttctaccctggggctgtgacagtggcttggaaggccgatggatctcctgtgaaagccggcgtggaaaccaccaagccatccaagcagagcaacaacaaatacgccgccagctcctacctgagcctgacacctgagcagtggaagtcccacagatcctacagctgccaagtgacccacgaaggcagcaccgtggaaaagacagtggcccctacagagtgcagcggcagagccgattgcggcatcaccagcgccagctaccaccagggcgtgctgagcgccaccatcctgtacgagatcctgctgggcaaggccaccctgtacgccgtgctggtgtctgccctggtgctgatggctatggtcaagcggaaggacagccggggaagggccaagcgatctggatctggagcaacaaacttctcactactcaaacaagcaggtgacgtggaggagaatcccgggcctactagtatggactggatttggcgcatccttttccttgtcggcgctgctaccggcgcgcattccttcgaacaagaagtgacacagatccctgccgctctgtctgtgcctgagggcgaaaacctggtgctgaactgctccttcaccgacagcgccatctacaacctccagtggttcaggcaggaccctggaaagggactgacaagcctgctgctgatccagagcagccagagagagcagacctccggcagactgaatgccagcctggataagagcagcggcaggtctaccctgtatatcgccgcttctcagcctggcgatagcgccacatatctgtgtgctgtgcggcctacaagcggcggcagctacatccctacatttggcagaggcaccagcctgatcgtgcacccttatgcctctacaaagggaccctccgtgtttcctctggctcccagcagcaagtctacaagcggaggaacagccgctctgggctgcctggtcaaggattactttcccgagcctgtgaccgtgtcctggaatagcggagcactgacaagcggcgtgcacacctttccagccgtgctgcaaagcagcggcctgtactctctgagcagcgtggtcacagtgcctagctctagcctgggcacccagacctacatctgcaatgtgaaccacaagcctagcaacaccaaggtggacaagagagtggaacccaagagctgtatccccgaggacacattcttcccaagcagcgacgtgccctgcgacgtgaagctggtggaaaagagcttcgagacagacaccaacctgaacttccagaacctgagcgtgatcggcttcagaatcctgctgctgaaagtggccggctttaacctgctgatgaccctgcggctgtggtccagc

SEQ ID NO: 4047 - DNA, 2295 bp, Artificial Sequence
  Synthetic Polynucloetide
atggccttaccagtgaccgccttgctcctgccgctggccttgctgctccacgccgccaggccggcatgccaggtccagctcgtcgagtccggcggcggcctcgtccaggccggcgactccgtcaccctctcctgcaccgcctccggccgcaccttctcctcctacgccctcgcctggttccgccagcgccccggcaaggagcgcgagttcgtcgccggcctccgctggggcggccccaccaactacgccgactccgtcaaggaccgcttcaccatctccggcgactccgccaagcacaccatgtacctccagatgaactccctcaagcccgaggacaccgccgtctactactgcggctacaaccccggcggctgggccgtcccctcccagtacgagtacgactcctggggccagggcacccaggtcaccgtctcctccggtaccggcggaggcggatctggcggcggaggtagcggtggcggaggatctgaattcaatgctggcgtgacccagacacctaagttccaggtgctgaaaaccggccagagcatgaccctgcaatgcgcccaggacatgaaccatgagtacatgagctggtacagacaggaccccggcatgggcctgagactgatccactactctgtggctatccagaccaccgaccagggcgaagtgcccaatggctacaacgtgtccagaagcaccatcgaggacttcccactgagactgctgtctgccgctcctagccagaccagcgtgtacttttgtgccagcagctacctgggcaacaccggcgagctgttttttggcgagggcagcagactgaccgtgctcgagggacagcctaaggccaatcctaccgtgacactgttccctccaagcagcgaagaactccaggccaacaaggccacacttgtgtgcctgatctccgacttctaccctggggctgtgacagtggcttggaaggccgatggatctcctgtgaaagccggcgtggaaaccaccaagccatccaagcagagcaacaacaaatacgccgccagctcctacctgagcctgacacctgagcagtggaagtcccacagatcctacagctgccaagtgacccacgaaggcagcaccgtggaaaagacagtggcccctacagagtgcagcggcagagccgattgcggctttaccagcgagagctaccagcagggcgtgctgagcgccaccatcctgtacgagatcctgctgggcaaggccaccctgtacgccgtgctggtgtctgccctggtgctgatggctatggtcaagcggaaggacagccggggaagggccaagcgatctggatctggagcaacaaacttctcactactcaaacaagcaggtgacgtggaggagaatcccgggcctactagtatggactggatttggcgcatccttttccttgtcggcgctgctaccggcgcgcattccttcgaacaagaagtgacacagatccctgccgctctgtctgtgcctgagggcgaaaacctggtgctgaactgctccttcaccgacagcgccatctacaacctccagtggttcaggcaggaccctggaaagggactgacaagcctgctgctgatccagagcagccagagagagcagacctccggcagactgaatgccagcctggataagagcagcggcaggtctaccctgtatatcgccgcttctcagcctggcgatagcgccacatatctgtgtgctgtgcggcctacaagcggcggcagctacatccctacatttggcagaggcaccagcctgatcgtgcacccttatgcctctacaaagggaccctccgtgtttcctctggctcccagcagcaagtctacaagcggaggaacagccgctctgggctgcctggtcaaggattactttcccgagcctgtgaccgtgtcctggaatagcggagcactgacaagcggcgtgcacacctttccagccgtgctgcaaagcagcggcctgtactctctgagcagcgtggtcacagtgcctagctctagcctgggcacccagacctacatctgcaatgtgaaccacaagcctagcaacaccaaggtggacaagagagtggaacccaagagctgtatccccgaggacacattcttcccaagccccgagagcagctgcgacgtgaagctggtggaaaagagcttcgagacagacaccaacctgaacttccagaacctgagcgtgatcggcttcagaatcctgctgctgaaagtggccggctttaacctgctgatgaccctgcggctgtggtccagc

SEQ ID NO: 4048 - DNA, 1773 bp, Artificial Sequence
  Synthetic Polynucloetide
atggccttaccagtgaccgccttgctcctgccgctggccttgctgctccacgccgccaggccggcatgccaggtccagctcgtcgagtccggcggcggcctcgtccaggccggcgactccgtcaccctctcctgcaccgcctccggccgcaccttctcctcctacgccctcgcctggttccgccagcgccccggcaaggagcgcgagttcgtcgccggcctccgctggggcggccccaccaactacgccgactccgtcaaggaccgcttcaccatctccggcgactccgccaagcacaccatgtacctccagatgaactccctcaagcccgaggacaccgccgtctactactgcggctacaaccccggcggctgggccgtcccctcccagtacgagtacgactcctggggccagggcacccaggtcaccgtctcctccggtaccggcggaggcggatctggcggcggaggtagcggtggcggaggatctgaattcaatgctggcgtgacccagacacctaagttccaggtgctgaaaaccggccagagcatgaccctgcaatgcgcccaggacatgaaccatgagtacatgagctggtacagacaggaccccggcatgggcctgagactgatccactactctgtggctatccagaccaccgaccagggcgaagtgcccaatggctacaacgtgtccagaagcaccatcgaggacttcccactgagactgctgtctgccgctcctagccagaccagcgtgtacttttgtgccagcagctacctgggcaacaccggcgagctgttttttggcgagggcagcagactgaccgtgggcggaggcggaagtggaggcggaggatctggcggcggaggctctcaagaagtgacacagatccctgccgctctgtctgtgcctgagggcgaaaacctggtgctgaactgctccttcaccgacagcgccatctacaacctccagtggttcaggcaggaccctggaaagggactgacaagcctgctgctgatccagagcagccagagagagcagacctccggcagactgaatgccagcctggataagagcagcggcaggtctaccctgtatatcgccgcttctcagcctggcgatagcgccacatatctgtgtgctgtgcggcctacaagcggcggcagctacatccctacatttggcagaggcaccagcctgatcgtgcacccttatgacggtaacgaggagatgggaggaatcactcaaaccccttacaaagtctcaatttcaggaacaactgttatccttacatgtccccagtatcctggcagcgagatcctttggcagcataacgacaagaatatagggggagatgaagacgataagaatatcggatctgacgaggatcacttgagcctgaaagagttctccgagcttgaacaaagcggatattatgtgtgctatccgcgcgggtcaaagccggaagacgctaacttttacctttatctccgagccagagtgtgcgaaaattgcatggaaatggacgttatgtccgttgctacaatagttatcgtagatatatgcatcacgggtggactgcttctgctggtttattattggtccaagaatagaaaggccaaagctaaacccgtgaccagaggcgctggcgcaggcggaaggcaaaggggacaaaacaaagaacggccaccaccagtgccaaatccagattatgagcctattcggaaaggacagagggacctgtactctggcctgaatcagagaagaatc

SEQ ID NO: 4049 - DNA, 1668 bp, Artificial Sequence
  Synthetic Polynucloetide
atggccttaccagtgaccgccttgctcctgccgctggccttgctgctccacgccgccaggccggcatgccaggtccagctcgtcgagtccggcggcggcctcgtccaggccggcgactccgtcaccctctcctgcaccgcctccggccgcaccttctcctcctacgccctcgcctggttccgccagcgccccggcaaggagcgcgagttcgtcgccggcctccgctggggcggccccaccaactacgccgactccgtcaaggaccgcttcaccatctccggcgactccgccaagcacaccatgtacctccagatgaactccctcaagcccgaggacaccgccgtctactactgcggctacaaccccggcggctgggccgtcccctcccagtacgagtacgactcctggggccagggcacccaggtcaccgtctcctccggtaccggcggaggcggatctggcggcggaggtagcggtggcggaggatctgaattcaatgctggcgtgacccagacacctaagttccaggtgctgaaaaccggccagagcatgaccctgcaatgcgcccaggacatgaaccatgagtacatgagctggtacagacaggaccccggcatgggcctgagactgatccactactctgtggctatccagaccaccgaccagggcgaagtgcccaatggctacaacgtgtccagaagcaccatcgaggacttcccactgagactgctgtctgccgctcctagccagaccagcgtgtacttttgtgccagcagctacctgggcaacaccggcgagctgttttttggcgagggcagcagactgaccgtgggcggaggcggaagtggaggcggaggatctggcggcggaggctctcaagaagtgacacagatccctgccgctctgtctgtgcctgagggcgaaaacctggtgctgaactgctccttcaccgacagcgccatctacaacctccagtggttcaggcaggaccctggaaagggactgacaagcctgctgctgatccagagcagccagagagagcagacctccggcagactgaatgccagcctggataagagcagcggcaggtctaccctgtatatcgccgcttctcagcctggcgatagcgccacatatctgtgtgctgtgcggcctacaagcggcggcagctacatccctacatttggcagaggcaccagcctgatcgtgcacccttatttcaagatccccatcgaggaactggaagatcgggtgttcgtgaactgcaacacctctatcacctgggtggaaggcaccgtgggaacactgctgagcgacatcaccagactggacctcggcaagcggattctggaccctcggggcatctacagatgcaacggcaccgacatctacaaggacaaagaaagcaccgtgcaggtccactacagaatgtgccagtcctgcgtggaactggaccctgctacagtggccggcatcatcgtgaccgatgtgatcgctactctgctgctggctctgggagtgttctgcttcgccggacacgaaacaggcagactgtctggcgctgccgatacacaggccctgctgagaaacgaccaagtgtatcagcccctgcgcgacagagatgatgcccagtattctcacctcggcggcaactgggctagaaacaag

SEQ ID NO: 4050 - DNA, 1698 bp, Artificial Sequence
  Synthetic Polynucloetide
atggccttaccagtgaccgccttgctcctgccgctggccttgctgctccacgccgccaggccggcatgccaggtccagctcgtcgagtccggcggcggcctcgtccaggccggcgactccgtcaccctctcctgcaccgcctccggccgcaccttctcctcctacgccctcgcctggttccgccagcgccccggcaaggagcgcgagttcgtcgccggcctccgctggggcggccccaccaactacgccgactccgtcaaggaccgcttcaccatctccggcgactccgccaagcacaccatgtacctccagatgaactccctcaagcccgaggacaccgccgtctactactgcggctacaaccccggcggctgggccgtcccctcccagtacgagtacgactcctggggccagggcacccaggtcaccgtctcctccggtaccggcggaggcggatctggcggcggaggtagcggtggcggaggatctgaattcaatgctggcgtgacccagacacctaagttccaggtgctgaaaaccggccagagcatgaccctgcaatgcgcccaggacatgaaccatgagtacatgagctggtacagacaggaccccggcatgggcctgagactgatccactactctgtggctatccagaccaccgaccagggcgaagtgcccaatggctacaacgtgtccagaagcaccatcgaggacttcccactgagactgctgtctgccgctcctagccagaccagcgtgtacttttgtgccagcagctacctgggcaacaccggcgagctgttttttggcgagggcagcagactgaccgtgggcggaggcggaagtggaggcggaggatctggcggcggaggctctcaagaagtgacacagatccctgccgctctgtctgtgcctgagggcgaaaacctggtgctgaactgctccttcaccgacagcgccatctacaacctccagtggttcaggcaggaccctggaaagggactgacaagcctgctgctgatccagagcagccagagagagcagacctccggcagactgaatgccagcctggataagagcagcggcaggtctaccctgtatatcgccgcttctcagcctggcgatagcgccacatatctgtgtgctgtgcggcctacaagcggcggcagctacatccctacatttggcagaggcaccagcctgatcgtgcacccttatcagagcatcaagggcaaccacctggtcaaggtgtacgactaccaagaggacggcagcgtgctgctgacatgtgatgccgaggccaagaacatcacctggtttaaggacggcaagatgatcggcttcctgaccgaggacaagaagaagtggaacctgggcagcaacgctaaggaccccagaggcatgtatcagtgcaagggcagccagaacaagagcaagcccctccaggtgtactaccggatgtgccagaactgcatcgagctgaacgccgctaccatcagcggctttctgttcgccgagatcgtgtccatcttcgtgctggccgtgggcgtgtactttatcgctggacaggatggcgtgcggcagagcagagcttccgataagcaaaccctgctgcctaacgaccagctgtaccagcctctgaaggacagagaggacgaccagtacagccacctccagggcaatcagctgagaagaaac

SEQ ID NO: 4051 - DNA, 1647 bp, Artificial Sequence
  Synthetic Polynucloetide
atggccttaccagtgaccgccttgctcctgccgctggccttgctgctccacgccgccaggccggcatgccaggtccagctcgtcgagtccggcggcggcctcgtccaggccggcgactccgtcaccctctcctgcaccgcctccggccgcaccttctcctcctacgccctcgcctggttccgccagcgccccggcaaggagcgcgagttcgtcgccggcctccgctggggcggccccaccaactacgccgactccgtcaaggaccgcttcaccatctccggcgactccgccaagcacaccatgtacctccagatgaactccctcaagcccgaggacaccgccgtctactactgcggctacaaccccggcggctgggccgtcccctcccagtacgagtacgactcctggggccagggcacccaggtcaccgtctcctccggtaccggcggaggcggatctggcggcggaggtagcggtggcggaggatctgaattcaatgctggcgtgacccagacacctaagttccaggtgctgaaaaccggccagagcatgaccctgcaatgcgcccaggacatgaaccatgagtacatgagctggtacagacaggaccccggcatgggcctgagactgatccactactctgtggctatccagaccaccgaccagggcgaagtgcccaatggctacaacgtgtccagaagcaccatcgaggacttcccactgagactgctgtctgccgctcctagccagaccagcgtgtacttttgtgccagcagctacctgggcaacaccggcgagctgttttttggcgagggcagcagactgaccgtgggcggaggcggaagtggaggcggaggatctggcggcggaggctctcaagaagtgacacagatccctgccgctctgtctgtgcctgagggcgaaaacctggtgctgaactgctccttcaccgacagcgccatctacaacctccagtggttcaggcaggaccctggaaagggactgacaagcctgctgctgatccagagcagccagagagagcagacctccggcagactgaatgccagcctggataagagcagcggcaggtctaccctgtatatcgccgcttctcagcctggcgatagcgccacatatctgtgtgctgtgcggcctacaagcggcggcagctacatccctacatttggcagaggcaccagcctgatcgtgcacccttatcagagttttgggttgttggaccctaaattgtgctatctgttggacggaatcctgttcatttacggagtgatcctgaccgcattgttcctgcgggttaagttttccagatccgcagacgcacccgcttaccaacaagggcagaaccaactctacaatgaacttaatttggggcggagggaagagtacgacgttctggacaaaaggaggggacgagatcccgagatgggcggaaagcctcagcgaaggaagaatccgcaagaggggctttataacgaactccagaaagataaaatggcagaagcctatagtgagattgggatgaagggagaaaggaggaggggtaaaggtcacgatgggttgtaccaaggattgagcacagccactaaagatacctatgatgcgctccacatgcaggccctgccgccaaga

SEQ ID NO: 4052 - DNA, 2349 bp, Artificial Sequence
  Synthetic Polynucloetide
atggccttaccagtgaccgccttgctcctgccgctggccttgctgctccacgccgccaggccggcatgccaggtccagctcgtcgagtccggcggcggcctcgtccaggccggcgactccgtcaccctctcctgcaccgcctccggccgcaccttctcctcctacgccctcgcctggttccgccagcgccccggcaaggagcgcgagttcgtcgccggcctccgctggggcggccccaccaactacgccgactccgtcaaggaccgcttcaccatctccggcgactccgccaagcacaccatgtacctccagatgaactccctcaagcccgaggacaccgccgtctactactgcggctacaaccccggcggctgggccgtcccctcccagtacgagtacgactcctggggccagggcacccaggtcaccgtctcctccggtaccggcggaggcggatctggcggcggaggtagcggtggcggaggatctgaattcaatgctggcgtgacccagacacctaagttccaggtgctgaaaaccggccagagcatgaccctgcaatgcgcccaggacatgaaccatgagtacatgagctggtacagacaggaccccggcatgggcctgagactgatccactactctgtggctatccagaccaccgaccagggcgaagtgcccaatggctacaacgtgtccagaagcaccatcgaggacttcccactgagactgctgtctgccgctcctagccagaccagcgtgtacttttgtgccagcagctacctgggcaacaccggcgagctgttttttggcgagggcagcagactgaccgtgggcggaggcggaagtggaggcggaggatctggcggcggaggctctcaagaagtgacacagatccctgccgctctgtctgtgcctgagggcgaaaacctggtgctgaactgctccttcaccgacagcgccatctacaacctccagtggttcaggcaggaccctggaaagggactgacaagcctgctgctgatccagagcagccagagagagcagacctccggcagactgaatgccagcctggataagagcagcggcaggtctaccctgtatatcgccgcttctcagcctggcgatagcgccacatatctgtgtgctgtgcggcctacaagcggcggcagctacatccctacatttggcagaggcaccagcctgatcgtgcacccttatgggagcggcatccagaaccctgatcctgccgtgtaccagctgcgggatagcaagagcagcgacaagagcgtgtgtctgttcaccgacttcgacagccagaccaacgtgtcccagagcaaggactccgacgtgtacatcaccgataagaccgtgctggacatgcggagcatggacttcaagagcaactccgccgtggcctggtccaacaagtccgatttcgcctgcgccaacgccttcaacaacagcattatccccgaggacacattcttcccaagccccgagagcagctgcgacgtgaagctggtggaaaagagcttcgagacagacaccaacctgaacttccagaacctgagcgtgatcggcttcagaatcctgctgctgaaagtggccggctttaacctgctgatgaccctgcggctgtggtccagccgcgccaagagaagcggatctggcgtgaagcagaccctgaatttcgacctgctgaagctggctggcgacgtggaatccaacccaggcccttctagaggccatatgaccgagtacaagcccacggtgcgcctcgccacccgcgacgacgtccccagggccgtacgcaccctcgccgccgcgttcgccgactaccccgccacgcgccacaccgtcgatccggaccgccacatcgagcgggtcaccgagctgcaagaactcttcctcacgcgcgtcgggctcgacatcggcaaggtgtgggtcgcggacgacggcgccgcggtggcggtctggaccacgccggagagcgtcgaagcgggggcggtgttcgccgagatcggcccgcgcatggccgagttgagcggttcccggctggccgcgcagcaacagatggaaggcctcctggcgccgcaccggcccaaggagcccgcgtggttcctggccaccgtcggcgtctcgcccgaccaccagggcaagggtctgggcagcgccgtcgtgctccccggagtggaggcggccgagcgcgccggggtgcccgccttcctggagacctccgcgccccgcaacctccccttctacgagcggctcggcttcaccgtcaccgccgacgtcgaggtgcccgaaggaccgcgcacctggtgcatgacccgcaagcccggtgcctga

SEQ ID NO: 4053 - DNA, 2451 bp, Artificial Sequence
  Synthetic Polynucloetide
atggccttaccagtgaccgccttgctcctgccgctggccttgctgctccacgccgccaggccggcatgccaggtccagctcgtcgagtccggcggcggcctcgtccaggccggcgactccgtcaccctctcctgcaccgcctccggccgcaccttctcctcctacgccctcgcctggttccgccagcgccccggcaaggagcgcgagttcgtcgccggcctccgctggggcggccccaccaactacgccgactccgtcaaggaccgcttcaccatctccggcgactccgccaagcacaccatgtacctccagatgaactccctcaagcccgaggacaccgccgtctactactgcggctacaaccccggcggctgggccgtcccctcccagtacgagtacgactcctggggccagggcacccaggtcaccgtctcctccggtaccggcggaggcggatctggcggcggaggtagcggtggcggaggatctgaattcaatgctggcgtgacccagacacctaagttccaggtgctgaaaaccggccagagcatgaccctgcaatgcgcccaggacatgaaccatgagtacatgagctggtacagacaggaccccggcatgggcctgagactgatccactactctgtggctatccagaccaccgaccagggcgaagtgcccaatggctacaacgtgtccagaagcaccatcgaggacttcccactgagactgctgtctgccgctcctagccagaccagcgtgtacttttgtgccagcagctacctgggcaacaccggcgagctgttttttggcgagggcagcagactgaccgtgggcggaggcggaagtggaggcggaggatctggcggcggaggctctcaagaagtgacacagatccctgccgctctgtctgtgcctgagggcgaaaacctggtgctgaactgctccttcaccgacagcgccatctacaacctccagtggttcaggcaggaccctggaaagggactgacaagcctgctgctgatccagagcagccagagagagcagacctccggcagactgaatgccagcctggataagagcagcggcaggtctaccctgtatatcgccgcttctcagcctggcgatagcgccacatatctgtgtgctgtgcggcctacaagcggcggcagctacatccctacatttggcagaggcaccagcctgatcgtgcacccttatctcgaggacctgaagaacgtgttcccacctgaggtggccgtgttcgagcctagcgaggccgagatcagccacacccagaaagccaccctcgtgtgcctggctaccggcttctaccccgaccatgtggaactgtcttggtgggtcaacggcaaagaggtgcacagcggcgtgtctaccgacccccagccactgaaagaacagcccgccctgaacgacagccggtactgcctgagcagcagactgagagtgtccgccaccttctggcagaacccccggaaccacttcagatgccaggtgcagttctacggcctgagcgagaacgacgagtggacccaggacagagccaagcccgtgacccagatcgtgtctgccgaagcctggggcagagccgattgcggctttaccagcgagagctaccagcagggcgtgctgagcgccaccatcctgtacgagatcctgctgggcaaggccaccctgtacgccgtgctggtgtctgccctggtgctgatggctatggtcaagcggaaggacagccggggaagggccaagcgatctggatctggagcaacaaacttctcactactcaaacaagcaggtgacgtggaggagaatcccgggcctactagaggccatatgaccgagtacaagcccacggtgcgcctcgccacccgcgacgacgtccccagggccgtacgcaccctcgccgccgcgttcgccgactaccccgccacgcgccacaccgtcgatccggaccgccacatcgagcgggtcaccgagctgcaagaactcttcctcacgcgcgtcgggctcgacatcggcaaggtgtgggtcgcggacgacggcgccgcggtggcggtctggaccacgccggagagcgtcgaagcgggggcggtgttcgccgagatcggcccgcgcatggccgagttgagcggttcccggctggccgcgcagcaacagatggaaggcctcctggcgccgcaccggcccaaggagcccgcgtggttcctggccaccgtcggcgtctcgcccgaccaccagggcaagggtctgggcagcgccgtcgtgctccccggagtggaggcggccgagcgcgccggggtgcccgccttcctggagacctccgcgccccgcaacctccccttctacgagcggctcggcttcaccgtcaccgccgacgtcgaggtgcccgaaggaccgcgcacctggtgcatgacccgcaagcccggtgcctga

SEQ ID NO: 4054 - DNA, 2595 bp, Artificial Sequence
  Synthetic Polynucloetide
atggccttaccagtgaccgccttgctcctgccgctggccttgctgctccacgccgccaggccggcatgccaggtccagctcgtcgagtccggcggcggcctcgtccaggccggcgactccgtcaccctctcctgcaccgcctccggccgcaccttctcctcctacgccctcgcctggttccgccagcgccccggcaaggagcgcgagttcgtcgccggcctccgctggggcggccccaccaactacgccgactccgtcaaggaccgcttcaccatctccggcgactccgccaagcacaccatgtacctccagatgaactccctcaagcccgaggacaccgccgtctactactgcggctacaaccccggcggctgggccgtcccctcccagtacgagtacgactcctggggccagggcacccaggtcaccgtctcctccggtaccggcggaggcggatctggcggcggaggtagcggtggcggaggatctgaattcaatgctggcgtgacccagacacctaagttccaggtgctgaaaaccggccagagcatgaccctgcaatgcgcccaggacatgaaccatgagtacatgagctggtacagacaggaccccggcatgggcctgagactgatccactactctgtggctatccagaccaccgaccagggcgaagtgcccaatggctacaacgtgtccagaagcaccatcgaggacttcccactgagactgctgtctgccgctcctagccagaccagcgtgtacttttgtgccagcagctacctgggcaacaccggcgagctgttttttggcgagggcagcagactgaccgtgggcggaggcggaagtggaggcggaggatctggcggcggaggctctcaagaagtgacacagatccctgccgctctgtctgtgcctgagggcgaaaacctggtgctgaactgctccttcaccgacagcgccatctacaacctccagtggttcaggcaggaccctggaaagggactgacaagcctgctgctgatccagagcagccagagagagcagacctccggcagactgaatgccagcctggataagagcagcggcaggtctaccctgtatatcgccgcttctcagcctggcgatagcgccacatatctgtgtgctgtgcggcctacaagcggcggcagctacatccctacatttggcagaggcaccagcctgatcgtgcacccttatgagcagaaactgatctcggaagaggatctggggagcggcaccccattcccttctctggcccctcccatcatgctgctggtggacggcaagcagcagatggtggtcgtgtgcctggtgctggatgtggccccacctggactggacagccccatctggtttagcgccggcaatggctctgccctggacgcctttacctacggcccaagccctgccaccgatggcacctggacaaatctggcccacctgagcctgcccagcgaggaactggcttcttgggagcctctcgtgtgccacacaggacctggcgctgagggacacagcagatccacccagcctatgcacctgtctggcgaggccagcaccgccagaacctgtcctcaggaacctctgagaggcacccctggcggagcactgtggctgggagtgctgagactgctgctgttcaagctgctgctgtttgacctgctgctgacctgctcctgtctgtgcgatcctgccggccctctgccttctcctgccaccaccacaagactgagagccctgggcagccacagactgcaccctgccacagagacaggcggcagagaggccacaagcagccctagaccccagcccagagacagaagatggggcgataccccccctggcagaaagcctggatctccagtccgcgccaagagaagcggatctggcgtgaagcagaccctgaatttcgacctgctgaagctggctggcgacgtggaatccaacccaggcccttctagatctagaggccatatgaccgagtacaagcccacggtgcgcctcgccacccgcgacgacgtccccagggccgtacgcaccctcgccgccgcgttcgccgactaccccgccacgcgccacaccgtcgatccggaccgccacatcgagcgggtcaccgagctgcaagaactcttcctcacgcgcgtcgggctcgacatcggcaaggtgtgggtcgcggacgacggcgccgcggtggcggtctggaccacgccggagagcgtcgaagcgggggcggtgttcgccgagatcggcccgcgcatggccgagttgagcggttcccggctggccgcgcagcaacagatggaaggcctcctggcgccgcaccggcccaaggagcccgcgtggttcctggccaccgtcggcgtctcgcccgaccaccagggcaagggtctgggcagcgccgtcgtgctccccggagtggaggcggccgagcgcgccggggtgcccgccttcctggagacctccgcgccccgcaacctccccttctacgagcggctcggcttcaccgtcaccgccgacgtcgaggtgcccgaaggaccgcgcacctggtgcatgacccgcaagcccggtgcctga

SEQ ID NO: 4055 - DNA, 2064 bp, Artificial Sequence
  Synthetic Polynucloetide
atggccttaccagtgaccgccttgctcctgccgctggccttgctgctccacgccgccaggccggcatgccaggtccagctcgtcgagtccggcggcggcctcgtccaggccggcgactccgtcaccctctcctgcaccgcctccggccgcaccttctcctcctacgccctcgcctggttccgccagcgccccggcaaggagcgcgagttcgtcgccggcctccgctggggcggccccaccaactacgccgactccgtcaaggaccgcttcaccatctccggcgactccgccaagcacaccatgtacctccagatgaactccctcaagcccgaggacaccgccgtctactactgcggctacaaccccggcggctgggccgtcccctcccagtacgagtacgactcctggggccagggcacccaggtcaccgtctcctccggtaccggcggaggcggatctggcggcggaggtagcggtggcggaggatctgaattcaatgctggcgtgacccagacacctaagttccaggtgctgaaaaccggccagagcatgaccctgcaatgcgcccaggacatgaaccatgagtacatgagctggtacagacaggaccccggcatgggcctgagactgatccactactctgtggctatccagaccaccgaccagggcgaagtgcccaatggctacaacgtgtccagaagcaccatcgaggacttcccactgagactgctgtctgccgctcctagccagaccagcgtgtacttttgtgccagcagctacctgggcaacaccggcgagctgttttttggcgagggcagcagactgaccgtgctcgaggacctgaagaacgtgttcccacctgaggtggccgtgttcgagcctagcgaggccgagatcagccacacccagaaagccaccctcgtgtgcctggctaccggcttctaccccgaccatgtggaactgtcttggtgggtcaacggcaaagaggtgcacagcggcgtgtctaccgacccccagccactgaaagaacagcccgccctgaacgacagccggtactgcctgagcagcagactgagagtgtccgccaccttctggcagaacccccggaaccacttcagatgccaggtgcagttctacggcctgagcgagaacgacgagtggacccaggacagagccaagcccgtgacccagatcgtgtctgccgaagcctggggcagagccgattgcggctttaccagcgagagctaccagcagggcgtgctgagcgccaccatcctgtacgagatcctgctgggcaaggccaccctgtacgccgtgctggtgtctgccctggtgctgatggctatggtcaagcggaaggacagccggggaagggccaagcgatctggatctggagcaacaaacttctcactactcaaacaagcaggtgacgtggaggagaatcccgggcctactagaggccatatgaccgagtacaagcccacggtgcgcctcgccacccgcgacgacgtccccagggccgtacgcaccctcgccgccgcgttcgccgactaccccgccacgcgccacaccgtcgatccggaccgccacatcgagcgggtcaccgagctgcaagaactcttcctcacgcgcgtcgggctcgacatcggcaaggtgtgggtcgcggacgacggcgccgcggtggcggtctggaccacgccggagagcgtcgaagcgggggcggtgttcgccgagatcggcccgcgcatggccgagttgagcggttcccggctggccgcgcagcaacagatggaaggcctcctggcgccgcaccggcccaaggagcccgcgtggttcctggccaccgtcggcgtctcgcccgaccaccagggcaagggtctgggcagcgccgtcgtgctccccggagtggaggcggccgagcgcgccggggtgcccgccttcctggagacctccgcgccccgcaacctccccttctacgagcggctcggcttcaccgtcaccgccgacgtcgaggtgcccgaaggaccgcgcacctggtgcatgacccgcaagcccggtgcctga

SEQ ID NO: 4056 - DNA, 1371 bp, Artificial Sequence
  Synthetic Polynucloetide
atggccttaccagtgaccgccttgctcctgccgctggccttgctgctccacgccgccaggccggcatgccaggtccagctcgtcgagtccggcggcggcctcgtccaggccggcgactccgtcaccctctcctgcaccgcctccggccgcaccttctcctcctacgccctcgcctggttccgccagcgccccggcaaggagcgcgagttcgtcgccggcctccgctggggcggccccaccaactacgccgactccgtcaaggaccgcttcaccatctccggcgactccgccaagcacaccatgtacctccagatgaactccctcaagcccgaggacaccgccgtctactactgcggctacaaccccggcggctgggccgtcccctcccagtacgagtacgactcctggggccagggcacccaggtcaccgtctcctccggtaccggcggaggcggatctggcggcggaggtagcggtggcggaggatctgaattcaatgctggcgtgacccagacacctaagttccaggtgctgaaaaccggccagagcatgaccctgcaatgcgcccaggacatgaaccatgagtacatgagctggtacagacaggaccccggcatgggcctgagactgatccactactctgtggctatccagaccaccgaccagggcgaagtgcccaatggctacaacgtgtccagaagcaccatcgaggacttcccactgagactgctgtctgccgctcctagccagaccagcgtgtacttttgtgccagcagctacctgggcaacaccggcgagctgttttttggcgagggcagcagactgaccgtgctcgaggacctgaagaacgtgttcccacctgaggtggccgtgttcgagcctagcgaggccgagatcagccacacccagaaagccaccctcgtgtgcctggctaccggcttctaccccgaccatgtggaactgtcttggtgggtcaacggcaaagaggtgcacagcggcgtgtctaccgacccccagccactgaaagaacagcccgccctgaacgacagccggtactgcctgagcagcagactgagagtgtccgccaccttctggcagaacccccggaaccacttcagatgccaggtgcagttctacggcctgagcgagaacgacgagtggacccaggacagagccaagcccgtgacccagatcgtgtctgccgaagcctggggcagagccgattgcggctttaccagcgagagctaccagcagggcgtgctgagcgccaccatcctgtacgagatcctgctgggcaaggccaccctgtacgccgtgctggtgtctgccctggtgctgatggctatggtcaagcggaaggacagccgggga

SEQ ID NO: 4057 - DNA, 1326 bp, Artificial Sequence
  Synthetic Polynucloetide
atggactggatttggcgcatccttttccttgtcggcgctgctaccggcgcgcattccttcgaacaagaagtgacacagatccctgccgctctgtctgtgcctgagggcgaaaacctggtgctgaactgctccttcaccgacagcgccatctacaacctccagtggttcaggcaggaccctggaaagggactgacaagcctgctgctgatccagagcagccagagagagcagacctccggcagactgaatgccagcctggataagagcagcggcaggtctaccctgtatatcgccgcttctcagcctggcgatagcgccacatatctgtgtgctgtgcggcctacaagcggcggcagctacatccctacatttggcagaggcaccagcctgatcgtgcacccttatatccagaaccctgatcctgccgtgtaccagctgcgggatagcaagagcagcgacaagagcgtgtgtctgttcaccgacttcgacagccagaccaacgtgtcccagagcaaggactccgacgtgtacatcaccgataagaccgtgctggacatgcggagcatggacttcaagagcaactccgccgtggcctggtccaacaagtccgatttcgcctgcgccaacgccttcaacaacagcattatccccgaggacacattcttcccaagccccgagagcagctgcgacgtgaagctggtggaaaagagcttcgagacagacaccaacctgaacttccagaacctgagcgtgatcggcttcagaatcctgctgctgaaagtggccggctttaacctgctgatgaccctgcggctgtggtccagccgcgccaagagaagcggatctggcgtgaagcagaccctgaatttcgacctgctgaagctggctggcgacgtggaatccaacccaggcccttctagaggccatatggccaagcctttgtctcaagaagaatccaccctcattgaaagagcaacggctacaatcaacagcatccccatctctgaagactacagcgtcgccagcgcagctctctctagcgacggccgcatcttcactggtgtcaatgtatatcattttactgggggaccttgtgcagaactcgtggtgctgggcactgctgctgctgcggcagctggcaacctgacttgtatcgtcgcgatcggaaatgagaacaggggcatcttgagcccctgcggacggtgccgacaggtgcttctcgatctgcatcctgggatcaaagccatagtgaaggacagtgatggacagccgacggcagttgggattcgtgaattgctgccctctggttatgtgtgggagggctga

SEQ ID NO: 4058 - DNA, 825 bp, Artificial Sequence
  Synthetic Polynucloetide
atggactggatttggcgcatccttttccttgtcggcgctgctaccggcgcgcattccttcgaacaagaagtgacacagatccctgccgctctgtctgtgcctgagggcgaaaacctggtgctgaactgctccttcaccgacagcgccatctacaacctccagtggttcaggcaggaccctggaaagggactgacaagcctgctgctgatccagagcagccagagagagcagacctccggcagactgaatgccagcctggataagagcagcggcaggtctaccctgtatatcgccgcttctcagcctggcgatagcgccacatatctgtgtgctgtgcggcctacaagcggcggcagctacatccctacatttggcagaggcaccagcctgatcgtgcacccttatatccagaaccctgatcctgccgtgtaccagctgcgggatagcaagagcagcgacaagagcgtgtgtctgttcaccgacttcgacagccagaccaacgtgtcccagagcaaggactccgacgtgtacatcaccgataagaccgtgctggacatgcggagcatggacttcaagagcaactccgccgtggcctggtccaacaagtccgatttcgcctgcgccaacgccttcaacaacagcattatccccgaggacacattcttcccaagccccgagagcagctgcgacgtgaagctggtggaaaagagcttcgagacagacaccaacctgaacttccagaacctgagcgtgatcggcttcagaatcctgctgctgaaagtggccggctttaacctgctgatgaccctgcggctgtggtccagc

SEQ ID NO: 4059 - DNA, 2118 bp, Artificial Sequence
  Synthetic Polynucloetide
atggccttaccagtgaccgccttgctcctgccgctggccttgctgctccacgccgccaggccggcatgccaggtccagctcgtcgagtccggcggcggcctcgtccaggccggcgactccgtcaccctctcctgcaccgcctccggccgcaccttctcctcctacgccctcgcctggttccgccagcgccccggcaaggagcgcgagttcgtcgccggcctccgctggggcggccccaccaactacgccgactccgtcaaggaccgcttcaccatctccggcgactccgccaagcacaccatgtacctccagatgaactccctcaagcccgaggacaccgccgtctactactgcggctacaaccccggcggctgggccgtcccctcccagtacgagtacgactcctggggccagggcacccaggtcaccgtctcctccggtaccggcggaggcggatctggcggcggaggtagcggtggcggaggatctgaattcaatgctggcgtgacccagacacctaagttccaggtgctgaaaaccggccagagcatgaccctgcaatgcgcccaggacatgaaccatgagtacatgagctggtacagacaggaccccggcatgggcctgagactgatccactactctgtggctatccagaccaccgaccagggcgaagtgcccaatggctacaacgtgtccagaagcaccatcgaggacttcccactgagactgctgtctgccgctcctagccagaccagcgtgtacttttgtgccagcagctacctgggcaacaccggcgagctgttttttggcgagggcagcagactgaccgtgctcgaggggaaaccaattcccaaccctcttctgggactggattcaaccggcagcggcgaggacctgaagaacgtgttcccacctgaggtggccgtgttcgagcctagcgaggccgagatcagccacacccagaaagccaccctcgtgtgcctggctaccggcttctaccccgaccatgtggaactgtcttggtgggtcaacggcaaagaggtgcacagcggcgtgtgtaccgacccccagccactgaaagaacagcccgccctgaacgacagccggtactgcctgagcagcagactgagagtgtccgccaccttctggcagaacccccggaaccacttcagatgccaggtgcagttctacggcctgagcgagaacgacgagtggacccaggacagagccaagcccgtgacccagatcgtgtctgccgaagcctggggcagagccgattgcggctttaccagcgagagctaccagcagggcgtgctgagcgccaccatcctgtacgagatcctgctgggcaaggccaccctgtacgccgtgctggtgtctgccctggtgctgatggctatggtcaagcggaaggacagccggggaagggccaagcgatctggatctggagcaacaaacttctcactactcaaacaagcaggtgacgtggaggagaatcccgggcctactagaggccatatgaccgagtacaagcccacggtgcgcctcgccacccgcgacgacgtccccagggccgtacgcaccctcgccgccgcgttcgccgactaccccgccacgcgccacaccgtcgatccggaccgccacatcgagcgggtcaccgagctgcaagaactcttcctcacgcgcgtcgggctcgacatcggcaaggtgtgggtcgcggacgacggcgccgcggtggcggtctggaccacgccggagagcgtcgaagcgggggcggtgttcgccgagatcggcccgcgcatggccgagttgagcggttcccggctggccgcgcagcaacagatggaaggcctcctggcgccgcaccggcccaaggagcccgcgtggttcctggccaccgtcggcgtctcgcccgaccaccagggcaagggtctgggcagcgccgtcgtgctccccggagtggaggcggccgagcgcgccggggtgcccgccttcctggagacctccgcgccccgcaacctccccttctacgagcggctcggcttcaccgtcaccgccgacgtcgaggtgcccgaaggaccgcgcacctggtgcatgacccgcaagcccggtgcctga

SEQ ID NO: 4060 - DNA, 1428 bp, Artificial Sequence
  Synthetic Polynucloetide
atggccttaccagtgaccgccttgctcctgccgctggccttgctgctccacgccgccaggccggcatgccaggtccagctcgtcgagtccggcggcggcctcgtccaggccggcgactccgtcaccctctcctgcaccgcctccggccgcaccttctcctcctacgccctcgcctggttccgccagcgccccggcaaggagcgcgagttcgtcgccggcctccgctggggcggccccaccaactacgccgactccgtcaaggaccgcttcaccatctccggcgactccgccaagcacaccatgtacctccagatgaactccctcaagcccgaggacaccgccgtctactactgcggctacaaccccggcggctgggccgtcccctcccagtacgagtacgactcctggggccagggcacccaggtcaccgtctcctccggtaccggcggaggcggatctggcggcggaggtagcggtggcggaggatctgaattcaatgctggcgtgacccagacacctaagttccaggtgctgaaaaccggccagagcatgaccctgcaatgcgcccaggacatgaaccatgagtacatgagctggtacagacaggaccccggcatgggcctgagactgatccactactctgtggctatccagaccaccgaccagggcgaagtgcccaatggctacaacgtgtccagaagcaccatcgaggacttcccactgagactgctgtctgccgctcctagccagaccagcgtgtacttttgtgccagcagctacctgggcaacaccggcgagctgttttttggcgagggcagcagactgaccgtgctcgaggggaaaccaattcccaaccctcttctgggactggattcaaccggcagcggcgaggacctgaagaacgtgttcccacctgaggtggccgtgttcgagcctagcgaggccgagatcagccacacccagaaagccaccctcgtgtgcctggctaccggcttctaccccgaccatgtggaactgtcttggtgggtcaacggcaaagaggtgcacagcggcgtgtgtaccgacccccagccactgaaagaacagcccgccctgaacgacagccggtactgcctgagcagcagactgagagtgtccgccaccttctggcagaacccccggaaccacttcagatgccaggtgcagttctacggcctgagcgagaacgacgagtggacccaggacagagccaagcccgtgacccagatcgtgtctgccgaagcctggggcagagccgattgcggctttaccagcgagagctaccagcagggcgtgctgagcgccaccatcctgtacgagatcctgctgggcaaggccaccctgtacgccgtgctggtgtctgccctggtgctgatggctatggtcaagcggaaggacagccggggatga

SEQ ID NO: 4061 - DNA, 1362 bp, Artificial Sequence
  Synthetic Polynucloetide
atggactggatttggcgcatccttttccttgtcggcgctgctaccggcgcgcattccttcgaacaagaagtgacacagatccctgccgctctgtctgtgcctgagggcgaaaacctggtgctgaactgctccttcaccgacagcgccatctacaacctccagtggttcaggcaggaccctggaaagggactgacaagcctgctgctgatccagagcagccagagagagcagacctccggcagactgaatgccagcctggataagagcagcggcaggtctaccctgtatatcgccgcttctcagcctggcgatagcgccacatatctgtgtgctgtgcggcctacaagcggcggcagctacatccctacatttggcagaggcaccagcctgatcgtgcacccttatgagcagaaactgatctcggaagaggatgggagcggcatccagaaccctgatcctgccgtgtaccagctgcgggatagcaagagcagcgacaagagcgtgtgtctgttcaccgacttcgacagccagaccaacgtgtcccagagcaaggactccgacgtgtacatcaccgataagtgcgtgctggacatgcggagcatggacttcaagagcaactccgccgtggcctggtccaacaagtccgatttcgcctgcgccaacgccttcaacaacagcattatccccgaggacacattcttcccaagccccgagagcagctgcgacgtgaagctggtggaaaagagcttcgagacagacaccaacctgaacttccagaacctgagcgtgatcggcttcagaatcctgctgctgaaagtggccggctttaacctgctgatgaccctgcggctgtggtccagccgcgccaagagaagcggatctggcgtgaagcagaccctgaatttcgacctgctgaagctggctggcgacgtggaatccaacccaggcccttctagaggccatatggccaagcctttgtctcaagaagaatccaccctcattgaaagagcaacggctacaatcaacagcatccccatctctgaagactacagcgtcgccagcgcagctctctctagcgacggccgcatcttcactggtgtcaatgtatatcattttactgggggaccttgtgcagaactcgtggtgctgggcactgctgctgctgcggcagctggcaacctgacttgtatcgtcgcgatcggaaatgagaacaggggcatcttgagcccctgcggacggtgccgacaggtgcttctcgatctgcatcctgggatcaaagccatagtgaaggacagtgatggacagccgacggcagttgggattcgtgaattgctgccctctggttatgtgtgggagggctga

SEQ ID NO: 4062 - DNA, 864 bp, Artificial Sequence
  Synthetic Polynucloetide
atggactggatttggcgcatccttttccttgtcggcgctgctaccggcgcgcattccttcgaacaagaagtgacacagatccctgccgctctgtctgtgcctgagggcgaaaacctggtgctgaactgctccttcaccgacagcgccatctacaacctccagtggttcaggcaggaccctggaaagggactgacaagcctgctgctgatccagagcagccagagagagcagacctccggcagactgaatgccagcctggataagagcagcggcaggtctaccctgtatatcgccgcttctcagcctggcgatagcgccacatatctgtgtgctgtgcggcctacaagcggcggcagctacatccctacatttggcagaggcaccagcctgatcgtgcacccttatgagcagaaactgatctcggaagaggatgggagcggcatccagaaccctgatcctgccgtgtaccagctgcgggatagcaagagcagcgacaagagcgtgtgtctgttcaccgacttcgacagccagaccaacgtgtcccagagcaaggactccgacgtgtacatcaccgataagtgcgtgctggacatgcggagcatggacttcaagagcaactccgccgtggcctggtccaacaagtccgatttcgcctgcgccaacgccttcaacaacagcattatccccgaggacacattcttcccaagccccgagagcagctgcgacgtgaagctggtggaaaagagcttcgagacagacaccaacctgaacttccagaacctgagcgtgatcggcttcagaatcctgctgctgaaagtggccggctttaacctgctgatgaccctgcggctgtggtccagctga

SEQ ID NO: 4063 - DNA, 2349 bp, Artificial Sequence
  Synthetic Polynucloetide
atggccttaccagtgaccgccttgctcctgccgctggccttgctgctccacgccgccaggccggcatgccaggtccagctcgtcgagtccggcggcggcctcgtccaggccggcgactccgtcaccctctcctgcaccgcctccggccgcaccttctcctcctacgccctcgcctggttccgccagcgccccggcaaggagcgcgagttcgtcgccggcctccgctggggcggccccaccaactacgccgactccgtcaaggaccgcttcaccatctccggcgactccgccaagcacaccatgtacctccagatgaactccctcaagcccgaggacaccgccgtctactactgcggctacaaccccggcggctgggccgtcccctcccagtacgagtacgactcctggggccagggcacccaggtcaccgtctcctccggtaccggcggaggcggatctggcggcggaggtagcggtggcggaggatctgaattcaatgctggcgtgacccagacacctaagttccaggtgctgaaaaccggccagagcatgaccctgcaatgcgcccaggacatgaaccatgagtacatgagctggtacagacaggaccccggcatgggcctgagactgatccactactctgtggctatccagaccaccgaccagggcgaagtgcccaatggctacaacgtgtccagaagcaccatcgaggacttcccactgagactgctgtctgccgctcctagccagaccagcgtgtacttttgtgccagcagctacctgggcaacaccggcgagctgttttttggcgagggcagcagactgaccgtgggcggaggcggaagtggaggcggaggatctggcggcggaggctctcaagaagtgacacagatccctgccgctctgtctgtgcctgagggcgaaaacctggtgctgaactgctccttcaccgacagcgccatctacaacctccagtggttcaggcaggaccctggaaagggactgacaagcctgctgctgatccagagcagccagagagagcagacctccggcagactgaatgccagcctggataagagcagcggcaggtctaccctgtatatcgccgcttctcagcctggcgatagcgccacatatctgtgtgctgtgcggcctacaagcggcggcagctacatccctacatttggcagaggcaccagcctgatcgtgcacccttatgggagcggcatccagaaccctgatcctgccgtgtaccagctgcgggatagcaagagcagcgacaagagcgtgtgtctgttcaccgacttcgacagccagaccaacgtgtcccagagcaaggactccgacgtgtacatcaccgataagaccgtgctggacatgcggagcatggacttcaagagcaactccgccgtggcctggtccaacaagtccgatttcgcctgcgccaacgccttcaacaacagcattatccccgaggacacattcttcccaagcagcgacgtgccctgcgacgtgaagctggtggaaaagagcttcgagacagacaccaacctgaacttccagaacctgagcgtgatcggcttcagaatcctgctgctgaaagtggccggctttaacctgctgatgaccctgcggctgtggtccagccgcgccaagagaagcggatctggcgtgaagcagaccctgaatttcgacctgctgaagctggctggcgacgtggaatccaacccaggcccttctagaggccatatgaccgagtacaagcccacggtgcgcctcgccacccgcgacgacgtccccagggccgtacgcaccctcgccgccgcgttcgccgactaccccgccacgcgccacaccgtcgatccggaccgccacatcgagcgggtcaccgagctgcaagaactcttcctcacgcgcgtcgggctcgacatcggcaaggtgtgggtcgcggacgacggcgccgcggtggcggtctggaccacgccggagagcgtcgaagcgggggcggtgttcgccgagatcggcccgcgcatggccgagttgagcggttcccggctggccgcgcagcaacagatggaaggcctcctggcgccgcaccggcccaaggagcccgcgtggttcctggccaccgtcggcgtctcgcccgaccaccagggcaagggtctgggcagcgccgtcgtgctccccggagtggaggcggccgagcgcgccggggtgcccgccttcctggagacctccgcgccccgcaacctccccttctacgagcggctcggcttcaccgtcaccgccgacgtcgaggtgcccgaaggaccgcgcacctggtgcatgacccgcaagcccggtgcctga

SEQ ID NO: 4064 - DNA, 2451 bp, Artificial Sequence
  Synthetic Polynucloetide
atggccttaccagtgaccgccttgctcctgccgctggccttgctgctccacgccgccaggccggcatgccaggtccagctcgtcgagtccggcggcggcctcgtccaggccggcgactccgtcaccctctcctgcaccgcctccggccgcaccttctcctcctacgccctcgcctggttccgccagcgccccggcaaggagcgcgagttcgtcgccggcctccgctggggcggccccaccaactacgccgactccgtcaaggaccgcttcaccatctccggcgactccgccaagcacaccatgtacctccagatgaactccctcaagcccgaggacaccgccgtctactactgcggctacaaccccggcggctgggccgtcccctcccagtacgagtacgactcctggggccagggcacccaggtcaccgtctcctccggtaccggcggaggcggatctggcggcggaggtagcggtggcggaggatctgaattcaatgctggcgtgacccagacacctaagttccaggtgctgaaaaccggccagagcatgaccctgcaatgcgcccaggacatgaaccatgagtacatgagctggtacagacaggaccccggcatgggcctgagactgatccactactctgtggctatccagaccaccgaccagggcgaagtgcccaatggctacaacgtgtccagaagcaccatcgaggacttcccactgagactgctgtctgccgctcctagccagaccagcgtgtacttttgtgccagcagctacctgggcaacaccggcgagctgttttttggcgagggcagcagactgaccgtgggcggaggcggaagtggaggcggaggatctggcggcggaggctctcaagaagtgacacagatccctgccgctctgtctgtgcctgagggcgaaaacctggtgctgaactgctccttcaccgacagcgccatctacaacctccagtggttcaggcaggaccctggaaagggactgacaagcctgctgctgatccagagcagccagagagagcagacctccggcagactgaatgccagcctggataagagcagcggcaggtctaccctgtatatcgccgcttctcagcctggcgatagcgccacatatctgtgtgctgtgcggcctacaagcggcggcagctacatccctacatttggcagaggcaccagcctgatcgtgcacccttatctcgaggacctgaagaacgtgttcccacctgaggtggccgtgttcgagcctagcaaggccgagatcgcccacacccagaaagccaccctcgtgtgcctggctaccggcttctaccccgaccatgtggaactgtcttggtgggtcaacggcaaagaggtgcacagcggcgtgtctaccgacccccagccactgaaagaacagcccgccctgaacgacagccggtactgcctgagcagcagactgagagtgtccgccaccttctggcagaacccccggaaccacttcagatgccaggtgcagttctacggcctgagcgagaacgacgagtggacccaggacagagccaagcccgtgacccagatcgtgtctgccgaagcctggggcagagccgattgcggcatcaccagcgccagctaccaccagggcgtgctgagcgccaccatcctgtacgagatcctgctgggcaaggccaccctgtacgccgtgctggtgtctgccctggtgctgatggctatggtcaagcggaaggacagccggggaagggccaagcgatctggatctggagcaacaaacttctcactactcaaacaagcaggtgacgtggaggagaatcccgggcctactagaggccatatgaccgagtacaagcccacggtgcgcctcgccacccgcgacgacgtccccagggccgtacgcaccctcgccgccgcgttcgccgactaccccgccacgcgccacaccgtcgatccggaccgccacatcgagcgggtcaccgagctgcaagaactcttcctcacgcgcgtcgggctcgacatcggcaaggtgtgggtcgcggacgacggcgccgcggtggcggtctggaccacgccggagagcgtcgaagcgggggcggtgttcgccgagatcggcccgcgcatggccgagttgagcggttcccggctggccgcgcagcaacagatggaaggcctcctggcgccgcaccggcccaaggagcccgcgtggttcctggccaccgtcggcgtctcgcccgaccaccagggcaagggtctgggcagcgccgtcgtgctccccggagtggaggcggccgagcgcgccggggtgcccgccttcctggagacctccgcgccccgcaacctccccttctacgagcggctcggcttcaccgtcaccgccgacgtcgaggtgcccgaaggaccgcgcacctggtgcatgacccgcaagcccggtgcctga

SEQ ID NO: 4065 - DNA, 3399 bp, Artificial Sequence
  Synthetic Polynucloetide
atggccttaccagtgaccgccttgctcctgccgctggccttgctgctccacgccgccaggccggcatgccaggtccagctcgtcgagtccggcggcggcctcgtccaggccggcgactccgtcaccctctcctgcaccgcctccggccgcaccttctcctcctacgccctcgcctggttccgccagcgccccggcaaggagcgcgagttcgtcgccggcctccgctggggcggccccaccaactacgccgactccgtcaaggaccgcttcaccatctccggcgactccgccaagcacaccatgtacctccagatgaactccctcaagcccgaggacaccgccgtctactactgcggctacaaccccggcggctgggccgtcccctcccagtacgagtacgactcctggggccagggcacccaggtcaccgtctcctccggtaccggcggaggcggatctggcggcggaggtagcggtggcggaggatctgaattcaatgctggcgtgacccagacacctaagttccaggtgctgaaaaccggccagagcatgaccctgcaatgcgcccaggacatgaaccatgagtacatgagctggtacagacaggaccccggcatgggcctgagactgatccactactctgtggctatccagaccaccgaccagggcgaagtgcccaatggctacaacgtgtccagaagcaccatcgaggacttcccactgagactgctgtctgccgctcctagccagaccagcgtgtacttttgtgccagcagctacctgggcaacaccggcgagctgttttttggcgagggcagcagactgaccgtgctcgagatccagaaccctgatcctgccgtgtaccagctgcgggatagcaagagcagcgacaagagcgtgtgtctgttcaccgacttcgacagccagaccaacgtgtcccagagcaaggactccgacgtgtacatcaccgataagtgcgtgctggacatgcggagcatggacttcaagagcaactccgccgtggcctggtccaacaagtccgatttcgcctgcgccaacgccttcaacaacagcattatccccgaggacacattcttcccaagcagcgacgtgccctgcgacgtgaagctggtggaaaagagcttcgagacagacaccaacctgaacttccagaacctgagcgtgatcggcttcagaatcctgctgctgaaagtggccggctttaacctgctgatgaccctgcggctgtggtccagccgcgccaagagaagcggatctggcgtgaagcagaccctgaatttcgacctgctgaagctggctggcgacgtggaatccaacccaggccctactagtatggactggatttggcgcatccttttccttgtcggcgctgctaccggcgcccattccgggccccaggttcagctgcaagagtctggcggaggacttgctcaagctggcggaagcctgagactgtcttgtgccgcctctggcagaaccttcagcatgggctggtttagacaggcccctggcaaagagagagagttcgtcgccgccatcacatacagcggcggcagcccttactacgcctcttctgtcagaggccggttcaccatcagccgggacaacgccaagaacaccgtgtacctccagatgaacagcctgaagccagaggacaccgccgtgtactactgtgccgccaatccaacctacggcagcgactggaatgccgagaattggggccagggcacccaagtgacagtgtctagtggatccggcggcggaggatctggcggaggcggatctgggggcggaggctctttcgaacaagaagtgacacagatccctgccgctctgtctgtgcctgagggcgaaaacctggtgctgaactgctccttcaccgacagcgccatctacaacctccagtggttcaggcaggaccctggaaagggactgacaagcctgctgctgatccagagcagccagagagagcagacctccggcagactgaatgccagcctggataagagcagcggcaggtctaccctgtatatcgccgcttctcagcctggcgatagcgccacatatctgtgtgctgtgcggcctacaagcggcggcagctacatccctacatttggcagaggcaccagcctgatcgtgcacccttatgaggacctgaagaacgtgttcccacctgaggtggccgtgttcgagcctagcaaggccgagatcgcccacacccagaaagccaccctcgtgtgcctggctaccggcttctaccccgaccatgtggaactgtcttggtgggtcaacggcaaagaggtgcacagcggcgtgtgtaccgacccccagccactgaaagaacagcccgccctgaacgacagccggtactgcctgagcagcagactgagagtgtccgccaccttctggcagaacccccggaaccacttcagatgccaggtgcagttctacggcctgagcgagaacgacgagtggacccaggacagagccaagcccgtgacccagatcgtgtctgccgaagcctggggcagagccgattgcggcatcaccagcgccagctaccaccagggcgtgctgagcgccaccatcctgtacgagatcctgctgggcaaggccaccctgtacgccgtgctggtgtctgccctggtgctgatggctatggtcaagcggaaggacagccggggaagggccaagcgatctggatctggagcaacaaacttctcactactcaaacaagcaggtgacgtggaggagaatcccgggccttctagaggccatatgaccgagtacaagcccacggtgcgcctcgccacccgcgacgacgtccccagggccgtacgcaccctcgccgccgcgttcgccgactaccccgccacgcgccacaccgtcgatccggaccgccacatcgagcgggtcaccgagctgcaagaactcttcctcacgcgcgtcgggctcgacatcggcaaggtgtgggtcgcggacgacggcgccgcggtggcggtctggaccacgccggagagcgtcgaagcgggggcggtgttcgccgagatcggcccgcgcatggccgagttgagcggttcccggctggccgcgcagcaacagatggaaggcctcctggcgccgcaccggcccaaggagcccgcgtggttcctggccaccgtcggcgtctcgcccgaccaccagggcaagggtctgggcagcgccgtcgtgctccccggagtggaggcggccgagcgcgccggggtgcccgccttcctggagacctccgcgccccgcaacctccccttctacgagcggctcggcttcaccgtcaccgccgacgtcgaggtgcccgaaggaccgcgcacctggtgcatgacccgcaagcccggtgcctga

SEQ ID NO: 4066 - DNA, 3396 bp, Artificial Sequence
  Synthetic Polynucloetide
atggccttaccagtgaccgccttgctcctgccgctggccttgctgctccacgccgccaggccggcatgccaggtccagctcgtcgagtccggcggcggcctcgtccaggccggcgactccgtcaccctctcctgcaccgcctccggccgcaccttctcctcctacgccctcgcctggttccgccagcgccccggcaaggagcgcgagttcgtcgccggcctccgctggggcggccccaccaactacgccgactccgtcaaggaccgcttcaccatctccggcgactccgccaagcacaccatgtacctccagatgaactccctcaagcccgaggacaccgccgtctactactgcggctacaaccccggcggctgggccgtcccctcccagtacgagtacgactcctggggccagggcacccaggtcaccgtctcctccggtaccggcggaggcggatctggcggcggaggtagcggtggcggaggatctgaattcaatgctggcgtgacccagacacctaagttccaggtgctgaaaaccggccagagcatgaccctgcaatgcgcccaggacatgaaccatgagtacatgagctggtacagacaggaccccggcatgggcctgagactgatccactactctgtggctatccagaccaccgaccagggcgaagtgcccaatggctacaacgtgtccagaagcaccatcgaggacttcccactgagactgctgtctgccgctcctagccagaccagcgtgtacttttgtgccagcagctacctgggcaacaccggcgagctgttttttggcgagggcagcagactgaccgtgctcgaggacctgaagaacgtgttcccacctgaggtggccgtgttcgagcctagcaaggccgagatcgcccacacccagaaagccaccctcgtgtgcctggctaccggcttctaccccgaccatgtggaactgtcttggtgggtcaacggcaaagaggtgcacagcggcgtgtgtaccgacccccagccactgaaagaacagcccgccctgaacgacagccggtactgcctgagcagcagactgagagtgtccgccaccttctggcagaacccccggaaccacttcagatgccaggtgcagttctacggcctgagcgagaacgacgagtggacccaggacagagccaagcccgtgacccagatcgtgtctgccgaagcctggggcagagccgattgcggcatcaccagcgccagctaccaccagggcgtgctgagcgccaccatcctgtacgagatcctgctgggcaaggccaccctgtacgccgtgctggtgtctgccctggtgctgatggctatggtcaagcggaaggacagccggggaagggccaagcgatctggatctggagcaacaaacttctcactactcaaacaagcaggtgacgtggaggagaatcccgggcctactagtatggactggatttggcgcatccttttccttgtcggcgctgctaccggcgcccattccgggccccaggttcagctgcaagagtctggcggaggacttgctcaagctggcggaagcctgagactgtcttgtgccgcctctggcagaaccttcagcatgggctggtttagacaggcccctggcaaagagagagagttcgtcgccgccatcacatacagcggcggcagcccttactacgcctcttctgtcagaggccggttcaccatcagccgggacaacgccaagaacaccgtgtacctccagatgaacagcctgaagccagaggacaccgccgtgtactactgtgccgccaatccaacctacggcagcgactggaatgccgagaattggggccagggcacccaagtgacagtgtctagtggatccggcggcggaggatctggcggaggcggatctgggggcggaggctctttcgaacaagaagtgacacagatccctgccgctctgtctgtgcctgagggcgaaaacctggtgctgaactgctccttcaccgacagcgccatctacaacctccagtggttcaggcaggaccctggaaagggactgacaagcctgctgctgatccagagcagccagagagagcagacctccggcagactgaatgccagcctggataagagcagcggcaggtctaccctgtatatcgccgcttctcagcctggcgatagcgccacatatctgtgtgctgtgcggcctacaagcggcggcagctacatccctacatttggcagaggcaccagcctgatcgtgcacccttatatccagaaccctgatcctgccgtgtaccagctgcgggatagcaagagcagcgacaagagcgtgtgtctgttcaccgacttcgacagccagaccaacgtgtcccagagcaaggactccgacgtgtacatcaccgataagtgcgtgctggacatgcggagcatggacttcaagagcaactccgccgtggcctggtccaacaagtccgatttcgcctgcgccaacgccttcaacaacagcattatccccgaggacacattcttcccaagcagcgacgtgccctgcgacgtgaagctggtggaaaagagcttcgagacagacaccaacctgaacttccagaacctgagcgtgatcggcttcagaatcctgctgctgaaagtggccggctttaacctgctgatgaccctgcggctgtggtccagccgcgccaagagaagcggatctggcgtgaagcagaccctgaatttcgacctgctgaagctggctggcgacgtggaatccaacccaggcccttctagaggccatatgaccgagtacaagcccacggtgcgcctcgccacccgcgacgacgtccccagggccgtacgcaccctcgccgccgcgttcgccgactaccccgccacgcgccacaccgtcgatccggaccgccacatcgagcgggtcaccgagctgcaagaactcttcctcacgcgcgtcgggctcgacatcggcaaggtgtgggtcgcggacgacggcgccgcggtggcggtctggaccacgccggagagcgtcgaagcgggggcggtgttcgccgagatcggcccgcgcatggccgagttgagcggttcccggctggccgcgcagcaacagatggaaggcctcctggcgccgcaccggcccaaggagcccgcgtggttcctggccaccgtcggcgtctcgcccgaccaccagggcaagggtctgggcagcgccgtcgtgctccccggagtggaggcggccgagcgcgccggggtgcccgccttcctggagacctccgcgccccgcaacctccccttctacgagcggctcggcttcaccgtcaccgccgacgtcgaggtgcccgaaggaccgcgcacctggtgcatgacccgcaagcccggtgcctga

SEQ ID NO: 4067 - DNA, 3396 bp, Artificial Sequence
  Synthetic Polynucloetide
atggccttaccagtgaccgccttgctcctgccgctggccttgctgctccacgccgccaggccggcatgccaggtccagctcgtcgagtccggcggcggcctcgtccaggccggcgactccgtcaccctctcctgcaccgcctccggccgcaccttctcctcctacgccctcgcctggttccgccagcgccccggcaaggagcgcgagttcgtcgccggcctccgctggggcggccccaccaactacgccgactccgtcaaggaccgcttcaccatctccggcgactccgccaagcacaccatgtacctccagatgaactccctcaagcccgaggacaccgccgtctactactgcggctacaaccccggcggctgggccgtcccctcccagtacgagtacgactcctggggccagggcacccaggtcaccgtctcctccggtaccggcggaggcggatctggcggcggaggtagcggtggcggaggatctgaattcaatgctggcgtgacccagacacctaagttccaggtgctgaaaaccggccagagcatgaccctgcaatgcgcccaggacatgaaccatgagtacatgagctggtacagacaggaccccggcatgggcctgagactgatccactactctgtggctatccagaccaccgaccagggcgaagtgcccaatggctacaacgtgtccagaagcaccatcgaggacttcccactgagactgctgtctgccgctcctagccagaccagcgtgtacttttgtgccagcagctacctgggcaacaccggcgagctgttttttggcgagggcagcagactgaccgtgctcgaggacctgaagaacgtgttcccacctgaggtggccgtgttcgagcctagcgaggccgagatcagccacacccagaaagccaccctcgtgtgcctggctaccggcttctaccccgaccatgtggaactgtcttggtgggtcaacggcaaagaggtgcacagcggcgtgtgtaccgacccccagccactgaaagaacagcccgccctgaacgacagccggtactgcctgagcagcagactgagagtgtccgccaccttctggcagaacccccggaaccacttcagatgccaggtgcagttctacggcctgagcgagaacgacgagtggacccaggacagagccaagcccgtgacccagatcgtgtctgccgaagcctggggcagagccgattgcggctttaccagcgagagctaccagcagggcgtgctgagcgccaccatcctgtacgagatcctgctgggcaaggccaccctgtacgccgtgctggtgtctgccctggtgctgatggctatggtcaagcggaaggacagccggggaagggccaagcgatctggatctggagcaacaaacttctcactactcaaacaagcaggtgacgtggaggagaatcccgggcctactagtatggactggatttggcgcatccttttccttgtcggcgctgctaccggcgcccattccgggccccaggttcagctgcaagagtctggcggaggacttgctcaagctggcggaagcctgagactgtcttgtgccgcctctggcagaaccttcagcatgggctggtttagacaggcccctggcaaagagagagagttcgtcgccgccatcacatacagcggcggcagcccttactacgcctcttctgtcagaggccggttcaccatcagccgggacaacgccaagaacaccgtgtacctccagatgaacagcctgaagccagaggacaccgccgtgtactactgtgccgccaatccaacctacggcagcgactggaatgccgagaattggggccagggcacccaagtgacagtgtctagtggatccggcggcggaggatctggcggaggcggatctgggggcggaggctctttcgaacaagaagtgacacagatccctgccgctctgtctgtgcctgagggcgaaaacctggtgctgaactgctccttcaccgacagcgccatctacaacctccagtggttcaggcaggaccctggaaagggactgacaagcctgctgctgatccagagcagccagagagagcagacctccggcagactgaatgccagcctggataagagcagcggcaggtctaccctgtatatcgccgcttctcagcctggcgatagcgccacatatctgtgtgctgtgcggcctacaagcggcggcagctacatccctacatttggcagaggcaccagcctgatcgtgcacccttatatccagaaccctgatcctgccgtgtaccagctgcgggatagcaagagcagcgacaagagcgtgtgtctgttcaccgacttcgacagccagaccaacgtgtcccagagcaaggactccgacgtgtacatcaccgataagtgcgtgctggacatgcggagcatggacttcaagagcaactccgccgtggcctggtccaacaagtccgatttcgcctgcgccaacgccttcaacaacagcattatccccgaggacacattcttcccaagccccgagagcagctgcgacgtgaagctggtggaaaagagcttcgagacagacaccaacctgaacttccagaacctgagcgtgatcggcttcagaatcctgctgctgaaagtggccggctttaacctgctgatgaccctgcggctgtggtccagccgcgccaagagaagcggatctggcgtgaagcagaccctgaatttcgacctgctgaagctggctggcgacgtggaatccaacccaggcccttctagaggccatatgaccgagtacaagcccacggtgcgcctcgccacccgcgacgacgtccccagggccgtacgcaccctcgccgccgcgttcgccgactaccccgccacgcgccacaccgtcgatccggaccgccacatcgagcgggtcaccgagctgcaagaactcttcctcacgcgcgtcgggctcgacatcggcaaggtgtgggtcgcggacgacggcgccgcggtggcggtctggaccacgccggagagcgtcgaagcgggggcggtgttcgccgagatcggcccgcgcatggccgagttgagcggttcccggctggccgcgcagcaacagatggaaggcctcctggcgccgcaccggcccaaggagcccgcgtggttcctggccaccgtcggcgtctcgcccgaccaccagggcaagggtctgggcagcgccgtcgtgctccccggagtggaggcggccgagcgcgccggggtgcccgccttcctggagacctccgcgccccgcaacctccccttctacgagcggctcggcttcaccgtcaccgccgacgtcgaggtgcccgaaggaccgcgcacctggtgcatgacccgcaagcccggtgcctga

SEQ ID NO: 4068 - DNA, 2694 bp, Artificial Sequence
  Synthetic Polynucloetide
atggccttaccagtgaccgccttgctcctgccgctggccttgctgctccacgccgccaggccggcatgccaggtccagctcgtcgagtccggcggcggcctcgtccaggccggcgactccgtcaccctctcctgcaccgcctccggccgcaccttctcctcctacgccctcgcctggttccgccagcgccccggcaaggagcgcgagttcgtcgccggcctccgctggggcggccccaccaactacgccgactccgtcaaggaccgcttcaccatctccggcgactccgccaagcacaccatgtacctccagatgaactccctcaagcccgaggacaccgccgtctactactgcggctacaaccccggcggctgggccgtcccctcccagtacgagtacgactcctggggccagggcacccaggtcaccgtctcctccggtaccggcggaggcggatctggcggcggaggtagcggtggcggaggatctgaattcaatgctggcgtgacccagacacctaagttccaggtgctgaaaaccggccagagcatgaccctgcaatgcgcccaggacatgaaccatgagtacatgagctggtacagacaggaccccggcatgggcctgagactgatccactactctgtggctatccagaccaccgaccagggcgaagtgcccaatggctacaacgtgtccagaagcaccatcgaggacttcccactgagactgctgtctgccgctcctagccagaccagcgtgtacttttgtgccagcagctacctgggcaacaccggcgagctgttttttggcgagggcagcagactgaccgtgctcgaggacctgaagaacgtgttcccacctgaggtggccgtgttcgagcctagcgaggccgagatcagccacacccagaaagccaccctcgtgtgcctggctaccggcttctaccccgaccatgtggaactgtcttggtgggtcaacggcaaagaggtgcacagcggcgtgtgtaccgacccccagccactgaaagaacagcccgccctgaacgacagccggtactgcctgagcagcagactgagagtgtccgccaccttctggcagaacccccggaaccacttcagatgccaggtgcagttctacggcctgagcgagaacgacgagtggacccaggacagagccaagcccgtgacccagatcgtgtctgccgaagcctggggcagagccgattgcggctttaccagcgagagctaccagcagggcgtgctgagcgccaccatcctgtacgagatcctgctgggcaaggccaccctgtacgccgtgctggtgtctgccctggtgctgatggctatggtcaagcggaaggacagccggggaagggccaagcgatctggatctggagcaacaaacttctcactactcaaacaagcaggtgacgtggaggagaatcccgggcctactagtatggactggatttggcgcatccttttccttgtcggcgctgctaccggcgcccattccgggccccaggttcagctgcaagagtctggcggaggacttgctcaagctggcggaagcctgagactgtcttgtgccgcctctggcagaaccttcagcatgggctggtttagacaggcccctggcaaagagagagagttcgtcgccgccatcacatacagcggcggcagcccttactacgcctcttctgtcagaggccggttcaccatcagccgggacaacgccaagaacaccgtgtacctccagatgaacagcctgaagccagaggacaccgccgtgtactactgtgccgccaatccaacctacggcagcgactggaatgccgagaattggggccagggcacccaagtgacagtgtctagtggatccggcggcggaggatctggcggaggcggatctgggggcggaggctctttcgaacaagaagtgacacagatccctgccgctctgtctgtgcctgagggcgaaaacctggtgctgaactgctccttcaccgacagcgccatctacaacctccagtggttcaggcaggaccctggaaagggactgacaagcctgctgctgatccagagcagccagagagagcagacctccggcagactgaatgccagcctggataagagcagcggcaggtctaccctgtatatcgccgcttctcagcctggcgatagcgccacatatctgtgtgctgtgcggcctacaagcggcggcagctacatccctacatttggcagaggcaccagcctgatcgtgcacccttatatccagaaccctgatcctgccgtgtaccagctgcgggatagcaagagcagcgacaagagcgtgtgtctgttcaccgacttcgacagccagaccaacgtgtcccagagcaaggactccgacgtgtacatcaccgataagtgcgtgctggacatgcggagcatggacttcaagagcaactccgccgtggcctggtccaacaagtccgatttcgcctgcgccaacgccttcaacaacagcattatccccgaggacacattcttcccaagccccgagagcagctgcgacgtgaagctggtggaaaagagcttcgagacagacaccaacctgaacttccagaacctgagcgtgatcggcttcagaatcctgctgctgaaagtggccggctttaacctgctgatgaccctgcggctgtggtccagc

SEQ ID NO: 4069 - DNA, 3369 bp, Artificial Sequence
  Synthetic Polynucloetide
atggccttaccagtgaccgccttgctcctgccgctggccttgctgctccacgccgccaggccggcatgccaggtccagctcgtcgagtccggcggcggcctcgtccaggccggcgactccgtcaccctctcctgcaccgcctccggccgcaccttctcctcctacgccctcgcctggttccgccagcgccccggcaaggagcgcgagttcgtcgccggcctccgctggggcggccccaccaactacgccgactccgtcaaggaccgcttcaccatctccggcgactccgccaagcacaccatgtacctccagatgaactccctcaagcccgaggacaccgccgtctactactgcggctacaaccccggcggctgggccgtcccctcccagtacgagtacgactcctggggccagggcacccaggtcaccgtctcctccggtaccggcggaggcggatctggcggcggaggtagcggtggcggaggatctgaattcaatgctggcgtgacccagacacctaagttccaggtgctgaaaaccggccagagcatgaccctgcaatgcgcccaggacatgaaccatgagtacatgagctggtacagacaggaccccggcatgggcctgagactgatccactactctgtggctatccagaccaccgaccagggcgaagtgcccaatggctacaacgtgtccagaagcaccatcgaggacttcccactgagactgctgtctgccgctcctagccagaccagcgtgtacttttgtgccagcagctacctgggcaacaccggcgagctgttttttggcgagggcagcagactgaccgtgctcgaggacctgaagaacgtgttcccacctgaggtggccgtgttcgagcctagcgaggccgagatcagccacacccagaaagccaccctcgtgtgcctggctaccggcttctaccccgaccatgtggaactgtcttggtgggtcaacggcaaagaggtgcacagcggcgtgtgtaccgacccccagccactgaaagaacagcccgccctgaacgacagccggtactgcctgagcagcagactgagagtgtccgccaccttctggcagaacccccggaaccacttcagatgccaggtgcagttctacggcctgagcgagaacgacgagtggacccaggacagagccaagcccgtgacccagatcgtgtctgccgaagcctggggcagagccgattgcggctttaccagcgagagctaccagcagggcgtgctgagcgccaccatcctgtacgagatcctgctgggcaaggccaccctgtacgccgtgctggtgtctgccctggtgctgatggctatggtcaagcggaaggacagccggggaagggccaagcgatctggatctggagcaacaaacttctcactactcaaacaagcaggtgacgtggaggagaatcccgggcctactagtatggactggatttggcgcatccttttccttgtcggcgctgctaccggcgcccattccgggccccaggttcagctgcaagagtctggcggaggacttgctcaagctggcggaagcctgagactgtcttgtgccgcctctggcagaaccttcagcatgggctggtttagacaggcccctggcaaagagagagagttcgtcgccgccatcacatacagcggcggcagcccttactacgcctcttctgtcagaggccggttcaccatcagccgggacaacgccaagaacaccgtgtacctccagatgaacagcctgaagccagaggacaccgccgtgtactactgtgccgccaatccaacctacggcagcgactggaatgccgagaattggggccagggcacccaagtgacagtgtctagtggatccggcggcggaggatctggcggaggcggatctgggggcggaggctctttcgaacaagaagtgacacagatccctgccgctctgtctgtgcctgagggcgaaaacctggtgctgaactgctccttcaccgacagcgccatctacaacctccagtggttcaggcaggaccctggaaagggactgacaagcctgctgctgatccagagcagccagagagagcagacctccggcagactgaatgccagcctggataagagcagcggcaggtctaccctgtatatcgccgcttctcagcctggcgatagcgccacatatctgtgtgctgtgcggcctacaagcggcggcagctacatccctacatttggcagaggcaccagcctgatcgtgcacccttatatccagaaccctgatcctgccgtgtaccagctgcgggatagcaagagcagcgacaagagcgtgtgtctgttcaccgacttcgacagccagaccaacgtgtcccagagcaaggactccgacgtgtacatcaccgataagtgcgtgctggacatgcggagcatggacttcaagagcaactccgccgtggcctggtccaacaagtccgatttcgcctgcgccaacgccttcaacaacagcattatccccgaggacacattcttcccaagccccgagagcagctgcgacgtgaagctggtggaaaagagcttcgagacagacaccaacctgaacttccagaacctgagcgtgatcggcttcagaatcctgctgctgaaagtggccggctttaacctgctgatgaccctgcggctgtggtccagccgcgccaagagaagcggatctggcgtgaagcagaccctgaatttcgacctgctgaagctggctggcgacgtggaatccaacccaggcccttctagaggcgggatccacaccatggctacctacgaggtgctgtgcgaggtggcaagaaagctgggcaccgacgacagagaagtggtgctgttcctgctgaacgtgttcatccctcagcctacactggcccagctgatcggtgcactgagagccctgaaagaggaaggccggctgacctttcctctgctggccgaatgcctgttcagagccggaagaagggatctgctgcgggacctgctgcatctggaccccagatttctggaaagacacctggccggcaccatgagctacttcagcccttaccagctgaccgtgctgcacgttgacggcgaactgtgcgccagagatattcggagcctgatcttcctgagcaaggacaccatcggcagccggtctacccctcagacatttctgcactgggtgtactgcatggaaaacctggacctgctcggccccacagatgtggatgccctgatgtccatgctgagaagcctgagcagagtggacctccagagacaggtgcagacactgatgggactgcacctgagcggacctagccacagccagcactacagacacacccct

SEQ ID NO: 4070 - DNA, 2706 bp, Artificial Sequence
  Synthetic Polynucloetide
atggccttaccagtgaccgccttgctcctgccgctggccttgctgctccacgccgccaggccggcatgccaggtccagctcgtcgagtccggcggcggcctcgtccaggccggcgactccgtcaccctctcctgcaccgcctccggccgcaccttctcctcctacgccctcgcctggttccgccagcgccccggcaaggagcgcgagttcgtcgccggcctccgctggggcggccccaccaactacgccgactccgtcaaggaccgcttcaccatctccggcgactccgccaagcacaccatgtacctccagatgaactccctcaagcccgaggacaccgccgtctactactgcggctacaaccccggcggctgggccgtcccctcccagtacgagtacgactcctggggccagggcacccaggtcaccgtctcctccggtaccggcggaggcggatctggcggcggaggtagcggtggcggaggatctgaattcaatgctggcgtgacccagacacctaagttccaggtgctgaaaaccggccagagcatgaccctgcaatgcgcccaggacatgaaccatgagtacatgagctggtacagacaggaccccggcatgggcctgagactgatccactactctgtggctatccagaccaccgaccagggcgaagtgcccaatggctacaacgtgtccagaagcaccatcgaggacttcccactgagactgctgtctgccgctcctagccagaccagcgtgtacttttgtgccagcagctacctgggcaacaccggcgagctgttttttggcgagggcagcagactgaccgtgctcgagatccagaaccctgatcctgccgtgtaccagctgcgggatagcaagagcagcgacaagagcgtgtgtctgttcaccgacttcgacagccagaccaacgtgtcccagagcaaggactccgacgtgtacatcaccgataagtgcgtgctggacatgcggagcatggacttcaagagcaactccgccgtggcctggtccaacaagtccgatttcgcctgcgccaacgccttcaacaacagcattatccccgaggacacattcttcccaagccccgagagcagctgcgacgtgaagctggtggaaaagagcttcgagacagacaccaacctgaacttccagaacctgagcgtgatcggcttcagaatcctgctgctgaaagtggccggctttaacctgctgatgaccctgcggctgtggtccagccgcgccaagagaagcggatctggcgtgaagcagaccctgaatttcgacctgctgaagctggctggcgacgtggaatccaacccaggccctactagtatggactggatttggcgcatccttttccttgtcggcgctgctaccggcgcccattccgggccccaggttcagctgcaagagtctggcggaggacttgctcaagctggcggaagcctgagactgtcttgtgccgcctctggcagaaccttcagcatgggctggtttagacaggcccctggcaaagagagagagttcgtcgccgccatcacatacagcggcggcagcccttactacgcctcttctgtcagaggccggttcaccatcagccgggacaacgccaagaacaccgtgtacctccagatgaacagcctgaagccagaggacaccgccgtgtactactgtgccgccaatccaacctacggcagcgactggaatgccgagaattggggccagggcacccaagtgacagtgtctagtggatccggcggcggaggatctggcggaggcggatctgggggcggaggctctttcgaacaagaagtgacacagatccctgccgctctgtctgtgcctgagggcgaaaacctggtgctgaactgctccttcaccgacagcgccatctacaacctccagtggttcaggcaggaccctggaaagggactgacaagcctgctgctgatccagagcagccagagagagcagacctccggcagactgaatgccagcctggataagagcagcggcaggtctaccctgtatatcgccgcttctcagcctggcgatagcgccacatatctgtgtgctgtgcggcctacaagcggcggcagctacatccctacatttggcagaggcaccagcctgatcgtgcacccttatgaggacctgaagaacgtgttcccacctgaggtggccgtgttcgagcctagcgaggccgagatcagccacacccagaaagccaccctcgtgtgcctggctaccggcttctaccccgaccatgtggaactgtcttggtgggtcaacggcaaagaggtgcacagcggcgtgtgtaccgacccccagccactgaaagaacagcccgccctgaacgacagccggtactgcctgagcagcagactgagagtgtccgccaccttctggcagaacccccggaaccacttcagatgccaggtgcagttctacggcctgagcgagaacgacgagtggacccaggacagagccaagcccgtgacccagatcgtgtctgccgaagcctggggcagagccgattgcggctttaccagcgagagctaccagcagggcgtgctgagcgccaccatcctgtacgagatcctgctgggcaaggccaccctgtacgccgtgctggtgtctgccctggtgctgatggctatggtcaagcggaaggacagccgggga

SEQ ID NO: 4071 - DNA, 3372 bp, Artificial Sequence
  Synthetic Polynucloetide
atggccttaccagtgaccgccttgctcctgccgctggccttgctgctccacgccgccaggccggcatgccaggtccagctcgtcgagtccggcggcggcctcgtccaggccggcgactccgtcaccctctcctgcaccgcctccggccgcaccttctcctcctacgccctcgcctggttccgccagcgccccggcaaggagcgcgagttcgtcgccggcctccgctggggcggccccaccaactacgccgactccgtcaaggaccgcttcaccatctccggcgactccgccaagcacaccatgtacctccagatgaactccctcaagcccgaggacaccgccgtctactactgcggctacaaccccggcggctgggccgtcccctcccagtacgagtacgactcctggggccagggcacccaggtcaccgtctcctccggtaccggcggaggcggatctggcggcggaggtagcggtggcggaggatctgaattcaatgctggcgtgacccagacacctaagttccaggtgctgaaaaccggccagagcatgaccctgcaatgcgcccaggacatgaaccatgagtacatgagctggtacagacaggaccccggcatgggcctgagactgatccactactctgtggctatccagaccaccgaccagggcgaagtgcccaatggctacaacgtgtccagaagcaccatcgaggacttcccactgagactgctgtctgccgctcctagccagaccagcgtgtacttttgtgccagcagctacctgggcaacaccggcgagctgttttttggcgagggcagcagactgaccgtgctcgagatccagaaccctgatcctgccgtgtaccagctgcgggatagcaagagcagcgacaagagcgtgtgtctgttcaccgacttcgacagccagaccaacgtgtcccagagcaaggactccgacgtgtacatcaccgataagtgcgtgctggacatgcggagcatggacttcaagagcaactccgccgtggcctggtccaacaagtccgatttcgcctgcgccaacgccttcaacaacagcattatccccgaggacacattcttcccaagccccgagagcagctgcgacgtgaagctggtggaaaagagcttcgagacagacaccaacctgaacttccagaacctgagcgtgatcggcttcagaatcctgctgctgaaagtggccggctttaacctgctgatgaccctgcggctgtggtccagccgcgccaagagaagcggatctggcgtgaagcagaccctgaatttcgacctgctgaagctggctggcgacgtggaatccaacccaggccctactagtatggactggatttggcgcatccttttccttgtcggcgctgctaccggcgcccattccgggccccaggttcagctgcaagagtctggcggaggacttgctcaagctggcggaagcctgagactgtcttgtgccgcctctggcagaaccttcagcatgggctggtttagacaggcccctggcaaagagagagagttcgtcgccgccatcacatacagcggcggcagcccttactacgcctcttctgtcagaggccggttcaccatcagccgggacaacgccaagaacaccgtgtacctccagatgaacagcctgaagccagaggacaccgccgtgtactactgtgccgccaatccaacctacggcagcgactggaatgccgagaattggggccagggcacccaagtgacagtgtctagtggatccggcggcggaggatctggcggaggcggatctgggggcggaggctctttcgaacaagaagtgacacagatccctgccgctctgtctgtgcctgagggcgaaaacctggtgctgaactgctccttcaccgacagcgccatctacaacctccagtggttcaggcaggaccctggaaagggactgacaagcctgctgctgatccagagcagccagagagagcagacctccggcagactgaatgccagcctggataagagcagcggcaggtctaccctgtatatcgccgcttctcagcctggcgatagcgccacatatctgtgtgctgtgcggcctacaagcggcggcagctacatccctacatttggcagaggcaccagcctgatcgtgcacccttatgaggacctgaagaacgtgttcccacctgaggtggccgtgttcgagcctagcgaggccgagatcagccacacccagaaagccaccctcgtgtgcctggctaccggcttctaccccgaccatgtggaactgtcttggtgggtcaacggcaaagaggtgcacagcggcgtgtgtaccgacccccagccactgaaagaacagcccgccctgaacgacagccggtactgcctgagcagcagactgagagtgtccgccaccttctggcagaacccccggaaccacttcagatgccaggtgcagttctacggcctgagcgagaacgacgagtggacccaggacagagccaagcccgtgacccagatcgtgtctgccgaagcctggggcagagccgattgcggctttaccagcgagagctaccagcagggcgtgctgagcgccaccatcctgtacgagatcctgctgggcaaggccaccctgtacgccgtgctggtgtctgccctggtgctgatggctatggtcaagcggaaggacagccggggaagggccaagcgatctggatctggagcaacaaacttctcactactcaaacaagcaggtgacgtggaggagaatcccgggccttctagaggcgggatccacaccatggctacctacgaggtgctgtgcgaggtggcaagaaagctgggcaccgacgacagagaagtggtgctgttcctgctgaacgtgttcatccctcagcctacactggcccagctgatcggtgcactgagagccctgaaagaggaaggccggctgacctttcctctgctggccgaatgcctgttcagagccggaagaagggatctgctgcgggacctgctgcatctggaccccagatttctggaaagacacctggccggcaccatgagctacttcagcccttaccagctgaccgtgctgcacgttgacggcgaactgtgcgccagagatattcggagcctgatcttcctgagcaaggacaccatcggcagccggtctacccctcagacatttctgcactgggtgtactgcatggaaaacctggacctgctcggccccacagatgtggatgccctgatgtccatgctgagaagcctgagcagagtggacctccagagacaggtgcagacactgatgggactgcacctgagcggacctagccacagccagcactacagacacacccct

SEQ ID NO: 4072 - DNA, 3396 bp, Artificial Sequence
  Synthetic Polynucloetide
atggccttaccagtgaccgccttgctcctgccgctggccttgctgctccacgccgccaggccggcatgccaggtccagctcgtcgagtccggcggcggcctcgtccaggccggcgactccgtcaccctctcctgcaccgcctccggccgcaccttctcctcctacgccctcgcctggttccgccagcgccccggcaaggagcgcgagttcgtcgccggcctccgctggggcggccccaccaactacgccgactccgtcaaggaccgcttcaccatctccggcgactccgccaagcacaccatgtacctccagatgaactccctcaagcccgaggacaccgccgtctactactgcggctacaaccccggcggctgggccgtcccctcccagtacgagtacgactcctggggccagggcacccaggtcaccgtctcctccggtaccggcggaggcggatctggcggcggaggtagcggtggcggaggatctgaattcaatgctggcgtgacccagacacctaagttccaggtgctgaaaaccggccagagcatgaccctgcaatgcgcccaggacatgaaccatgagtacatgagctggtacagacaggaccccggcatgggcctgagactgatccactactctgtggctatccagaccaccgaccagggcgaagtgcccaatggctacaacgtgtccagaagcaccatcgaggacttcccactgagactgctgtctgccgctcctagccagaccagcgtgtacttttgtgccagcagctacctgggcaacaccggcgagctgttttttggcgagggcagcagactgaccgtgctcgaggacctgaagaacgtgttcccacctgaggtggccgtgttcgagcctagcgaggccgagatcagccacacccagaaagccaccctcgtgtgcctggctaccggcttctaccccgaccatgtggaactgtcttggtgggtcaacggcaaagaggtgcacagcggcgtgtctaccgacccccagccactgaaagaacagcccgccctgaacgacagccggtactgcctgagcagcagactgagagtgtccgccaccttctggcagaacccccggaaccacttcagatgccaggtgcagttctacggcctgagcgagaacgacgagtggacccaggacagagccaagcccgtgacccagatcgtgtctgccgaagcctggggcagagccgattgcggctttaccagcgagagctaccagcagggcgtgctgagcgccaccatcctgtacgagatcctgctgggcaaggccaccctgtacgccgtgctggtgtctgccctggtgctgatggctatggtcaagcggaaggacagccggggaagggccaagcgatctggatctggagcaacaaacttctcactactcaaacaagcaggtgacgtggaggagaatcccgggcctactagtatggactggatttggcgcatccttttccttgtcggcgctgctaccggcgcccattccgggccccaggttcagctgcaagagtctggcggaggacttgctcaagctggcggaagcctgagactgtcttgtgccgcctctggcagaaccttcagcatgggctggtttagacaggcccctggcaaagagagagagttcgtcgccgccatcacatacagcggcggcagcccttactacgcctcttctgtcagaggccggttcaccatcagccgggacaacgccaagaacaccgtgtacctccagatgaacagcctgaagccagaggacaccgccgtgtactactgtgccgccaatccaacctacggcagcgactggaatgccgagaattggggccagggcacccaagtgacagtgtctagtggatccggcggcggaggatctggcggaggcggatctgggggcggaggctctttcgaacaagaagtgacacagatccctgccgctctgtctgtgcctgagggcgaaaacctggtgctgaactgctccttcaccgacagcgccatctacaacctccagtggttcaggcaggaccctggaaagggactgacaagcctgctgctgatccagagcagccagagagagcagacctccggcagactgaatgccagcctggataagagcagcggcaggtctaccctgtatatcgccgcttctcagcctggcgatagcgccacatatctgtgtgctgtgcggcctacaagcggcggcagctacatccctacatttggcagaggcaccagcctgatcgtgcacccttatatccagaaccctgatcctgccgtgtaccagctgcgggatagcaagagcagcgacaagagcgtgtgtctgttcaccgacttcgacagccagaccaacgtgtcccagagcaaggactccgacgtgtacatcaccgataagaccgtgctggacatgcggagcatggacttcaagagcaactccgccgtggcctggtccaacaagtccgatttcgcctgcgccaacgccttcaacaacagcattatccccgaggacacattcttcccaagccccgagagcagctgcgacgtgaagctggtggaaaagagcttcgagacagacaccaacctgaacttccagaacctgagcgtgatcggcttcagaatcctgctgctgaaagtggccggctttaacctgctgatgaccctgcggctgtggtccagccgcgccaagagaagcggatctggcgtgaagcagaccctgaatttcgacctgctgaagctggctggcgacgtggaatccaacccaggcccttctagaggccatatgaccgagtacaagcccacggtgcgcctcgccacccgcgacgacgtccccagggccgtacgcaccctcgccgccgcgttcgccgactaccccgccacgcgccacaccgtcgatccggaccgccacatcgagcgggtcaccgagctgcaagaactcttcctcacgcgcgtcgggctcgacatcggcaaggtgtgggtcgcggacgacggcgccgcggtggcggtctggaccacgccggagagcgtcgaagcgggggcggtgttcgccgagatcggcccgcgcatggccgagttgagcggttcccggctggccgcgcagcaacagatggaaggcctcctggcgccgcaccggcccaaggagcccgcgtggttcctggccaccgtcggcgtctcgcccgaccaccagggcaagggtctgggcagcgccgtcgtgctccccggagtggaggcggccgagcgcgccggggtgcccgccttcctggagacctccgcgccccgcaacctccccttctacgagcggctcggcttcaccgtcaccgccgacgtcgaggtgcccgaaggaccgcgcacctggtgcatgacccgcaagcccggtgcctga

SEQ ID NO: 4073 - DNA, 3642 bp, Artificial Sequence
  Synthetic Polynucloetide
atggccttaccagtgaccgccttgctcctgccgctggccttgctgctccacgccgccaggccggcatgccaggtccagctcgtcgagtccggcggcggcctcgtccaggccggcgactccgtcaccctctcctgcaccgcctccggccgcaccttctcctcctacgccctcgcctggttccgccagcgccccggcaaggagcgcgagttcgtcgccggcctccgctggggcggccccaccaactacgccgactccgtcaaggaccgcttcaccatctccggcgactccgccaagcacaccatgtacctccagatgaactccctcaagcccgaggacaccgccgtctactactgcggctacaaccccggcggctgggccgtcccctcccagtacgagtacgactcctggggccagggcacccaggtcaccgtctcctccggtaccggcggaggcggatctggcggcggaggtagcggtggcggaggatctgaattcaatgctggcgtgacccagacacctaagttccaggtgctgaaaaccggccagagcatgaccctgcaatgcgcccaggacatgaaccatgagtacatgagctggtacagacaggaccccggcatgggcctgagactgatccactactctgtggctatccagaccaccgaccagggcgaagtgcccaatggctacaacgtgtccagaagcaccatcgaggacttcccactgagactgctgtctgccgctcctagccagaccagcgtgtacttttgtgccagcagctacctgggcaacaccggcgagctgttttttggcgagggcagcagactgaccgtgctcgaggacctgaagaacgtgttcccacctgaggtggccgtgttcgagcctagcgaggccgagatcagccacacccagaaagccaccctcgtgtgcctggctaccggcttctaccccgaccatgtggaactgtcttggtgggtcaacggcaaagaggtgcacagcggcgtgtctaccgacccccagccactgaaagaacagcccgccctgaacgacagccggtactgcctgagcagcagactgagagtgtccgccaccttctggcagaacccccggaaccacttcagatgccaggtgcagttctacggcctgagcgagaacgacgagtggacccaggacagagccaagcccgtgacccagatcgtgtctgccgaagcctggggcagagccgattgcggctttaccagcgagagctaccagcagggcgtgctgagcgccaccatcctgtacgagatcctgctgggcaaggccaccctgtacgccgtgctggtgtctgccctggtgctgatggctatggtcaagcggaaggacagccggggaagggccaagcgatctggatctggagcaacaaacttctcactactcaaacaagcaggtgacgtggaggagaatcccgggcctactagtatggactggatttggcgcatccttttccttgtcggcgctgctaccggcgcccattccgggccccaggttcagctgcaagagtctggcggaggacttgctcaagctggcggaagcctgagactgtcttgtgccgcctctggcagaaccttcagcatgggctggtttagacaggcccctggcaaagagagagagttcgtcgccgccatcacatacagcggcggcagcccttactacgcctcttctgtcagaggccggttcaccatcagccgggacaacgccaagaacaccgtgtacctccagatgaacagcctgaagccagaggacaccgccgtgtactactgtgccgccaatccaacctacggcagcgactggaatgccgagaattggggccagggcacccaagtgacagtgtctagtggatccggcggcggaggatctggcggaggcggatctgggggcggaggctctttcgaacaagaagtgacacagatccctgccgctctgtctgtgcctgagggcgaaaacctggtgctgaactgctccttcaccgacagcgccatctacaacctccagtggttcaggcaggaccctggaaagggactgacaagcctgctgctgatccagagcagccagagagagcagacctccggcagactgaatgccagcctggataagagcagcggcaggtctaccctgtatatcgccgcttctcagcctggcgatagcgccacatatctgtgtgctgtgcggcctacaagcggcggcagctacatccctacatttggcagaggcaccagcctgatcgtgcacccttatgagcagaaactgatctcggaagaggatgggagcggcaccccattcccttctctggcccctcccatcatgctgctggtggacggcaagcagcagatggtggtcgtgtgcctggtgctggatgtggccccacctggactggacagccccatctggtttagcgccggcaatggctctgccctggacgcctttacctacggcccaagccctgccaccgatggcacctggacaaatctggcccacctgagcctgcccagcgaggaactggcttcttgggagcctctcgtgtgccacacaggacctggcgctgagggacacagcagatccacccagcctatgcacctgtctggcgaggccagcaccgccagaacctgtcctcaggaacctctgagaggcacccctggcggagcactgtggctgggagtgctgagactgctgctgttcaagctgctgctgtttgacctgctgctgacctgctcctgtctgtgcgatcctgccggccctctgccttctcctgccaccaccacaagactgagagccctgggcagccacagactgcaccctgccacagagacaggcggcagagaggccacaagcagccctagaccccagcccagagacagaagatggggcgataccccccctggcagaaagcctggatctccagtccgcgccaagagaagcggatctggcgtgaagcagaccctgaatttcgacctgctgaagctggctggcgacgtggaatccaacccaggcccttctagaggccatatgaccgagtacaagcccacggtgcgcctcgccacccgcgacgacgtccccagggccgtacgcaccctcgccgccgcgttcgccgactaccccgccacgcgccacaccgtcgatccggaccgccacatcgagcgggtcaccgagctgcaagaactcttcctcacgcgcgtcgggctcgacatcggcaaggtgtgggtcgcggacgacggcgccgcggtggcggtctggaccacgccggagagcgtcgaagcgggggcggtgttcgccgagatcggcccgcgcatggccgagttgagcggttcccggctggccgcgcagcaacagatggaaggcctcctggcgccgcaccggcccaaggagcccgcgtggttcctggccaccgtcggcgtctcgcccgaccaccagggcaagggtctgggcagcgccgtcgtgctccccggagtggaggcggccgagcgcgccggggtgcccgccttcctggagacctccgcgccccgcaacctccccttctacgagcggctcggcttcaccgtcaccgccgacgtcgaggtgcccgaaggaccgcgcacctggtgcatgacccgcaagcccggtgcctga

SEQ ID NO: 4074 - DNA, 3507 bp, Artificial Sequence
  Synthetic Polynucloetide
atggccttaccagtgaccgccttgctcctgccgctggccttgctgctccacgccgccaggccggcatgccaggtccagctcgtcgagtccggcggcggcctcgtccaggccggcgactccgtcaccctctcctgcaccgcctccggccgcaccttctcctcctacgccctcgcctggttccgccagcgccccggcaaggagcgcgagttcgtcgccggcctccgctggggcggccccaccaactacgccgactccgtcaaggaccgcttcaccatctccggcgactccgccaagcacaccatgtacctccagatgaactccctcaagcccgaggacaccgccgtctactactgcggctacaaccccggcggctgggccgtcccctcccagtacgagtacgactcctggggccagggcacccaggtcaccgtctcctccggtaccggcggaggcggatctggcggcggaggtagcggtggcggaggatctgaattcaatgctggcgtgacccagacacctaagttccaggtgctgaaaaccggccagagcatgaccctgcaatgcgcccaggacatgaaccatgagtacatgagctggtacagacaggaccccggcatgggcctgagactgatccactactctgtggctatccagaccaccgaccagggcgaagtgcccaatggctacaacgtgtccagaagcaccatcgaggacttcccactgagactgctgtctgccgctcctagccagaccagcgtgtacttttgtgccagcagctacctgggcaacaccggcgagctgttttttggcgagggcagcagactgaccgtgctcgaggggaaaccaattcccaaccctcttctgggactggattcaaccggcagcggcgacaagcagctggacgccgacgtgtcccccaagcctaccatcttcctgccctctatcgccgagacaaagctccagaaggccggcacctacctgtgcctgctggaaaagttcttcccagatgtgattaagatccactggcaggaaaagaagtccaacaccatcctgggcagccaggaaggcaacaccatgaagaccaacgacacctacatgaagttcagctggctgaccgtgcccgagaagtccctggacaaagaacacagatgcatcgtgcggcacgaaaacaacaagaacggcgtggaccaggaaatcatcttcccacccatcaagaccgatgtgattacaatggaccccaaggacaactgctccaaggacgccaacgataccctgctgctccagctgaccaacaccagcgcctactacatgtacttgttgctgctgctgaagtccgtggtgtacttcgccatcatcacatgctgcctgctgcggagaaccgccttctgctgcaacggcgagaagtctagggccaagcgatctggatctggagcaacaaacttctcactactcaaacaagcaggtgacgtggaggagaatcccgggcctactagtatggactggatttggcgcatccttttccttgtcggcgctgctaccggcgcccattccgggccccaggttcagctgcaagagtctggcggaggacttgctcaagctggcggaagcctgagactgtcttgtgccgcctctggcagaaccttcagcatgggctggtttagacaggcccctggcaaagagagagagttcgtcgccgccatcacatacagcggcggcagcccttactacgcctcttctgtcagaggccggttcaccatcagccgggacaacgccaagaacaccgtgtacctccagatgaacagcctgaagccagaggacaccgccgtgtactactgtgccgccaatccaacctacggcagcgactggaatgccgagaattggggccagggcacccaagtgacagtgtctagtggatccggcggcggaggatctggcggaggcggatctgggggcggaggctctttcgaacaagaagtgacacagatccctgccgctctgtctgtgcctgagggcgaaaacctggtgctgaactgctccttcaccgacagcgccatctacaacctccagtggttcaggcaggaccctggaaagggactgacaagcctgctgctgatccagagcagccagagagagcagacctccggcagactgaatgccagcctggataagagcagcggcaggtctaccctgtatatcgccgcttctcagcctggcgatagcgccacatatctgtgtgctgtgcggcctacaagcggcggcagctacatccctacatttggcagaggcaccagcctgatcgtgcacccttatgagcagaaactgatctcggaagaggatgggagcggcagccagcctcacaccaagcccagcgtgttcgtgatgaagaacggcaccaacgtggcctgcctcgtgaaagagttctaccccaaggacatcaggatcaacctggtgtccagcaagaagatcaccgagttcgaccccgccatcgtgatctcccccagcggcaagtacaacgccgtgaagctggggaagtacgaggacagcaacagcgtgacctgctccgtgcagcacgacaacaagaccgtgcacagcaccgactttgaagtgaaaaccgactccaccgaccacgtgaagcccaaagagacagagaacaccaagcagcccagcaagagctgccacaagcccaaggccatcgtgcacaccgagaaagtgaacatgatgagcctgaccgtgctgggcctgcggatgctgttcgccaaaaccgtggccgtgaacttcctgctgaccgccaagctgttcttcctccgcgccaagagaagcggatctggcgtgaagcagaccctgaatttcgacctgctgaagctggctggcgacgtggaatccaacccaggcccttctagaggccatatgaccgagtacaagcccacggtgcgcctcgccacccgcgacgacgtccccagggccgtacgcaccctcgccgccgcgttcgccgactaccccgccacgcgccacaccgtcgatccggaccgccacatcgagcgggtcaccgagctgcaagaactcttcctcacgcgcgtcgggctcgacatcggcaaggtgtgggtcgcggacgacggcgccgcggtggcggtctggaccacgccggagagcgtcgaagcgggggcggtgttcgccgagatcggcccgcgcatggccgagttgagcggttcccggctggccgcgcagcaacagatggaaggcctcctggcgccgcaccggcccaaggagcccgcgtggttcctggccaccgtcggcgtctcgcccgaccaccagggcaagggtctgggcagcgccgtcgtgctccccggagtggaggcggccgagcgcgccggggtgcccgccttcctggagacctccgcgccccgcaacctccccttctacgagcggctcggcttcaccgtcaccgccgacgtcgaggtgcccgaaggaccgcgcacctggtgcatgacccgcaagcccggtgcctga

SEQ ID NO: 4075 - DNA, 2718 bp, Artificial Sequence
  Synthetic Polynucloetide
atggccttaccagtgaccgccttgctcctgccgctggccttgctgctccacgccgccaggccggcatgccaggtccagctcgtcgagtccggcggcggcctcgtccaggccggcgactccgtcaccctctcctgcaccgcctccggccgcaccttctcctcctacgccctcgcctggttccgccagcgccccggcaaggagcgcgagttcgtcgccggcctccgctggggcggccccaccaactacgccgactccgtcaaggaccgcttcaccatctccggcgactccgccaagcacaccatgtacctccagatgaactccctcaagcccgaggacaccgccgtctactactgcggctacaaccccggcggctgggccgtcccctcccagtacgagtacgactcctggggccagggcacccaggtcaccgtctcctccggtaccggcggaggcggatctggcggcggaggtagcggtggcggaggatctgaattcaatgctggcgtgacccagacacctaagttccaggtgctgaaaaccggccagagcatgaccctgcaatgcgcccaggacatgaaccatgagtacatgagctggtacagacaggaccccggcatgggcctgagactgatccactactctgtggctatccagaccaccgaccagggcgaagtgcccaatggctacaacgtgtccagaagcaccatcgaggacttcccactgagactgctgtctgccgctcctagccagaccagcgtgtacttttgtgccagcagctacctgggcaacaccggcgagctgttttttggcgagggcagcagactgaccgtgctcgagagccagcctcacaccaagcccagcgtgttcgtgatgaagaacggcaccaacgtggcctgcctcgtgaaagagttctaccccaaggacatcaggatcaacctggtgtccagcaagaagatcaccgagttcgaccccgccatcgtgatctcccccagcggcaagtacaacgccgtgaagctggggaagtacgaggacagcaacagcgtgacctgctccgtgcagcacgacaacaagaccgtgcacagcaccgactttgaagtgaaaaccgactccaccgaccacgtgaagcccaaagagacagagaacaccaagcagcccagcaagagctgccacaagcccaaggccatcgtgcacaccgagaaagtgaacatgatgagcctgaccgtgctgggcctgcggatgctgttcgccaaaaccgtggccgtgaacttcctgctgaccgccaagctgttcttcctcagggccaagcgatctggatctggagcaacaaacttctcactactcaaacaagcaggtgacgtggaggagaatcccgggcctactagtatggactggatttggcgcatccttttccttgtcggcgctgctaccggcgcccattccgggccccaggttcagctgcaagagtctggcggaggacttgctcaagctggcggaagcctgagactgtcttgtgccgcctctggcagaaccttcagcatgggctggtttagacaggcccctggcaaagagagagagttcgtcgccgccatcacatacagcggcggcagcccttactacgcctcttctgtcagaggccggttcaccatcagccgggacaacgccaagaacaccgtgtacctccagatgaacagcctgaagccagaggacaccgccgtgtactactgtgccgccaatccaacctacggcagcgactggaatgccgagaattggggccagggcacccaagtgacagtgtctagtggatccggcggcggaggatctggcggaggcggatctgggggcggaggctctttcgaacaagaagtgacacagatccctgccgctctgtctgtgcctgagggcgaaaacctggtgctgaactgctccttcaccgacagcgccatctacaacctccagtggttcaggcaggaccctggaaagggactgacaagcctgctgctgatccagagcagccagagagagcagacctccggcagactgaatgccagcctggataagagcagcggcaggtctaccctgtatatcgccgcttctcagcctggcgatagcgccacatatctgtgtgctgtgcggcctacaagcggcggcagctacatccctacatttggcagaggcaccagcctgatcgtgcacccttatgacaagcagctggacgccgacgtgtcccccaagcctaccatcttcctgccctctatcgccgagacaaagctccagaaggccggcacctacctgtgcctgctggaaaagttcttcccagatgtgattaagatccactggcaggaaaagaagtccaacaccatcctgggcagccaggaaggcaacaccatgaagaccaacgacacctacatgaagttcagctggctgaccgtgcccgagaagtccctggacaaagaacacagatgcatcgtgcggcacgaaaacaacaagaacggcgtggaccaggaaatcatcttcccacccatcaagaccgatgtgattacaatggaccccaaggacaactgctccaaggacgccaacgataccctgctgctccagctgaccaacaccagcgcctactacatgtacttgttgctgctgctgaagtccgtggtgtacttcgccatcatcacatgctgcctgctgcggagaaccgccttctgctgcaacggcgagaagtct

SEQ ID NO: 4076 - DNA, 3933 bp, Artificial Sequence
  Synthetic Polynucloetide
atggccttaccagtgaccgccttgctcctgccgctggccttgctgctccacgccgccaggccggcatgccaggtccagctcgtcgagtccggcggcggcctcgtccaggccggcgactccgtcaccctctcctgcaccgcctccggccgcaccttctcctcctacgccctcgcctggttccgccagcgccccggcaaggagcgcgagttcgtcgccggcctccgctggggcggccccaccaactacgccgactccgtcaaggaccgcttcaccatctccggcgactccgccaagcacaccatgtacctccagatgaactccctcaagcccgaggacaccgccgtctactactgcggctacaaccccggcggctgggccgtcccctcccagtacgagtacgactcctggggccagggcacccaggtcaccgtctcctccggtaccggcggaggcggatctggcggcggaggtagcggtggcggaggatctgaattcaatgctggcgtgacccagacacctaagttccaggtgctgaaaaccggccagagcatgaccctgcaatgcgcccaggacatgaaccatgagtacatgagctggtacagacaggaccccggcatgggcctgagactgatccactactctgtggctatccagaccaccgaccagggcgaagtgcccaatggctacaacgtgtccagaagcaccatcgaggacttcccactgagactgctgtctgccgctcctagccagaccagcgtgtacttttgtgccagcagctacctgggcaacaccggcgagctgttttttggcgagggcagcagactgaccgtgggacagcctaaggccaatcctaccgtgacactgttccctccaagcagcgaagaactccaggccaacaaggccacacttgtgtgcctgatctccgacttctaccctggggctgtgacagtggcttggaaggccgatggatctcctgtgaaagccggcgtggaaaccaccaagccatccaagcagagcaacaacaaatacgccgccagctcctacctgagcctgacacctgagcagtggaagtcccacagatcctacagctgccaagtgacccacgaaggcagcaccgtggaaaagacagtggcccctacagagtgcagcggatcccagagcttcggcctgctggaccccaagctgtgctacctgctggatggcatcctgttcatctacggcgtgatcctgaccgccctgttcctgagagtgaagttcagcagaagcgccgacgcccctgcctaccagcagggacagaaccaactgtacaacgagctgaacctgggcagacgggaagagtacgacgtgctggacaagcggagaggcagggaccctgagatgggcggaaagccccagcggagaaagaacccccaggaaggactgtataacgaactccagaaagacaagatggccgaagcctacagcgagatcggcatgaagggcgagcggagaagaggcaagggccacgatggcctgtaccagggcctgagcaccgccaccaaggacacctatgacgccctgcacatgcaggccctgcctccaagaagggccaagcgatctggatctggagcaacaaacttctcactactcaaacaagcaggtgacgtggaggagaatcccgggcctactagtatggactggatttggcgcatccttttccttgtcggcgctgctaccggcgcccattccgggccccaggttcagctgcaagagtctggcggaggacttgctcaagctggcggaagcctgagactgtcttgtgccgcctctggcagaaccttcagcatgggctggtttagacaggcccctggcaaagagagagagttcgtcgccgccatcacatacagcggcggcagcccttactacgcctcttctgtcagaggccggttcaccatcagccgggacaacgccaagaacaccgtgtacctccagatgaacagcctgaagccagaggacaccgccgtgtactactgtgccgccaatccaacctacggcagcgactggaatgccgagaattggggccagggcacccaagtgacagtgtctagtggatccggcggcggaggatctggcggaggcggatctgggggcggaggctctttcgaacaagaagtgacacagatccctgccgctctgtctgtgcctgagggcgaaaacctggtgctgaactgctccttcaccgacagcgccatctacaacctccagtggttcaggcaggaccctggaaagggactgacaagcctgctgctgatccagagcagccagagagagcagacctccggcagactgaatgccagcctggataagagcagcggcaggtctaccctgtatatcgccgcttctcagcctggcgatagcgccacatatctgtgtgctgtgcggcctacaagcggcggcagctacatccctacatttggcagaggcaccagcctgatcgtgcacccttatgcctctacaaagggaccctccgtgtttcctctggctcccagcagcaagtctacaagcggaggaacagccgctctgggctgcctggtcaaggattactttcccgagcctgtgaccgtgtcctggaatagcggagcactgacaagcggcgtgcacacctttccagccgtgctgcaaagcagcggcctgtactctctgagcagcgtggtcacagtgcctagctctagcctgggcacccagacctacatctgcaatgtgaaccacaagcctagcaacaccaaggtggacaagagagtggaacccaagagctgtggtacccagagttttgggttgttggaccctaaattgtgctatctgttggacggaatcctgttcatttacggagtgatcctgaccgcattgttcctgcgggttaagttttccagatccgcagacgcacccgcttaccaacaagggcagaaccaactctacaatgaacttaatttggggcggagggaagagtacgacgttctggacaaaaggaggggacgagatcccgagatgggcggaaagcctcagcgaaggaagaatccgcaagaggggctttataacgaactccagaaagataaaatggcagaagcctatagtgagattgggatgaagggagaaaggaggaggggtaaaggtcacgatgggttgtaccaaggattgagcacagccactaaagatacctatgatgcgctccacatgcaggccctgccgccaagacgcgccaagagaagcggatctggcgtgaagcagaccctgaatttcgacctgctgaagctggctggcgacgtggaatccaacccaggcccttctagaggccatatgaccgagtacaagcccacggtgcgcctcgccacccgcgacgacgtccccagggccgtacgcaccctcgccgccgcgttcgccgactaccccgccacgcgccacaccgtcgatccggaccgccacatcgagcgggtcaccgagctgcaagaactcttcctcacgcgcgtcgggctcgacatcggcaaggtgtgggtcgcggacgacggcgccgcggtggcggtctggaccacgccggagagcgtcgaagcgggggcggtgttcgccgagatcggcccgcgcatggccgagttgagcggttcccggctggccgcgcagcaacagatggaaggcctcctggcgccgcaccggcccaaggagcccgcgtggttcctggccaccgtcggcgtctcgcccgaccaccagggcaagggtctgggcagcgccgtcgtgctccccggagtggaggcggccgagcgcgccggggtgcccgccttcctggagacctccgcgccccgcaacctccccttctacgagcggctcggcttcaccgtcaccgccgacgtcgaggtgcccgaaggaccgcgcacctggtgcatgacccgcaagcccggtgcctga

SEQ ID NO: 4077 - DNA, 3282 bp, Artificial Sequence
  Synthetic Polynucloetide
atggccttaccagtgaccgccttgctcctgccgctggccttgctgctccacgccgccaggccggcatgccaggtccagctcgtcgagtccggcggcggcctcgtccaggccggcgactccgtcaccctctcctgcaccgcctccggccgcaccttctcctcctacgccctcgcctggttccgccagcgccccggcaaggagcgcgagttcgtcgccggcctccgctggggcggccccaccaactacgccgactccgtcaaggaccgcttcaccatctccggcgactccgccaagcacaccatgtacctccagatgaactccctcaagcccgaggacaccgccgtctactactgcggctacaaccccggcggctgggccgtcccctcccagtacgagtacgactcctggggccagggcacccaggtcaccgtctcctccggtaccggcggaggcggatctggcggcggaggtagcggtggcggaggatctgaattcaatgctggcgtgacccagacacctaagttccaggtgctgaaaaccggccagagcatgaccctgcaatgcgcccaggacatgaaccatgagtacatgagctggtacagacaggaccccggcatgggcctgagactgatccactactctgtggctatccagaccaccgaccagggcgaagtgcccaatggctacaacgtgtccagaagcaccatcgaggacttcccactgagactgctgtctgccgctcctagccagaccagcgtgtacttttgtgccagcagctacctgggcaacaccggcgagctgttttttggcgagggcagcagactgaccgtgctcgaggacctgaagaacgtgttcccacctgaggtggccgtgttcgagcctagcgaggccgagatcagccacacccagaaagccaccctcgtgtgcctggctaccggcttctaccccgaccatgtggaactgtcttggtgggtcaacggcaaagaggtgcacagcggcgtgtctaccgacccccagccactgaaagaacagcccgccctgaacgacagccggtactgcctgagcagcagactgagagtgtccgccaccttctggcagaacccccggaaccacttcagatgccaggtgcagttctacggcctgagcgagaacgacgagtggacccaggacagagccaagcccgtgacccagatcgtgtctgccgaagcctggggcagagccgattgcggatcccagagcttcggcctgctggaccccaagctgtgctacctgctggatggcatcctgttcatctacggcgtgatcctgaccgccctgttcctgagagtgaagttcagcagaagcgccgacgcccctgcctaccagcagggacagaaccaactgtacaacgagctgaacctgggcagacgggaagagtacgacgtgctggacaagcggagaggcagggaccctgagatgggcggaaagccccagcggagaaagaacccccaggaaggactgtataacgaactccagaaagacaagatggccgaagcctacagcgagatcggcatgaagggcgagcggagaagaggcaagggccacgatggcctgtaccagggcctgagcaccgccaccaaggacacctatgacgccctgcacatgcaggccctgcctccaagaagggccaagcgatctggatctggagcaacaaacttctcactactcaaacaagcaggtgacgtggaggagaatcccgggcctactagtatggactggatttggcgcatccttttccttgtcggcgctgctaccggcgcccattccgggccccaggttcagctgcaagagtctggcggaggacttgctcaagctggcggaagcctgagactgtcttgtgccgcctctggcagaaccttcagcatgggctggtttagacaggcccctggcaaagagagagagttcgtcgccgccatcacatacagcggcggcagcccttactacgcctcttctgtcagaggccggttcaccatcagccgggacaacgccaagaacaccgtgtacctccagatgaacagcctgaagccagaggacaccgccgtgtactactgtgccgccaatccaacctacggcagcgactggaatgccgagaattggggccagggcacccaagtgacagtgtctagtggatccggcggcggaggatctggcggaggcggatctgggggcggaggctctttcgaacaagaagtgacacagatccctgccgctctgtctgtgcctgagggcgaaaacctggtgctgaactgctccttcaccgacagcgccatctacaacctccagtggttcaggcaggaccctggaaagggactgacaagcctgctgctgatccagagcagccagagagagcagacctccggcagactgaatgccagcctggataagagcagcggcaggtctaccctgtatatcgccgcttctcagcctggcgatagcgccacatatctgtgtgctgtgcggcctacaagcggcggcagctacatccctacatttggcagaggcaccagcctgatcgtgcacccttatatccagaaccctgatcctgccgtgtaccagctgcgggatagcaagagcagcgacaagagcgtgtgtctgttcaccgacttcgacagccagaccaacgtgtcccagagcaaggactccgacgtgtacatcaccgataagaccgtgctggacatgcggagcatggacttcaagagcaactccgccgtggcctggtccaacaagtccgatttcgcctgcgccaacgccttcaacaacagcattatccccgaggacacattcttcccaagccccgagagcagctgcggtacccagagttttgggttgttggaccctaaattgtgctatctgttggacggaatcctgttcatttacggagtgatcctgaccgcattgttcctgcgggttaagttttccagatccgcagacgcacccgcttaccaacaagggcagaaccaactctacaatgaacttaatttggggcggagggaagagtacgacgttctggacaaaaggaggggacgagatcccgagatgggcggaaagcctcagcgaaggaagaatccgcaagaggggctttataacgaactccagaaagataaaatggcagaagcctatagtgagattgggatgaagggagaaaggaggaggggtaaaggtcacgatgggttgtaccaaggattgagcacagccactaaagatacctatgatgcgctccacatgcaggccctgccgccaaga

SEQ ID NO: 4078 - DNA, 3282 bp, Artificial Sequence
  Synthetic Polynucloetide
atggccttaccagtgaccgccttgctcctgccgctggccttgctgctccacgccgccaggccggcatgccaggtccagctcgtcgagtccggcggcggcctcgtccaggccggcgactccgtcaccctctcctgcaccgcctccggccgcaccttctcctcctacgccctcgcctggttccgccagcgccccggcaaggagcgcgagttcgtcgccggcctccgctggggcggccccaccaactacgccgactccgtcaaggaccgcttcaccatctccggcgactccgccaagcacaccatgtacctccagatgaactccctcaagcccgaggacaccgccgtctactactgcggctacaaccccggcggctgggccgtcccctcccagtacgagtacgactcctggggccagggcacccaggtcaccgtctcctccggtaccggcggaggcggatctggcggcggaggtagcggtggcggaggatctgaattcaatgctggcgtgacccagacacctaagttccaggtgctgaaaaccggccagagcatgaccctgcaatgcgcccaggacatgaaccatgagtacatgagctggtacagacaggaccccggcatgggcctgagactgatccactactctgtggctatccagaccaccgaccagggcgaagtgcccaatggctacaacgtgtccagaagcaccatcgaggacttcccactgagactgctgtctgccgctcctagccagaccagcgtgtacttttgtgccagcagctacctgggcaacaccggcgagctgttttttggcgagggcagcagactgaccgtgctcgaggacctgaagaacgtgttcccacctgaggtggccgtgttcgagcctagcaaggccgagatcgcccacacccagaaagccaccctcgtgtgcctggctaccggcttctaccccgaccatgtggaactgtcttggtgggtcaacggcaaagaggtgcacagcggcgtgtgtaccgacccccagccactgaaagaacagcccgccctgaacgacagccggtactgcctgagcagcagactgagagtgtccgccaccttctggcagaacccccggaaccacttcagatgccaggtgcagttctacggcctgagcgagaacgacgagtggacccaggacagagccaagcccgtgacccagatcgtgtctgccgaagcctggggcagagccgattgcggatcccagagcttcggcctgctggaccccaagctgtgctacctgctggatggcatcctgttcatctacggcgtgatcctgaccgccctgttcctgagagtgaagttcagcagaagcgccgacgcccctgcctaccagcagggacagaaccaactgtacaacgagctgaacctgggcagacgggaagagtacgacgtgctggacaagcggagaggcagggaccctgagatgggcggaaagccccagcggagaaagaacccccaggaaggactgtataacgaactccagaaagacaagatggccgaagcctacagcgagatcggcatgaagggcgagcggagaagaggcaagggccacgatggcctgtaccagggcctgagcaccgccaccaaggacacctatgacgccctgcacatgcaggccctgcctccaagaagggccaagcgatctggatctggagcaacaaacttctcactactcaaacaagcaggtgacgtggaggagaatcccgggcctactagtatggactggatttggcgcatccttttccttgtcggcgctgctaccggcgcccattccgggccccaggttcagctgcaagagtctggcggaggacttgctcaagctggcggaagcctgagactgtcttgtgccgcctctggcagaaccttcagcatgggctggtttagacaggcccctggcaaagagagagagttcgtcgccgccatcacatacagcggcggcagcccttactacgcctcttctgtcagaggccggttcaccatcagccgggacaacgccaagaacaccgtgtacctccagatgaacagcctgaagccagaggacaccgccgtgtactactgtgccgccaatccaacctacggcagcgactggaatgccgagaattggggccagggcacccaagtgacagtgtctagtggatccggcggcggaggatctggcggaggcggatctgggggcggaggctctttcgaacaagaagtgacacagatccctgccgctctgtctgtgcctgagggcgaaaacctggtgctgaactgctccttcaccgacagcgccatctacaacctccagtggttcaggcaggaccctggaaagggactgacaagcctgctgctgatccagagcagccagagagagcagacctccggcagactgaatgccagcctggataagagcagcggcaggtctaccctgtatatcgccgcttctcagcctggcgatagcgccacatatctgtgtgctgtgcggcctacaagcggcggcagctacatccctacatttggcagaggcaccagcctgatcgtgcacccttatatccagaaccctgatcctgccgtgtaccagctgcgggatagcaagagcagcgacaagagcgtgtgtctgttcaccgacttcgacagccagaccaacgtgtcccagagcaaggactccgacgtgtacatcaccgataagtgcgtgctggacatgcggagcatggacttcaagagcaactccgccgtggcctggtccaacaagtccgatttcgcctgcgccaacgccttcaacaacagcattatccccgaggacacattcttcccaagcagcgacgtgccctgcggtacccagagttttgggttgttggaccctaaattgtgctatctgttggacggaatcctgttcatttacggagtgatcctgaccgcattgttcctgcgggttaagttttccagatccgcagacgcacccgcttaccaacaagggcagaaccaactctacaatgaacttaatttggggcggagggaagagtacgacgttctggacaaaaggaggggacgagatcccgagatgggcggaaagcctcagcgaaggaagaatccgcaagaggggctttataacgaactccagaaagataaaatggcagaagcctatagtgagattgggatgaagggagaaaggaggaggggtaaaggtcacgatgggttgtaccaaggattgagcacagccactaaagatacctatgatgcgctccacatgcaggccctgccgccaaga

SEQ ID NO: 4079 - DNA, 3495 bp, Artificial Sequence
  Synthetic Polynucloetide
atggccttaccagtgaccgccttgctcctgccgctggccttgctgctccacgccgccaggccggcatgccaggtccagctcgtcgagtccggcggcggcctcgtccaggccggcgactccgtcaccctctcctgcaccgcctccggccgcaccttctcctcctacgccctcgcctggttccgccagcgccccggcaaggagcgcgagttcgtcgccggcctccgctggggcggccccaccaactacgccgactccgtcaaggaccgcttcaccatctccggcgactccgccaagcacaccatgtacctccagatgaactccctcaagcccgaggacaccgccgtctactactgcggctacaaccccggcggctgggccgtcccctcccagtacgagtacgactcctggggccagggcacccaggtcaccgtctcctccggtaccggcggaggcggatctggcggcggaggtagcggtggcggaggatctgaattcaatgctggcgtgacccagacacctaagttccaggtgctgaaaaccggccagagcatgaccctgcaatgcgcccaggacatgaaccatgagtacatgagctggtacagacaggaccccggcatgggcctgagactgatccactactctgtggctatccagaccaccgaccagggcgaagtgcccaatggctacaacgtgtccagaagcaccatcgaggacttcccactgagactgctgtctgccgctcctagccagaccagcgtgtacttttgtgccagcagctacctgggcaacaccggcgagctgttttttggcgagggcagcagactgaccgtgctcgaggggaaaccaattcccaaccctcttctgggactggattcaaccggcagcggcgaggacctgaagaacgtgttcccacctgaggtggccgtgttcgagcctagcgaggccgagatcagccacacccagaaagccaccctcgtgtgcctggctaccggcttctaccccgaccatgtggaactgtcttggtgggtcaacggcaaagaggtgcacagcggcgtgtctaccgacccccagccactgaaagaacagcccgccctgaacgacagccggtactgcctgagcagcagactgagagtgtccgccaccttctggcagaacccccggaaccacttcagatgccaggtgcagttctacggcctgagcgagaacgacgagtggacccaggacagagccaagcccgtgacccagatcgtgtctgccgaagcctggggcagagccgattgcggatcccagagcttcggcctgctggaccccaagctgtgctacctgctggatggcatcctgttcatctacggcgtgatcctgaccgccctgttcctgagagtgaagttcagcagaagcgccgacgcccctgcctaccagcagggacagaaccaactgtacaacgagctgaacctgggcagacgggaagagtacgacgtgctggacaagcggagaggcagggaccctgagatgggcggaaagccccagcggagaaagaacccccaggaaggactgtataacgaactccagaaagacaagatggccgaagcctacagcgagatcggcatgaagggcgagcggagaagaggcaagggccacgatggcctgtaccagggcctgagcaccgccaccaaggacacctatgacgccctgcacatgcaggccctgcctccaagaagggccaagcgatctggatctggagcaacaaacttctcactactcaaacaagcaggtgacgtggaggagaatcccgggcctactagtatggactggatttggcgcatccttttccttgtcggcgctgctaccggcgcccattccgggccccaggttcagctgcaagagtctggcggaggacttgctcaagctggcggaagcctgagactgtcttgtgccgcctctggcagaaccttcagcatgggctggtttagacaggcccctggcaaagagagagagttcgtcgccgccatcacatacagcggcggcagcccttactacgcctcttctgtcagaggccggttcaccatcagccgggacaacgccaagaacaccgtgtacctccagatgaacagcctgaagccagaggacaccgccgtgtactactgtgccgccaatccaacctacggcagcgactggaatgccgagaattggggccagggcacccaagtgacagtgtctagtggatccggcggcggaggatctggcggaggcggatctgggggcggaggctctttcgaacaagaagtgacacagatccctgccgctctgtctgtgcctgagggcgaaaacctggtgctgaactgctccttcaccgacagcgccatctacaacctccagtggttcaggcaggaccctggaaagggactgacaagcctgctgctgatccagagcagccagagagagcagacctccggcagactgaatgccagcctggataagagcagcggcaggtctaccctgtatatcgccgcttctcagcctggcgatagcgccacatatctgtgtgctgtgcggcctacaagcggcggcagctacatccctacatttggcagaggcaccagcctgatcgtgcacccttatgagcagaaactgatctcggaagaggatgggagcggcatccagaaccctgatcctgccgtgtaccagctgcgggatagcaagagcagcgacaagagcgtgtgtctgttcaccgacttcgacagccagaccaacgtgtcccagagcaaggactccgacgtgtacatcaccgataagaccgtgctggacatgcggagcatggacttcaagagcaactccgccgtggcctggtccaacaagtccgatttcgcctgcgccaacgccttcaacaacagcattatccccgaggacacattcttcccaagccccgagagcagctgcggtacccagagttttgggttgttggaccctaaattgtgctatctgttggacggaatcctgttcatttacggagtgatcctgaccgcattgttcctgaggagcaagcggtcacggctgctccacagcgattacatgaatatgacaccacgaagaccgggtcctactcgcaaacactaccaaccctacgcacctccccgcgactttgcagcgtaccgatctcgggttaagttttccagatccgcagacgcacccgcttaccaacaagggcagaaccaactctacaatgaacttaatttggggcggagggaagagtacgacgttctggacaaaaggaggggacgagatcccgagatgggcggaaagcctcagcgaaggaagaatccgcaagaggggctttataacgaactccagaaagataaaatggcagaagcctatagtgagattgggatgaagggagaaaggaggaggggtaaaggtcacgatgggttgtaccaaggattgagcacagccactaaagatacctatgatgcgctccacatgcaggccctgccgccaaga

SEQ ID NO: 4080 - DNA, 3618 bp, Artificial Sequence
  Synthetic Polynucloetide
atggccttaccagtgaccgccttgctcctgccgctggccttgctgctccacgccgccaggccggcatgccaggtccagctcgtcgagtccggcggcggcctcgtccaggccggcgactccgtcaccctctcctgcaccgcctccggccgcaccttctcctcctacgccctcgcctggttccgccagcgccccggcaaggagcgcgagttcgtcgccggcctccgctggggcggccccaccaactacgccgactccgtcaaggaccgcttcaccatctccggcgactccgccaagcacaccatgtacctccagatgaactccctcaagcccgaggacaccgccgtctactactgcggctacaaccccggcggctgggccgtcccctcccagtacgagtacgactcctggggccagggcacccaggtcaccgtctcctccggtaccggcggaggcggatctggcggcggaggtagcggtggcggaggatctgaattcaatgctggcgtgacccagacacctaagttccaggtgctgaaaaccggccagagcatgaccctgcaatgcgcccaggacatgaaccatgagtacatgagctggtacagacaggaccccggcatgggcctgagactgatccactactctgtggctatccagaccaccgaccagggcgaagtgcccaatggctacaacgtgtccagaagcaccatcgaggacttcccactgagactgctgtctgccgctcctagccagaccagcgtgtacttttgtgccagcagctacctgggcaacaccggcgagctgttttttggcgagggcagcagactgaccgtgctcgaggggaaaccaattcccaaccctcttctgggactggattcaaccggcagcggcgaggacctgaagaacgtgttcccacctgaggtggccgtgttcgagcctagcgaggccgagatcagccacacccagaaagccaccctcgtgtgcctggctaccggcttctaccccgaccatgtggaactgtcttggtgggtcaacggcaaagaggtgcacagcggcgtgtctaccgacccccagccactgaaagaacagcccgccctgaacgacagccggtactgcctgagcagcagactgagagtgtccgccaccttctggcagaacccccggaaccacttcagatgccaggtgcagttctacggcctgagcgagaacgacgagtggacccaggacagagccaagcccgtgacccagatcgtgtctgccgaagcctggggcagagccgattgcggatcccagagcttcggcctgctggaccccaagctgtgctacctgctggatggcatcctgttcatctacggcgtgatcctgaccgccctgttcctgaggagtaagaggagcaggctcctgcacagtgactacatgaacatgactccacgccgccccggacccacccgcaagcattaccagccctatgccccaccacgcgacttcgcagcctatcgctccagagtgaagttcagcagaagcgccgacgcccctgcctaccagcagggacagaaccaactgtacaacgagctgaacctgggcagacgggaagagtacgacgtgctggacaagcggagaggcagggaccctgagatgggcggaaagccccagcggagaaagaacccccaggaaggactgtataacgaactccagaaagacaagatggccgaagcctacagcgagatcggcatgaagggcgagcggagaagaggcaagggccacgatggcctgtaccagggcctgagcaccgccaccaaggacacctatgacgccctgcacatgcaggccctgcctccaagaagggccaagcgatctggatctggagcaacaaacttctcactactcaaacaagcaggtgacgtggaggagaatcccgggcctactagtatggactggatttggcgcatccttttccttgtcggcgctgctaccggcgcccattccgggccccaggttcagctgcaagagtctggcggaggacttgctcaagctggcggaagcctgagactgtcttgtgccgcctctggcagaaccttcagcatgggctggtttagacaggcccctggcaaagagagagagttcgtcgccgccatcacatacagcggcggcagcccttactacgcctcttctgtcagaggccggttcaccatcagccgggacaacgccaagaacaccgtgtacctccagatgaacagcctgaagccagaggacaccgccgtgtactactgtgccgccaatccaacctacggcagcgactggaatgccgagaattggggccagggcacccaagtgacagtgtctagtggatccggcggcggaggatctggcggaggcggatctgggggcggaggctctttcgaacaagaagtgacacagatccctgccgctctgtctgtgcctgagggcgaaaacctggtgctgaactgctccttcaccgacagcgccatctacaacctccagtggttcaggcaggaccctggaaagggactgacaagcctgctgctgatccagagcagccagagagagcagacctccggcagactgaatgccagcctggataagagcagcggcaggtctaccctgtatatcgccgcttctcagcctggcgatagcgccacatatctgtgtgctgtgcggcctacaagcggcggcagctacatccctacatttggcagaggcaccagcctgatcgtgcacccttatgagcagaaactgatctcggaagaggatgggagcggcatccagaaccctgatcctgccgtgtaccagctgcgggatagcaagagcagcgacaagagcgtgtgtctgttcaccgacttcgacagccagaccaacgtgtcccagagcaaggactccgacgtgtacatcaccgataagaccgtgctggacatgcggagcatggacttcaagagcaactccgccgtggcctggtccaacaagtccgatttcgcctgcgccaacgccttcaacaacagcattatccccgaggacacattcttcccaagccccgagagcagctgcggtacccagagttttgggttgttggaccctaaattgtgctatctgttggacggaatcctgttcatttacggagtgatcctgaccgcattgttcctgaggagcaagcggtcacggctgctccacagcgattacatgaatatgacaccacgaagaccgggtcctactcgcaaacactaccaaccctacgcacctccccgcgactttgcagcgtaccgatctcgggttaagttttccagatccgcagacgcacccgcttaccaacaagggcagaaccaactctacaatgaacttaatttggggcggagggaagagtacgacgttctggacaaaaggaggggacgagatcccgagatgggcggaaagcctcagcgaaggaagaatccgcaagaggggctttataacgaactccagaaagataaaatggcagaagcctatagtgagattgggatgaagggagaaaggaggaggggtaaaggtcacgatgggttgtaccaaggattgagcacagccactaaagatacctatgatgcgctccacatgcaggccctgccgccaaga

SEQ ID NO: 4081 - DNA, 3501 bp, Artificial Sequence
  Synthetic Polynucloetide
atggccttaccagtgaccgccttgctcctgccgctggccttgctgctccacgccgccaggccggcatgccaggtccagctcgtcgagtccggcggcggcctcgtccaggccggcgactccgtcaccctctcctgcaccgcctccggccgcaccttctcctcctacgccctcgcctggttccgccagcgccccggcaaggagcgcgagttcgtcgccggcctccgctggggcggccccaccaactacgccgactccgtcaaggaccgcttcaccatctccggcgactccgccaagcacaccatgtacctccagatgaactccctcaagcccgaggacaccgccgtctactactgcggctacaaccccggcggctgggccgtcccctcccagtacgagtacgactcctggggccagggcacccaggtcaccgtctcctccggtaccggcggaggcggatctggcggcggaggtagcggtggcggaggatctgaattcaatgctggcgtgacccagacacctaagttccaggtgctgaaaaccggccagagcatgaccctgcaatgcgcccaggacatgaaccatgagtacatgagctggtacagacaggaccccggcatgggcctgagactgatccactactctgtggctatccagaccaccgaccagggcgaagtgcccaatggctacaacgtgtccagaagcaccatcgaggacttcccactgagactgctgtctgccgctcctagccagaccagcgtgtacttttgtgccagcagctacctgggcaacaccggcgagctgttttttggcgagggcagcagactgaccgtgctcgaggggaaaccaattcccaaccctcttctgggactggattcaaccggcagcggcgaggacctgaagaacgtgttcccacctgaggtggccgtgttcgagcctagcgaggccgagatcagccacacccagaaagccaccctcgtgtgcctggctaccggcttctaccccgaccatgtggaactgtcttggtgggtcaacggcaaagaggtgcacagcggcgtgtctaccgacccccagccactgaaagaacagcccgccctgaacgacagccggtactgcctgagcagcagactgagagtgtccgccaccttctggcagaacccccggaaccacttcagatgccaggtgcagttctacggcctgagcgagaacgacgagtggacccaggacagagccaagcccgtgacccagatcgtgtctgccgaagcctggggcagagccgattgcggatcccagagcttcggcctgctggaccccaagctgtgctacctgctggatggcatcctgttcatctacggcgtgatcctgaccgccctgttcctgagagtgaagttcagcagaagcgccgacgcccctgcctaccagcagggacagaaccaactgtacaacgagctgaacctgggcagacgggaagagtacgacgtgctggacaagcggagaggcagggaccctgagatgggcggaaagccccagcggagaaagaacccccaggaaggactgtataacgaactccagaaagacaagatggccgaagcctacagcgagatcggcatgaagggcgagcggagaagaggcaagggccacgatggcctgtaccagggcctgagcaccgccaccaaggacacctatgacgccctgcacatgcaggccctgcctccaagaagggccaagcgatctggatctggagcaacaaacttctcactactcaaacaagcaggtgacgtggaggagaatcccgggcctactagtatggactggatttggcgcatccttttccttgtcggcgctgctaccggcgcccattccgggccccaggttcagctgcaagagtctggcggaggacttgctcaagctggcggaagcctgagactgtcttgtgccgcctctggcagaaccttcagcatgggctggtttagacaggcccctggcaaagagagagagttcgtcgccgccatcacatacagcggcggcagcccttactacgcctcttctgtcagaggccggttcaccatcagccgggacaacgccaagaacaccgtgtacctccagatgaacagcctgaagccagaggacaccgccgtgtactactgtgccgccaatccaacctacggcagcgactggaatgccgagaattggggccagggcacccaagtgacagtgtctagtggatccggcggcggaggatctggcggaggcggatctgggggcggaggctctttcgaacaagaagtgacacagatccctgccgctctgtctgtgcctgagggcgaaaacctggtgctgaactgctccttcaccgacagcgccatctacaacctccagtggttcaggcaggaccctggaaagggactgacaagcctgctgctgatccagagcagccagagagagcagacctccggcagactgaatgccagcctggataagagcagcggcaggtctaccctgtatatcgccgcttctcagcctggcgatagcgccacatatctgtgtgctgtgcggcctacaagcggcggcagctacatccctacatttggcagaggcaccagcctgatcgtgcacccttatgagcagaaactgatctcggaagaggatctggggagcggcatccagaaccctgatcctgccgtgtaccagctgcgggatagcaagagcagcgacaagagcgtgtgtctgttcaccgacttcgacagccagaccaacgtgtcccagagcaaggactccgacgtgtacatcaccgataagaccgtgctggacatgcggagcatggacttcaagagcaactccgccgtggcctggtccaacaagtccgatttcgcctgcgccaacgccttcaacaacagcattatccccgaggacacattcttcccaagccccgagagcagctgcggtacccagagttttgggttgttggaccctaaattgtgctatctgttggacggaatcctgttcatttacggagtgatcctgaccgcattgttcctgaagagaggccggaagaagctgctgtacatcttcaagcagcctttcatgcggcccgtgcagaccacccaggaagaggacggctgctcctgccggttccccgaggaagaagaaggcggctgcgagctgcgggttaagttttccagatccgcagacgcacccgcttaccaacaagggcagaaccaactctacaatgaacttaatttggggcggagggaagagtacgacgttctggacaaaaggaggggacgagatcccgagatgggcggaaagcctcagcgaaggaagaatccgcaagaggggctttataacgaactccagaaagataaaatggcagaagcctatagtgagattgggatgaagggagaaaggaggaggggtaaaggtcacgatgggttgtaccaaggattgagcacagccactaaagatacctatgatgcgctccacatgcaggccctgccgccaaga

SEQ ID NO: 4082 - DNA, 3627 bp, Artificial Sequence
  Synthetic Polynucloetide
atggccttaccagtgaccgccttgctcctgccgctggccttgctgctccacgccgccaggccggcatgccaggtccagctcgtcgagtccggcggcggcctcgtccaggccggcgactccgtcaccctctcctgcaccgcctccggccgcaccttctcctcctacgccctcgcctggttccgccagcgccccggcaaggagcgcgagttcgtcgccggcctccgctggggcggccccaccaactacgccgactccgtcaaggaccgcttcaccatctccggcgactccgccaagcacaccatgtacctccagatgaactccctcaagcccgaggacaccgccgtctactactgcggctacaaccccggcggctgggccgtcccctcccagtacgagtacgactcctggggccagggcacccaggtcaccgtctcctccggtaccggcggaggcggatctggcggcggaggtagcggtggcggaggatctgaattcaatgctggcgtgacccagacacctaagttccaggtgctgaaaaccggccagagcatgaccctgcaatgcgcccaggacatgaaccatgagtacatgagctggtacagacaggaccccggcatgggcctgagactgatccactactctgtggctatccagaccaccgaccagggcgaagtgcccaatggctacaacgtgtccagaagcaccatcgaggacttcccactgagactgctgtctgccgctcctagccagaccagcgtgtacttttgtgccagcagctacctgggcaacaccggcgagctgttttttggcgagggcagcagactgaccgtgctcgaggggaaaccaattcccaaccctcttctgggactggattcaaccggcagcggcgaggacctgaagaacgtgttcccacctgaggtggccgtgttcgagcctagcgaggccgagatcagccacacccagaaagccaccctcgtgtgcctggctaccggcttctaccccgaccatgtggaactgtcttggtgggtcaacggcaaagaggtgcacagcggcgtgtctaccgacccccagccactgaaagaacagcccgccctgaacgacagccggtactgcctgagcagcagactgagagtgtccgccaccttctggcagaacccccggaaccacttcagatgccaggtgcagttctacggcctgagcgagaacgacgagtggacccaggacagagccaagcccgtgacccagatcgtgtctgccgaagcctggggcagagccgattgcggatcccagagcttcggcctgctggaccccaagctgtgctacctgctggatggcatcctgttcatctacggcgtgatcctgaccgccctgttcctgaaacggggcagaaagaaactcctgtatatattcaaacaaccatttatgagaccagtacaaactactcaagaggaagatggctgtagctgccgatttccagaagaagaagaaggaggatgtgaactgagagtgaagttcagcagaagcgccgacgcccctgcctaccagcagggacagaaccaactgtacaacgagctgaacctgggcagacgggaagagtacgacgtgctggacaagcggagaggcagggaccctgagatgggcggaaagccccagcggagaaagaacccccaggaaggactgtataacgaactccagaaagacaagatggccgaagcctacagcgagatcggcatgaagggcgagcggagaagaggcaagggccacgatggcctgtaccagggcctgagcaccgccaccaaggacacctatgacgccctgcacatgcaggccctgcctccaagaagggccaagcgatctggatctggagcaacaaacttctcactactcaaacaagcaggtgacgtggaggagaatcccgggcctactagtatggactggatttggcgcatccttttccttgtcggcgctgctaccggcgcccattccgggccccaggttcagctgcaagagtctggcggaggacttgctcaagctggcggaagcctgagactgtcttgtgccgcctctggcagaaccttcagcatgggctggtttagacaggcccctggcaaagagagagagttcgtcgccgccatcacatacagcggcggcagcccttactacgcctcttctgtcagaggccggttcaccatcagccgggacaacgccaagaacaccgtgtacctccagatgaacagcctgaagccagaggacaccgccgtgtactactgtgccgccaatccaacctacggcagcgactggaatgccgagaattggggccagggcacccaagtgacagtgtctagtggatccggcggcggaggatctggcggaggcggatctgggggcggaggctctttcgaacaagaagtgacacagatccctgccgctctgtctgtgcctgagggcgaaaacctggtgctgaactgctccttcaccgacagcgccatctacaacctccagtggttcaggcaggaccctggaaagggactgacaagcctgctgctgatccagagcagccagagagagcagacctccggcagactgaatgccagcctggataagagcagcggcaggtctaccctgtatatcgccgcttctcagcctggcgatagcgccacatatctgtgtgctgtgcggcctacaagcggcggcagctacatccctacatttggcagaggcaccagcctgatcgtgcacccttatgagcagaaactgatctcggaagaggatctggggagcggcatccagaaccctgatcctgccgtgtaccagctgcgggatagcaagagcagcgacaagagcgtgtgtctgttcaccgacttcgacagccagaccaacgtgtcccagagcaaggactccgacgtgtacatcaccgataagaccgtgctggacatgcggagcatggacttcaagagcaactccgccgtggcctggtccaacaagtccgatttcgcctgcgccaacgccttcaacaacagcattatccccgaggacacattcttcccaagccccgagagcagctgcggtacccagagttttgggttgttggaccctaaattgtgctatctgttggacggaatcctgttcatttacggagtgatcctgaccgcattgttcctgaagagaggccggaagaagctgctgtacatcttcaagcagcctttcatgcggcccgtgcagaccacccaggaagaggacggctgctcctgccggttccccgaggaagaagaaggcggctgcgagctgcgggttaagttttccagatccgcagacgcacccgcttaccaacaagggcagaaccaactctacaatgaacttaatttggggcggagggaagagtacgacgttctggacaaaaggaggggacgagatcccgagatgggcggaaagcctcagcgaaggaagaatccgcaagaggggctttataacgaactccagaaagataaaatggcagaagcctatagtgagattgggatgaagggagaaaggaggaggggtaaaggtcacgatgggttgtaccaaggattgagcacagccactaaagatacctatgatgcgctccacatgcaggccctgccgccaaga

SEQ ID NO: 4083 - DNA, 3300 bp, Artificial Sequence
  Synthetic Polynucloetide
atggccttaccagtgaccgccttgctcctgccgctggccttgctgctccacgccgccaggccggcatgccaggtccagctcgtcgagtccggcggcggcctcgtccaggccggcgactccgtcaccctctcctgcaccgcctccggccgcaccttctcctcctacgccctcgcctggttccgccagcgccccggcaaggagcgcgagttcgtcgccggcctccgctggggcggccccaccaactacgccgactccgtcaaggaccgcttcaccatctccggcgactccgccaagcacaccatgtacctccagatgaactccctcaagcccgaggacaccgccgtctactactgcggctacaaccccggcggctgggccgtcccctcccagtacgagtacgactcctggggccagggcacccaggtcaccgtctcctccggtaccggcggaggcggatctggcggcggaggtagcggtggcggaggatctgaattcaatgctggcgtgacccagacacctaagttccaggtgctgaaaaccggccagagcatgaccctgcaatgcgcccaggacatgaaccatgagtacatgagctggtacagacaggaccccggcatgggcctgagactgatccactactctgtggctatccagaccaccgaccagggcgaagtgcccaatggctacaacgtgtccagaagcaccatcgaggacttcccactgagactgctgtctgccgctcctagccagaccagcgtgtacttttgtgccagcagctacctgggcaacaccggcgagctgttttttggcgagggcagcagactgaccgtgctcgagcagagcttcggcctgctggaccccaagctgtgctacctgctggatggcatcctgttcatctacggcgtgatcctgaccgccctgttcctgagagtgaagttcagcagaagcgccgacgcccctgcctaccagcagggacagaaccaactgtacaacgagctgaacctgggcagacgggaagagtacgacgtgctggacaagcggagaggcagggaccctgagatgggcggaaagccccagcggagaaagaacccccaggaaggactgtataacgaactccagaaagacaagatggccgaagcctacagcgagatcggcatgaagggcgagcggagaagaggcaagggccacgatggcctgtaccagggcctgagcaccgccaccaaggacacctatgacgccctgcacatgcaggccctgcctccaagaagggccaagcgatctggatctggagcaacaaacttctcactactcaaacaagcaggtgacgtggaggagaatcccgggcctactagtatggactggatttggcgcatccttttccttgtcggcgctgctaccggcgcccattccgggccccaggttcagctgcaagagtctggcggaggacttgctcaagctggcggaagcctgagactgtcttgtgccgcctctggcagaaccttcagcatgggctggtttagacaggcccctggcaaagagagagagttcgtcgccgccatcacatacagcggcggcagcccttactacgcctcttctgtcagaggccggttcaccatcagccgggacaacgccaagaacaccgtgtacctccagatgaacagcctgaagccagaggacaccgccgtgtactactgtgccgccaatccaacctacggcagcgactggaatgccgagaattggggccagggcacccaagtgacagtgtctagtggatccggcggcggaggatctggcggaggcggatctgggggcggaggctctttcgaacaagaagtgacacagatccctgccgctctgtctgtgcctgagggcgaaaacctggtgctgaactgctccttcaccgacagcgccatctacaacctccagtggttcaggcaggaccctggaaagggactgacaagcctgctgctgatccagagcagccagagagagcagacctccggcagactgaatgccagcctggataagagcagcggcaggtctaccctgtatatcgccgcttctcagcctggcgatagcgccacatatctgtgtgctgtgcggcctacaagcggcggcagctacatccctacatttggcagaggcaccagcctgatcgtgcacccttatcagagttttgggttgttggaccctaaattgtgctatctgttggacggaatcctgttcatttacggagtgatcctgaccgcattgttcctgcgggttaagttttccagatccgcagacgcacccgcttaccaacaagggcagaaccaactctacaatgaacttaatttggggcggagggaagagtacgacgttctggacaaaaggaggggacgagatcccgagatgggcggaaagcctcagcgaaggaagaatccgcaagaggggctttataacgaactccagaaagataaaatggcagaagcctatagtgagattgggatgaagggagaaaggaggaggggtaaaggtcacgatgggttgtaccaaggattgagcacagccactaaagatacctatgatgcgctccacatgcaggccctgccgccaagacgcgccaagagaagcggatctggcgtgaagcagaccctgaatttcgacctgctgaagctggctggcgacgtggaatccaacccaggcccttctagaggccatatgaccgagtacaagcccacggtgcgcctcgccacccgcgacgacgtccccagggccgtacgcaccctcgccgccgcgttcgccgactaccccgccacgcgccacaccgtcgatccggaccgccacatcgagcgggtcaccgagctgcaagaactcttcctcacgcgcgtcgggctcgacatcggcaaggtgtgggtcgcggacgacggcgccgcggtggcggtctggaccacgccggagagcgtcgaagcgggggcggtgttcgccgagatcggcccgcgcatggccgagttgagcggttcccggctggccgcgcagcaacagatggaaggcctcctggcgccgcaccggcccaaggagcccgcgtggttcctggccaccgtcggcgtctcgcccgaccaccagggcaagggtctgggcagcgccgtcgtgctccccggagtggaggcggccgagcgcgccggggtgcccgccttcctggagacctccgcgccccgcaacctccccttctacgagcggctcggcttcaccgtcaccgccgacgtcgaggtgcccgaaggaccgcgcacctggtgcatgacccgcaagcccggtgcctga

SEQ ID NO: 4084 - DNA, 2772 bp, Artificial Sequence
  Synthetic Polynucloetide
atggccttaccagtgaccgccttgctcctgccgctggccttgctgctccacgccgccaggccggcatgccaggtccagctcgtcgagtccggcggcggcctcgtccaggccggcgactccgtcaccctctcctgcaccgcctccggccgcaccttctcctcctacgccctcgcctggttccgccagcgccccggcaaggagcgcgagttcgtcgccggcctccgctggggcggccccaccaactacgccgactccgtcaaggaccgcttcaccatctccggcgactccgccaagcacaccatgtacctccagatgaactccctcaagcccgaggacaccgccgtctactactgcggctacaaccccggcggctgggccgtcccctcccagtacgagtacgactcctggggccagggcacccaggtcaccgtctcctccggtaccggcggaggcggatctggcggcggaggtagcggtggcggaggatctgaattcaatgctggcgtgacccagacacctaagttccaggtgctgaaaaccggccagagcatgaccctgcaatgcgcccaggacatgaaccatgagtacatgagctggtacagacaggaccccggcatgggcctgagactgatccactactctgtggctatccagaccaccgaccagggcgaagtgcccaatggctacaacgtgtccagaagcaccatcgaggacttcccactgagactgctgtctgccgctcctagccagaccagcgtgtacttttgtgccagcagctacctgggcaacaccggcgagctgttttttggcgagggcagcagactgaccgtgctcgagggacagcctaaggccaatcctaccgtgacactgttccctccaagcagcgaagaactccaggccaacaaggccacacttgtgtgcctgatctccgacttctaccctggggctgtgacagtggcttggaaggccgatggatctcctgtgaaagccggcgtggaaaccaccaagccatccaagcagagcaacaacaaatacgccgccagctcctacctgagcctgacacctgagcagtggaagtcccacagatcctacagctgccaagtgacccacgaaggcagcaccgtggaaaagacagtggcccctacagagtgcagccccatcaagaccgatgtgattacaatggaccccaaggacaactgctccaaggacgccaacgataccctgctgctccagctgaccaacaccagcgcctactacatgtacttgttgctgctgctgaagtccgtggtgtacttcgccatcatcacatgctgcctgctgcggagaaccgccttctgctgcaacggcgagaagtctagggccaagcgatctggatctggagcaacaaacttctcactactcaaacaagcaggtgacgtggaggagaatcccgggcctactagtatggactggatttggcgcatccttttccttgtcggcgctgctaccggcgcccattccgggccccaggttcagctgcaagagtctggcggaggacttgctcaagctggcggaagcctgagactgtcttgtgccgcctctggcagaaccttcagcatgggctggtttagacaggcccctggcaaagagagagagttcgtcgccgccatcacatacagcggcggcagcccttactacgcctcttctgtcagaggccggttcaccatcagccgggacaacgccaagaacaccgtgtacctccagatgaacagcctgaagccagaggacaccgccgtgtactactgtgccgccaatccaacctacggcagcgactggaatgccgagaattggggccagggcacccaagtgacagtgtctagtggatccggcggcggaggatctggcggaggcggatctgggggcggaggctctttcgaacaagaagtgacacagatccctgccgctctgtctgtgcctgagggcgaaaacctggtgctgaactgctccttcaccgacagcgccatctacaacctccagtggttcaggcaggaccctggaaagggactgacaagcctgctgctgatccagagcagccagagagagcagacctccggcagactgaatgccagcctggataagagcagcggcaggtctaccctgtatatcgccgcttctcagcctggcgatagcgccacatatctgtgtgctgtgcggcctacaagcggcggcagctacatccctacatttggcagaggcaccagcctgatcgtgcacccttatgcctctacaaagggaccctccgtgtttcctctggctcccagcagcaagtctacaagcggaggaacagccgctctgggctgcctggtcaaggattactttcccgagcctgtgaccgtgtcctggaatagcggagcactgacaagcggcgtgcacacctttccagccgtgctgcaaagcagcggcctgtactctctgagcagcgtggtcacagtgcctagctctagcctgggcacccagacctacatctgcaatgtgaaccacaagcctagcaacaccaaggtggacaagagagtggaacccaagagctgtgaagtgaaaaccgactccaccgaccacgtgaagcccaaagagacagagaacaccaagcagcccagcaagagctgccacaagcccaaggccatcgtgcacaccgagaaagtgaacatgatgagcctgaccgtgctgggcctgcggatgctgttcgccaaaaccgtggccgtgaacttcctgctgaccgccaagctgttcttcctc

SEQ ID NO: 4085 - DNA, 2706 bp, Artificial Sequence
  Synthetic Polynucloetide
atggccttaccagtgaccgccttgctcctgccgctggccttgctgctccacgccgccaggccggcatgccaggtccagctcgtcgagtccggcggcggcctcgtccaggccggcgactccgtcaccctctcctgcaccgcctccggccgcaccttctcctcctacgccctcgcctggttccgccagcgccccggcaaggagcgcgagttcgtcgccggcctccgctggggcggccccaccaactacgccgactccgtcaaggaccgcttcaccatctccggcgactccgccaagcacaccatgtacctccagatgaactccctcaagcccgaggacaccgccgtctactactgcggctacaaccccggcggctgggccgtcccctcccagtacgagtacgactcctggggccagggcacccaggtcaccgtctcctccggtaccggcggaggcggatctggcggcggaggtagcggtggcggaggatctgaattcaatgctggcgtgacccagacacctaagttccaggtgctgaaaaccggccagagcatgaccctgcaatgcgcccaggacatgaaccatgagtacatgagctggtacagacaggaccccggcatgggcctgagactgatccactactctgtggctatccagaccaccgaccagggcgaagtgcccaatggctacaacgtgtccagaagcaccatcgaggacttcccactgagactgctgtctgccgctcctagccagaccagcgtgtacttttgtgccagcagctacctgggcaacaccggcgagctgttttttggcgagggcagcagactgaccgtgctcgagggacagcctaaggccaatcctaccgtgacactgttccctccaagcagcgaagaactccaggccaacaaggccacacttgtgtgcctgatctccgacttctaccctggggctgtgacagtggcttggaaggccgatggatctcctgtgaaagccggcgtggaaaccaccaagccatccaagcagagcaacaacaaatacgccgccagctcctacctgagcctgacacctgagcagtggaagtcccacagatcctacagctgccaagtgacccacgaaggcagcaccgtggaaaagacagtggcccctacagagtgcagcggcagagccgattgcggcatcaccagcgccagctaccaccagggcgtgctgagcgccaccatcctgtacgagatcctgctgggcaaggccaccctgtacgccgtgctggtgtctgccctggtgctgatggctatggtcaagcggaaggacagccggggaagggccaagcgatctggatctggagcaacaaacttctcactactcaaacaagcaggtgacgtggaggagaatcccgggcctactagtatggactggatttggcgcatccttttccttgtcggcgctgctaccggcgcccattccgggccccaggttcagctgcaagagtctggcggaggacttgctcaagctggcggaagcctgagactgtcttgtgccgcctctggcagaaccttcagcatgggctggtttagacaggcccctggcaaagagagagagttcgtcgccgccatcacatacagcggcggcagcccttactacgcctcttctgtcagaggccggttcaccatcagccgggacaacgccaagaacaccgtgtacctccagatgaacagcctgaagccagaggacaccgccgtgtactactgtgccgccaatccaacctacggcagcgactggaatgccgagaattggggccagggcacccaagtgacagtgtctagtggatccggcggcggaggatctggcggaggcggatctgggggcggaggctctttcgaacaagaagtgacacagatccctgccgctctgtctgtgcctgagggcgaaaacctggtgctgaactgctccttcaccgacagcgccatctacaacctccagtggttcaggcaggaccctggaaagggactgacaagcctgctgctgatccagagcagccagagagagcagacctccggcagactgaatgccagcctggataagagcagcggcaggtctaccctgtatatcgccgcttctcagcctggcgatagcgccacatatctgtgtgctgtgcggcctacaagcggcggcagctacatccctacatttggcagaggcaccagcctgatcgtgcacccttatgcctctacaaagggaccctccgtgtttcctctggctcccagcagcaagtctacaagcggaggaacagccgctctgggctgcctggtcaaggattactttcccgagcctgtgaccgtgtcctggaatagcggagcactgacaagcggcgtgcacacctttccagccgtgctgcaaagcagcggcctgtactctctgagcagcgtggtcacagtgcctagctctagcctgggcacccagacctacatctgcaatgtgaaccacaagcctagcaacaccaaggtggacaagagagtggaacccaagagctgtatccccgaggacacattcttcccaagcagcgacgtgccctgcgacgtgaagctggtggaaaagagcttcgagacagacaccaacctgaacttccagaacctgagcgtgatcggcttcagaatcctgctgctgaaagtggccggctttaacctgctgatgaccctgcggctgtggtccagc

SEQ ID NO: 4086 - DNA, 2706 bp, Artificial Sequence
  Synthetic Polynucloetide
atggccttaccagtgaccgccttgctcctgccgctggccttgctgctccacgccgccaggccggcatgccaggtccagctcgtcgagtccggcggcggcctcgtccaggccggcgactccgtcaccctctcctgcaccgcctccggccgcaccttctcctcctacgccctcgcctggttccgccagcgccccggcaaggagcgcgagttcgtcgccggcctccgctggggcggccccaccaactacgccgactccgtcaaggaccgcttcaccatctccggcgactccgccaagcacaccatgtacctccagatgaactccctcaagcccgaggacaccgccgtctactactgcggctacaaccccggcggctgggccgtcccctcccagtacgagtacgactcctggggccagggcacccaggtcaccgtctcctccggtaccggcggaggcggatctggcggcggaggtagcggtggcggaggatctgaattcaatgctggcgtgacccagacacctaagttccaggtgctgaaaaccggccagagcatgaccctgcaatgcgcccaggacatgaaccatgagtacatgagctggtacagacaggaccccggcatgggcctgagactgatccactactctgtggctatccagaccaccgaccagggcgaagtgcccaatggctacaacgtgtccagaagcaccatcgaggacttcccactgagactgctgtctgccgctcctagccagaccagcgtgtacttttgtgccagcagctacctgggcaacaccggcgagctgttttttggcgagggcagcagactgaccgtgctcgagggacagcctaaggccaatcctaccgtgacactgttccctccaagcagcgaagaactccaggccaacaaggccacacttgtgtgcctgatctccgacttctaccctggggctgtgacagtggcttggaaggccgatggatctcctgtgaaagccggcgtggaaaccaccaagccatccaagcagagcaacaacaaatacgccgccagctcctacctgagcctgacacctgagcagtggaagtcccacagatcctacagctgccaagtgacccacgaaggcagcaccgtggaaaagacagtggcccctacagagtgcagcggcagagccgattgcggctttaccagcgagagctaccagcagggcgtgctgagcgccaccatcctgtacgagatcctgctgggcaaggccaccctgtacgccgtgctggtgtctgccctggtgctgatggctatggtcaagcggaaggacagccggggaagggccaagcgatctggatctggagcaacaaacttctcactactcaaacaagcaggtgacgtggaggagaatcccgggcctactagtatggactggatttggcgcatccttttccttgtcggcgctgctaccggcgcccattccgggccccaggttcagctgcaagagtctggcggaggacttgctcaagctggcggaagcctgagactgtcttgtgccgcctctggcagaaccttcagcatgggctggtttagacaggcccctggcaaagagagagagttcgtcgccgccatcacatacagcggcggcagcccttactacgcctcttctgtcagaggccggttcaccatcagccgggacaacgccaagaacaccgtgtacctccagatgaacagcctgaagccagaggacaccgccgtgtactactgtgccgccaatccaacctacggcagcgactggaatgccgagaattggggccagggcacccaagtgacagtgtctagtggatccggcggcggaggatctggcggaggcggatctgggggcggaggctctttcgaacaagaagtgacacagatccctgccgctctgtctgtgcctgagggcgaaaacctggtgctgaactgctccttcaccgacagcgccatctacaacctccagtggttcaggcaggaccctggaaagggactgacaagcctgctgctgatccagagcagccagagagagcagacctccggcagactgaatgccagcctggataagagcagcggcaggtctaccctgtatatcgccgcttctcagcctggcgatagcgccacatatctgtgtgctgtgcggcctacaagcggcggcagctacatccctacatttggcagaggcaccagcctgatcgtgcacccttatgcctctacaaagggaccctccgtgtttcctctggctcccagcagcaagtctacaagcggaggaacagccgctctgggctgcctggtcaaggattactttcccgagcctgtgaccgtgtcctggaatagcggagcactgacaagcggcgtgcacacctttccagccgtgctgcaaagcagcggcctgtactctctgagcagcgtggtcacagtgcctagctctagcctgggcacccagacctacatctgcaatgtgaaccacaagcctagcaacaccaaggtggacaagagagtggaacccaagagctgtatccccgaggacacattcttcccaagccccgagagcagctgcgacgtgaagctggtggaaaagagcttcgagacagacaccaacctgaacttccagaacctgagcgtgatcggcttcagaatcctgctgctgaaagtggccggctttaacctgctgatgaccctgcggctgtggtccagc

SEQ ID NO: 4087 - DNA, 1923 bp, Artificial Sequence
  Synthetic Polynucloetide
atggactggatttggcgcatccttttccttgtcggcgctgctaccggcgcccattccgggccccaggttcagctgcaagagtctggcggaggacttgctcaagctggcggaagcctgagactgtcttgtgccgcctctggcagaaccttcagcatgggctggtttagacaggcccctggcaaagagagagagttcgtcgccgccatcacatacagcggcggcagcccttactacgcctcttctgtcagaggccggttcaccatcagccgggacaacgccaagaacaccgtgtacctccagatgaacagcctgaagccagaggacaccgccgtgtactactgtgccgccaatccaacctacggcagcgactggaatgccgagaattggggccagggcacccaagtgacagtgtctagtggatccggcggcggaggatctggcggaggcggatctgggggcggaggctctttcgaacaagttcagcttcaacagcctggcgctgagctggtcaaacctggcgcttctgtgaagatgagctgcaaagccagcggctacgccttcagcagctactggatcaactggatgaagcagaaacccggccagggactcgaatggatcggccaaatctatcccggcgacggcgacaccaactacaacggcaagttcaagggcagagccacactgaccgccgatacctctagcagcacagcctacatgcagctgagcagcctgaccagcgaagatagcgccgtgtacttctgtgcccggtccatcacaacagtcgtgggctgcgctatggactattggggccagggaacaagcgtgaccgtgtctagtggcggaggcggaagtggaggcggaggatctggcggcggaggctctgacatccagatgacacagagccctagcagcctgtctgccagcgtgggagacagagtgaccatcacatgcaaggccagcgaccacatcaacaactggctggcctggtatcagcagaagcctggacaggcccctaagctgctgatctacggcgctaccacactggaaacaggcgtgcccagcagattttctggcagcggctctggcaccgactacaccctgacaatatccagcctccagcctgaggacttcgccacctactactgtcagcagagctggaacaccccttggacattcggccagggcaccaagctggaaatcaagagaacgcgtgagcagaaactgatctcggaagaggatctggcgaagcccaccacgacgccagcgccgcgaccaccaacaccggcgcccaccatcgcgtcgcagcccctgtccctgcgcccagaggcgtgccggccagcggcggggggcgcagtgcacacgagggggctggacttcgcctgtgacatctacatctgggcgcccttggccgggacttgtggggtccttctcctgtcactggttatcaccctttactgcaaacggggcagaaagaaactcctgtatatattcaaacaaccatttatgagaccagtacaaactactcaagaggaagatggctgtagctgccgatttccagaagaagaagaaggaggatgtgaactgagagtgaagttcagcaggagcgcagacgcccccgcgtaccagcagggccagaaccagctctataacgagctgaatctaggacgaagagaggagtacgatgttttggacaagagacgtggccgggaccctgagatggggggaaagccgagaaggaagaaccctcaggaaggcctgtacaatgaactgcagaaagataagatggcggaggcctacagtgagattgggatgaaaggcgagcgccggaggggcaaggggcacgatggcctttaccagggtctcagtacagccaccaaggacacctacgacgcccttcacatgcaggccctgccccctcgctga

SEQ ID NO: 4088 - DNA, 2982 bp, Artificial Sequence
  Synthetic Polynucloetide
atggccttaccagtgaccgccttgctcctgccgctggccttgctgctccacgccgccaggccggacatccagatgacacagagccctagcagcctgtctgccagcgtgggagacagagtgaccatcacatgcaaggccagcgaccacatcaacaactggctggcctggtatcagcagaagcctggacaggcccctaagctgctgatctacggcgctaccacactggaaacaggcgtgcccagcagattttctggcagcggctctggcaccgactacaccctgacaatatccagcctccagcctgaggacttcgccacctactactgtcagcagagctggaacaccccttggacattcggccagggcaccaagctggaaatcaagagactcgagatccagaaccctgatcctgccgtgtaccagctgcgggatagcaagagcagcgacaagagcgtgtgtctgttcaccgacttcgacagccagaccaacgtgtcccagagcaaggactccgacgtgtacatcaccgataagtgcgtgctggacatgcggagcatggacttcaagagcaactccgccgtggcctggtccaacaagtccgatttcgcctgcgccaacgccttcaacaacagcattatccccgaggacacattcttcccaagcagcgacgtgccctgcgacgtgaagctggtggaaaagagcttcgagacagacaccaacctgaacttccagaacctgagcgtgatcggcttcagaatcctgctgctgaaagtggccggctttaacctgctgatgaccctgcggctgtggtccagccgcgccaagagaagcggatctggcgtgaagcagaccctgaatttcgacctgctgaagctggctggcgacgtggaatccaacccaggccctactagtatggactggatttggcgcatccttttccttgtcggcgctgctaccggcgcccattccgggccccaggttcagctgcaagagtctggcggaggacttgctcaagctggcggaagcctgagactgtcttgtgccgcctctggcagaaccttcagcatgggctggtttagacaggcccctggcaaagagagagagttcgtcgccgccatcacatacagcggcggcagcccttactacgcctcttctgtcagaggccggttcaccatcagccgggacaacgccaagaacaccgtgtacctccagatgaacagcctgaagccagaggacaccgccgtgtactactgtgccgccaatccaacctacggcagcgactggaatgccgagaattggggccagggcacccaagtgacagtgtctagtggatccggcggcggaggatctggcggaggcggatctgggggcggaggctctttcgaacaagttcagcttcaacagcctggcgctgagctggtcaaacctggcgcttctgtgaagatgagctgcaaagccagcggctacgccttcagcagctactggatcaactggatgaagcagaaacccggccagggactcgaatggatcggccaaatctatcccggcgacggcgacaccaactacaacggcaagttcaagggcagagccacactgaccgccgatacctctagcagcacagcctacatgcagctgagcagcctgaccagcgaagatagcgccgtgtacttctgtgcccggtccatcacaacagtcgtgggctgcgctatggactattggggccagggaacaagcgtgaccgtgtctagtacgcgtgaggacctgaagaacgtgttcccacctgaggtggccgtgttcgagcctagcaaggccgagatcgcccacacccagaaagccaccctcgtgtgcctggctaccggcttctaccccgaccatgtggaactgtcttggtgggtcaacggcaaagaggtgcacagcggcgtgtgtaccgacccccagccactgaaagaacagcccgccctgaacgacagccggtactgcctgagcagcagactgagagtgtccgccaccttctggcagaacccccggaaccacttcagatgccaggtgcagttctacggcctgagcgagaacgacgagtggacccaggacagagccaagcccgtgacccagatcgtgtctgccgaagcctggggcagagccgattgcggcatcaccagcgccagctaccaccagggcgtgctgagcgccaccatcctgtacgagatcctgctgggcaaggccaccctgtacgccgtgctggtgtctgccctggtgctgatggctatggtcaagcggaaggacagccggggaagggccaagcgatctggatctggagcaacaaacttctcactactcaaacaagcaggtgacgtggaggagaatcccgggccttctagaggccatatgaccgagtacaagcccacggtgcgcctcgccacccgcgacgacgtccccagggccgtacgcaccctcgccgccgcgttcgccgactaccccgccacgcgccacaccgtcgatccggaccgccacatcgagcgggtcaccgagctgcaagaactcttcctcacgcgcgtcgggctcgacatcggcaaggtgtgggtcgcggacgacggcgccgcggtggcggtctggaccacgccggagagcgtcgaagcgggggcggtgttcgccgagatcggcccgcgcatggccgagttgagcggttcccggctggccgcgcagcaacagatggaaggcctcctggcgccgcaccggcccaaggagcccgcgtggttcctggccaccgtcggcgtctcgcccgaccaccagggcaagggtctgggcagcgccgtcgtgctccccggagtggaggcggccgagcgcgccggggtgcccgccttcctggagacctccgcgccccgcaacctccccttctacgagcggctcggcttcaccgtcaccgccgacgtcgaggtgcccgaaggaccgcgcacctggtgcatgacccgcaagcccggtgcctga

SEQ ID NO: 4089 - DNA, 2979 bp, Artificial Sequence
  Synthetic Polynucloetide
atggccttaccagtgaccgccttgctcctgccgctggccttgctgctccacgccgccaggccggacatccagatgacacagagccctagcagcctgtctgccagcgtgggagacagagtgaccatcacatgcaaggccagcgaccacatcaacaactggctggcctggtatcagcagaagcctggacaggcccctaagctgctgatctacggcgctaccacactggaaacaggcgtgcccagcagattttctggcagcggctctggcaccgactacaccctgacaatatccagcctccagcctgaggacttcgccacctactactgtcagcagagctggaacaccccttggacattcggccagggcaccaagctggaaatcaagagactcgaggacctgaagaacgtgttcccacctgaggtggccgtgttcgagcctagcaaggccgagatcgcccacacccagaaagccaccctcgtgtgcctggctaccggcttctaccccgaccatgtggaactgtcttggtgggtcaacggcaaagaggtgcacagcggcgtgtgtaccgacccccagccactgaaagaacagcccgccctgaacgacagccggtactgcctgagcagcagactgagagtgtccgccaccttctggcagaacccccggaaccacttcagatgccaggtgcagttctacggcctgagcgagaacgacgagtggacccaggacagagccaagcccgtgacccagatcgtgtctgccgaagcctggggcagagccgattgcggcatcaccagcgccagctaccaccagggcgtgctgagcgccaccatcctgtacgagatcctgctgggcaaggccaccctgtacgccgtgctggtgtctgccctggtgctgatggctatggtcaagcggaaggacagccggggaagggccaagcgatctggatctggagcaacaaacttctcactactcaaacaagcaggtgacgtggaggagaatcccgggcctactagtatggactggatttggcgcatccttttccttgtcggcgctgctaccggcgcccattccgggccccaggttcagctgcaagagtctggcggaggacttgctcaagctggcggaagcctgagactgtcttgtgccgcctctggcagaaccttcagcatgggctggtttagacaggcccctggcaaagagagagagttcgtcgccgccatcacatacagcggcggcagcccttactacgcctcttctgtcagaggccggttcaccatcagccgggacaacgccaagaacaccgtgtacctccagatgaacagcctgaagccagaggacaccgccgtgtactactgtgccgccaatccaacctacggcagcgactggaatgccgagaattggggccagggcacccaagtgacagtgtctagtggatccggcggcggaggatctggcggaggcggatctgggggcggaggctctttcgaacaagttcagcttcaacagcctggcgctgagctggtcaaacctggcgcttctgtgaagatgagctgcaaagccagcggctacgccttcagcagctactggatcaactggatgaagcagaaacccggccagggactcgaatggatcggccaaatctatcccggcgacggcgacaccaactacaacggcaagttcaagggcagagccacactgaccgccgatacctctagcagcacagcctacatgcagctgagcagcctgaccagcgaagatagcgccgtgtacttctgtgcccggtccatcacaacagtcgtgggctgcgctatggactattggggccagggaacaagcgtgaccgtgtctagtacgcgtatccagaaccctgatcctgccgtgtaccagctgcgggatagcaagagcagcgacaagagcgtgtgtctgttcaccgacttcgacagccagaccaacgtgtcccagagcaaggactccgacgtgtacatcaccgataagtgcgtgctggacatgcggagcatggacttcaagagcaactccgccgtggcctggtccaacaagtccgatttcgcctgcgccaacgccttcaacaacagcattatccccgaggacacattcttcccaagcagcgacgtgccctgcgacgtgaagctggtggaaaagagcttcgagacagacaccaacctgaacttccagaacctgagcgtgatcggcttcagaatcctgctgctgaaagtggccggctttaacctgctgatgaccctgcggctgtggtccagccgcgccaagagaagcggatctggcgtgaagcagaccctgaatttcgacctgctgaagctggctggcgacgtggaatccaacccaggcccttctagaggccatatgaccgagtacaagcccacggtgcgcctcgccacccgcgacgacgtccccagggccgtacgcaccctcgccgccgcgttcgccgactaccccgccacgcgccacaccgtcgatccggaccgccacatcgagcgggtcaccgagctgcaagaactcttcctcacgcgcgtcgggctcgacatcggcaaggtgtgggtcgcggacgacggcgccgcggtggcggtctggaccacgccggagagcgtcgaagcgggggcggtgttcgccgagatcggcccgcgcatggccgagttgagcggttcccggctggccgcgcagcaacagatggaaggcctcctggcgccgcaccggcccaaggagcccgcgtggttcctggccaccgtcggcgtctcgcccgaccaccagggcaagggtctgggcagcgccgtcgtgctccccggagtggaggcggccgagcgcgccggggtgcccgccttcctggagacctccgcgccccgcaacctccccttctacgagcggctcggcttcaccgtcaccgccgacgtcgaggtgcccgaaggaccgcgcacctggtgcatgacccgcaagcccggtgcctga

SEQ ID NO: 4090 - DNA, 2979 bp, Artificial Sequence
  Synthetic Polynucloetide
atggccttaccagtgaccgccttgctcctgccgctggccttgctgctccacgccgccaggccggacatccagatgacacagagccctagcagcctgtctgccagcgtgggagacagagtgaccatcacatgcaaggccagcgaccacatcaacaactggctggcctggtatcagcagaagcctggacaggcccctaagctgctgatctacggcgctaccacactggaaacaggcgtgcccagcagattttctggcagcggctctggcaccgactacaccctgacaatatccagcctccagcctgaggacttcgccacctactactgtcagcagagctggaacaccccttggacattcggccagggcaccaagctggaaatcaagagactcgaggacctgaagaacgtgttcccacctgaggtggccgtgttcgagcctagcgaggccgagatcagccacacccagaaagccaccctcgtgtgcctggctaccggcttctaccccgaccatgtggaactgtcttggtgggtcaacggcaaagaggtgcacagcggcgtgtgtaccgacccccagccactgaaagaacagcccgccctgaacgacagccggtactgcctgagcagcagactgagagtgtccgccaccttctggcagaacccccggaaccacttcagatgccaggtgcagttctacggcctgagcgagaacgacgagtggacccaggacagagccaagcccgtgacccagatcgtgtctgccgaagcctggggcagagccgattgcggctttaccagcgagagctaccagcagggcgtgctgagcgccaccatcctgtacgagatcctgctgggcaaggccaccctgtacgccgtgctggtgtctgccctggtgctgatggctatggtcaagcggaaggacagccggggaagggccaagcgatctggatctggagcaacaaacttctcactactcaaacaagcaggtgacgtggaggagaatcccgggcctactagtatggactggatttggcgcatccttttccttgtcggcgctgctaccggcgcccattccgggccccaggttcagctgcaagagtctggcggaggacttgctcaagctggcggaagcctgagactgtcttgtgccgcctctggcagaaccttcagcatgggctggtttagacaggcccctggcaaagagagagagttcgtcgccgccatcacatacagcggcggcagcccttactacgcctcttctgtcagaggccggttcaccatcagccgggacaacgccaagaacaccgtgtacctccagatgaacagcctgaagccagaggacaccgccgtgtactactgtgccgccaatccaacctacggcagcgactggaatgccgagaattggggccagggcacccaagtgacagtgtctagtggatccggcggcggaggatctggcggaggcggatctgggggcggaggctctttcgaacaagttcagcttcaacagcctggcgctgagctggtcaaacctggcgcttctgtgaagatgagctgcaaagccagcggctacgccttcagcagctactggatcaactggatgaagcagaaacccggccagggactcgaatggatcggccaaatctatcccggcgacggcgacaccaactacaacggcaagttcaagggcagagccacactgaccgccgatacctctagcagcacagcctacatgcagctgagcagcctgaccagcgaagatagcgccgtgtacttctgtgcccggtccatcacaacagtcgtgggctgcgctatggactattggggccagggaacaagcgtgaccgtgtctagtacgcgtatccagaaccctgatcctgccgtgtaccagctgcgggatagcaagagcagcgacaagagcgtgtgtctgttcaccgacttcgacagccagaccaacgtgtcccagagcaaggactccgacgtgtacatcaccgataagtgcgtgctggacatgcggagcatggacttcaagagcaactccgccgtggcctggtccaacaagtccgatttcgcctgcgccaacgccttcaacaacagcattatccccgaggacacattcttcccaagccccgagagcagctgcgacgtgaagctggtggaaaagagcttcgagacagacaccaacctgaacttccagaacctgagcgtgatcggcttcagaatcctgctgctgaaagtggccggctttaacctgctgatgaccctgcggctgtggtccagccgcgccaagagaagcggatctggcgtgaagcagaccctgaatttcgacctgctgaagctggctggcgacgtggaatccaacccaggcccttctagaggccatatgaccgagtacaagcccacggtgcgcctcgccacccgcgacgacgtccccagggccgtacgcaccctcgccgccgcgttcgccgactaccccgccacgcgccacaccgtcgatccggaccgccacatcgagcgggtcaccgagctgcaagaactcttcctcacgcgcgtcgggctcgacatcggcaaggtgtgggtcgcggacgacggcgccgcggtggcggtctggaccacgccggagagcgtcgaagcgggggcggtgttcgccgagatcggcccgcgcatggccgagttgagcggttcccggctggccgcgcagcaacagatggaaggcctcctggcgccgcaccggcccaaggagcccgcgtggttcctggccaccgtcggcgtctcgcccgaccaccagggcaagggtctgggcagcgccgtcgtgctccccggagtggaggcggccgagcgcgccggggtgcccgccttcctggagacctccgcgccccgcaacctccccttctacgagcggctcggcttcaccgtcaccgccgacgtcgaggtgcccgaaggaccgcgcacctggtgcatgacccgcaagcccggtgcctga

SEQ ID NO: 4091 - DNA, 2277 bp, Artificial Sequence
  Synthetic Polynucloetide
atggccttaccagtgaccgccttgctcctgccgctggccttgctgctccacgccgccaggccggacatccagatgacacagagccctagcagcctgtctgccagcgtgggagacagagtgaccatcacatgcaaggccagcgaccacatcaacaactggctggcctggtatcagcagaagcctggacaggcccctaagctgctgatctacggcgctaccacactggaaacaggcgtgcccagcagattttctggcagcggctctggcaccgactacaccctgacaatatccagcctccagcctgaggacttcgccacctactactgtcagcagagctggaacaccccttggacattcggccagggcaccaagctggaaatcaagagactcgaggacctgaagaacgtgttcccacctgaggtggccgtgttcgagcctagcgaggccgagatcagccacacccagaaagccaccctcgtgtgcctggctaccggcttctaccccgaccatgtggaactgtcttggtgggtcaacggcaaagaggtgcacagcggcgtgtgtaccgacccccagccactgaaagaacagcccgccctgaacgacagccggtactgcctgagcagcagactgagagtgtccgccaccttctggcagaacccccggaaccacttcagatgccaggtgcagttctacggcctgagcgagaacgacgagtggacccaggacagagccaagcccgtgacccagatcgtgtctgccgaagcctggggcagagccgattgcggctttaccagcgagagctaccagcagggcgtgctgagcgccaccatcctgtacgagatcctgctgggcaaggccaccctgtacgccgtgctggtgtctgccctggtgctgatggctatggtcaagcggaaggacagccggggaagggccaagcgatctggatctggagcaacaaacttctcactactcaaacaagcaggtgacgtggaggagaatcccgggcctactagtatggactggatttggcgcatccttttccttgtcggcgctgctaccggcgcccattccgggccccaggttcagctgcaagagtctggcggaggacttgctcaagctggcggaagcctgagactgtcttgtgccgcctctggcagaaccttcagcatgggctggtttagacaggcccctggcaaagagagagagttcgtcgccgccatcacatacagcggcggcagcccttactacgcctcttctgtcagaggccggttcaccatcagccgggacaacgccaagaacaccgtgtacctccagatgaacagcctgaagccagaggacaccgccgtgtactactgtgccgccaatccaacctacggcagcgactggaatgccgagaattggggccagggcacccaagtgacagtgtctagtggatccggcggcggaggatctggcggaggcggatctgggggcggaggctctttcgaacaagttcagcttcaacagcctggcgctgagctggtcaaacctggcgcttctgtgaagatgagctgcaaagccagcggctacgccttcagcagctactggatcaactggatgaagcagaaacccggccagggactcgaatggatcggccaaatctatcccggcgacggcgacaccaactacaacggcaagttcaagggcagagccacactgaccgccgatacctctagcagcacagcctacatgcagctgagcagcctgaccagcgaagatagcgccgtgtacttctgtgcccggtccatcacaacagtcgtgggctgcgctatggactattggggccagggaacaagcgtgaccgtgtctagtacgcgtatccagaaccctgatcctgccgtgtaccagctgcgggatagcaagagcagcgacaagagcgtgtgtctgttcaccgacttcgacagccagaccaacgtgtcccagagcaaggactccgacgtgtacatcaccgataagtgcgtgctggacatgcggagcatggacttcaagagcaactccgccgtggcctggtccaacaagtccgatttcgcctgcgccaacgccttcaacaacagcattatccccgaggacacattcttcccaagccccgagagcagctgcgacgtgaagctggtggaaaagagcttcgagacagacaccaacctgaacttccagaacctgagcgtgatcggcttcagaatcctgctgctgaaagtggccggctttaacctgctgatgaccctgcggctgtggtccagc

SEQ ID NO: 4092 - DNA, 2952 bp, Artificial Sequence
  Synthetic Polynucloetide
atggccttaccagtgaccgccttgctcctgccgctggccttgctgctccacgccgccaggccggacatccagatgacacagagccctagcagcctgtctgccagcgtgggagacagagtgaccatcacatgcaaggccagcgaccacatcaacaactggctggcctggtatcagcagaagcctggacaggcccctaagctgctgatctacggcgctaccacactggaaacaggcgtgcccagcagattttctggcagcggctctggcaccgactacaccctgacaatatccagcctccagcctgaggacttcgccacctactactgtcagcagagctggaacaccccttggacattcggccagggcaccaagctggaaatcaagagactcgaggacctgaagaacgtgttcccacctgaggtggccgtgttcgagcctagcgaggccgagatcagccacacccagaaagccaccctcgtgtgcctggctaccggcttctaccccgaccatgtggaactgtcttggtgggtcaacggcaaagaggtgcacagcggcgtgtgtaccgacccccagccactgaaagaacagcccgccctgaacgacagccggtactgcctgagcagcagactgagagtgtccgccaccttctggcagaacccccggaaccacttcagatgccaggtgcagttctacggcctgagcgagaacgacgagtggacccaggacagagccaagcccgtgacccagatcgtgtctgccgaagcctggggcagagccgattgcggctttaccagcgagagctaccagcagggcgtgctgagcgccaccatcctgtacgagatcctgctgggcaaggccaccctgtacgccgtgctggtgtctgccctggtgctgatggctatggtcaagcggaaggacagccggggaagggccaagcgatctggatctggagcaacaaacttctcactactcaaacaagcaggtgacgtggaggagaatcccgggcctactagtatggactggatttggcgcatccttttccttgtcggcgctgctaccggcgcccattccgggccccaggttcagctgcaagagtctggcggaggacttgctcaagctggcggaagcctgagactgtcttgtgccgcctctggcagaaccttcagcatgggctggtttagacaggcccctggcaaagagagagagttcgtcgccgccatcacatacagcggcggcagcccttactacgcctcttctgtcagaggccggttcaccatcagccgggacaacgccaagaacaccgtgtacctccagatgaacagcctgaagccagaggacaccgccgtgtactactgtgccgccaatccaacctacggcagcgactggaatgccgagaattggggccagggcacccaagtgacagtgtctagtggatccggcggcggaggatctggcggaggcggatctgggggcggaggctctttcgaacaagttcagcttcaacagcctggcgctgagctggtcaaacctggcgcttctgtgaagatgagctgcaaagccagcggctacgccttcagcagctactggatcaactggatgaagcagaaacccggccagggactcgaatggatcggccaaatctatcccggcgacggcgacaccaactacaacggcaagttcaagggcagagccacactgaccgccgatacctctagcagcacagcctacatgcagctgagcagcctgaccagcgaagatagcgccgtgtacttctgtgcccggtccatcacaacagtcgtgggctgcgctatggactattggggccagggaacaagcgtgaccgtgtctagtacgcgtatccagaaccctgatcctgccgtgtaccagctgcgggatagcaagagcagcgacaagagcgtgtgtctgttcaccgacttcgacagccagaccaacgtgtcccagagcaaggactccgacgtgtacatcaccgataagtgcgtgctggacatgcggagcatggacttcaagagcaactccgccgtggcctggtccaacaagtccgatttcgcctgcgccaacgccttcaacaacagcattatccccgaggacacattcttcccaagccccgagagcagctgcgacgtgaagctggtggaaaagagcttcgagacagacaccaacctgaacttccagaacctgagcgtgatcggcttcagaatcctgctgctgaaagtggccggctttaacctgctgatgaccctgcggctgtggtccagccgcgccaagagaagcggatctggcgtgaagcagaccctgaatttcgacctgctgaagctggctggcgacgtggaatccaacccaggcccttctagaggcgggatccacaccatggctacctacgaggtgctgtgcgaggtggcaagaaagctgggcaccgacgacagagaagtggtgctgttcctgctgaacgtgttcatccctcagcctacactggcccagctgatcggtgcactgagagccctgaaagaggaaggccggctgacctttcctctgctggccgaatgcctgttcagagccggaagaagggatctgctgcgggacctgctgcatctggaccccagatttctggaaagacacctggccggcaccatgagctacttcagcccttaccagctgaccgtgctgcacgttgacggcgaactgtgcgccagagatattcggagcctgatcttcctgagcaaggacaccatcggcagccggtctacccctcagacatttctgcactgggtgtactgcatggaaaacctggacctgctcggccccacagatgtggatgccctgatgtccatgctgagaagcctgagcagagtggacctccagagacaggtgcagacactgatgggactgcacctgagcggacctagccacagccagcactacagacacacccct

SEQ ID NO: 4093 - DNA, 2289 bp, Artificial Sequence
  Synthetic Polynucloetide
atggccttaccagtgaccgccttgctcctgccgctggccttgctgctccacgccgccaggccggacatccagatgacacagagccctagcagcctgtctgccagcgtgggagacagagtgaccatcacatgcaaggccagcgaccacatcaacaactggctggcctggtatcagcagaagcctggacaggcccctaagctgctgatctacggcgctaccacactggaaacaggcgtgcccagcagattttctggcagcggctctggcaccgactacaccctgacaatatccagcctccagcctgaggacttcgccacctactactgtcagcagagctggaacaccccttggacattcggccagggcaccaagctggaaatcaagagactcgagatccagaaccctgatcctgccgtgtaccagctgcgggatagcaagagcagcgacaagagcgtgtgtctgttcaccgacttcgacagccagaccaacgtgtcccagagcaaggactccgacgtgtacatcaccgataagtgcgtgctggacatgcggagcatggacttcaagagcaactccgccgtggcctggtccaacaagtccgatttcgcctgcgccaacgccttcaacaacagcattatccccgaggacacattcttcccaagccccgagagcagctgcgacgtgaagctggtggaaaagagcttcgagacagacaccaacctgaacttccagaacctgagcgtgatcggcttcagaatcctgctgctgaaagtggccggctttaacctgctgatgaccctgcggctgtggtccagccgcgccaagagaagcggatctggcgtgaagcagaccctgaatttcgacctgctgaagctggctggcgacgtggaatccaacccaggccctactagtatggactggatttggcgcatccttttccttgtcggcgctgctaccggcgcccattccgggccccaggttcagctgcaagagtctggcggaggacttgctcaagctggcggaagcctgagactgtcttgtgccgcctctggcagaaccttcagcatgggctggtttagacaggcccctggcaaagagagagagttcgtcgccgccatcacatacagcggcggcagcccttactacgcctcttctgtcagaggccggttcaccatcagccgggacaacgccaagaacaccgtgtacctccagatgaacagcctgaagccagaggacaccgccgtgtactactgtgccgccaatccaacctacggcagcgactggaatgccgagaattggggccagggcacccaagtgacagtgtctagtggatccggcggcggaggatctggcggaggcggatctgggggcggaggctctttcgaacaagttcagcttcaacagcctggcgctgagctggtcaaacctggcgcttctgtgaagatgagctgcaaagccagcggctacgccttcagcagctactggatcaactggatgaagcagaaacccggccagggactcgaatggatcggccaaatctatcccggcgacggcgacaccaactacaacggcaagttcaagggcagagccacactgaccgccgatacctctagcagcacagcctacatgcagctgagcagcctgaccagcgaagatagcgccgtgtacttctgtgcccggtccatcacaacagtcgtgggctgcgctatggactattggggccagggaacaagcgtgaccgtgtctagtacgcgtgaggacctgaagaacgtgttcccacctgaggtggccgtgttcgagcctagcgaggccgagatcagccacacccagaaagccaccctcgtgtgcctggctaccggcttctaccccgaccatgtggaactgtcttggtgggtcaacggcaaagaggtgcacagcggcgtgtgtaccgacccccagccactgaaagaacagcccgccctgaacgacagccggtactgcctgagcagcagactgagagtgtccgccaccttctggcagaacccccggaaccacttcagatgccaggtgcagttctacggcctgagcgagaacgacgagtggacccaggacagagccaagcccgtgacccagatcgtgtctgccgaagcctggggcagagccgattgcggctttaccagcgagagctaccagcagggcgtgctgagcgccaccatcctgtacgagatcctgctgggcaaggccaccctgtacgccgtgctggtgtctgccctggtgctgatggctatggtcaagcggaaggacagccgggga

SEQ ID NO: 4094 - DNA, 2955 bp, Artificial Sequence
  Synthetic Polynucloetide
atggccttaccagtgaccgccttgctcctgccgctggccttgctgctccacgccgccaggccggacatccagatgacacagagccctagcagcctgtctgccagcgtgggagacagagtgaccatcacatgcaaggccagcgaccacatcaacaactggctggcctggtatcagcagaagcctggacaggcccctaagctgctgatctacggcgctaccacactggaaacaggcgtgcccagcagattttctggcagcggctctggcaccgactacaccctgacaatatccagcctccagcctgaggacttcgccacctactactgtcagcagagctggaacaccccttggacattcggccagggcaccaagctggaaatcaagagactcgagatccagaaccctgatcctgccgtgtaccagctgcgggatagcaagagcagcgacaagagcgtgtgtctgttcaccgacttcgacagccagaccaacgtgtcccagagcaaggactccgacgtgtacatcaccgataagtgcgtgctggacatgcggagcatggacttcaagagcaactccgccgtggcctggtccaacaagtccgatttcgcctgcgccaacgccttcaacaacagcattatccccgaggacacattcttcccaagccccgagagcagctgcgacgtgaagctggtggaaaagagcttcgagacagacaccaacctgaacttccagaacctgagcgtgatcggcttcagaatcctgctgctgaaagtggccggctttaacctgctgatgaccctgcggctgtggtccagccgcgccaagagaagcggatctggcgtgaagcagaccctgaatttcgacctgctgaagctggctggcgacgtggaatccaacccaggccctactagtatggactggatttggcgcatccttttccttgtcggcgctgctaccggcgcccattccgggccccaggttcagctgcaagagtctggcggaggacttgctcaagctggcggaagcctgagactgtcttgtgccgcctctggcagaaccttcagcatgggctggtttagacaggcccctggcaaagagagagagttcgtcgccgccatcacatacagcggcggcagcccttactacgcctcttctgtcagaggccggttcaccatcagccgggacaacgccaagaacaccgtgtacctccagatgaacagcctgaagccagaggacaccgccgtgtactactgtgccgccaatccaacctacggcagcgactggaatgccgagaattggggccagggcacccaagtgacagtgtctagtggatccggcggcggaggatctggcggaggcggatctgggggcggaggctctttcgaacaagttcagcttcaacagcctggcgctgagctggtcaaacctggcgcttctgtgaagatgagctgcaaagccagcggctacgccttcagcagctactggatcaactggatgaagcagaaacccggccagggactcgaatggatcggccaaatctatcccggcgacggcgacaccaactacaacggcaagttcaagggcagagccacactgaccgccgatacctctagcagcacagcctacatgcagctgagcagcctgaccagcgaagatagcgccgtgtacttctgtgcccggtccatcacaacagtcgtgggctgcgctatggactattggggccagggaacaagcgtgaccgtgtctagtacgcgtgaggacctgaagaacgtgttcccacctgaggtggccgtgttcgagcctagcgaggccgagatcagccacacccagaaagccaccctcgtgtgcctggctaccggcttctaccccgaccatgtggaactgtcttggtgggtcaacggcaaagaggtgcacagcggcgtgtgtaccgacccccagccactgaaagaacagcccgccctgaacgacagccggtactgcctgagcagcagactgagagtgtccgccaccttctggcagaacccccggaaccacttcagatgccaggtgcagttctacggcctgagcgagaacgacgagtggacccaggacagagccaagcccgtgacccagatcgtgtctgccgaagcctggggcagagccgattgcggctttaccagcgagagctaccagcagggcgtgctgagcgccaccatcctgtacgagatcctgctgggcaaggccaccctgtacgccgtgctggtgtctgccctggtgctgatggctatggtcaagcggaaggacagccggggaagggccaagcgatctggatctggagcaacaaacttctcactactcaaacaagcaggtgacgtggaggagaatcccgggccttctagaggcgggatccacaccatggctacctacgaggtgctgtgcgaggtggcaagaaagctgggcaccgacgacagagaagtggtgctgttcctgctgaacgtgttcatccctcagcctacactggcccagctgatcggtgcactgagagccctgaaagaggaaggccggctgacctttcctctgctggccgaatgcctgttcagagccggaagaagggatctgctgcgggacctgctgcatctggaccccagatttctggaaagacacctggccggcaccatgagctacttcagcccttaccagctgaccgtgctgcacgttgacggcgaactgtgcgccagagatattcggagcctgatcttcctgagcaaggacaccatcggcagccggtctacccctcagacatttctgcactgggtgtactgcatggaaaacctggacctgctcggccccacagatgtggatgccctgatgtccatgctgagaagcctgagcagagtggacctccagagacaggtgcagacactgatgggactgcacctgagcggacctagccacagccagcactacagacacacccct

SEQ ID NO: 4095 - DNA, 2979 bp, Artificial Sequence
  Synthetic Polynucloetide
atggccttaccagtgaccgccttgctcctgccgctggccttgctgctccacgccgccaggccggacatccagatgacacagagccctagcagcctgtctgccagcgtgggagacagagtgaccatcacatgcaaggccagcgaccacatcaacaactggctggcctggtatcagcagaagcctggacaggcccctaagctgctgatctacggcgctaccacactggaaacaggcgtgcccagcagattttctggcagcggctctggcaccgactacaccctgacaatatccagcctccagcctgaggacttcgccacctactactgtcagcagagctggaacaccccttggacattcggccagggcaccaagctggaaatcaagagactcgaggacctgaagaacgtgttcccacctgaggtggccgtgttcgagcctagcgaggccgagatcagccacacccagaaagccaccctcgtgtgcctggctaccggcttctaccccgaccatgtggaactgtcttggtgggtcaacggcaaagaggtgcacagcggcgtgtctaccgacccccagccactgaaagaacagcccgccctgaacgacagccggtactgcctgagcagcagactgagagtgtccgccaccttctggcagaacccccggaaccacttcagatgccaggtgcagttctacggcctgagcgagaacgacgagtggacccaggacagagccaagcccgtgacccagatcgtgtctgccgaagcctggggcagagccgattgcggctttaccagcgagagctaccagcagggcgtgctgagcgccaccatcctgtacgagatcctgctgggcaaggccaccctgtacgccgtgctggtgtctgccctggtgctgatggctatggtcaagcggaaggacagccggggaagggccaagcgatctggatctggagcaacaaacttctcactactcaaacaagcaggtgacgtggaggagaatcccgggcctactagtatggactggatttggcgcatccttttccttgtcggcgctgctaccggcgcccattccgggccccaggttcagctgcaagagtctggcggaggacttgctcaagctggcggaagcctgagactgtcttgtgccgcctctggcagaaccttcagcatgggctggtttagacaggcccctggcaaagagagagagttcgtcgccgccatcacatacagcggcggcagcccttactacgcctcttctgtcagaggccggttcaccatcagccgggacaacgccaagaacaccgtgtacctccagatgaacagcctgaagccagaggacaccgccgtgtactactgtgccgccaatccaacctacggcagcgactggaatgccgagaattggggccagggcacccaagtgacagtgtctagtggatccggcggcggaggatctggcggaggcggatctgggggcggaggctctttcgaacaagttcagcttcaacagcctggcgctgagctggtcaaacctggcgcttctgtgaagatgagctgcaaagccagcggctacgccttcagcagctactggatcaactggatgaagcagaaacccggccagggactcgaatggatcggccaaatctatcccggcgacggcgacaccaactacaacggcaagttcaagggcagagccacactgaccgccgatacctctagcagcacagcctacatgcagctgagcagcctgaccagcgaagatagcgccgtgtacttctgtgcccggtccatcacaacagtcgtgggctgcgctatggactattggggccagggaacaagcgtgaccgtgtctagtacgcgtatccagaaccctgatcctgccgtgtaccagctgcgggatagcaagagcagcgacaagagcgtgtgtctgttcaccgacttcgacagccagaccaacgtgtcccagagcaaggactccgacgtgtacatcaccgataagaccgtgctggacatgcggagcatggacttcaagagcaactccgccgtggcctggtccaacaagtccgatttcgcctgcgccaacgccttcaacaacagcattatccccgaggacacattcttcccaagccccgagagcagctgcgacgtgaagctggtggaaaagagcttcgagacagacaccaacctgaacttccagaacctgagcgtgatcggcttcagaatcctgctgctgaaagtggccggctttaacctgctgatgaccctgcggctgtggtccagccgcgccaagagaagcggatctggcgtgaagcagaccctgaatttcgacctgctgaagctggctggcgacgtggaatccaacccaggcccttctagaggccatatgaccgagtacaagcccacggtgcgcctcgccacccgcgacgacgtccccagggccgtacgcaccctcgccgccgcgttcgccgactaccccgccacgcgccacaccgtcgatccggaccgccacatcgagcgggtcaccgagctgcaagaactcttcctcacgcgcgtcgggctcgacatcggcaaggtgtgggtcgcggacgacggcgccgcggtggcggtctggaccacgccggagagcgtcgaagcgggggcggtgttcgccgagatcggcccgcgcatggccgagttgagcggttcccggctggccgcgcagcaacagatggaaggcctcctggcgccgcaccggcccaaggagcccgcgtggttcctggccaccgtcggcgtctcgcccgaccaccagggcaagggtctgggcagcgccgtcgtgctccccggagtggaggcggccgagcgcgccggggtgcccgccttcctggagacctccgcgccccgcaacctccccttctacgagcggctcggcttcaccgtcaccgccgacgtcgaggtgcccgaaggaccgcgcacctggtgcatgacccgcaagcccggtgcctga

SEQ ID NO: 4096 - DNA, 3225 bp, Artificial Sequence
  Synthetic Polynucloetide
atggccttaccagtgaccgccttgctcctgccgctggccttgctgctccacgccgccaggccggacatccagatgacacagagccctagcagcctgtctgccagcgtgggagacagagtgaccatcacatgcaaggccagcgaccacatcaacaactggctggcctggtatcagcagaagcctggacaggcccctaagctgctgatctacggcgctaccacactggaaacaggcgtgcccagcagattttctggcagcggctctggcaccgactacaccctgacaatatccagcctccagcctgaggacttcgccacctactactgtcagcagagctggaacaccccttggacattcggccagggcaccaagctggaaatcaagagactcgaggacctgaagaacgtgttcccacctgaggtggccgtgttcgagcctagcgaggccgagatcagccacacccagaaagccaccctcgtgtgcctggctaccggcttctaccccgaccatgtggaactgtcttggtgggtcaacggcaaagaggtgcacagcggcgtgtctaccgacccccagccactgaaagaacagcccgccctgaacgacagccggtactgcctgagcagcagactgagagtgtccgccaccttctggcagaacccccggaaccacttcagatgccaggtgcagttctacggcctgagcgagaacgacgagtggacccaggacagagccaagcccgtgacccagatcgtgtctgccgaagcctggggcagagccgattgcggctttaccagcgagagctaccagcagggcgtgctgagcgccaccatcctgtacgagatcctgctgggcaaggccaccctgtacgccgtgctggtgtctgccctggtgctgatggctatggtcaagcggaaggacagccggggaagggccaagcgatctggatctggagcaacaaacttctcactactcaaacaagcaggtgacgtggaggagaatcccgggcctactagtatggactggatttggcgcatccttttccttgtcggcgctgctaccggcgcccattccgggccccaggttcagctgcaagagtctggcggaggacttgctcaagctggcggaagcctgagactgtcttgtgccgcctctggcagaaccttcagcatgggctggtttagacaggcccctggcaaagagagagagttcgtcgccgccatcacatacagcggcggcagcccttactacgcctcttctgtcagaggccggttcaccatcagccgggacaacgccaagaacaccgtgtacctccagatgaacagcctgaagccagaggacaccgccgtgtactactgtgccgccaatccaacctacggcagcgactggaatgccgagaattggggccagggcacccaagtgacagtgtctagtggatccggcggcggaggatctggcggaggcggatctgggggcggaggctctttcgaacaagttcagcttcaacagcctggcgctgagctggtcaaacctggcgcttctgtgaagatgagctgcaaagccagcggctacgccttcagcagctactggatcaactggatgaagcagaaacccggccagggactcgaatggatcggccaaatctatcccggcgacggcgacaccaactacaacggcaagttcaagggcagagccacactgaccgccgatacctctagcagcacagcctacatgcagctgagcagcctgaccagcgaagatagcgccgtgtacttctgtgcccggtccatcacaacagtcgtgggctgcgctatggactattggggccagggaacaagcgtgaccgtgtctagtacgcgtgagcagaaactgatctcggaagaggatgggagcggcaccccattcccttctctggcccctcccatcatgctgctggtggacggcaagcagcagatggtggtcgtgtgcctggtgctggatgtggccccacctggactggacagccccatctggtttagcgccggcaatggctctgccctggacgcctttacctacggcccaagccctgccaccgatggcacctggacaaatctggcccacctgagcctgcccagcgaggaactggcttcttgggagcctctcgtgtgccacacaggacctggcgctgagggacacagcagatccacccagcctatgcacctgtctggcgaggccagcaccgccagaacctgtcctcaggaacctctgagaggcacccctggcggagcactgtggctgggagtgctgagactgctgctgttcaagctgctgctgtttgacctgctgctgacctgctcctgtctgtgcgatcctgccggccctctgccttctcctgccaccaccacaagactgagagccctgggcagccacagactgcaccctgccacagagacaggcggcagagaggccacaagcagccctagaccccagcccagagacagaagatggggcgataccccccctggcagaaagcctggatctccagtccgcgccaagagaagcggatctggcgtgaagcagaccctgaatttcgacctgctgaagctggctggcgacgtggaatccaacccaggcccttctagaggccatatgaccgagtacaagcccacggtgcgcctcgccacccgcgacgacgtccccagggccgtacgcaccctcgccgccgcgttcgccgactaccccgccacgcgccacaccgtcgatccggaccgccacatcgagcgggtcaccgagctgcaagaactcttcctcacgcgcgtcgggctcgacatcggcaaggtgtgggtcgcggacgacggcgccgcggtggcggtctggaccacgccggagagcgtcgaagcgggggcggtgttcgccgagatcggcccgcgcatggccgagttgagcggttcccggctggccgcgcagcaacagatggaaggcctcctggcgccgcaccggcccaaggagcccgcgtggttcctggccaccgtcggcgtctcgcccgaccaccagggcaagggtctgggcagcgccgtcgtgctccccggagtggaggcggccgagcgcgccggggtgcccgccttcctggagacctccgcgccccgcaacctccccttctacgagcggctcggcttcaccgtcaccgccgacgtcgaggtgcccgaaggaccgcgcacctggtgcatgacccgcaagcccggtgcctga

SEQ ID NO: 4097 - DNA, 3090 bp, Artificial Sequence
  Synthetic Polynucloetide
atggccttaccagtgaccgccttgctcctgccgctggccttgctgctccacgccgccaggccggacatccagatgacacagagccctagcagcctgtctgccagcgtgggagacagagtgaccatcacatgcaaggccagcgaccacatcaacaactggctggcctggtatcagcagaagcctggacaggcccctaagctgctgatctacggcgctaccacactggaaacaggcgtgcccagcagattttctggcagcggctctggcaccgactacaccctgacaatatccagcctccagcctgaggacttcgccacctactactgtcagcagagctggaacaccccttggacattcggccagggcaccaagctggaaatcaagagactcgaggggaaaccaattcccaaccctcttctgggactggattcaaccggcagcggcgacaagcagctggacgccgacgtgtcccccaagcctaccatcttcctgccctctatcgccgagacaaagctccagaaggccggcacctacctgtgcctgctggaaaagttcttcccagatgtgattaagatccactggcaggaaaagaagtccaacaccatcctgggcagccaggaaggcaacaccatgaagaccaacgacacctacatgaagttcagctggctgaccgtgcccgagaagtccctggacaaagaacacagatgcatcgtgcggcacgaaaacaacaagaacggcgtggaccaggaaatcatcttcccacccatcaagaccgatgtgattacaatggaccccaaggacaactgctccaaggacgccaacgataccctgctgctccagctgaccaacaccagcgcctactacatgtacttgttgctgctgctgaagtccgtggtgtacttcgccatcatcacatgctgcctgctgcggagaaccgccttctgctgcaacggcgagaagtctagggccaagcgatctggatctggagcaacaaacttctcactactcaaacaagcaggtgacgtggaggagaatcccgggcctactagtatggactggatttggcgcatccttttccttgtcggcgctgctaccggcgcccattccgggccccaggttcagctgcaagagtctggcggaggacttgctcaagctggcggaagcctgagactgtcttgtgccgcctctggcagaaccttcagcatgggctggtttagacaggcccctggcaaagagagagagttcgtcgccgccatcacatacagcggcggcagcccttactacgcctcttctgtcagaggccggttcaccatcagccgggacaacgccaagaacaccgtgtacctccagatgaacagcctgaagccagaggacaccgccgtgtactactgtgccgccaatccaacctacggcagcgactggaatgccgagaattggggccagggcacccaagtgacagtgtctagtggatccggcggcggaggatctggcggaggcggatctgggggcggaggctctttcgaacaagttcagcttcaacagcctggcgctgagctggtcaaacctggcgcttctgtgaagatgagctgcaaagccagcggctacgccttcagcagctactggatcaactggatgaagcagaaacccggccagggactcgaatggatcggccaaatctatcccggcgacggcgacaccaactacaacggcaagttcaagggcagagccacactgaccgccgatacctctagcagcacagcctacatgcagctgagcagcctgaccagcgaagatagcgccgtgtacttctgtgcccggtccatcacaacagtcgtgggctgcgctatggactattggggccagggaacaagcgtgaccgtgtctagtacgcgtgagcagaaactgatctcggaagaggatgggagcggcagccagcctcacaccaagcccagcgtgttcgtgatgaagaacggcaccaacgtggcctgcctcgtgaaagagttctaccccaaggacatcaggatcaacctggtgtccagcaagaagatcaccgagttcgaccccgccatcgtgatctcccccagcggcaagtacaacgccgtgaagctggggaagtacgaggacagcaacagcgtgacctgctccgtgcagcacgacaacaagaccgtgcacagcaccgactttgaagtgaaaaccgactccaccgaccacgtgaagcccaaagagacagagaacaccaagcagcccagcaagagctgccacaagcccaaggccatcgtgcacaccgagaaagtgaacatgatgagcctgaccgtgctgggcctgcggatgctgttcgccaaaaccgtggccgtgaacttcctgctgaccgccaagctgttcttcctccgcgccaagagaagcggatctggcgtgaagcagaccctgaatttcgacctgctgaagctggctggcgacgtggaatccaacccaggcccttctagaggccatatgaccgagtacaagcccacggtgcgcctcgccacccgcgacgacgtccccagggccgtacgcaccctcgccgccgcgttcgccgactaccccgccacgcgccacaccgtcgatccggaccgccacatcgagcgggtcaccgagctgcaagaactcttcctcacgcgcgtcgggctcgacatcggcaaggtgtgggtcgcggacgacggcgccgcggtggcggtctggaccacgccggagagcgtcgaagcgggggcggtgttcgccgagatcggcccgcgcatggccgagttgagcggttcccggctggccgcgcagcaacagatggaaggcctcctggcgccgcaccggcccaaggagcccgcgtggttcctggccaccgtcggcgtctcgcccgaccaccagggcaagggtctgggcagcgccgtcgtgctccccggagtggaggcggccgagcgcgccggggtgcccgccttcctggagacctccgcgccccgcaacctccccttctacgagcggctcggcttcaccgtcaccgccgacgtcgaggtgcccgaaggaccgcgcacctggtgcatgacccgcaagcccggtgcctga

SEQ ID NO: 4098 - DNA, 2301 bp, Artificial Sequence
  Synthetic Polynucloetide
atggccttaccagtgaccgccttgctcctgccgctggccttgctgctccacgccgccaggccggacatccagatgacacagagccctagcagcctgtctgccagcgtgggagacagagtgaccatcacatgcaaggccagcgaccacatcaacaactggctggcctggtatcagcagaagcctggacaggcccctaagctgctgatctacggcgctaccacactggaaacaggcgtgcccagcagattttctggcagcggctctggcaccgactacaccctgacaatatccagcctccagcctgaggacttcgccacctactactgtcagcagagctggaacaccccttggacattcggccagggcaccaagctggaaatcaagagactcgagagccagcctcacaccaagcccagcgtgttcgtgatgaagaacggcaccaacgtggcctgcctcgtgaaagagttctaccccaaggacatcaggatcaacctggtgtccagcaagaagatcaccgagttcgaccccgccatcgtgatctcccccagcggcaagtacaacgccgtgaagctggggaagtacgaggacagcaacagcgtgacctgctccgtgcagcacgacaacaagaccgtgcacagcaccgactttgaagtgaaaaccgactccaccgaccacgtgaagcccaaagagacagagaacaccaagcagcccagcaagagctgccacaagcccaaggccatcgtgcacaccgagaaagtgaacatgatgagcctgaccgtgctgggcctgcggatgctgttcgccaaaaccgtggccgtgaacttcctgctgaccgccaagctgttcttcctcagggccaagcgatctggatctggagcaacaaacttctcactactcaaacaagcaggtgacgtggaggagaatcccgggcctactagtatggactggatttggcgcatccttttccttgtcggcgctgctaccggcgcccattccgggccccaggttcagctgcaagagtctggcggaggacttgctcaagctggcggaagcctgagactgtcttgtgccgcctctggcagaaccttcagcatgggctggtttagacaggcccctggcaaagagagagagttcgtcgccgccatcacatacagcggcggcagcccttactacgcctcttctgtcagaggccggttcaccatcagccgggacaacgccaagaacaccgtgtacctccagatgaacagcctgaagccagaggacaccgccgtgtactactgtgccgccaatccaacctacggcagcgactggaatgccgagaattggggccagggcacccaagtgacagtgtctagtggatccggcggcggaggatctggcggaggcggatctgggggcggaggctctttcgaacaagttcagcttcaacagcctggcgctgagctggtcaaacctggcgcttctgtgaagatgagctgcaaagccagcggctacgccttcagcagctactggatcaactggatgaagcagaaacccggccagggactcgaatggatcggccaaatctatcccggcgacggcgacaccaactacaacggcaagttcaagggcagagccacactgaccgccgatacctctagcagcacagcctacatgcagctgagcagcctgaccagcgaagatagcgccgtgtacttctgtgcccggtccatcacaacagtcgtgggctgcgctatggactattggggccagggaacaagcgtgaccgtgtctagtacgcgtgacaagcagctggacgccgacgtgtcccccaagcctaccatcttcctgccctctatcgccgagacaaagctccagaaggccggcacctacctgtgcctgctggaaaagttcttcccagatgtgattaagatccactggcaggaaaagaagtccaacaccatcctgggcagccaggaaggcaacaccatgaagaccaacgacacctacatgaagttcagctggctgaccgtgcccgagaagtccctggacaaagaacacagatgcatcgtgcggcacgaaaacaacaagaacggcgtggaccaggaaatcatcttcccacccatcaagaccgatgtgattacaatggaccccaaggacaactgctccaaggacgccaacgataccctgctgctccagctgaccaacaccagcgcctactacatgtacttgttgctgctgctgaagtccgtggtgtacttcgccatcatcacatgctgcctgctgcggagaaccgccttctgctgcaacggcgagaagtct

SEQ ID NO: 4099 - DNA, 3510 bp, Artificial Sequence
  Synthetic Polynucloetide
atggccttaccagtgaccgccttgctcctgccgctggccttgctgctccacgccgccaggccggacatccagatgacacagagccctagcagcctgtctgccagcgtgggagacagagtgaccatcacatgcaaggccagcgaccacatcaacaactggctggcctggtatcagcagaagcctggacaggcccctaagctgctgatctacggcgctaccacactggaaacaggcgtgcccagcagattttctggcagcggctctggcaccgactacaccctgacaatatccagcctccagcctgaggacttcgccacctactactgtcagcagagctggaacaccccttggacattcggccagggcaccaagctggaaatcaagagaggacagcctaaggccaatcctaccgtgacactgttccctccaagcagcgaagaactccaggccaacaaggccacacttgtgtgcctgatctccgacttctaccctggggctgtgacagtggcttggaaggccgatggatctcctgtgaaagccggcgtggaaaccaccaagccatccaagcagagcaacaacaaatacgccgccagctcctacctgagcctgacacctgagcagtggaagtcccacagatcctacagctgccaagtgacccacgaaggcagcaccgtggaaaagacagtggcccctacagagtgcagcggatcccagagcttcggcctgctggaccccaagctgtgctacctgctggatggcatcctgttcatctacggcgtgatcctgaccgccctgttcctgagagtgaagttcagcagaagcgccgacgcccctgcctaccagcagggacagaaccaactgtacaacgagctgaacctgggcagacgggaagagtacgacgtgctggacaagcggagaggcagggaccctgagatgggcggaaagccccagcggagaaagaacccccaggaaggactgtataacgaactccagaaagacaagatggccgaagcctacagcgagatcggcatgaagggcgagcggagaagaggcaagggccacgatggcctgtaccagggcctgagcaccgccaccaaggacacctatgacgccctgcacatgcaggccctgcctccaagaagggccaagcgatctggatctggagcaacaaacttctcactactcaaacaagcaggtgacgtggaggagaatcccgggcctactagtatggactggatttggcgcatccttttccttgtcggcgctgctaccggcgcccattccgggccccaggttcagctgcaagagtctggcggaggacttgctcaagctggcggaagcctgagactgtcttgtgccgcctctggcagaaccttcagcatgggctggtttagacaggcccctggcaaagagagagagttcgtcgccgccatcacatacagcggcggcagcccttactacgcctcttctgtcagaggccggttcaccatcagccgggacaacgccaagaacaccgtgtacctccagatgaacagcctgaagccagaggacaccgccgtgtactactgtgccgccaatccaacctacggcagcgactggaatgccgagaattggggccagggcacccaagtgacagtgtctagtggatccggcggcggaggatctggcggaggcggatctgggggcggaggctctttcgaacaagttcagcttcaacagcctggcgctgagctggtcaaacctggcgcttctgtgaagatgagctgcaaagccagcggctacgccttcagcagctactggatcaactggatgaagcagaaacccggccagggactcgaatggatcggccaaatctatcccggcgacggcgacaccaactacaacggcaagttcaagggcagagccacactgaccgccgatacctctagcagcacagcctacatgcagctgagcagcctgaccagcgaagatagcgccgtgtacttctgtgcccggtccatcacaacagtcgtgggctgcgctatggactattggggccagggaacaagcgtgaccgtgtctagtgcctctacaaagggaccctccgtgtttcctctggctcccagcagcaagtctacaagcggaggaacagccgctctgggctgcctggtcaaggattactttcccgagcctgtgaccgtgtcctggaatagcggagcactgacaagcggcgtgcacacctttccagccgtgctgcaaagcagcggcctgtactctctgagcagcgtggtcacagtgcctagctctagcctgggcacccagacctacatctgcaatgtgaaccacaagcctagcaacaccaaggtggacaagagagtggaacccaagagctgtggtacccagagttttgggttgttggaccctaaattgtgctatctgttggacggaatcctgttcatttacggagtgatcctgaccgcattgttcctgcgggttaagttttccagatccgcagacgcacccgcttaccaacaagggcagaaccaactctacaatgaacttaatttggggcggagggaagagtacgacgttctggacaaaaggaggggacgagatcccgagatgggcggaaagcctcagcgaaggaagaatccgcaagaggggctttataacgaactccagaaagataaaatggcagaagcctatagtgagattgggatgaagggagaaaggaggaggggtaaaggtcacgatgggttgtaccaaggattgagcacagccactaaagatacctatgatgcgctccacatgcaggccctgccgccaagacgcgccaagagaagcggatctggcgtgaagcagaccctgaatttcgacctgctgaagctggctggcgacgtggaatccaacccaggcccttctagaggccatatgaccgagtacaagcccacggtgcgcctcgccacccgcgacgacgtccccagggccgtacgcaccctcgccgccgcgttcgccgactaccccgccacgcgccacaccgtcgatccggaccgccacatcgagcgggtcaccgagctgcaagaactcttcctcacgcgcgtcgggctcgacatcggcaaggtgtgggtcgcggacgacggcgccgcggtggcggtctggaccacgccggagagcgtcgaagcgggggcggtgttcgccgagatcggcccgcgcatggccgagttgagcggttcccggctggccgcgcagcaacagatggaaggcctcctggcgccgcaccggcccaaggagcccgcgtggttcctggccaccgtcggcgtctcgcccgaccaccagggcaagggtctgggcagcgccgtcgtgctccccggagtggaggcggccgagcgcgccggggtgcccgccttcctggagacctccgcgccccgcaacctccccttctacgagcggctcggcttcaccgtcaccgccgacgtcgaggtgcccgaaggaccgcgcacctggtgcatgacccgcaagcccggtgcctga

SEQ ID NO: 4100 - DNA, 2865 bp, Artificial Sequence
  Synthetic Polynucloetide
atggccttaccagtgaccgccttgctcctgccgctggccttgctgctccacgccgccaggccggacatccagatgacacagagccctagcagcctgtctgccagcgtgggagacagagtgaccatcacatgcaaggccagcgaccacatcaacaactggctggcctggtatcagcagaagcctggacaggcccctaagctgctgatctacggcgctaccacactggaaacaggcgtgcccagcagattttctggcagcggctctggcaccgactacaccctgacaatatccagcctccagcctgaggacttcgccacctactactgtcagcagagctggaacaccccttggacattcggccagggcaccaagctggaaatcaagagactcgaggacctgaagaacgtgttcccacctgaggtggccgtgttcgagcctagcgaggccgagatcagccacacccagaaagccaccctcgtgtgcctggctaccggcttctaccccgaccatgtggaactgtcttggtgggtcaacggcaaagaggtgcacagcggcgtgtctaccgacccccagccactgaaagaacagcccgccctgaacgacagccggtactgcctgagcagcagactgagagtgtccgccaccttctggcagaacccccggaaccacttcagatgccaggtgcagttctacggcctgagcgagaacgacgagtggacccaggacagagccaagcccgtgacccagatcgtgtctgccgaagcctggggcagagccgattgcggatcccagagcttcggcctgctggaccccaagctgtgctacctgctggatggcatcctgttcatctacggcgtgatcctgaccgccctgttcctgagagtgaagttcagcagaagcgccgacgcccctgcctaccagcagggacagaaccaactgtacaacgagctgaacctgggcagacgggaagagtacgacgtgctggacaagcggagaggcagggaccctgagatgggcggaaagccccagcggagaaagaacccccaggaaggactgtataacgaactccagaaagacaagatggccgaagcctacagcgagatcggcatgaagggcgagcggagaagaggcaagggccacgatggcctgtaccagggcctgagcaccgccaccaaggacacctatgacgccctgcacatgcaggccctgcctccaagaagggccaagcgatctggatctggagcaacaaacttctcactactcaaacaagcaggtgacgtggaggagaatcccgggcctactagtatggactggatttggcgcatccttttccttgtcggcgctgctaccggcgcccattccgggccccaggttcagctgcaagagtctggcggaggacttgctcaagctggcggaagcctgagactgtcttgtgccgcctctggcagaaccttcagcatgggctggtttagacaggcccctggcaaagagagagagttcgtcgccgccatcacatacagcggcggcagcccttactacgcctcttctgtcagaggccggttcaccatcagccgggacaacgccaagaacaccgtgtacctccagatgaacagcctgaagccagaggacaccgccgtgtactactgtgccgccaatccaacctacggcagcgactggaatgccgagaattggggccagggcacccaagtgacagtgtctagtggatccggcggcggaggatctggcggaggcggatctgggggcggaggctctttcgaacaagttcagcttcaacagcctggcgctgagctggtcaaacctggcgcttctgtgaagatgagctgcaaagccagcggctacgccttcagcagctactggatcaactggatgaagcagaaacccggccagggactcgaatggatcggccaaatctatcccggcgacggcgacaccaactacaacggcaagttcaagggcagagccacactgaccgccgatacctctagcagcacagcctacatgcagctgagcagcctgaccagcgaagatagcgccgtgtacttctgtgcccggtccatcacaacagtcgtgggctgcgctatggactattggggccagggaacaagcgtgaccgtgtctagtacgcgtatccagaaccctgatcctgccgtgtaccagctgcgggatagcaagagcagcgacaagagcgtgtgtctgttcaccgacttcgacagccagaccaacgtgtcccagagcaaggactccgacgtgtacatcaccgataagaccgtgctggacatgcggagcatggacttcaagagcaactccgccgtggcctggtccaacaagtccgatttcgcctgcgccaacgccttcaacaacagcattatccccgaggacacattcttcccaagccccgagagcagctgcggtacccagagttttgggttgttggaccctaaattgtgctatctgttggacggaatcctgttcatttacggagtgatcctgaccgcattgttcctgcgggttaagttttccagatccgcagacgcacccgcttaccaacaagggcagaaccaactctacaatgaacttaatttggggcggagggaagagtacgacgttctggacaaaaggaggggacgagatcccgagatgggcggaaagcctcagcgaaggaagaatccgcaagaggggctttataacgaactccagaaagataaaatggcagaagcctatagtgagattgggatgaagggagaaaggaggaggggtaaaggtcacgatgggttgtaccaaggattgagcacagccactaaagatacctatgatgcgctccacatgcaggccctgccgccaaga

SEQ ID NO: 4101 - DNA, 2865 bp, Artificial Sequence
  Synthetic Polynucloetide
atggccttaccagtgaccgccttgctcctgccgctggccttgctgctccacgccgccaggccggacatccagatgacacagagccctagcagcctgtctgccagcgtgggagacagagtgaccatcacatgcaaggccagcgaccacatcaacaactggctggcctggtatcagcagaagcctggacaggcccctaagctgctgatctacggcgctaccacactggaaacaggcgtgcccagcagattttctggcagcggctctggcaccgactacaccctgacaatatccagcctccagcctgaggacttcgccacctactactgtcagcagagctggaacaccccttggacattcggccagggcaccaagctggaaatcaagagactcgaggacctgaagaacgtgttcccacctgaggtggccgtgttcgagcctagcaaggccgagatcgcccacacccagaaagccaccctcgtgtgcctggctaccggcttctaccccgaccatgtggaactgtcttggtgggtcaacggcaaagaggtgcacagcggcgtgtgtaccgacccccagccactgaaagaacagcccgccctgaacgacagccggtactgcctgagcagcagactgagagtgtccgccaccttctggcagaacccccggaaccacttcagatgccaggtgcagttctacggcctgagcgagaacgacgagtggacccaggacagagccaagcccgtgacccagatcgtgtctgccgaagcctggggcagagccgattgcggatcccagagcttcggcctgctggaccccaagctgtgctacctgctggatggcatcctgttcatctacggcgtgatcctgaccgccctgttcctgagagtgaagttcagcagaagcgccgacgcccctgcctaccagcagggacagaaccaactgtacaacgagctgaacctgggcagacgggaagagtacgacgtgctggacaagcggagaggcagggaccctgagatgggcggaaagccccagcggagaaagaacccccaggaaggactgtataacgaactccagaaagacaagatggccgaagcctacagcgagatcggcatgaagggcgagcggagaagaggcaagggccacgatggcctgtaccagggcctgagcaccgccaccaaggacacctatgacgccctgcacatgcaggccctgcctccaagaagggccaagcgatctggatctggagcaacaaacttctcactactcaaacaagcaggtgacgtggaggagaatcccgggcctactagtatggactggatttggcgcatccttttccttgtcggcgctgctaccggcgcccattccgggccccaggttcagctgcaagagtctggcggaggacttgctcaagctggcggaagcctgagactgtcttgtgccgcctctggcagaaccttcagcatgggctggtttagacaggcccctggcaaagagagagagttcgtcgccgccatcacatacagcggcggcagcccttactacgcctcttctgtcagaggccggttcaccatcagccgggacaacgccaagaacaccgtgtacctccagatgaacagcctgaagccagaggacaccgccgtgtactactgtgccgccaatccaacctacggcagcgactggaatgccgagaattggggccagggcacccaagtgacagtgtctagtggatccggcggcggaggatctggcggaggcggatctgggggcggaggctctttcgaacaagttcagcttcaacagcctggcgctgagctggtcaaacctggcgcttctgtgaagatgagctgcaaagccagcggctacgccttcagcagctactggatcaactggatgaagcagaaacccggccagggactcgaatggatcggccaaatctatcccggcgacggcgacaccaactacaacggcaagttcaagggcagagccacactgaccgccgatacctctagcagcacagcctacatgcagctgagcagcctgaccagcgaagatagcgccgtgtacttctgtgcccggtccatcacaacagtcgtgggctgcgctatggactattggggccagggaacaagcgtgaccgtgtctagtacgcgtatccagaaccctgatcctgccgtgtaccagctgcgggatagcaagagcagcgacaagagcgtgtgtctgttcaccgacttcgacagccagaccaacgtgtcccagagcaaggactccgacgtgtacatcaccgataagtgcgtgctggacatgcggagcatggacttcaagagcaactccgccgtggcctggtccaacaagtccgatttcgcctgcgccaacgccttcaacaacagcattatccccgaggacacattcttcccaagcagcgacgtgccctgcggtacccagagttttgggttgttggaccctaaattgtgctatctgttggacggaatcctgttcatttacggagtgatcctgaccgcattgttcctgcgggttaagttttccagatccgcagacgcacccgcttaccaacaagggcagaaccaactctacaatgaacttaatttggggcggagggaagagtacgacgttctggacaaaaggaggggacgagatcccgagatgggcggaaagcctcagcgaaggaagaatccgcaagaggggctttataacgaactccagaaagataaaatggcagaagcctatagtgagattgggatgaagggagaaaggaggaggggtaaaggtcacgatgggttgtaccaaggattgagcacagccactaaagatacctatgatgcgctccacatgcaggccctgccgccaaga

SEQ ID NO: 4102 - DNA, 3078 bp, Artificial Sequence
  Synthetic Polynucloetide
atggccttaccagtgaccgccttgctcctgccgctggccttgctgctccacgccgccaggccggacatccagatgacacagagccctagcagcctgtctgccagcgtgggagacagagtgaccatcacatgcaaggccagcgaccacatcaacaactggctggcctggtatcagcagaagcctggacaggcccctaagctgctgatctacggcgctaccacactggaaacaggcgtgcccagcagattttctggcagcggctctggcaccgactacaccctgacaatatccagcctccagcctgaggacttcgccacctactactgtcagcagagctggaacaccccttggacattcggccagggcaccaagctggaaatcaagagactcgaggggaaaccaattcccaaccctcttctgggactggattcaaccggcagcggcgaggacctgaagaacgtgttcccacctgaggtggccgtgttcgagcctagcgaggccgagatcagccacacccagaaagccaccctcgtgtgcctggctaccggcttctaccccgaccatgtggaactgtcttggtgggtcaacggcaaagaggtgcacagcggcgtgtctaccgacccccagccactgaaagaacagcccgccctgaacgacagccggtactgcctgagcagcagactgagagtgtccgccaccttctggcagaacccccggaaccacttcagatgccaggtgcagttctacggcctgagcgagaacgacgagtggacccaggacagagccaagcccgtgacccagatcgtgtctgccgaagcctggggcagagccgattgcggatcccagagcttcggcctgctggaccccaagctgtgctacctgctggatggcatcctgttcatctacggcgtgatcctgaccgccctgttcctgagagtgaagttcagcagaagcgccgacgcccctgcctaccagcagggacagaaccaactgtacaacgagctgaacctgggcagacgggaagagtacgacgtgctggacaagcggagaggcagggaccctgagatgggcggaaagccccagcggagaaagaacccccaggaaggactgtataacgaactccagaaagacaagatggccgaagcctacagcgagatcggcatgaagggcgagcggagaagaggcaagggccacgatggcctgtaccagggcctgagcaccgccaccaaggacacctatgacgccctgcacatgcaggccctgcctccaagaagggccaagcgatctggatctggagcaacaaacttctcactactcaaacaagcaggtgacgtggaggagaatcccgggcctactagtatggactggatttggcgcatccttttccttgtcggcgctgctaccggcgcccattccgggccccaggttcagctgcaagagtctggcggaggacttgctcaagctggcggaagcctgagactgtcttgtgccgcctctggcagaaccttcagcatgggctggtttagacaggcccctggcaaagagagagagttcgtcgccgccatcacatacagcggcggcagcccttactacgcctcttctgtcagaggccggttcaccatcagccgggacaacgccaagaacaccgtgtacctccagatgaacagcctgaagccagaggacaccgccgtgtactactgtgccgccaatccaacctacggcagcgactggaatgccgagaattggggccagggcacccaagtgacagtgtctagtggatccggcggcggaggatctggcggaggcggatctgggggcggaggctctttcgaacaagttcagcttcaacagcctggcgctgagctggtcaaacctggcgcttctgtgaagatgagctgcaaagccagcggctacgccttcagcagctactggatcaactggatgaagcagaaacccggccagggactcgaatggatcggccaaatctatcccggcgacggcgacaccaactacaacggcaagttcaagggcagagccacactgaccgccgatacctctagcagcacagcctacatgcagctgagcagcctgaccagcgaagatagcgccgtgtacttctgtgcccggtccatcacaacagtcgtgggctgcgctatggactattggggccagggaacaagcgtgaccgtgtctagtacgcgtgagcagaaactgatctcggaagaggatgggagcggcatccagaaccctgatcctgccgtgtaccagctgcgggatagcaagagcagcgacaagagcgtgtgtctgttcaccgacttcgacagccagaccaacgtgtcccagagcaaggactccgacgtgtacatcaccgataagaccgtgctggacatgcggagcatggacttcaagagcaactccgccgtggcctggtccaacaagtccgatttcgcctgcgccaacgccttcaacaacagcattatccccgaggacacattcttcccaagccccgagagcagctgcggtacccagagttttgggttgttggaccctaaattgtgctatctgttggacggaatcctgttcatttacggagtgatcctgaccgcattgttcctgaggagcaagcggtcacggctgctccacagcgattacatgaatatgacaccacgaagaccgggtcctactcgcaaacactaccaaccctacgcacctccccgcgactttgcagcgtaccgatctcgggttaagttttccagatccgcagacgcacccgcttaccaacaagggcagaaccaactctacaatgaacttaatttggggcggagggaagagtacgacgttctggacaaaaggaggggacgagatcccgagatgggcggaaagcctcagcgaaggaagaatccgcaagaggggctttataacgaactccagaaagataaaatggcagaagcctatagtgagattgggatgaagggagaaaggaggaggggtaaaggtcacgatgggttgtaccaaggattgagcacagccactaaagatacctatgatgcgctccacatgcaggccctgccgccaaga

SEQ ID NO: 4103 - DNA, 3201 bp, Artificial Sequence
  Synthetic Polynucloetide
atggccttaccagtgaccgccttgctcctgccgctggccttgctgctccacgccgccaggccggacatccagatgacacagagccctagcagcctgtctgccagcgtgggagacagagtgaccatcacatgcaaggccagcgaccacatcaacaactggctggcctggtatcagcagaagcctggacaggcccctaagctgctgatctacggcgctaccacactggaaacaggcgtgcccagcagattttctggcagcggctctggcaccgactacaccctgacaatatccagcctccagcctgaggacttcgccacctactactgtcagcagagctggaacaccccttggacattcggccagggcaccaagctggaaatcaagagactcgaggggaaaccaattcccaaccctcttctgggactggattcaaccggcagcggcgaggacctgaagaacgtgttcccacctgaggtggccgtgttcgagcctagcgaggccgagatcagccacacccagaaagccaccctcgtgtgcctggctaccggcttctaccccgaccatgtggaactgtcttggtgggtcaacggcaaagaggtgcacagcggcgtgtctaccgacccccagccactgaaagaacagcccgccctgaacgacagccggtactgcctgagcagcagactgagagtgtccgccaccttctggcagaacccccggaaccacttcagatgccaggtgcagttctacggcctgagcgagaacgacgagtggacccaggacagagccaagcccgtgacccagatcgtgtctgccgaagcctggggcagagccgattgcggatcccagagcttcggcctgctggaccccaagctgtgctacctgctggatggcatcctgttcatctacggcgtgatcctgaccgccctgttcctgaggagtaagaggagcaggctcctgcacagtgactacatgaacatgactccacgccgccccggacccacccgcaagcattaccagccctatgccccaccacgcgacttcgcagcctatcgctccagagtgaagttcagcagaagcgccgacgcccctgcctaccagcagggacagaaccaactgtacaacgagctgaacctgggcagacgggaagagtacgacgtgctggacaagcggagaggcagggaccctgagatgggcggaaagccccagcggagaaagaacccccaggaaggactgtataacgaactccagaaagacaagatggccgaagcctacagcgagatcggcatgaagggcgagcggagaagaggcaagggccacgatggcctgtaccagggcctgagcaccgccaccaaggacacctatgacgccctgcacatgcaggccctgcctccaagaagggccaagcgatctggatctggagcaacaaacttctcactactcaaacaagcaggtgacgtggaggagaatcccgggcctactagtatggactggatttggcgcatccttttccttgtcggcgctgctaccggcgcccattccgggccccaggttcagctgcaagagtctggcggaggacttgctcaagctggcggaagcctgagactgtcttgtgccgcctctggcagaaccttcagcatgggctggtttagacaggcccctggcaaagagagagagttcgtcgccgccatcacatacagcggcggcagcccttactacgcctcttctgtcagaggccggttcaccatcagccgggacaacgccaagaacaccgtgtacctccagatgaacagcctgaagccagaggacaccgccgtgtactactgtgccgccaatccaacctacggcagcgactggaatgccgagaattggggccagggcacccaagtgacagtgtctagtggatccggcggcggaggatctggcggaggcggatctgggggcggaggctctttcgaacaagttcagcttcaacagcctggcgctgagctggtcaaacctggcgcttctgtgaagatgagctgcaaagccagcggctacgccttcagcagctactggatcaactggatgaagcagaaacccggccagggactcgaatggatcggccaaatctatcccggcgacggcgacaccaactacaacggcaagttcaagggcagagccacactgaccgccgatacctctagcagcacagcctacatgcagctgagcagcctgaccagcgaagatagcgccgtgtacttctgtgcccggtccatcacaacagtcgtgggctgcgctatggactattggggccagggaacaagcgtgaccgtgtctagtacgcgtgagcagaaactgatctcggaagaggatgggagcggcatccagaaccctgatcctgccgtgtaccagctgcgggatagcaagagcagcgacaagagcgtgtgtctgttcaccgacttcgacagccagaccaacgtgtcccagagcaaggactccgacgtgtacatcaccgataagaccgtgctggacatgcggagcatggacttcaagagcaactccgccgtggcctggtccaacaagtccgatttcgcctgcgccaacgccttcaacaacagcattatccccgaggacacattcttcccaagccccgagagcagctgcggtacccagagttttgggttgttggaccctaaattgtgctatctgttggacggaatcctgttcatttacggagtgatcctgaccgcattgttcctgaggagcaagcggtcacggctgctccacagcgattacatgaatatgacaccacgaagaccgggtcctactcgcaaacactaccaaccctacgcacctccccgcgactttgcagcgtaccgatctcgggttaagttttccagatccgcagacgcacccgcttaccaacaagggcagaaccaactctacaatgaacttaatttggggcggagggaagagtacgacgttctggacaaaaggaggggacgagatcccgagatgggcggaaagcctcagcgaaggaagaatccgcaagaggggctttataacgaactccagaaagataaaatggcagaagcctatagtgagattgggatgaagggagaaaggaggaggggtaaaggtcacgatgggttgtaccaaggattgagcacagccactaaagatacctatgatgcgctccacatgcaggccctgccgccaaga

SEQ ID NO: 4104 - DNA, 3084 bp, Artificial Sequence
  Synthetic Polynucloetide
atggccttaccagtgaccgccttgctcctgccgctggccttgctgctccacgccgccaggccggacatccagatgacacagagccctagcagcctgtctgccagcgtgggagacagagtgaccatcacatgcaaggccagcgaccacatcaacaactggctggcctggtatcagcagaagcctggacaggcccctaagctgctgatctacggcgctaccacactggaaacaggcgtgcccagcagattttctggcagcggctctggcaccgactacaccctgacaatatccagcctccagcctgaggacttcgccacctactactgtcagcagagctggaacaccccttggacattcggccagggcaccaagctggaaatcaagagactcgaggggaaaccaattcccaaccctcttctgggactggattcaaccggcagcggcgaggacctgaagaacgtgttcccacctgaggtggccgtgttcgagcctagcgaggccgagatcagccacacccagaaagccaccctcgtgtgcctggctaccggcttctaccccgaccatgtggaactgtcttggtgggtcaacggcaaagaggtgcacagcggcgtgtctaccgacccccagccactgaaagaacagcccgccctgaacgacagccggtactgcctgagcagcagactgagagtgtccgccaccttctggcagaacccccggaaccacttcagatgccaggtgcagttctacggcctgagcgagaacgacgagtggacccaggacagagccaagcccgtgacccagatcgtgtctgccgaagcctggggcagagccgattgcggatcccagagcttcggcctgctggaccccaagctgtgctacctgctggatggcatcctgttcatctacggcgtgatcctgaccgccctgttcctgagagtgaagttcagcagaagcgccgacgcccctgcctaccagcagggacagaaccaactgtacaacgagctgaacctgggcagacgggaagagtacgacgtgctggacaagcggagaggcagggaccctgagatgggcggaaagccccagcggagaaagaacccccaggaaggactgtataacgaactccagaaagacaagatggccgaagcctacagcgagatcggcatgaagggcgagcggagaagaggcaagggccacgatggcctgtaccagggcctgagcaccgccaccaaggacacctatgacgccctgcacatgcaggccctgcctccaagaagggccaagcgatctggatctggagcaacaaacttctcactactcaaacaagcaggtgacgtggaggagaatcccgggcctactagtatggactggatttggcgcatccttttccttgtcggcgctgctaccggcgcccattccgggccccaggttcagctgcaagagtctggcggaggacttgctcaagctggcggaagcctgagactgtcttgtgccgcctctggcagaaccttcagcatgggctggtttagacaggcccctggcaaagagagagagttcgtcgccgccatcacatacagcggcggcagcccttactacgcctcttctgtcagaggccggttcaccatcagccgggacaacgccaagaacaccgtgtacctccagatgaacagcctgaagccagaggacaccgccgtgtactactgtgccgccaatccaacctacggcagcgactggaatgccgagaattggggccagggcacccaagtgacagtgtctagtggatccggcggcggaggatctggcggaggcggatctgggggcggaggctctttcgaacaagttcagcttcaacagcctggcgctgagctggtcaaacctggcgcttctgtgaagatgagctgcaaagccagcggctacgccttcagcagctactggatcaactggatgaagcagaaacccggccagggactcgaatggatcggccaaatctatcccggcgacggcgacaccaactacaacggcaagttcaagggcagagccacactgaccgccgatacctctagcagcacagcctacatgcagctgagcagcctgaccagcgaagatagcgccgtgtacttctgtgcccggtccatcacaacagtcgtgggctgcgctatggactattggggccagggaacaagcgtgaccgtgtctagtacgcgtgagcagaaactgatctcggaagaggatctggggagcggcatccagaaccctgatcctgccgtgtaccagctgcgggatagcaagagcagcgacaagagcgtgtgtctgttcaccgacttcgacagccagaccaacgtgtcccagagcaaggactccgacgtgtacatcaccgataagaccgtgctggacatgcggagcatggacttcaagagcaactccgccgtggcctggtccaacaagtccgatttcgcctgcgccaacgccttcaacaacagcattatccccgaggacacattcttcccaagccccgagagcagctgcggtacccagagttttgggttgttggaccctaaattgtgctatctgttggacggaatcctgttcatttacggagtgatcctgaccgcattgttcctgaagagaggccggaagaagctgctgtacatcttcaagcagcctttcatgcggcccgtgcagaccacccaggaagaggacggctgctcctgccggttccccgaggaagaagaaggcggctgcgagctgcgggttaagttttccagatccgcagacgcacccgcttaccaacaagggcagaaccaactctacaatgaacttaatttggggcggagggaagagtacgacgttctggacaaaaggaggggacgagatcccgagatgggcggaaagcctcagcgaaggaagaatccgcaagaggggctttataacgaactccagaaagataaaatggcagaagcctatagtgagattgggatgaagggagaaaggaggaggggtaaaggtcacgatgggttgtaccaaggattgagcacagccactaaagatacctatgatgcgctccacatgcaggccctgccgccaaga

SEQ ID NO: 4105 - DNA, 3210 bp, Artificial Sequence
  Synthetic Polynucloetide
atggccttaccagtgaccgccttgctcctgccgctggccttgctgctccacgccgccaggccggacatccagatgacacagagccctagcagcctgtctgccagcgtgggagacagagtgaccatcacatgcaaggccagcgaccacatcaacaactggctggcctggtatcagcagaagcctggacaggcccctaagctgctgatctacggcgctaccacactggaaacaggcgtgcccagcagattttctggcagcggctctggcaccgactacaccctgacaatatccagcctccagcctgaggacttcgccacctactactgtcagcagagctggaacaccccttggacattcggccagggcaccaagctggaaatcaagagactcgaggggaaaccaattcccaaccctcttctgggactggattcaaccggcagcggcgaggacctgaagaacgtgttcccacctgaggtggccgtgttcgagcctagcgaggccgagatcagccacacccagaaagccaccctcgtgtgcctggctaccggcttctaccccgaccatgtggaactgtcttggtgggtcaacggcaaagaggtgcacagcggcgtgtctaccgacccccagccactgaaagaacagcccgccctgaacgacagccggtactgcctgagcagcagactgagagtgtccgccaccttctggcagaacccccggaaccacttcagatgccaggtgcagttctacggcctgagcgagaacgacgagtggacccaggacagagccaagcccgtgacccagatcgtgtctgccgaagcctggggcagagccgattgcggatcccagagcttcggcctgctggaccccaagctgtgctacctgctggatggcatcctgttcatctacggcgtgatcctgaccgccctgttcctgaaacggggcagaaagaaactcctgtatatattcaaacaaccatttatgagaccagtacaaactactcaagaggaagatggctgtagctgccgatttccagaagaagaagaaggaggatgtgaactgagagtgaagttcagcagaagcgccgacgcccctgcctaccagcagggacagaaccaactgtacaacgagctgaacctgggcagacgggaagagtacgacgtgctggacaagcggagaggcagggaccctgagatgggcggaaagccccagcggagaaagaacccccaggaaggactgtataacgaactccagaaagacaagatggccgaagcctacagcgagatcggcatgaagggcgagcggagaagaggcaagggccacgatggcctgtaccagggcctgagcaccgccaccaaggacacctatgacgccctgcacatgcaggccctgcctccaagaagggccaagcgatctggatctggagcaacaaacttctcactactcaaacaagcaggtgacgtggaggagaatcccgggcctactagtatggactggatttggcgcatccttttccttgtcggcgctgctaccggcgcccattccgggccccaggttcagctgcaagagtctggcggaggacttgctcaagctggcggaagcctgagactgtcttgtgccgcctctggcagaaccttcagcatgggctggtttagacaggcccctggcaaagagagagagttcgtcgccgccatcacatacagcggcggcagcccttactacgcctcttctgtcagaggccggttcaccatcagccgggacaacgccaagaacaccgtgtacctccagatgaacagcctgaagccagaggacaccgccgtgtactactgtgccgccaatccaacctacggcagcgactggaatgccgagaattggggccagggcacccaagtgacagtgtctagtggatccggcggcggaggatctggcggaggcggatctgggggcggaggctctttcgaacaagttcagcttcaacagcctggcgctgagctggtcaaacctggcgcttctgtgaagatgagctgcaaagccagcggctacgccttcagcagctactggatcaactggatgaagcagaaacccggccagggactcgaatggatcggccaaatctatcccggcgacggcgacaccaactacaacggcaagttcaagggcagagccacactgaccgccgatacctctagcagcacagcctacatgcagctgagcagcctgaccagcgaagatagcgccgtgtacttctgtgcccggtccatcacaacagtcgtgggctgcgctatggactattggggccagggaacaagcgtgaccgtgtctagtacgcgtgagcagaaactgatctcggaagaggatctggggagcggcatccagaaccctgatcctgccgtgtaccagctgcgggatagcaagagcagcgacaagagcgtgtgtctgttcaccgacttcgacagccagaccaacgtgtcccagagcaaggactccgacgtgtacatcaccgataagaccgtgctggacatgcggagcatggacttcaagagcaactccgccgtggcctggtccaacaagtccgatttcgcctgcgccaacgccttcaacaacagcattatccccgaggacacattcttcccaagccccgagagcagctgcggtacccagagttttgggttgttggaccctaaattgtgctatctgttggacggaatcctgttcatttacggagtgatcctgaccgcattgttcctgaagagaggccggaagaagctgctgtacatcttcaagcagcctttcatgcggcccgtgcagaccacccaggaagaggacggctgctcctgccggttccccgaggaagaagaaggcggctgcgagctgcgggttaagttttccagatccgcagacgcacccgcttaccaacaagggcagaaccaactctacaatgaacttaatttggggcggagggaagagtacgacgttctggacaaaaggaggggacgagatcccgagatgggcggaaagcctcagcgaaggaagaatccgcaagaggggctttataacgaactccagaaagataaaatggcagaagcctatagtgagattgggatgaagggagaaaggaggaggggtaaaggtcacgatgggttgtaccaaggattgagcacagccactaaagatacctatgatgcgctccacatgcaggccctgccgccaaga

SEQ ID NO: 4106 - DNA, 2883 bp, Artificial Sequence
  Synthetic Polynucloetide
atggccttaccagtgaccgccttgctcctgccgctggccttgctgctccacgccgccaggccggacatccagatgacacagagccctagcagcctgtctgccagcgtgggagacagagtgaccatcacatgcaaggccagcgaccacatcaacaactggctggcctggtatcagcagaagcctggacaggcccctaagctgctgatctacggcgctaccacactggaaacaggcgtgcccagcagattttctggcagcggctctggcaccgactacaccctgacaatatccagcctccagcctgaggacttcgccacctactactgtcagcagagctggaacaccccttggacattcggccagggcaccaagctggaaatcaagagactcgagcagagcttcggcctgctggaccccaagctgtgctacctgctggatggcatcctgttcatctacggcgtgatcctgaccgccctgttcctgagagtgaagttcagcagaagcgccgacgcccctgcctaccagcagggacagaaccaactgtacaacgagctgaacctgggcagacgggaagagtacgacgtgctggacaagcggagaggcagggaccctgagatgggcggaaagccccagcggagaaagaacccccaggaaggactgtataacgaactccagaaagacaagatggccgaagcctacagcgagatcggcatgaagggcgagcggagaagaggcaagggccacgatggcctgtaccagggcctgagcaccgccaccaaggacacctatgacgccctgcacatgcaggccctgcctccaagaagggccaagcgatctggatctggagcaacaaacttctcactactcaaacaagcaggtgacgtggaggagaatcccgggcctactagtatggactggatttggcgcatccttttccttgtcggcgctgctaccggcgcccattccgggccccaggttcagctgcaagagtctggcggaggacttgctcaagctggcggaagcctgagactgtcttgtgccgcctctggcagaaccttcagcatgggctggtttagacaggcccctggcaaagagagagagttcgtcgccgccatcacatacagcggcggcagcccttactacgcctcttctgtcagaggccggttcaccatcagccgggacaacgccaagaacaccgtgtacctccagatgaacagcctgaagccagaggacaccgccgtgtactactgtgccgccaatccaacctacggcagcgactggaatgccgagaattggggccagggcacccaagtgacagtgtctagtggatccggcggcggaggatctggcggaggcggatctgggggcggaggctctttcgaacaagttcagcttcaacagcctggcgctgagctggtcaaacctggcgcttctgtgaagatgagctgcaaagccagcggctacgccttcagcagctactggatcaactggatgaagcagaaacccggccagggactcgaatggatcggccaaatctatcccggcgacggcgacaccaactacaacggcaagttcaagggcagagccacactgaccgccgatacctctagcagcacagcctacatgcagctgagcagcctgaccagcgaagatagcgccgtgtacttctgtgcccggtccatcacaacagtcgtgggctgcgctatggactattggggccagggaacaagcgtgaccgtgtctagtacgcgtcagagttttgggttgttggaccctaaattgtgctatctgttggacggaatcctgttcatttacggagtgatcctgaccgcattgttcctgcgggttaagttttccagatccgcagacgcacccgcttaccaacaagggcagaaccaactctacaatgaacttaatttggggcggagggaagagtacgacgttctggacaaaaggaggggacgagatcccgagatgggcggaaagcctcagcgaaggaagaatccgcaagaggggctttataacgaactccagaaagataaaatggcagaagcctatagtgagattgggatgaagggagaaaggaggaggggtaaaggtcacgatgggttgtaccaaggattgagcacagccactaaagatacctatgatgcgctccacatgcaggccctgccgccaagacgcgccaagagaagcggatctggcgtgaagcagaccctgaatttcgacctgctgaagctggctggcgacgtggaatccaacccaggcccttctagaggccatatgaccgagtacaagcccacggtgcgcctcgccacccgcgacgacgtccccagggccgtacgcaccctcgccgccgcgttcgccgactaccccgccacgcgccacaccgtcgatccggaccgccacatcgagcgggtcaccgagctgcaagaactcttcctcacgcgcgtcgggctcgacatcggcaaggtgtgggtcgcggacgacggcgccgcggtggcggtctggaccacgccggagagcgtcgaagcgggggcggtgttcgccgagatcggcccgcgcatggccgagttgagcggttcccggctggccgcgcagcaacagatggaaggcctcctggcgccgcaccggcccaaggagcccgcgtggttcctggccaccgtcggcgtctcgcccgaccaccagggcaagggtctgggcagcgccgtcgtgctccccggagtggaggcggccgagcgcgccggggtgcccgccttcctggagacctccgcgccccgcaacctccccttctacgagcggctcggcttcaccgtcaccgccgacgtcgaggtgcccgaaggaccgcgcacctggtgcatgacccgcaagcccggtgcctga

SEQ ID NO: 4107 - DNA, 2355 bp, Artificial Sequence
  Synthetic Polynucloetide
atggccttaccagtgaccgccttgctcctgccgctggccttgctgctccacgccgccaggccggacatccagatgacacagagccctagcagcctgtctgccagcgtgggagacagagtgaccatcacatgcaaggccagcgaccacatcaacaactggctggcctggtatcagcagaagcctggacaggcccctaagctgctgatctacggcgctaccacactggaaacaggcgtgcccagcagattttctggcagcggctctggcaccgactacaccctgacaatatccagcctccagcctgaggacttcgccacctactactgtcagcagagctggaacaccccttggacattcggccagggcaccaagctggaaatcaagagactcgagggacagcctaaggccaatcctaccgtgacactgttccctccaagcagcgaagaactccaggccaacaaggccacacttgtgtgcctgatctccgacttctaccctggggctgtgacagtggcttggaaggccgatggatctcctgtgaaagccggcgtggaaaccaccaagccatccaagcagagcaacaacaaatacgccgccagctcctacctgagcctgacacctgagcagtggaagtcccacagatcctacagctgccaagtgacccacgaaggcagcaccgtggaaaagacagtggcccctacagagtgcagccccatcaagaccgatgtgattacaatggaccccaaggacaactgctccaaggacgccaacgataccctgctgctccagctgaccaacaccagcgcctactacatgtacttgttgctgctgctgaagtccgtggtgtacttcgccatcatcacatgctgcctgctgcggagaaccgccttctgctgcaacggcgagaagtctagggccaagcgatctggatctggagcaacaaacttctcactactcaaacaagcaggtgacgtggaggagaatcccgggcctactagtatggactggatttggcgcatccttttccttgtcggcgctgctaccggcgcccattccgggccccaggttcagctgcaagagtctggcggaggacttgctcaagctggcggaagcctgagactgtcttgtgccgcctctggcagaaccttcagcatgggctggtttagacaggcccctggcaaagagagagagttcgtcgccgccatcacatacagcggcggcagcccttactacgcctcttctgtcagaggccggttcaccatcagccgggacaacgccaagaacaccgtgtacctccagatgaacagcctgaagccagaggacaccgccgtgtactactgtgccgccaatccaacctacggcagcgactggaatgccgagaattggggccagggcacccaagtgacagtgtctagtggatccggcggcggaggatctggcggaggcggatctgggggcggaggctctttcgaacaagttcagcttcaacagcctggcgctgagctggtcaaacctggcgcttctgtgaagatgagctgcaaagccagcggctacgccttcagcagctactggatcaactggatgaagcagaaacccggccagggactcgaatggatcggccaaatctatcccggcgacggcgacaccaactacaacggcaagttcaagggcagagccacactgaccgccgatacctctagcagcacagcctacatgcagctgagcagcctgaccagcgaagatagcgccgtgtacttctgtgcccggtccatcacaacagtcgtgggctgcgctatggactattggggccagggaacaagcgtgaccgtgtctagtacgcgtgcctctacaaagggaccctccgtgtttcctctggctcccagcagcaagtctacaagcggaggaacagccgctctgggctgcctggtcaaggattactttcccgagcctgtgaccgtgtcctggaatagcggagcactgacaagcggcgtgcacacctttccagccgtgctgcaaagcagcggcctgtactctctgagcagcgtggtcacagtgcctagctctagcctgggcacccagacctacatctgcaatgtgaaccacaagcctagcaacaccaaggtggacaagagagtggaacccaagagctgtgaagtgaaaaccgactccaccgaccacgtgaagcccaaagagacagagaacaccaagcagcccagcaagagctgccacaagcccaaggccatcgtgcacaccgagaaagtgaacatgatgagcctgaccgtgctgggcctgcggatgctgttcgccaaaaccgtggccgtgaacttcctgctgaccgccaagctgttcttcctc

SEQ ID NO: 4108 - DNA, 2289 bp, Artificial Sequence
  Synthetic Polynucloetide
atggccttaccagtgaccgccttgctcctgccgctggccttgctgctccacgccgccaggccggacatccagatgacacagagccctagcagcctgtctgccagcgtgggagacagagtgaccatcacatgcaaggccagcgaccacatcaacaactggctggcctggtatcagcagaagcctggacaggcccctaagctgctgatctacggcgctaccacactggaaacaggcgtgcccagcagattttctggcagcggctctggcaccgactacaccctgacaatatccagcctccagcctgaggacttcgccacctactactgtcagcagagctggaacaccccttggacattcggccagggcaccaagctggaaatcaagagactcgagggacagcctaaggccaatcctaccgtgacactgttccctccaagcagcgaagaactccaggccaacaaggccacacttgtgtgcctgatctccgacttctaccctggggctgtgacagtggcttggaaggccgatggatctcctgtgaaagccggcgtggaaaccaccaagccatccaagcagagcaacaacaaatacgccgccagctcctacctgagcctgacacctgagcagtggaagtcccacagatcctacagctgccaagtgacccacgaaggcagcaccgtggaaaagacagtggcccctacagagtgcagcggcagagccgattgcggcatcaccagcgccagctaccaccagggcgtgctgagcgccaccatcctgtacgagatcctgctgggcaaggccaccctgtacgccgtgctggtgtctgccctggtgctgatggctatggtcaagcggaaggacagccggggaagggccaagcgatctggatctggagcaacaaacttctcactactcaaacaagcaggtgacgtggaggagaatcccgggcctactagtatggactggatttggcgcatccttttccttgtcggcgctgctaccggcgcccattccgggccccaggttcagctgcaagagtctggcggaggacttgctcaagctggcggaagcctgagactgtcttgtgccgcctctggcagaaccttcagcatgggctggtttagacaggcccctggcaaagagagagagttcgtcgccgccatcacatacagcggcggcagcccttactacgcctcttctgtcagaggccggttcaccatcagccgggacaacgccaagaacaccgtgtacctccagatgaacagcctgaagccagaggacaccgccgtgtactactgtgccgccaatccaacctacggcagcgactggaatgccgagaattggggccagggcacccaagtgacagtgtctagtggatccggcggcggaggatctggcggaggcggatctgggggcggaggctctttcgaacaagttcagcttcaacagcctggcgctgagctggtcaaacctggcgcttctgtgaagatgagctgcaaagccagcggctacgccttcagcagctactggatcaactggatgaagcagaaacccggccagggactcgaatggatcggccaaatctatcccggcgacggcgacaccaactacaacggcaagttcaagggcagagccacactgaccgccgatacctctagcagcacagcctacatgcagctgagcagcctgaccagcgaagatagcgccgtgtacttctgtgcccggtccatcacaacagtcgtgggctgcgctatggactattggggccagggaacaagcgtgaccgtgtctagtacgcgtgcctctacaaagggaccctccgtgtttcctctggctcccagcagcaagtctacaagcggaggaacagccgctctgggctgcctggtcaaggattactttcccgagcctgtgaccgtgtcctggaatagcggagcactgacaagcggcgtgcacacctttccagccgtgctgcaaagcagcggcctgtactctctgagcagcgtggtcacagtgcctagctctagcctgggcacccagacctacatctgcaatgtgaaccacaagcctagcaacaccaaggtggacaagagagtggaacccaagagctgtatccccgaggacacattcttcccaagcagcgacgtgccctgcgacgtgaagctggtggaaaagagcttcgagacagacaccaacctgaacttccagaacctgagcgtgatcggcttcagaatcctgctgctgaaagtggccggctttaacctgctgatgaccctgcggctgtggtccagc

SEQ ID NO: 4109 - DNA, 2289 bp, Artificial Sequence
  Synthetic Polynucloetide
atggccttaccagtgaccgccttgctcctgccgctggccttgctgctccacgccgccaggccggacatccagatgacacagagccctagcagcctgtctgccagcgtgggagacagagtgaccatcacatgcaaggccagcgaccacatcaacaactggctggcctggtatcagcagaagcctggacaggcccctaagctgctgatctacggcgctaccacactggaaacaggcgtgcccagcagattttctggcagcggctctggcaccgactacaccctgacaatatccagcctccagcctgaggacttcgccacctactactgtcagcagagctggaacaccccttggacattcggccagggcaccaagctggaaatcaagagactcgagggacagcctaaggccaatcctaccgtgacactgttccctccaagcagcgaagaactccaggccaacaaggccacacttgtgtgcctgatctccgacttctaccctggggctgtgacagtggcttggaaggccgatggatctcctgtgaaagccggcgtggaaaccaccaagccatccaagcagagcaacaacaaatacgccgccagctcctacctgagcctgacacctgagcagtggaagtcccacagatcctacagctgccaagtgacccacgaaggcagcaccgtggaaaagacagtggcccctacagagtgcagcggcagagccgattgcggctttaccagcgagagctaccagcagggcgtgctgagcgccaccatcctgtacgagatcctgctgggcaaggccaccctgtacgccgtgctggtgtctgccctggtgctgatggctatggtcaagcggaaggacagccggggaagggccaagcgatctggatctggagcaacaaacttctcactactcaaacaagcaggtgacgtggaggagaatcccgggcctactagtatggactggatttggcgcatccttttccttgtcggcgctgctaccggcgcccattccgggccccaggttcagctgcaagagtctggcggaggacttgctcaagctggcggaagcctgagactgtcttgtgccgcctctggcagaaccttcagcatgggctggtttagacaggcccctggcaaagagagagagttcgtcgccgccatcacatacagcggcggcagcccttactacgcctcttctgtcagaggccggttcaccatcagccgggacaacgccaagaacaccgtgtacctccagatgaacagcctgaagccagaggacaccgccgtgtactactgtgccgccaatccaacctacggcagcgactggaatgccgagaattggggccagggcacccaagtgacagtgtctagtggatccggcggcggaggatctggcggaggcggatctgggggcggaggctctttcgaacaagttcagcttcaacagcctggcgctgagctggtcaaacctggcgcttctgtgaagatgagctgcaaagccagcggctacgccttcagcagctactggatcaactggatgaagcagaaacccggccagggactcgaatggatcggccaaatctatcccggcgacggcgacaccaactacaacggcaagttcaagggcagagccacactgaccgccgatacctctagcagcacagcctacatgcagctgagcagcctgaccagcgaagatagcgccgtgtacttctgtgcccggtccatcacaacagtcgtgggctgcgctatggactattggggccagggaacaagcgtgaccgtgtctagtacgcgtgcctctacaaagggaccctccgtgtttcctctggctcccagcagcaagtctacaagcggaggaacagccgctctgggctgcctggtcaaggattactttcccgagcctgtgaccgtgtcctggaatagcggagcactgacaagcggcgtgcacacctttccagccgtgctgcaaagcagcggcctgtactctctgagcagcgtggtcacagtgcctagctctagcctgggcacccagacctacatctgcaatgtgaaccacaagcctagcaacaccaaggtggacaagagagtggaacccaagagctgtatccccgaggacacattcttcccaagccccgagagcagctgcgacgtgaagctggtggaaaagagcttcgagacagacaccaacctgaacttccagaacctgagcgtgatcggcttcagaatcctgctgctgaaagtggccggctttaacctgctgatgaccctgcggctgtggtccagc

SEQ ID NO: 4110 - DNA, 1779 bp, Artificial Sequence
  Synthetic Polynucloetide
atggactggatttggcgcatccttttccttgtcggcgctgctaccggcgcccattccgggccccaggttcagctgcaagagtctggcggaggacttgctcaagctggcggaagcctgagactgtcttgtgccgcctctggcagaaccttcagcatgggctggtttagacaggcccctggcaaagagagagagttcgtcgccgccatcacatacagcggcggcagcccttactacgcctcttctgtcagaggccggttcaccatcagccgggacaacgccaagaacaccgtgtacctccagatgaacagcctgaagccagaggacaccgccgtgtactactgtgccgccaatccaacctacggcagcgactggaatgccgagaattggggccagggcacccaagtgacagtgtctagtggatccggcggcggaggatctggcggaggcggatctgggggcggaggctctttcgaacaagttcagcttcaacagcctggcgctgagctggtcaaacctggcgcttctgtgaagatgagctgcaaagccagcggctacgccttcagcagctactggatcaactggatgaagcagaaacccggccagggactcgaatggatcggccaaatctatcccggcgacggcgacaccaactacaacggcaagttcaagggcagagccacactgaccgccgatacctctagcagcacagcctacatgcagctgagcagcctgaccagcgaagatagcgccgtgtacttctgtgcccggtccatcacaacagtcgtgggctgcgctatggactattggggccagggaacaagcgtgaccgtgtctagtggcggaggcggaagtggaggcggaggatctggcggcggaggctctgacatccagatgacacagagccctagcagcctgtctgccagcgtgggagacagagtgaccatcacatgcaaggccagcgaccacatcaacaactggctggcctggtatcagcagaagcctggacaggcccctaagctgctgatctacggcgctaccacactggaaacaggcgtgcccagcagattttctggcagcggctctggcaccgactacaccctgacaatatccagcctccagcctgaggacttcgccacctactactgtcagcagagctggaacaccccttggacattcggccagggcaccaagctggaaatcaagagaacgcgtggcggaggcagcgacggtaacgaggagatgggaggaatcactcaaaccccttacaaagtctcaatttcaggaacaactgttatccttacatgtccccagtatcctggcagcgagatcctttggcagcataacgacaagaatatagggggagatgaagacgataagaatatcggatctgacgaggatcacttgagcctgaaagagttctccgagcttgaacaaagcggatattatgtgtgctatccgcgcgggtcaaagccggaagacgctaacttttacctttatctccgagccagagtgtgcgaaaattgcatggaaatggacgttatgtccgttgctacaatagttatcgtagatatatgcatcacgggtggactgcttctgctggtttattattggtccaagaatagaaaggccaaagctaaacccgtgaccagaggcgctggcgcaggcggaaggcaaaggggacaaaacaaagaacggccaccaccagtgccaaatccagattatgagcctattcggaaaggacagagggacctgtactctggcctgaatcagagaagaatc

SEQ ID NO: 4111 - DNA, 1674 bp, Artificial Sequence
  Synthetic Polynucloetide
atggactggatttggcgcatccttttccttgtcggcgctgctaccggcgcccattccgggccccaggttcagctgcaagagtctggcggaggacttgctcaagctggcggaagcctgagactgtcttgtgccgcctctggcagaaccttcagcatgggctggtttagacaggcccctggcaaagagagagagttcgtcgccgccatcacatacagcggcggcagcccttactacgcctcttctgtcagaggccggttcaccatcagccgggacaacgccaagaacaccgtgtacctccagatgaacagcctgaagccagaggacaccgccgtgtactactgtgccgccaatccaacctacggcagcgactggaatgccgagaattggggccagggcacccaagtgacagtgtctagtggatccggcggcggaggatctggcggaggcggatctgggggcggaggctctttcgaacaagttcagcttcaacagcctggcgctgagctggtcaaacctggcgcttctgtgaagatgagctgcaaagccagcggctacgccttcagcagctactggatcaactggatgaagcagaaacccggccagggactcgaatggatcggccaaatctatcccggcgacggcgacaccaactacaacggcaagttcaagggcagagccacactgaccgccgatacctctagcagcacagcctacatgcagctgagcagcctgaccagcgaagatagcgccgtgtacttctgtgcccggtccatcacaacagtcgtgggctgcgctatggactattggggccagggaacaagcgtgaccgtgtctagtggcggaggcggaagtggaggcggaggatctggcggcggaggctctgacatccagatgacacagagccctagcagcctgtctgccagcgtgggagacagagtgaccatcacatgcaaggccagcgaccacatcaacaactggctggcctggtatcagcagaagcctggacaggcccctaagctgctgatctacggcgctaccacactggaaacaggcgtgcccagcagattttctggcagcggctctggcaccgactacaccctgacaatatccagcctccagcctgaggacttcgccacctactactgtcagcagagctggaacaccccttggacattcggccagggcaccaagctggaaatcaagagaacgcgtggcggaggcagcttcaagatccccatcgaggaactggaagatcgggtgttcgtgaactgcaacacctctatcacctgggtggaaggcaccgtgggaacactgctgagcgacatcaccagactggacctcggcaagcggattctggaccctcggggcatctacagatgcaacggcaccgacatctacaaggacaaagaaagcaccgtgcaggtccactacagaatgtgccagtcctgcgtggaactggaccctgctacagtggccggcatcatcgtgaccgatgtgatcgctactctgctgctggctctgggagtgttctgcttcgccggacacgaaacaggcagactgtctggcgctgccgatacacaggccctgctgagaaacgaccaagtgtatcagcccctgcgcgacagagatgatgcccagtattctcacctcggcggcaactgggctagaaacaag

SEQ ID NO: 4112 - DNA, 1704 bp, Artificial Sequence
  Synthetic Polynucloetide
atggactggatttggcgcatccttttccttgtcggcgctgctaccggcgcccattccgggccccaggttcagctgcaagagtctggcggaggacttgctcaagctggcggaagcctgagactgtcttgtgccgcctctggcagaaccttcagcatgggctggtttagacaggcccctggcaaagagagagagttcgtcgccgccatcacatacagcggcggcagcccttactacgcctcttctgtcagaggccggttcaccatcagccgggacaacgccaagaacaccgtgtacctccagatgaacagcctgaagccagaggacaccgccgtgtactactgtgccgccaatccaacctacggcagcgactggaatgccgagaattggggccagggcacccaagtgacagtgtctagtggatccggcggcggaggatctggcggaggcggatctgggggcggaggctctttcgaacaagttcagcttcaacagcctggcgctgagctggtcaaacctggcgcttctgtgaagatgagctgcaaagccagcggctacgccttcagcagctactggatcaactggatgaagcagaaacccggccagggactcgaatggatcggccaaatctatcccggcgacggcgacaccaactacaacggcaagttcaagggcagagccacactgaccgccgatacctctagcagcacagcctacatgcagctgagcagcctgaccagcgaagatagcgccgtgtacttctgtgcccggtccatcacaacagtcgtgggctgcgctatggactattggggccagggaacaagcgtgaccgtgtctagtggcggaggcggaagtggaggcggaggatctggcggcggaggctctgacatccagatgacacagagccctagcagcctgtctgccagcgtgggagacagagtgaccatcacatgcaaggccagcgaccacatcaacaactggctggcctggtatcagcagaagcctggacaggcccctaagctgctgatctacggcgctaccacactggaaacaggcgtgcccagcagattttctggcagcggctctggcaccgactacaccctgacaatatccagcctccagcctgaggacttcgccacctactactgtcagcagagctggaacaccccttggacattcggccagggcaccaagctggaaatcaagagaacgcgtggcggaggcagccagagcatcaagggcaaccacctggtcaaggtgtacgactaccaagaggacggcagcgtgctgctgacatgtgatgccgaggccaagaacatcacctggtttaaggacggcaagatgatcggcttcctgaccgaggacaagaagaagtggaacctgggcagcaacgctaaggaccccagaggcatgtatcagtgcaagggcagccagaacaagagcaagcccctccaggtgtactaccggatgtgccagaactgcatcgagctgaacgccgctaccatcagcggctttctgttcgccgagatcgtgtccatcttcgtgctggccgtgggcgtgtactttatcgctggacaggatggcgtgcggcagagcagagcttccgataagcaaaccctgctgcctaacgaccagctgtaccagcctctgaaggacagagaggacgaccagtacagccacctccagggcaatcagctgagaagaaac

SEQ ID NO: 4113 - DNA, 1653 bp, Artificial Sequence
  Synthetic Polynucloetide
atggactggatttggcgcatccttttccttgtcggcgctgctaccggcgcccattccgggccccaggttcagctgcaagagtctggcggaggacttgctcaagctggcggaagcctgagactgtcttgtgccgcctctggcagaaccttcagcatgggctggtttagacaggcccctggcaaagagagagagttcgtcgccgccatcacatacagcggcggcagcccttactacgcctcttctgtcagaggccggttcaccatcagccgggacaacgccaagaacaccgtgtacctccagatgaacagcctgaagccagaggacaccgccgtgtactactgtgccgccaatccaacctacggcagcgactggaatgccgagaattggggccagggcacccaagtgacagtgtctagtggatccggcggcggaggatctggcggaggcggatctgggggcggaggctctttcgaacaagttcagcttcaacagcctggcgctgagctggtcaaacctggcgcttctgtgaagatgagctgcaaagccagcggctacgccttcagcagctactggatcaactggatgaagcagaaacccggccagggactcgaatggatcggccaaatctatcccggcgacggcgacaccaactacaacggcaagttcaagggcagagccacactgaccgccgatacctctagcagcacagcctacatgcagctgagcagcctgaccagcgaagatagcgccgtgtacttctgtgcccggtccatcacaacagtcgtgggctgcgctatggactattggggccagggaacaagcgtgaccgtgtctagtggcggaggcggaagtggaggcggaggatctggcggcggaggctctgacatccagatgacacagagccctagcagcctgtctgccagcgtgggagacagagtgaccatcacatgcaaggccagcgaccacatcaacaactggctggcctggtatcagcagaagcctggacaggcccctaagctgctgatctacggcgctaccacactggaaacaggcgtgcccagcagattttctggcagcggctctggcaccgactacaccctgacaatatccagcctccagcctgaggacttcgccacctactactgtcagcagagctggaacaccccttggacattcggccagggcaccaagctggaaatcaagagaacgcgtggcggaggcagccagagttttgggttgttggaccctaaattgtgctatctgttggacggaatcctgttcatttacggagtgatcctgaccgcattgttcctgcgggttaagttttccagatccgcagacgcacccgcttaccaacaagggcagaaccaactctacaatgaacttaatttggggcggagggaagagtacgacgttctggacaaaaggaggggacgagatcccgagatgggcggaaagcctcagcgaaggaagaatccgcaagaggggctttataacgaactccagaaagataaaatggcagaagcctatagtgagattgggatgaagggagaaaggaggaggggtaaaggtcacgatgggttgtaccaaggattgagcacagccactaaagatacctatgatgcgctccacatgcaggccctgccgccaaga

SEQ ID NO: 4114 - DNA, 1764 bp, Artificial Sequence
  Synthetic Polynucloetide
atggactggatttggcgcatccttttccttgtcggcgctgctaccggcgcccattccgggccccaggttcagctgcaagagtctggcggaggacttgctcaagctggcggaagcctgagactgtcttgtgccgcctctggcagaaccttcagcatgggctggtttagacaggcccctggcaaagagagagagttcgtcgccgccatcacatacagcggcggcagcccttactacgcctcttctgtcagaggccggttcaccatcagccgggacaacgccaagaacaccgtgtacctccagatgaacagcctgaagccagaggacaccgccgtgtactactgtgccgccaatccaacctacggcagcgactggaatgccgagaattggggccagggcacccaagtgacagtgtctagtggatccggcggcggaggatctggcggaggcggatctgggggcggaggctctttcgaacaagttcagcttcaacagcctggcgctgagctggtcaaacctggcgcttctgtgaagatgagctgcaaagccagcggctacgccttcagcagctactggatcaactggatgaagcagaaacccggccagggactcgaatggatcggccaaatctatcccggcgacggcgacaccaactacaacggcaagttcaagggcagagccacactgaccgccgatacctctagcagcacagcctacatgcagctgagcagcctgaccagcgaagatagcgccgtgtacttctgtgcccggtccatcacaacagtcgtgggctgcgctatggactattggggccagggaacaagcgtgaccgtgtctagtacgcgtatccagaaccctgatcctgccgtgtaccagctgcgggatagcaagagcagcgacaagagcgtgtgtctgttcaccgacttcgacagccagaccaacgtgtcccagagcaaggactccgacgtgtacatcaccgataagaccgtgctggacatgcggagcatggacttcaagagcaactccgccgtggcctggtccaacaagtccgatttcgcctgcgccaacgccttcaacaacagcattatccccgaggacacattcttcccaagccccgagagcagctgcgacgtgaagctggtggaaaagagcttcgagacagacaccaacctgaacttccagaacctgagcgtgatcggcttcagaatcctgctgctgaaagtggccggctttaacctgctgatgaccctgcggctgtggtccagccgcgccaagagaagcggatctggcgtgaagcagaccctgaatttcgacctgctgaagctggctggcgacgtggaatccaacccaggcccttctagaggccatatggccaagcctttgtctcaagaagaatccaccctcattgaaagagcaacggctacaatcaacagcatccccatctctgaagactacagcgtcgccagcgcagctctctctagcgacggccgcatcttcactggtgtcaatgtatatcattttactgggggaccttgtgcagaactcgtggtgctgggcactgctgctgctgcggcagctggcaacctgacttgtatcgtcgcgatcggaaatgagaacaggggcatcttgagcccctgcggacggtgccgacaggtgcttctcgatctgcatcctgggatcaaagccatagtgaaggacagtgatggacagccgacggcagttgggattcgtgaattgctgccctctggttatgtgtgggagggctga

SEQ ID NO: 4115 - DNA, 1263 bp, Artificial Sequence
  Synthetic Polynucloetide
atggactggatttggcgcatccttttccttgtcggcgctgctaccggcgcccattccgggccccaggttcagctgcaagagtctggcggaggacttgctcaagctggcggaagcctgagactgtcttgtgccgcctctggcagaaccttcagcatgggctggtttagacaggcccctggcaaagagagagagttcgtcgccgccatcacatacagcggcggcagcccttactacgcctcttctgtcagaggccggttcaccatcagccgggacaacgccaagaacaccgtgtacctccagatgaacagcctgaagccagaggacaccgccgtgtactactgtgccgccaatccaacctacggcagcgactggaatgccgagaattggggccagggcacccaagtgacagtgtctagtggatccggcggcggaggatctggcggaggcggatctgggggcggaggctctttcgaacaagttcagcttcaacagcctggcgctgagctggtcaaacctggcgcttctgtgaagatgagctgcaaagccagcggctacgccttcagcagctactggatcaactggatgaagcagaaacccggccagggactcgaatggatcggccaaatctatcccggcgacggcgacaccaactacaacggcaagttcaagggcagagccacactgaccgccgatacctctagcagcacagcctacatgcagctgagcagcctgaccagcgaagatagcgccgtgtacttctgtgcccggtccatcacaacagtcgtgggctgcgctatggactattggggccagggaacaagcgtgaccgtgtctagtacgcgtatccagaaccctgatcctgccgtgtaccagctgcgggatagcaagagcagcgacaagagcgtgtgtctgttcaccgacttcgacagccagaccaacgtgtcccagagcaaggactccgacgtgtacatcaccgataagaccgtgctggacatgcggagcatggacttcaagagcaactccgccgtggcctggtccaacaagtccgatttcgcctgcgccaacgccttcaacaacagcattatccccgaggacacattcttcccaagccccgagagcagctgcgacgtgaagctggtggaaaagagcttcgagacagacaccaacctgaacttccagaacctgagcgtgatcggcttcagaatcctgctgctgaaagtggccggctttaacctgctgatgaccctgcggctgtggtccagc

SEQ ID NO: 4116 - DNA, 1800 bp, Artificial Sequence
  Synthetic Polynucloetide
atggactggatttggcgcatccttttccttgtcggcgctgctaccggcgcccattccgggccccaggttcagctgcaagagtctggcggaggacttgctcaagctggcggaagcctgagactgtcttgtgccgcctctggcagaaccttcagcatgggctggtttagacaggcccctggcaaagagagagagttcgtcgccgccatcacatacagcggcggcagcccttactacgcctcttctgtcagaggccggttcaccatcagccgggacaacgccaagaacaccgtgtacctccagatgaacagcctgaagccagaggacaccgccgtgtactactgtgccgccaatccaacctacggcagcgactggaatgccgagaattggggccagggcacccaagtgacagtgtctagtggatccggcggcggaggatctggcggaggcggatctgggggcggaggctctttcgaacaagttcagcttcaacagcctggcgctgagctggtcaaacctggcgcttctgtgaagatgagctgcaaagccagcggctacgccttcagcagctactggatcaactggatgaagcagaaacccggccagggactcgaatggatcggccaaatctatcccggcgacggcgacaccaactacaacggcaagttcaagggcagagccacactgaccgccgatacctctagcagcacagcctacatgcagctgagcagcctgaccagcgaagatagcgccgtgtacttctgtgcccggtccatcacaacagtcgtgggctgcgctatggactattggggccagggaacaagcgtgaccgtgtctagtacgcgtgagcagaaactgatctcggaagaggatgggagcggcatccagaaccctgatcctgccgtgtaccagctgcgggatagcaagagcagcgacaagagcgtgtgtctgttcaccgacttcgacagccagaccaacgtgtcccagagcaaggactccgacgtgtacatcaccgataagtgcgtgctggacatgcggagcatggacttcaagagcaactccgccgtggcctggtccaacaagtccgatttcgcctgcgccaacgccttcaacaacagcattatccccgaggacacattcttcccaagccccgagagcagctgcgacgtgaagctggtggaaaagagcttcgagacagacaccaacctgaacttccagaacctgagcgtgatcggcttcagaatcctgctgctgaaagtggccggctttaacctgctgatgaccctgcggctgtggtccagccgcgccaagagaagcggatctggcgtgaagcagaccctgaatttcgacctgctgaagctggctggcgacgtggaatccaacccaggcccttctagaggccatatggccaagcctttgtctcaagaagaatccaccctcattgaaagagcaacggctacaatcaacagcatccccatctctgaagactacagcgtcgccagcgcagctctctctagcgacggccgcatcttcactggtgtcaatgtatatcattttactgggggaccttgtgcagaactcgtggtgctgggcactgctgctgctgcggcagctggcaacctgacttgtatcgtcgcgatcggaaatgagaacaggggcatcttgagcccctgcggacggtgccgacaggtgcttctcgatctgcatcctgggatcaaagccatagtgaaggacagtgatggacagccgacggcagttgggattcgtgaattgctgccctctggttatgtgtgggagggctga

SEQ ID NO: 4117 - DNA, 1302 bp, Artificial Sequence
  Synthetic Polynucloetide
atggactggatttggcgcatccttttccttgtcggcgctgctaccggcgcccattccgggccccaggttcagctgcaagagtctggcggaggacttgctcaagctggcggaagcctgagactgtcttgtgccgcctctggcagaaccttcagcatgggctggtttagacaggcccctggcaaagagagagagttcgtcgccgccatcacatacagcggcggcagcccttactacgcctcttctgtcagaggccggttcaccatcagccgggacaacgccaagaacaccgtgtacctccagatgaacagcctgaagccagaggacaccgccgtgtactactgtgccgccaatccaacctacggcagcgactggaatgccgagaattggggccagggcacccaagtgacagtgtctagtggatccggcggcggaggatctggcggaggcggatctgggggcggaggctctttcgaacaagttcagcttcaacagcctggcgctgagctggtcaaacctggcgcttctgtgaagatgagctgcaaagccagcggctacgccttcagcagctactggatcaactggatgaagcagaaacccggccagggactcgaatggatcggccaaatctatcccggcgacggcgacaccaactacaacggcaagttcaagggcagagccacactgaccgccgatacctctagcagcacagcctacatgcagctgagcagcctgaccagcgaagatagcgccgtgtacttctgtgcccggtccatcacaacagtcgtgggctgcgctatggactattggggccagggaacaagcgtgaccgtgtctagtacgcgtgagcagaaactgatctcggaagaggatgggagcggcatccagaaccctgatcctgccgtgtaccagctgcgggatagcaagagcagcgacaagagcgtgtgtctgttcaccgacttcgacagccagaccaacgtgtcccagagcaaggactccgacgtgtacatcaccgataagtgcgtgctggacatgcggagcatggacttcaagagcaactccgccgtggcctggtccaacaagtccgatttcgcctgcgccaacgccttcaacaacagcattatccccgaggacacattcttcccaagccccgagagcagctgcgacgtgaagctggtggaaaagagcttcgagacagacaccaacctgaacttccagaacctgagcgtgatcggcttcagaatcctgctgctgaaagtggccggctttaacctgctgatgaccctgcggctgtggtccagctga

SEQ ID NO: 4118 - DNA, 1902 bp, Artificial Sequence
  Synthetic Polynucloetide
atggccttaccagtgaccgccttgctcctgccgctggccttgctgctccacgccgccaggccgcagctccagctgcaagagtctggacctggcctggtcaagcctagcgagacactgagcctgacctgtaccgtgtccggcgatagcatcagcagcggcgattactactggggctggatcagacagcctcctggcaaaggactggaatggatcggccacatctactacagcggcgtgacctactacaaccccagcctgaagtccagagtgaccatcagcgtggacaccagccggaaccagttctccctgaagctgtctagcgtgacagccgccgataccgccgtgtactactgcaccagagaggacagcagcaactggcggagtagaggccagggaacactggtcacagttagctctggtaccggcggaggcggatctggcggcggaggtagcggtggcggaggatctgaattcgacatccagatgacacagagccctagcagcctgtctgccagcgtgggagacagagtgaccatcacatgcaaggccagcgaccacatcaacaactggctggcctggtatcagcagaagcctggacaggcccctaagctgctgatctacggcgctaccacactggaaacaggcgtgcccagcagattttctggcagcggctctggcaccgactacaccctgacaatatccagcctccagcctgaggacttcgccacctactactgtcagcagagctggaacaccccttggacattcggccagggcaccaagctggaaatcaagagaggcggaggcggaagtggaggcggaggatctggcggcggaggctctcaagttcagcttcaacagcctggcgctgagctggtcaaacctggcgcttctgtgaagatgagctgcaaagccagcggctacgccttcagcagctactggatcaactggatgaagcagaaacccggccagggactcgaatggatcggccaaatctatcccggcgacggcgacaccaactacaacggcaagttcaagggcagagccacactgaccgccgatacctctagcagcacagcctacatgcagctgagcagcctgaccagcgaagatagcgccgtgtacttctgtgcccggtccatcacaacagtcgtgggctgcgctatggactattggggccagggaacaagcgtgaccgtgtctagtacgcgtgagcagaaactgatctcggaagaggatctgaaaattgaagttatgtatcctcctccttacctagacaatgagaagagcaatggaaccattatccatgtgaaagggaaacacctttgtccaagtcccctatttcccggaccttctaagcccttttgggtgctggtggtggttgggggagtcctggcttgctatagcttgctagtaacagtggcctttattattttctgggtgaggagtaagaggagcaggctcctgcacagtgactacatgaacatgactccacgccgccccggacccacccgcaagcattaccagccctatgccccaccacgcgacttcgcagcctatcgctccagagtgaagttcagcaggagcgcagacgcccccgcgtaccagcagggccagaaccagctctataacgagctcaatctaggacgaagagaggagtacgatgttttggacaagagacgtggccgggaccctgagatggggggaaagccgagaaggaagaaccctcaggaaggcctgtacaatgaactgcagaaagataagatggcggaggcctacagtgagattgggatgaaaggcgagcgccggaggggcaaggggcacgatggcctttaccagggtctcagtacagccaccaaggacacctacgacgcccttcacatgcaggccctgccccctcgc

SEQ ID NO: 4119 - DNA, 1923 bp, Artificial Sequence
  Synthetic Polynucloetide
atggccttaccagtgaccgccttgctcctgccgctggccttgctgctccacgccgccaggccgcagctccagctgcaagagtctggacctggcctggtcaagcctagcgagacactgagcctgacctgtaccgtgtccggcgatagcatcagcagcggcgattactactggggctggatcagacagcctcctggcaaaggactggaatggatcggccacatctactacagcggcgtgacctactacaaccccagcctgaagtccagagtgaccatcagcgtggacaccagccggaaccagttctccctgaagctgtctagcgtgacagccgccgataccgccgtgtactactgcaccagagaggacagcagcaactggcggagtagaggccagggaacactggtcacagttagctctggtaccggcggaggcggatctggcggcggaggtagcggtggcggaggatctgaattcgacatccagatgacacagagccctagcagcctgtctgccagcgtgggagacagagtgaccatcacatgcaaggccagcgaccacatcaacaactggctggcctggtatcagcagaagcctggacaggcccctaagctgctgatctacggcgctaccacactggaaacaggcgtgcccagcagattttctggcagcggctctggcaccgactacaccctgacaatatccagcctccagcctgaggacttcgccacctactactgtcagcagagctggaacaccccttggacattcggccagggcaccaagctggaaatcaagagaggcggaggcggaagtggaggcggaggatctggcggcggaggctctcaagttcagcttcaacagcctggcgctgagctggtcaaacctggcgcttctgtgaagatgagctgcaaagccagcggctacgccttcagcagctactggatcaactggatgaagcagaaacccggccagggactcgaatggatcggccaaatctatcccggcgacggcgacaccaactacaacggcaagttcaagggcagagccacactgaccgccgatacctctagcagcacagcctacatgcagctgagcagcctgaccagcgaagatagcgccgtgtacttctgtgcccggtccatcacaacagtcgtgggctgcgctatggactattggggccagggaacaagcgtgaccgtgtctagtacgcgtgagcagaaactgatctcggaagaggatctggcgaagcccaccacgacgccagcgccgcgaccaccaacaccggcgcccaccatcgcgtcgcagcccctgtccctgcgcccagaggcgtgccggccagcggcggggggcgcagtgcacacgagggggctggacttcgcctgtgacatctacatctgggcgcccttggccgggacttgtggggtccttctcctgtcactggttatcaccctttactgcaaacggggcagaaagaaactcctgtatatattcaaacaaccatttatgagaccagtacaaactactcaagaggaagatggctgtagctgccgatttccagaagaagaagaaggaggatgtgaactgagagtgaagttcagcaggagcgcagacgcccccgcgtaccagcagggccagaaccagctctataacgagctgaatctaggacgaagagaggagtacgatgttttggacaagagacgtggccgggaccctgagatggggggaaagccgagaaggaagaaccctcaggaaggcctgtacaatgaactgcagaaagataagatggcggaggcctacagtgagattgggatgaaaggcgagcgccggaggggcaaggggcacgatggcctttaccagggtctcagtacagccaccaaggacacctacgacgcccttcacatgcaggccctgccccctcgctga

SEQ ID NO: 4120 - DNA, 3162 bp, Artificial Sequence
  Synthetic Polynucloetide
atggccttaccagtgaccgccttgctcctgccgctggccttgctgctccacgccgccaggccgcagctccagctgcaagagtctggacctggcctggtcaagcctagcgagacactgagcctgacctgtaccgtgtccggcgatagcatcagcagcggcgattactactggggctggatcagacagcctcctggcaaaggactggaatggatcggccacatctactacagcggcgtgacctactacaaccccagcctgaagtccagagtgaccatcagcgtggacaccagccggaaccagttctccctgaagctgtctagcgtgacagccgccgataccgccgtgtactactgcaccagagaggacagcagcaactggcggagtagaggccagggaacactggtcacagttagctctggtaccggcggaggcggatctggcggcggaggtagcggtggcggaggatctgaattcgacatccagatgacacagagccctagcagcctgtctgccagcgtgggagacagagtgaccatcacatgcaaggccagcgaccacatcaacaactggctggcctggtatcagcagaagcctggacaggcccctaagctgctgatctacggcgctaccacactggaaacaggcgtgcccagcagattttctggcagcggctctggcaccgactacaccctgacaatatccagcctccagcctgaggacttcgccacctactactgtcagcagagctggaacaccccttggacattcggccagggcaccaagctggaaatcaagagaggcggaggcggaagtggaggcggaggatctggcggcggaggctctcaagttcagcttcaacagcctggcgctgagctggtcaaacctggcgcttctgtgaagatgagctgcaaagccagcggctacgccttcagcagctactggatcaactggatgaagcagaaacccggccagggactcgaatggatcggccaaatctatcccggcgacggcgacaccaactacaacggcaagttcaagggcagagccacactgaccgccgatacctctagcagcacagcctacatgcagctgagcagcctgaccagcgaagatagcgccgtgtacttctgtgcccggtccatcacaacagtcgtgggctgcgctatggactattggggccagggaacaagcgtgaccgtgtctagtacgcgtgagcagaaactgatctcggaagaggatctggcgaagcccaccacgacgccagcgccgcgaccaccaacaccggcgcccaccatcgcgtcgcagcccctgtccctgcgcccagaggcgtgccggccagcggcggggggcgcagtgcacacgagggggctggacttcgcctgtgacatctacatctgggcgcccttggccgggacttgtggggtccttctcctgtcactggttatcaccctttactgcgggcgcgccagagtgaagttcagcaggagcgcagacgcccccgcgtaccagcagggccagaaccagctctataacgagctgaatctaggacgaagagaggagtacgatgttttggacaagagacgtggccgggaccctgagatggggggaaagccgagaaggaagaaccctcaggaaggcctgtacaatgaactgcagaaagataagatggcggaggcctacagtgagattgggatgaaaggcgagcgccggaggggcaaggggcacgatggcctttaccagggtctcagtacagccaccaaggacacctacgacgcccttcacatgcaggccctgccccctcgctctagaggatctggagcaacaaacttctcactactcaaacaagcaggtgacgtggaggagaatcccgggcctgggatccacatggccacttacgaggttctctgtgaggtggcgcggaaactgggcacggatgacagggaagtggtattgttcctcctaaacgtgttcatacctcaacccacactggcccaattaattggagctcttagagctttaaaggaggagggcaggttaacgtttcccctgttagcggaatgtctgtttcgtgcaggtcgcagagacctcttgcgcgacctgcttcacttagacccgcgttttttagagcgccacctagcgggcacaatgagttatttcagcccttatcagctcactgttctccacgtagacggggagctgtgtgcgagggatattaggtctttgatatttttaagcaaggacactatagggtctcgcagcacaccacagacattcttacactgggtgtactgtatggaaaacttagacctactgggtcccactgacgtggatgccctaatgtcaatgcttagatctttgtcaagagtagacctacagcgccaagtgcaaaccctaatgggccttcacctttccggcccatcacactcccaacactatcgccatacaccactcgagaccgatttctacgactacaaggacgacgatgacaagactagtggctccggcgagggcagaggaagtctactaacctgcggagatgtggaagaaaatcctggcccacatatgaccgagtacaagcccacggtgcgcctcgccacccgcgacgacgtccccagggccgtacgcaccctcgccgccgcgttcgccgactaccccgccacgcgccacaccgtcgatccggaccgccacatcgagcgggtcaccgagctgcaagaactcttcctcacgcgcgtcgggctcgacatcggcaaggtgtgggtcgcggacgacggcgccgcggtggcggtctggaccacgccggagagcgtcgaagcgggggcggtgttcgccgagatcggcccgcgcatggccgagttgagcggttcccggctggccgcgcagcaacagatggaaggcctcctggcgccgcaccggcccaaggagcccgcgtggttcctggccaccgtcggcgtctcgcccgaccaccagggcaagggtctgggcagcgccgtcgtgctccccggagtggaggcggccgagcgcgccggggtgcccgccttcctggagacctccgcgccccgcaacctccccttctacgagcggctcggcttcaccgtcaccgccgacgtcgaggtgcccgaaggaccgcgcacctggtgcatgacccgcaagcccggtgcctga

SEQ ID NO: 4121 - DNA, 2982 bp, Artificial Sequence
  Synthetic Polynucloetide
atggccttaccagtgaccgccttgctcctgccgctggccttgctgctccacgccgccaggccgcagctccagctgcaagagtctggacctggcctggtcaagcctagcgagacactgagcctgacctgtaccgtgtccggcgatagcatcagcagcggcgattactactggggctggatcagacagcctcctggcaaaggactggaatggatcggccacatctactacagcggcgtgacctactacaaccccagcctgaagtccagagtgaccatcagcgtggacaccagccggaaccagttctccctgaagctgtctagcgtgacagccgccgataccgccgtgtactactgcaccagagaggacagcagcaactggcggagtagaggccagggaacactggtcacagttagctctggtaccggcggaggcggatctggcggcggaggtagcggtggcggaggatctgaattcgacatccagatgacacagagccctagcagcctgtctgccagcgtgggagacagagtgaccatcacatgcaaggccagcgaccacatcaacaactggctggcctggtatcagcagaagcctggacaggcccctaagctgctgatctacggcgctaccacactggaaacaggcgtgcccagcagattttctggcagcggctctggcaccgactacaccctgacaatatccagcctccagcctgaggacttcgccacctactactgtcagcagagctggaacaccccttggacattcggccagggcaccaagctggaaatcaagagactcgagatccagaaccctgatcctgccgtgtaccagctgcgggatagcaagagcagcgacaagagcgtgtgtctgttcaccgacttcgacagccagaccaacgtgtcccagagcaaggactccgacgtgtacatcaccgataagtgcgtgctggacatgcggagcatggacttcaagagcaactccgccgtggcctggtccaacaagtccgatttcgcctgcgccaacgccttcaacaacagcattatccccgaggacacattcttcccaagcagcgacgtgccctgcgacgtgaagctggtggaaaagagcttcgagacagacaccaacctgaacttccagaacctgagcgtgatcggcttcagaatcctgctgctgaaagtggccggctttaacctgctgatgaccctgcggctgtggtccagccgcgccaagagaagcggatctggcgtgaagcagaccctgaatttcgacctgctgaagctggctggcgacgtggaatccaacccaggccctactagtatggactggatttggcgcatccttttccttgtcggcgctgctaccggcgcgcattccttcgaacaagttcagcttcaacagcctggcgctgagctggtcaaacctggcgcttctgtgaagatgagctgcaaagccagcggctacgccttcagcagctactggatcaactggatgaagcagaaacccggccagggactcgaatggatcggccaaatctatcccggcgacggcgacaccaactacaacggcaagttcaagggcagagccacactgaccgccgatacctctagcagcacagcctacatgcagctgagcagcctgaccagcgaagatagcgccgtgtacttctgtgcccggtccatcacaacagtcgtgggctgcgctatggactattggggccagggaacaagcgtgaccgtgtctagtacgcgtgaggacctgaagaacgtgttcccacctgaggtggccgtgttcgagcctagcaaggccgagatcgcccacacccagaaagccaccctcgtgtgcctggctaccggcttctaccccgaccatgtggaactgtcttggtgggtcaacggcaaagaggtgcacagcggcgtgtgtaccgacccccagccactgaaagaacagcccgccctgaacgacagccggtactgcctgagcagcagactgagagtgtccgccaccttctggcagaacccccggaaccacttcagatgccaggtgcagttctacggcctgagcgagaacgacgagtggacccaggacagagccaagcccgtgacccagatcgtgtctgccgaagcctggggcagagccgattgcggcatcaccagcgccagctaccaccagggcgtgctgagcgccaccatcctgtacgagatcctgctgggcaaggccaccctgtacgccgtgctggtgtctgccctggtgctgatggctatggtcaagcggaaggacagccggggaagggccaagcgatctggatctggagcaacaaacttctcactactcaaacaagcaggtgacgtggaggagaatcccgggccttctagaggccatatgaccgagtacaagcccacggtgcgcctcgccacccgcgacgacgtccccagggccgtacgcaccctcgccgccgcgttcgccgactaccccgccacgcgccacaccgtcgatccggaccgccacatcgagcgggtcaccgagctgcaagaactcttcctcacgcgcgtcgggctcgacatcggcaaggtgtgggtcgcggacgacggcgccgcggtggcggtctggaccacgccggagagcgtcgaagcgggggcggtgttcgccgagatcggcccgcgcatggccgagttgagcggttcccggctggccgcgcagcaacagatggaaggcctcctggcgccgcaccggcccaaggagcccgcgtggttcctggccaccgtcggcgtctcgcccgaccaccagggcaagggtctgggcagcgccgtcgtgctccccggagtggaggcggccgagcgcgccggggtgcccgccttcctggagacctccgcgccccgcaacctccccttctacgagcggctcggcttcaccgtcaccgccgacgtcgaggtgcccgaaggaccgcgcacctggtgcatgacccgcaagcccggtgcctga

SEQ ID NO: 4122 - DNA, 2979 bp, Artificial Sequence
  Synthetic Polynucloetide
atggccttaccagtgaccgccttgctcctgccgctggccttgctgctccacgccgccaggccgcagctccagctgcaagagtctggacctggcctggtcaagcctagcgagacactgagcctgacctgtaccgtgtccggcgatagcatcagcagcggcgattactactggggctggatcagacagcctcctggcaaaggactggaatggatcggccacatctactacagcggcgtgacctactacaaccccagcctgaagtccagagtgaccatcagcgtggacaccagccggaaccagttctccctgaagctgtctagcgtgacagccgccgataccgccgtgtactactgcaccagagaggacagcagcaactggcggagtagaggccagggaacactggtcacagttagctctggtaccggcggaggcggatctggcggcggaggtagcggtggcggaggatctgaattcgacatccagatgacacagagccctagcagcctgtctgccagcgtgggagacagagtgaccatcacatgcaaggccagcgaccacatcaacaactggctggcctggtatcagcagaagcctggacaggcccctaagctgctgatctacggcgctaccacactggaaacaggcgtgcccagcagattttctggcagcggctctggcaccgactacaccctgacaatatccagcctccagcctgaggacttcgccacctactactgtcagcagagctggaacaccccttggacattcggccagggcaccaagctggaaatcaagagactcgaggacctgaagaacgtgttcccacctgaggtggccgtgttcgagcctagcaaggccgagatcgcccacacccagaaagccaccctcgtgtgcctggctaccggcttctaccccgaccatgtggaactgtcttggtgggtcaacggcaaagaggtgcacagcggcgtgtgtaccgacccccagccactgaaagaacagcccgccctgaacgacagccggtactgcctgagcagcagactgagagtgtccgccaccttctggcagaacccccggaaccacttcagatgccaggtgcagttctacggcctgagcgagaacgacgagtggacccaggacagagccaagcccgtgacccagatcgtgtctgccgaagcctggggcagagccgattgcggcatcaccagcgccagctaccaccagggcgtgctgagcgccaccatcctgtacgagatcctgctgggcaaggccaccctgtacgccgtgctggtgtctgccctggtgctgatggctatggtcaagcggaaggacagccggggaagggccaagcgatctggatctggagcaacaaacttctcactactcaaacaagcaggtgacgtggaggagaatcccgggcctactagtatggactggatttggcgcatccttttccttgtcggcgctgctaccggcgcgcattccttcgaacaagttcagcttcaacagcctggcgctgagctggtcaaacctggcgcttctgtgaagatgagctgcaaagccagcggctacgccttcagcagctactggatcaactggatgaagcagaaacccggccagggactcgaatggatcggccaaatctatcccggcgacggcgacaccaactacaacggcaagttcaagggcagagccacactgaccgccgatacctctagcagcacagcctacatgcagctgagcagcctgaccagcgaagatagcgccgtgtacttctgtgcccggtccatcacaacagtcgtgggctgcgctatggactattggggccagggaacaagcgtgaccgtgtctagtacgcgtatccagaaccctgatcctgccgtgtaccagctgcgggatagcaagagcagcgacaagagcgtgtgtctgttcaccgacttcgacagccagaccaacgtgtcccagagcaaggactccgacgtgtacatcaccgataagtgcgtgctggacatgcggagcatggacttcaagagcaactccgccgtggcctggtccaacaagtccgatttcgcctgcgccaacgccttcaacaacagcattatccccgaggacacattcttcccaagcagcgacgtgccctgcgacgtgaagctggtggaaaagagcttcgagacagacaccaacctgaacttccagaacctgagcgtgatcggcttcagaatcctgctgctgaaagtggccggctttaacctgctgatgaccctgcggctgtggtccagccgcgccaagagaagcggatctggcgtgaagcagaccctgaatttcgacctgctgaagctggctggcgacgtggaatccaacccaggcccttctagaggccatatgaccgagtacaagcccacggtgcgcctcgccacccgcgacgacgtccccagggccgtacgcaccctcgccgccgcgttcgccgactaccccgccacgcgccacaccgtcgatccggaccgccacatcgagcgggtcaccgagctgcaagaactcttcctcacgcgcgtcgggctcgacatcggcaaggtgtgggtcgcggacgacggcgccgcggtggcggtctggaccacgccggagagcgtcgaagcgggggcggtgttcgccgagatcggcccgcgcatggccgagttgagcggttcccggctggccgcgcagcaacagatggaaggcctcctggcgccgcaccggcccaaggagcccgcgtggttcctggccaccgtcggcgtctcgcccgaccaccagggcaagggtctgggcagcgccgtcgtgctccccggagtggaggcggccgagcgcgccggggtgcccgccttcctggagacctccgcgccccgcaacctccccttctacgagcggctcggcttcaccgtcaccgccgacgtcgaggtgcccgaaggaccgcgcacctggtgcatgacccgcaagcccggtgcctga

SEQ ID NO: 4123 - DNA, 2277 bp, Artificial Sequence
  Synthetic Polynucloetide
atggccttaccagtgaccgccttgctcctgccgctggccttgctgctccacgccgccaggccgcagctccagctgcaagagtctggacctggcctggtcaagcctagcgagacactgagcctgacctgtaccgtgtccggcgatagcatcagcagcggcgattactactggggctggatcagacagcctcctggcaaaggactggaatggatcggccacatctactacagcggcgtgacctactacaaccccagcctgaagtccagagtgaccatcagcgtggacaccagccggaaccagttctccctgaagctgtctagcgtgacagccgccgataccgccgtgtactactgcaccagagaggacagcagcaactggcggagtagaggccagggaacactggtcacagttagctctggtaccggcggaggcggatctggcggcggaggtagcggtggcggaggatctgaattcgacatccagatgacacagagccctagcagcctgtctgccagcgtgggagacagagtgaccatcacatgcaaggccagcgaccacatcaacaactggctggcctggtatcagcagaagcctggacaggcccctaagctgctgatctacggcgctaccacactggaaacaggcgtgcccagcagattttctggcagcggctctggcaccgactacaccctgacaatatccagcctccagcctgaggacttcgccacctactactgtcagcagagctggaacaccccttggacattcggccagggcaccaagctggaaatcaagagactcgaggacctgaagaacgtgttcccacctgaggtggccgtgttcgagcctagcgaggccgagatcagccacacccagaaagccaccctcgtgtgcctggctaccggcttctaccccgaccatgtggaactgtcttggtgggtcaacggcaaagaggtgcacagcggcgtgtgtaccgacccccagccactgaaagaacagcccgccctgaacgacagccggtactgcctgagcagcagactgagagtgtccgccaccttctggcagaacccccggaaccacttcagatgccaggtgcagttctacggcctgagcgagaacgacgagtggacccaggacagagccaagcccgtgacccagatcgtgtctgccgaagcctggggcagagccgattgcggctttaccagcgagagctaccagcagggcgtgctgagcgccaccatcctgtacgagatcctgctgggcaaggccaccctgtacgccgtgctggtgtctgccctggtgctgatggctatggtcaagcggaaggacagccggggaagggccaagcgatctggatctggagcaacaaacttctcactactcaaacaagcaggtgacgtggaggagaatcccgggcctactagtatggactggatttggcgcatccttttccttgtcggcgctgctaccggcgcgcattccttcgaacaagttcagcttcaacagcctggcgctgagctggtcaaacctggcgcttctgtgaagatgagctgcaaagccagcggctacgccttcagcagctactggatcaactggatgaagcagaaacccggccagggactcgaatggatcggccaaatctatcccggcgacggcgacaccaactacaacggcaagttcaagggcagagccacactgaccgccgatacctctagcagcacagcctacatgcagctgagcagcctgaccagcgaagatagcgccgtgtacttctgtgcccggtccatcacaacagtcgtgggctgcgctatggactattggggccagggaacaagcgtgaccgtgtctagtacgcgtatccagaaccctgatcctgccgtgtaccagctgcgggatagcaagagcagcgacaagagcgtgtgtctgttcaccgacttcgacagccagaccaacgtgtcccagagcaaggactccgacgtgtacatcaccgataagtgcgtgctggacatgcggagcatggacttcaagagcaactccgccgtggcctggtccaacaagtccgatttcgcctgcgccaacgccttcaacaacagcattatccccgaggacacattcttcccaagccccgagagcagctgcgacgtgaagctggtggaaaagagcttcgagacagacaccaacctgaacttccagaacctgagcgtgatcggcttcagaatcctgctgctgaaagtggccggctttaacctgctgatgaccctgcggctgtggtccagc

SEQ ID NO: 4124 - DNA, 2952 bp, Artificial Sequence
  Synthetic Polynucloetide
atggccttaccagtgaccgccttgctcctgccgctggccttgctgctccacgccgccaggccgcagctccagctgcaagagtctggacctggcctggtcaagcctagcgagacactgagcctgacctgtaccgtgtccggcgatagcatcagcagcggcgattactactggggctggatcagacagcctcctggcaaaggactggaatggatcggccacatctactacagcggcgtgacctactacaaccccagcctgaagtccagagtgaccatcagcgtggacaccagccggaaccagttctccctgaagctgtctagcgtgacagccgccgataccgccgtgtactactgcaccagagaggacagcagcaactggcggagtagaggccagggaacactggtcacagttagctctggtaccggcggaggcggatctggcggcggaggtagcggtggcggaggatctgaattcgacatccagatgacacagagccctagcagcctgtctgccagcgtgggagacagagtgaccatcacatgcaaggccagcgaccacatcaacaactggctggcctggtatcagcagaagcctggacaggcccctaagctgctgatctacggcgctaccacactggaaacaggcgtgcccagcagattttctggcagcggctctggcaccgactacaccctgacaatatccagcctccagcctgaggacttcgccacctactactgtcagcagagctggaacaccccttggacattcggccagggcaccaagctggaaatcaagagactcgaggacctgaagaacgtgttcccacctgaggtggccgtgttcgagcctagcgaggccgagatcagccacacccagaaagccaccctcgtgtgcctggctaccggcttctaccccgaccatgtggaactgtcttggtgggtcaacggcaaagaggtgcacagcggcgtgtgtaccgacccccagccactgaaagaacagcccgccctgaacgacagccggtactgcctgagcagcagactgagagtgtccgccaccttctggcagaacccccggaaccacttcagatgccaggtgcagttctacggcctgagcgagaacgacgagtggacccaggacagagccaagcccgtgacccagatcgtgtctgccgaagcctggggcagagccgattgcggctttaccagcgagagctaccagcagggcgtgctgagcgccaccatcctgtacgagatcctgctgggcaaggccaccctgtacgccgtgctggtgtctgccctggtgctgatggctatggtcaagcggaaggacagccggggaagggccaagcgatctggatctggagcaacaaacttctcactactcaaacaagcaggtgacgtggaggagaatcccgggcctactagtatggactggatttggcgcatccttttccttgtcggcgctgctaccggcgcgcattccttcgaacaagttcagcttcaacagcctggcgctgagctggtcaaacctggcgcttctgtgaagatgagctgcaaagccagcggctacgccttcagcagctactggatcaactggatgaagcagaaacccggccagggactcgaatggatcggccaaatctatcccggcgacggcgacaccaactacaacggcaagttcaagggcagagccacactgaccgccgatacctctagcagcacagcctacatgcagctgagcagcctgaccagcgaagatagcgccgtgtacttctgtgcccggtccatcacaacagtcgtgggctgcgctatggactattggggccagggaacaagcgtgaccgtgtctagtacgcgtatccagaaccctgatcctgccgtgtaccagctgcgggatagcaagagcagcgacaagagcgtgtgtctgttcaccgacttcgacagccagaccaacgtgtcccagagcaaggactccgacgtgtacatcaccgataagtgcgtgctggacatgcggagcatggacttcaagagcaactccgccgtggcctggtccaacaagtccgatttcgcctgcgccaacgccttcaacaacagcattatccccgaggacacattcttcccaagccccgagagcagctgcgacgtgaagctggtggaaaagagcttcgagacagacaccaacctgaacttccagaacctgagcgtgatcggcttcagaatcctgctgctgaaagtggccggctttaacctgctgatgaccctgcggctgtggtccagccgcgccaagagaagcggatctggcgtgaagcagaccctgaatttcgacctgctgaagctggctggcgacgtggaatccaacccaggcccttctagaggcgggatccacaccatggctacctacgaggtgctgtgcgaggtggcaagaaagctgggcaccgacgacagagaagtggtgctgttcctgctgaacgtgttcatccctcagcctacactggcccagctgatcggtgcactgagagccctgaaagaggaaggccggctgacctttcctctgctggccgaatgcctgttcagagccggaagaagggatctgctgcgggacctgctgcatctggaccccagatttctggaaagacacctggccggcaccatgagctacttcagcccttaccagctgaccgtgctgcacgttgacggcgaactgtgcgccagagatattcggagcctgatcttcctgagcaaggacaccatcggcagccggtctacccctcagacatttctgcactgggtgtactgcatggaaaacctggacctgctcggccccacagatgtggatgccctgatgtccatgctgagaagcctgagcagagtggacctccagagacaggtgcagacactgatgggactgcacctgagcggacctagccacagccagcactacagacacacccct

SEQ ID NO: 4125 - DNA, 2289 bp, Artificial Sequence
  Synthetic Polynucloetide
atggccttaccagtgaccgccttgctcctgccgctggccttgctgctccacgccgccaggccgcagctccagctgcaagagtctggacctggcctggtcaagcctagcgagacactgagcctgacctgtaccgtgtccggcgatagcatcagcagcggcgattactactggggctggatcagacagcctcctggcaaaggactggaatggatcggccacatctactacagcggcgtgacctactacaaccccagcctgaagtccagagtgaccatcagcgtggacaccagccggaaccagttctccctgaagctgtctagcgtgacagccgccgataccgccgtgtactactgcaccagagaggacagcagcaactggcggagtagaggccagggaacactggtcacagttagctctggtaccggcggaggcggatctggcggcggaggtagcggtggcggaggatctgaattcgacatccagatgacacagagccctagcagcctgtctgccagcgtgggagacagagtgaccatcacatgcaaggccagcgaccacatcaacaactggctggcctggtatcagcagaagcctggacaggcccctaagctgctgatctacggcgctaccacactggaaacaggcgtgcccagcagattttctggcagcggctctggcaccgactacaccctgacaatatccagcctccagcctgaggacttcgccacctactactgtcagcagagctggaacaccccttggacattcggccagggcaccaagctggaaatcaagagactcgagatccagaaccctgatcctgccgtgtaccagctgcgggatagcaagagcagcgacaagagcgtgtgtctgttcaccgacttcgacagccagaccaacgtgtcccagagcaaggactccgacgtgtacatcaccgataagtgcgtgctggacatgcggagcatggacttcaagagcaactccgccgtggcctggtccaacaagtccgatttcgcctgcgccaacgccttcaacaacagcattatccccgaggacacattcttcccaagccccgagagcagctgcgacgtgaagctggtggaaaagagcttcgagacagacaccaacctgaacttccagaacctgagcgtgatcggcttcagaatcctgctgctgaaagtggccggctttaacctgctgatgaccctgcggctgtggtccagccgcgccaagagaagcggatctggcgtgaagcagaccctgaatttcgacctgctgaagctggctggcgacgtggaatccaacccaggccctactagtatggactggatttggcgcatccttttccttgtcggcgctgctaccggcgcgcattccttcgaacaagttcagcttcaacagcctggcgctgagctggtcaaacctggcgcttctgtgaagatgagctgcaaagccagcggctacgccttcagcagctactggatcaactggatgaagcagaaacccggccagggactcgaatggatcggccaaatctatcccggcgacggcgacaccaactacaacggcaagttcaagggcagagccacactgaccgccgatacctctagcagcacagcctacatgcagctgagcagcctgaccagcgaagatagcgccgtgtacttctgtgcccggtccatcacaacagtcgtgggctgcgctatggactattggggccagggaacaagcgtgaccgtgtctagtacgcgtgaggacctgaagaacgtgttcccacctgaggtggccgtgttcgagcctagcgaggccgagatcagccacacccagaaagccaccctcgtgtgcctggctaccggcttctaccccgaccatgtggaactgtcttggtgggtcaacggcaaagaggtgcacagcggcgtgtgtaccgacccccagccactgaaagaacagcccgccctgaacgacagccggtactgcctgagcagcagactgagagtgtccgccaccttctggcagaacccccggaaccacttcagatgccaggtgcagttctacggcctgagcgagaacgacgagtggacccaggacagagccaagcccgtgacccagatcgtgtctgccgaagcctggggcagagccgattgcggctttaccagcgagagctaccagcagggcgtgctgagcgccaccatcctgtacgagatcctgctgggcaaggccaccctgtacgccgtgctggtgtctgccctggtgctgatggctatggtcaagcggaaggacagccgggga

SEQ ID NO: 4126 - DNA, 2955 bp, Artificial Sequence
  Synthetic Polynucloetide
atggccttaccagtgaccgccttgctcctgccgctggccttgctgctccacgccgccaggccgcagctccagctgcaagagtctggacctggcctggtcaagcctagcgagacactgagcctgacctgtaccgtgtccggcgatagcatcagcagcggcgattactactggggctggatcagacagcctcctggcaaaggactggaatggatcggccacatctactacagcggcgtgacctactacaaccccagcctgaagtccagagtgaccatcagcgtggacaccagccggaaccagttctccctgaagctgtctagcgtgacagccgccgataccgccgtgtactactgcaccagagaggacagcagcaactggcggagtagaggccagggaacactggtcacagttagctctggtaccggcggaggcggatctggcggcggaggtagcggtggcggaggatctgaattcgacatccagatgacacagagccctagcagcctgtctgccagcgtgggagacagagtgaccatcacatgcaaggccagcgaccacatcaacaactggctggcctggtatcagcagaagcctggacaggcccctaagctgctgatctacggcgctaccacactggaaacaggcgtgcccagcagattttctggcagcggctctggcaccgactacaccctgacaatatccagcctccagcctgaggacttcgccacctactactgtcagcagagctggaacaccccttggacattcggccagggcaccaagctggaaatcaagagactcgagatccagaaccctgatcctgccgtgtaccagctgcgggatagcaagagcagcgacaagagcgtgtgtctgttcaccgacttcgacagccagaccaacgtgtcccagagcaaggactccgacgtgtacatcaccgataagtgcgtgctggacatgcggagcatggacttcaagagcaactccgccgtggcctggtccaacaagtccgatttcgcctgcgccaacgccttcaacaacagcattatccccgaggacacattcttcccaagccccgagagcagctgcgacgtgaagctggtggaaaagagcttcgagacagacaccaacctgaacttccagaacctgagcgtgatcggcttcagaatcctgctgctgaaagtggccggctttaacctgctgatgaccctgcggctgtggtccagccgcgccaagagaagcggatctggcgtgaagcagaccctgaatttcgacctgctgaagctggctggcgacgtggaatccaacccaggccctactagtatggactggatttggcgcatccttttccttgtcggcgctgctaccggcgcgcattccttcgaacaagttcagcttcaacagcctggcgctgagctggtcaaacctggcgcttctgtgaagatgagctgcaaagccagcggctacgccttcagcagctactggatcaactggatgaagcagaaacccggccagggactcgaatggatcggccaaatctatcccggcgacggcgacaccaactacaacggcaagttcaagggcagagccacactgaccgccgatacctctagcagcacagcctacatgcagctgagcagcctgaccagcgaagatagcgccgtgtacttctgtgcccggtccatcacaacagtcgtgggctgcgctatggactattggggccagggaacaagcgtgaccgtgtctagtacgcgtgaggacctgaagaacgtgttcccacctgaggtggccgtgttcgagcctagcgaggccgagatcagccacacccagaaagccaccctcgtgtgcctggctaccggcttctaccccgaccatgtggaactgtcttggtgggtcaacggcaaagaggtgcacagcggcgtgtgtaccgacccccagccactgaaagaacagcccgccctgaacgacagccggtactgcctgagcagcagactgagagtgtccgccaccttctggcagaacccccggaaccacttcagatgccaggtgcagttctacggcctgagcgagaacgacgagtggacccaggacagagccaagcccgtgacccagatcgtgtctgccgaagcctggggcagagccgattgcggctttaccagcgagagctaccagcagggcgtgctgagcgccaccatcctgtacgagatcctgctgggcaaggccaccctgtacgccgtgctggtgtctgccctggtgctgatggctatggtcaagcggaaggacagccggggaagggccaagcgatctggatctggagcaacaaacttctcactactcaaacaagcaggtgacgtggaggagaatcccgggccttctagaggcgggatccacaccatggctacctacgaggtgctgtgcgaggtggcaagaaagctgggcaccgacgacagagaagtggtgctgttcctgctgaacgtgttcatccctcagcctacactggcccagctgatcggtgcactgagagccctgaaagaggaaggccggctgacctttcctctgctggccgaatgcctgttcagagccggaagaagggatctgctgcgggacctgctgcatctggaccccagatttctggaaagacacctggccggcaccatgagctacttcagcccttaccagctgaccgtgctgcacgttgacggcgaactgtgcgccagagatattcggagcctgatcttcctgagcaaggacaccatcggcagccggtctacccctcagacatttctgcactgggtgtactgcatggaaaacctggacctgctcggccccacagatgtggatgccctgatgtccatgctgagaagcctgagcagagtggacctccagagacaggtgcagacactgatgggactgcacctgagcggacctagccacagccagcactacagacacacccct

SEQ ID NO: 4127 - DNA, 3114 bp, Artificial Sequence
  Synthetic Polynucloetide
atggccttaccagtgaccgccttgctcctgccgctggccttgctgctccacgccgccaggccgctcgaggggaaaccaattcccaaccctcttctgggactggattcaaccggcagcggcgaggacctgaagaacgtgttcccacctgaggtggccgtgttcgagcctagcaaggccgagatcgcccacacccagaaagccaccctcgtgtgcctggctaccggcttctaccccgaccatgtggaactgtcttggtgggtcaacggcaaagaggtgcacagcggcgtgtgtaccgacccccagccactgaaagaacagcccgccctgaacgacagccggtactgcctgagcagcagactgagagtgtccgccaccttctggcagaacccccggaaccacttcagatgccaggtgcagttctacggcctgagcgagaacgacgagtggacccaggacagagccaagcccgtgacccagatcgtgtctgccgaagcctggggcagagccgattgcggcatcaccagcgccagctaccaccagggcgtgctgagcgccaccatcctgtacgagatcctgctgggcaaggccaccctgtacgccgtgctggtgtctgccctggtgctgatggctatggtcaagcggaaggacagccggggaagggccaagcgatctggatctggagcaacaaacttctcactactcaaacaagcaggtgacgtggaggagaatcccgggcctactagcatggccttaccagtgaccgccttgctcctgccgctggccttgctgctccacgccgccaggccgcagctccagctgcaagagtctggacctggcctggtcaagcctagcgagacactgagcctgacctgtaccgtgtccggcgatagcatcagcagcggcgattactactggggctggatcagacagcctcctggcaaaggactggaatggatcggccacatctactacagcggcgtgacctactacaaccccagcctgaagtccagagtgaccatcagcgtggacaccagccggaaccagttctccctgaagctgtctagcgtgacagccgccgataccgccgtgtactactgcaccagagaggacagcagcaactggcggagtagaggccagggaacactggtcacagttagctctggtaccggcggaggcggatctggcggcggaggtagcggtggcggaggatctgaattcgacatccagatgacacagagccctagcagcctgtctgccagcgtgggagacagagtgaccatcacatgcaaggccagcgaccacatcaacaactggctggcctggtatcagcagaagcctggacaggcccctaagctgctgatctacggcgctaccacactggaaacaggcgtgcccagcagattttctggcagcggctctggcaccgactacaccctgacaatatccagcctccagcctgaggacttcgccacctactactgtcagcagagctggaacaccccttggacattcggccagggcaccaagctggaaatcaagagaggcggaggcggaagtggaggcggaggatctggcggcggaggctctcaagttcagcttcaacagcctggcgctgagctggtcaaacctggcgcttctgtgaagatgagctgcaaagccagcggctacgccttcagcagctactggatcaactggatgaagcagaaacccggccagggactcgaatggatcggccaaatctatcccggcgacggcgacaccaactacaacggcaagttcaagggcagagccacactgaccgccgatacctctagcagcacagcctacatgcagctgagcagcctgaccagcgaagatagcgccgtgtacttctgtgcccggtccatcacaacagtcgtgggctgcgctatggactattggggccagggaacaagcgtgaccgtgtctagtacgcgtgagcagaaactgatctcggaagaggatgggagcggcatccagaaccctgatcctgccgtgtaccagctgcgggatagcaagagcagcgacaagagcgtgtgtctgttcaccgacttcgacagccagaccaacgtgtcccagagcaaggactccgacgtgtacatcaccgataagtgcgtgctggacatgcggagcatggacttcaagagcaactccgccgtggcctggtccaacaagtccgatttcgcctgcgccaacgccttcaacaacagcattatccccgaggacacattcttcccaagcagcgacgtgccctgcgacgtgaagctggtggaaaagagcttcgagacagacaccaacctgaacttccagaacctgagcgtgatcggcttcagaatcctgctgctgaaagtggccggctttaacctgctgatgaccctgcggctgtggtccagccgcgccaagagaagcggatctggcgtgaagcagaccctgaatttcgacctgctgaagctggctggcgacgtggaatccaacccaggcccttctagaggccatatgaccgagtacaagcccacggtgcgcctcgccacccgcgacgacgtccccagggccgtacgcaccctcgccgccgcgttcgccgactaccccgccacgcgccacaccgtcgatccggaccgccacatcgagcgggtcaccgagctgcaagaactcttcctcacgcgcgtcgggctcgacatcggcaaggtgtgggtcgcggacgacggcgccgcggtggcggtctggaccacgccggagagcgtcgaagcgggggcggtgttcgccgagatcggcccgcgcatggccgagttgagcggttcccggctggccgcgcagcaacagatggaaggcctcctggcgccgcaccggcccaaggagcccgcgtggttcctggccaccgtcggcgtctcgcccgaccaccagggcaagggtctgggcagcgccgtcgtgctccccggagtggaggcggccgagcgcgccggggtgcccgccttcctggagacctccgcgccccgcaacctccccttctacgagcggctcggcttcaccgtcaccgccgacgtcgaggtgcccgaaggaccgcgcacctggtgcatgacccgcaagcccggtgcctga

SEQ ID NO: 4128 - DNA, 3117 bp, Artificial Sequence
  Synthetic Polynucloetide
atggccttaccagtgaccgccttgctcctgccgctggccttgctgctccacgccgccaggccgctcgagcagaaactgatctcggaagaggatctgggctccggcgatcgccctgatcctgccgtgtaccagctgcgggatagcaagagcagcgacaagagcgtgtgtctgttcaccgacttcgacagccagaccaacgtgtcccagagcaaggactccgacgtgtacatcaccgataagtgcgtgctggacatgcggagcatggacttcaagagcaactccgccgtggcctggtccaacaagtccgatttcgcctgcgccaacgccttcaacaacagcattatccccgaggacacattcttcccaagccccgagagcagctgcgacgtgaagctggtggaaaagagcttcgagacagacaccaacctgaacttccagaacctgagcgtgatcggcttcagaatcctgctgctgaaagtggccggctttaacctgctgatgaccctgcggctgtggtccagctctagtcgcgccaagagaagcggatctggcgtgaagcagaccctgaatttcgacctgctgaagctggctggcgacgtggaatccaacccaggccccactagcatggccttaccagtgaccgccttgctcctgccgctggccttgctgctccacgccgccaggccgcagctccagctgcaagagtctggacctggcctggtcaagcctagcgagacactgagcctgacctgtaccgtgtccggcgatagcatcagcagcggcgattactactggggctggatcagacagcctcctggcaaaggactggaatggatcggccacatctactacagcggcgtgacctactacaaccccagcctgaagtccagagtgaccatcagcgtggacaccagccggaaccagttctccctgaagctgtctagcgtgacagccgccgataccgccgtgtactactgcaccagagaggacagcagcaactggcggagtagaggccagggaacactggtcacagttagctctggtaccggcggaggcggatctggcggcggaggtagcggtggcggaggatctgaattcgacatccagatgacacagagccctagcagcctgtctgccagcgtgggagacagagtgaccatcacatgcaaggccagcgaccacatcaacaactggctggcctggtatcagcagaagcctggacaggcccctaagctgctgatctacggcgctaccacactggaaacaggcgtgcccagcagattttctggcagcggctctggcaccgactacaccctgacaatatccagcctccagcctgaggacttcgccacctactactgtcagcagagctggaacaccccttggacattcggccagggcaccaagctggaaatcaagagaggcggaggcggaagtggaggcggaggatctggcggcggaggctctcaagttcagcttcaacagcctggcgctgagctggtcaaacctggcgcttctgtgaagatgagctgcaaagccagcggctacgccttcagcagctactggatcaactggatgaagcagaaacccggccagggactcgaatggatcggccaaatctatcccggcgacggcgacaccaactacaacggcaagttcaagggcagagccacactgaccgccgatacctctagcagcacagcctacatgcagctgagcagcctgaccagcgaagatagcgccgtgtacttctgtgcccggtccatcacaacagtcgtgggctgcgctatggactattggggccagggaacaagcgtgaccgtgtctagtacgcgtgggaaaccaattcccaaccctcttctgggactggattcaaccggcagcggcgaggacctgaagaacgtgttcccacctgaggtggccgtgttcgagcctagcgaggccgagatcagccacacccagaaagccaccctcgtgtgcctggctaccggcttctaccccgaccatgtggaactgtcttggtgggtcaacggcaaagaggtgcacagcggcgtgtgtaccgacccccagccactgaaagaacagcccgccctgaacgacagccggtactgcctgagcagcagactgagagtgtccgccaccttctggcagaacccccggaaccacttcagatgccaggtgcagttctacggcctgagcgagaacgacgagtggacccaggacagagccaagcccgtgacccagatcgtgtctgccgaagcctggggcagagccgattgcggctttaccagcgagagctaccagcagggcgtgctgagcgccaccatcctgtacgagatcctgctgggcaaggccaccctgtacgccgtgctggtgtctgccctggtgctgatggctatggtcaagcggaaggacagccggggaagggccaagcgatctggatctggagcaacaaacttctcactactcaaacaagcaggtgacgtggaggagaatcccgggccttctagaggccatatgaccgagtacaagcccacggtgcgcctcgccacccgcgacgacgtccccagggccgtacgcaccctcgccgccgcgttcgccgactaccccgccacgcgccacaccgtcgatccggaccgccacatcgagcgggtcaccgagctgcaagaactcttcctcacgcgcgtcgggctcgacatcggcaaggtgtgggtcgcggacgacggcgccgcggtggcggtctggaccacgccggagagcgtcgaagcgggggcggtgttcgccgagatcggcccgcgcatggccgagttgagcggttcccggctggccgcgcagcaacagatggaaggcctcctggcgccgcaccggcccaaggagcccgcgtggttcctggccaccgtcggcgtctcgcccgaccaccagggcaagggtctgggcagcgccgtcgtgctccccggagtggaggcggccgagcgcgccggggtgcccgccttcctggagacctccgcgccccgcaacctccccttctacgagcggctcggcttcaccgtcaccgccgacgtcgaggtgcccgaaggaccgcgcacctggtgcatgacccgcaagcccggtgcctga

SEQ ID NO: 4129 - DNA, 2979 bp, Artificial Sequence
  Synthetic Polynucloetide
atggccttaccagtgaccgccttgctcctgccgctggccttgctgctccacgccgccaggccgcagctccagctgcaagagtctggacctggcctggtcaagcctagcgagacactgagcctgacctgtaccgtgtccggcgatagcatcagcagcggcgattactactggggctggatcagacagcctcctggcaaaggactggaatggatcggccacatctactacagcggcgtgacctactacaaccccagcctgaagtccagagtgaccatcagcgtggacaccagccggaaccagttctccctgaagctgtctagcgtgacagccgccgataccgccgtgtactactgcaccagagaggacagcagcaactggcggagtagaggccagggaacactggtcacagttagctctggtaccggcggaggcggatctggcggcggaggtagcggtggcggaggatctgaattcgacatccagatgacacagagccctagcagcctgtctgccagcgtgggagacagagtgaccatcacatgcaaggccagcgaccacatcaacaactggctggcctggtatcagcagaagcctggacaggcccctaagctgctgatctacggcgctaccacactggaaacaggcgtgcccagcagattttctggcagcggctctggcaccgactacaccctgacaatatccagcctccagcctgaggacttcgccacctactactgtcagcagagctggaacaccccttggacattcggccagggcaccaagctggaaatcaagagactcgaggacctgaagaacgtgttcccacctgaggtggccgtgttcgagcctagcgaggccgagatcagccacacccagaaagccaccctcgtgtgcctggctaccggcttctaccccgaccatgtggaactgtcttggtgggtcaacggcaaagaggtgcacagcggcgtgtctaccgacccccagccactgaaagaacagcccgccctgaacgacagccggtactgcctgagcagcagactgagagtgtccgccaccttctggcagaacccccggaaccacttcagatgccaggtgcagttctacggcctgagcgagaacgacgagtggacccaggacagagccaagcccgtgacccagatcgtgtctgccgaagcctggggcagagccgattgcggctttaccagcgagagctaccagcagggcgtgctgagcgccaccatcctgtacgagatcctgctgggcaaggccaccctgtacgccgtgctggtgtctgccctggtgctgatggctatggtcaagcggaaggacagccggggaagggccaagcgatctggatctggagcaacaaacttctcactactcaaacaagcaggtgacgtggaggagaatcccgggcctactagtatggactggatttggcgcatccttttccttgtcggcgctgctaccggcgcgcattccttcgaacaagttcagcttcaacagcctggcgctgagctggtcaaacctggcgcttctgtgaagatgagctgcaaagccagcggctacgccttcagcagctactggatcaactggatgaagcagaaacccggccagggactcgaatggatcggccaaatctatcccggcgacggcgacaccaactacaacggcaagttcaagggcagagccacactgaccgccgatacctctagcagcacagcctacatgcagctgagcagcctgaccagcgaagatagcgccgtgtacttctgtgcccggtccatcacaacagtcgtgggctgcgctatggactattggggccagggaacaagcgtgaccgtgtctagtacgcgtatccagaaccctgatcctgccgtgtaccagctgcgggatagcaagagcagcgacaagagcgtgtgtctgttcaccgacttcgacagccagaccaacgtgtcccagagcaaggactccgacgtgtacatcaccgataagaccgtgctggacatgcggagcatggacttcaagagcaactccgccgtggcctggtccaacaagtccgatttcgcctgcgccaacgccttcaacaacagcattatccccgaggacacattcttcccaagccccgagagcagctgcgacgtgaagctggtggaaaagagcttcgagacagacaccaacctgaacttccagaacctgagcgtgatcggcttcagaatcctgctgctgaaagtggccggctttaacctgctgatgaccctgcggctgtggtccagccgcgccaagagaagcggatctggcgtgaagcagaccctgaatttcgacctgctgaagctggctggcgacgtggaatccaacccaggcccttctagaggccatatgaccgagtacaagcccacggtgcgcctcgccacccgcgacgacgtccccagggccgtacgcaccctcgccgccgcgttcgccgactaccccgccacgcgccacaccgtcgatccggaccgccacatcgagcgggtcaccgagctgcaagaactcttcctcacgcgcgtcgggctcgacatcggcaaggtgtgggtcgcggacgacggcgccgcggtggcggtctggaccacgccggagagcgtcgaagcgggggcggtgttcgccgagatcggcccgcgcatggccgagttgagcggttcccggctggccgcgcagcaacagatggaaggcctcctggcgccgcaccggcccaaggagcccgcgtggttcctggccaccgtcggcgtctcgcccgaccaccagggcaagggtctgggcagcgccgtcgtgctccccggagtggaggcggccgagcgcgccggggtgcccgccttcctggagacctccgcgccccgcaacctccccttctacgagcggctcggcttcaccgtcaccgccgacgtcgaggtgcccgaaggaccgcgcacctggtgcatgacccgcaagcccggtgcctga

SEQ ID NO: 4130 - DNA, 3225 bp, Artificial Sequence
  Synthetic Polynucloetide
atggccttaccagtgaccgccttgctcctgccgctggccttgctgctccacgccgccaggccgcagctccagctgcaagagtctggacctggcctggtcaagcctagcgagacactgagcctgacctgtaccgtgtccggcgatagcatcagcagcggcgattactactggggctggatcagacagcctcctggcaaaggactggaatggatcggccacatctactacagcggcgtgacctactacaaccccagcctgaagtccagagtgaccatcagcgtggacaccagccggaaccagttctccctgaagctgtctagcgtgacagccgccgataccgccgtgtactactgcaccagagaggacagcagcaactggcggagtagaggccagggaacactggtcacagttagctctggtaccggcggaggcggatctggcggcggaggtagcggtggcggaggatctgaattcgacatccagatgacacagagccctagcagcctgtctgccagcgtgggagacagagtgaccatcacatgcaaggccagcgaccacatcaacaactggctggcctggtatcagcagaagcctggacaggcccctaagctgctgatctacggcgctaccacactggaaacaggcgtgcccagcagattttctggcagcggctctggcaccgactacaccctgacaatatccagcctccagcctgaggacttcgccacctactactgtcagcagagctggaacaccccttggacattcggccagggcaccaagctggaaatcaagagactcgaggacctgaagaacgtgttcccacctgaggtggccgtgttcgagcctagcgaggccgagatcagccacacccagaaagccaccctcgtgtgcctggctaccggcttctaccccgaccatgtggaactgtcttggtgggtcaacggcaaagaggtgcacagcggcgtgtctaccgacccccagccactgaaagaacagcccgccctgaacgacagccggtactgcctgagcagcagactgagagtgtccgccaccttctggcagaacccccggaaccacttcagatgccaggtgcagttctacggcctgagcgagaacgacgagtggacccaggacagagccaagcccgtgacccagatcgtgtctgccgaagcctggggcagagccgattgcggctttaccagcgagagctaccagcagggcgtgctgagcgccaccatcctgtacgagatcctgctgggcaaggccaccctgtacgccgtgctggtgtctgccctggtgctgatggctatggtcaagcggaaggacagccggggaagggccaagcgatctggatctggagcaacaaacttctcactactcaaacaagcaggtgacgtggaggagaatcccgggcctactagtatggactggatttggcgcatccttttccttgtcggcgctgctaccggcgcgcattccttcgaacaagttcagcttcaacagcctggcgctgagctggtcaaacctggcgcttctgtgaagatgagctgcaaagccagcggctacgccttcagcagctactggatcaactggatgaagcagaaacccggccagggactcgaatggatcggccaaatctatcccggcgacggcgacaccaactacaacggcaagttcaagggcagagccacactgaccgccgatacctctagcagcacagcctacatgcagctgagcagcctgaccagcgaagatagcgccgtgtacttctgtgcccggtccatcacaacagtcgtgggctgcgctatggactattggggccagggaacaagcgtgaccgtgtctagtacgcgtgagcagaaactgatctcggaagaggatgggagcggcaccccattcccttctctggcccctcccatcatgctgctggtggacggcaagcagcagatggtggtcgtgtgcctggtgctggatgtggccccacctggactggacagccccatctggtttagcgccggcaatggctctgccctggacgcctttacctacggcccaagccctgccaccgatggcacctggacaaatctggcccacctgagcctgcccagcgaggaactggcttcttgggagcctctcgtgtgccacacaggacctggcgctgagggacacagcagatccacccagcctatgcacctgtctggcgaggccagcaccgccagaacctgtcctcaggaacctctgagaggcacccctggcggagcactgtggctgggagtgctgagactgctgctgttcaagctgctgctgtttgacctgctgctgacctgctcctgtctgtgcgatcctgccggccctctgccttctcctgccaccaccacaagactgagagccctgggcagccacagactgcaccctgccacagagacaggcggcagagaggccacaagcagccctagaccccagcccagagacagaagatggggcgataccccccctggcagaaagcctggatctccagtccgcgccaagagaagcggatctggcgtgaagcagaccctgaatttcgacctgctgaagctggctggcgacgtggaatccaacccaggcccttctagaggccatatgaccgagtacaagcccacggtgcgcctcgccacccgcgacgacgtccccagggccgtacgcaccctcgccgccgcgttcgccgactaccccgccacgcgccacaccgtcgatccggaccgccacatcgagcgggtcaccgagctgcaagaactcttcctcacgcgcgtcgggctcgacatcggcaaggtgtgggtcgcggacgacggcgccgcggtggcggtctggaccacgccggagagcgtcgaagcgggggcggtgttcgccgagatcggcccgcgcatggccgagttgagcggttcccggctggccgcgcagcaacagatggaaggcctcctggcgccgcaccggcccaaggagcccgcgtggttcctggccaccgtcggcgtctcgcccgaccaccagggcaagggtctgggcagcgccgtcgtgctccccggagtggaggcggccgagcgcgccggggtgcccgccttcctggagacctccgcgccccgcaacctccccttctacgagcggctcggcttcaccgtcaccgccgacgtcgaggtgcccgaaggaccgcgcacctggtgcatgacccgcaagcccggtgcctga

SEQ ID NO: 4131 - DNA, 3279 bp, Artificial Sequence
  Synthetic Polynucloetide
atggccttaccagtgaccgccttgctcctgccgctggccttgctgctccacgccgccaggccgctcgaggacctgaagaacgtgttcccacctgaggtggccgtgttcgagcctagcgaggccgagatcagccacacccagaaagccaccctcgtgtgcctggctaccggcttctaccccgaccatgtggaactgtcttggtgggtcaacggcaaagaggtgcacagcggcgtgtctaccgacccccagccactgaaagaacagcccgccctgaacgacagccggtactgcctgagcagcagactgagagtgtccgccaccttctggcagaacccccggaaccacttcagatgccaggtgcagttctacggcctgagcgagaacgacgagtggacccaggacagagccaagcccgtgacccagatcgtgtctgccgaagcctggggcagagccgattgcggctttaccagcgagagctaccagcagggcgtgctgagcgccaccatcctgtacgagatcctgctgggcaaggccaccctgtacgccgtgctggtgtctgccctggtgctgatggctatggtcaagcggaaggacagccggggaagggccaagcgatctggatctggagcaacaaacttctcactactcaaacaagcaggtgacgtggaggagaatcccgggcctactagcatggccttaccagtgaccgccttgctcctgccgctggccttgctgctccacgccgccaggccgcagctccagctgcaagagtctggacctggcctggtcaagcctagcgagacactgagcctgacctgtaccgtgtccggcgatagcatcagcagcggcgattactactggggctggatcagacagcctcctggcaaaggactggaatggatcggccacatctactacagcggcgtgacctactacaaccccagcctgaagtccagagtgaccatcagcgtggacaccagccggaaccagttctccctgaagctgtctagcgtgacagccgccgataccgccgtgtactactgcaccagagaggacagcagcaactggcggagtagaggccagggaacactggtcacagttagctctggtaccggcggaggcggatctggcggcggaggtagcggtggcggaggatctgaattcgacatccagatgacacagagccctagcagcctgtctgccagcgtgggagacagagtgaccatcacatgcaaggccagcgaccacatcaacaactggctggcctggtatcagcagaagcctggacaggcccctaagctgctgatctacggcgctaccacactggaaacaggcgtgcccagcagattttctggcagcggctctggcaccgactacaccctgacaatatccagcctccagcctgaggacttcgccacctactactgtcagcagagctggaacaccccttggacattcggccagggcaccaagctggaaatcaagagaggcggaggcggaagtggaggcggaggatctggcggcggaggctctcaagttcagcttcaacagcctggcgctgagctggtcaaacctggcgcttctgtgaagatgagctgcaaagccagcggctacgccttcagcagctactggatcaactggatgaagcagaaacccggccagggactcgaatggatcggccaaatctatcccggcgacggcgacaccaactacaacggcaagttcaagggcagagccacactgaccgccgatacctctagcagcacagcctacatgcagctgagcagcctgaccagcgaagatagcgccgtgtacttctgtgcccggtccatcacaacagtcgtgggctgcgctatggactattggggccagggaacaagcgtgaccgtgtctagtacgcgtgagcagaaactgatctcggaagaggatctggggagcggcaccccattcccttctctggcccctcccatcatgctgctggtggacggcaagcagcagatggtggtcgtgtgcctggtgctggatgtggccccacctggactggacagccccatctggtttagcgccggcaatggctctgccctggacgcctttacctacggcccaagccctgccaccgatggcacctggacaaatctggcccacctgagcctgcccagcgaggaactggcttcttgggagcctctcgtgtgccacacaggacctggcgctgagggacacagcagatccacccagcctatgcacctgtctggcgaggccagcaccgccagaacctgtcctcaggaacctctgagaggcacccctggcggagcactgtggctgggagtgctgagactgctgctgttcaagctgctgctgtttgacctgctgctgacctgctcctgtctgtgcgatcctgccggccctctgccttctcctgccaccaccacaagactgagagccctgggcagccacagactgcaccctgccacagagacaggcggcagagaggccacaagcagccctagaccccagcccagagacagaagatggggcgataccccccctggcagaaagcctggatctccagtccgcgccaagagaagcggatctggcgtgaagcagaccctgaatttcgacctgctgaagctggctggcgacgtggaatccaacccaggcccttctagatctagaggccatatgaccgagtacaagcccacggtgcgcctcgccacccgcgacgacgtccccagggccgtacgcaccctcgccgccgcgttcgccgactaccccgccacgcgccacaccgtcgatccggaccgccacatcgagcgggtcaccgagctgcaagaactcttcctcacgcgcgtcgggctcgacatcggcaaggtgtgggtcgcggacgacggcgccgcggtggcggtctggaccacgccggagagcgtcgaagcgggggcggtgttcgccgagatcggcccgcgcatggccgagttgagcggttcccggctggccgcgcagcaacagatggaaggcctcctggcgccgcaccggcccaaggagcccgcgtggttcctggccaccgtcggcgtctcgcccgaccaccagggcaagggtctgggcagcgccgtcgtgctccccggagtggaggcggccgagcgcgccggggtgcccgccttcctggagacctccgcgccccgcaacctccccttctacgagcggctcggcttcaccgtcaccgccgacgtcgaggtgcccgaaggaccgcgcacctggtgcatgacccgcaagcccggtgcctga

SEQ ID NO: 4132 - DNA, 3090 bp, Artificial Sequence
  Synthetic Polynucloetide
atggccttaccagtgaccgccttgctcctgccgctggccttgctgctccacgccgccaggccgcagctccagctgcaagagtctggacctggcctggtcaagcctagcgagacactgagcctgacctgtaccgtgtccggcgatagcatcagcagcggcgattactactggggctggatcagacagcctcctggcaaaggactggaatggatcggccacatctactacagcggcgtgacctactacaaccccagcctgaagtccagagtgaccatcagcgtggacaccagccggaaccagttctccctgaagctgtctagcgtgacagccgccgataccgccgtgtactactgcaccagagaggacagcagcaactggcggagtagaggccagggaacactggtcacagttagctctggtaccggcggaggcggatctggcggcggaggtagcggtggcggaggatctgaattcgacatccagatgacacagagccctagcagcctgtctgccagcgtgggagacagagtgaccatcacatgcaaggccagcgaccacatcaacaactggctggcctggtatcagcagaagcctggacaggcccctaagctgctgatctacggcgctaccacactggaaacaggcgtgcccagcagattttctggcagcggctctggcaccgactacaccctgacaatatccagcctccagcctgaggacttcgccacctactactgtcagcagagctggaacaccccttggacattcggccagggcaccaagctggaaatcaagagactcgaggggaaaccaattcccaaccctcttctgggactggattcaaccggcagcggcgacaagcagctggacgccgacgtgtcccccaagcctaccatcttcctgccctctatcgccgagacaaagctccagaaggccggcacctacctgtgcctgctggaaaagttcttcccagatgtgattaagatccactggcaggaaaagaagtccaacaccatcctgggcagccaggaaggcaacaccatgaagaccaacgacacctacatgaagttcagctggctgaccgtgcccgagaagtccctggacaaagaacacagatgcatcgtgcggcacgaaaacaacaagaacggcgtggaccaggaaatcatcttcccacccatcaagaccgatgtgattacaatggaccccaaggacaactgctccaaggacgccaacgataccctgctgctccagctgaccaacaccagcgcctactacatgtacttgttgctgctgctgaagtccgtggtgtacttcgccatcatcacatgctgcctgctgcggagaaccgccttctgctgcaacggcgagaagtctagggccaagcgatctggatctggagcaacaaacttctcactactcaaacaagcaggtgacgtggaggagaatcccgggcctactagtatggactggatttggcgcatccttttccttgtcggcgctgctaccggcgcgcattccttcgaacaagttcagcttcaacagcctggcgctgagctggtcaaacctggcgcttctgtgaagatgagctgcaaagccagcggctacgccttcagcagctactggatcaactggatgaagcagaaacccggccagggactcgaatggatcggccaaatctatcccggcgacggcgacaccaactacaacggcaagttcaagggcagagccacactgaccgccgatacctctagcagcacagcctacatgcagctgagcagcctgaccagcgaagatagcgccgtgtacttctgtgcccggtccatcacaacagtcgtgggctgcgctatggactattggggccagggaacaagcgtgaccgtgtctagtacgcgtgagcagaaactgatctcggaagaggatgggagcggcagccagcctcacaccaagcccagcgtgttcgtgatgaagaacggcaccaacgtggcctgcctcgtgaaagagttctaccccaaggacatcaggatcaacctggtgtccagcaagaagatcaccgagttcgaccccgccatcgtgatctcccccagcggcaagtacaacgccgtgaagctggggaagtacgaggacagcaacagcgtgacctgctccgtgcagcacgacaacaagaccgtgcacagcaccgactttgaagtgaaaaccgactccaccgaccacgtgaagcccaaagagacagagaacaccaagcagcccagcaagagctgccacaagcccaaggccatcgtgcacaccgagaaagtgaacatgatgagcctgaccgtgctgggcctgcggatgctgttcgccaaaaccgtggccgtgaacttcctgctgaccgccaagctgttcttcctccgcgccaagagaagcggatctggcgtgaagcagaccctgaatttcgacctgctgaagctggctggcgacgtggaatccaacccaggcccttctagaggccatatgaccgagtacaagcccacggtgcgcctcgccacccgcgacgacgtccccagggccgtacgcaccctcgccgccgcgttcgccgactaccccgccacgcgccacaccgtcgatccggaccgccacatcgagcgggtcaccgagctgcaagaactcttcctcacgcgcgtcgggctcgacatcggcaaggtgtgggtcgcggacgacggcgccgcggtggcggtctggaccacgccggagagcgtcgaagcgggggcggtgttcgccgagatcggcccgcgcatggccgagttgagcggttcccggctggccgcgcagcaacagatggaaggcctcctggcgccgcaccggcccaaggagcccgcgtggttcctggccaccgtcggcgtctcgcccgaccaccagggcaagggtctgggcagcgccgtcgtgctccccggagtggaggcggccgagcgcgccggggtgcccgccttcctggagacctccgcgccccgcaacctccccttctacgagcggctcggcttcaccgtcaccgccgacgtcgaggtgcccgaaggaccgcgcacctggtgcatgacccgcaagcccggtgcctga

SEQ ID NO: 4133 - DNA, 2301 bp, Artificial Sequence
  Synthetic Polynucloetide
atggccttaccagtgaccgccttgctcctgccgctggccttgctgctccacgccgccaggccgcagctccagctgcaagagtctggacctggcctggtcaagcctagcgagacactgagcctgacctgtaccgtgtccggcgatagcatcagcagcggcgattactactggggctggatcagacagcctcctggcaaaggactggaatggatcggccacatctactacagcggcgtgacctactacaaccccagcctgaagtccagagtgaccatcagcgtggacaccagccggaaccagttctccctgaagctgtctagcgtgacagccgccgataccgccgtgtactactgcaccagagaggacagcagcaactggcggagtagaggccagggaacactggtcacagttagctctggtaccggcggaggcggatctggcggcggaggtagcggtggcggaggatctgaattcgacatccagatgacacagagccctagcagcctgtctgccagcgtgggagacagagtgaccatcacatgcaaggccagcgaccacatcaacaactggctggcctggtatcagcagaagcctggacaggcccctaagctgctgatctacggcgctaccacactggaaacaggcgtgcccagcagattttctggcagcggctctggcaccgactacaccctgacaatatccagcctccagcctgaggacttcgccacctactactgtcagcagagctggaacaccccttggacattcggccagggcaccaagctggaaatcaagagactcgagagccagcctcacaccaagcccagcgtgttcgtgatgaagaacggcaccaacgtggcctgcctcgtgaaagagttctaccccaaggacatcaggatcaacctggtgtccagcaagaagatcaccgagttcgaccccgccatcgtgatctcccccagcggcaagtacaacgccgtgaagctggggaagtacgaggacagcaacagcgtgacctgctccgtgcagcacgacaacaagaccgtgcacagcaccgactttgaagtgaaaaccgactccaccgaccacgtgaagcccaaagagacagagaacaccaagcagcccagcaagagctgccacaagcccaaggccatcgtgcacaccgagaaagtgaacatgatgagcctgaccgtgctgggcctgcggatgctgttcgccaaaaccgtggccgtgaacttcctgctgaccgccaagctgttcttcctcagggccaagcgatctggatctggagcaacaaacttctcactactcaaacaagcaggtgacgtggaggagaatcccgggcctactagtatggactggatttggcgcatccttttccttgtcggcgctgctaccggcgcgcattccttcgaacaagttcagcttcaacagcctggcgctgagctggtcaaacctggcgcttctgtgaagatgagctgcaaagccagcggctacgccttcagcagctactggatcaactggatgaagcagaaacccggccagggactcgaatggatcggccaaatctatcccggcgacggcgacaccaactacaacggcaagttcaagggcagagccacactgaccgccgatacctctagcagcacagcctacatgcagctgagcagcctgaccagcgaagatagcgccgtgtacttctgtgcccggtccatcacaacagtcgtgggctgcgctatggactattggggccagggaacaagcgtgaccgtgtctagtacgcgtgacaagcagctggacgccgacgtgtcccccaagcctaccatcttcctgccctctatcgccgagacaaagctccagaaggccggcacctacctgtgcctgctggaaaagttcttcccagatgtgattaagatccactggcaggaaaagaagtccaacaccatcctgggcagccaggaaggcaacaccatgaagaccaacgacacctacatgaagttcagctggctgaccgtgcccgagaagtccctggacaaagaacacagatgcatcgtgcggcacgaaaacaacaagaacggcgtggaccaggaaatcatcttcccacccatcaagaccgatgtgattacaatggaccccaaggacaactgctccaaggacgccaacgataccctgctgctccagctgaccaacaccagcgcctactacatgtacttgttgctgctgctgaagtccgtggtgtacttcgccatcatcacatgctgcctgctgcggagaaccgccttctgctgcaacggcgagaagtct

SEQ ID NO: 4134 - DNA, 3135 bp, Artificial Sequence
  Synthetic Polynucloetide
atggccttaccagtgaccgccttgctcctgccgctggccttgctgctccacgccgccaggccgctcgaggggaaaccaattcccaaccctcttctgggactggattcaaccggcagcggcgacaagcagctggacgccgacgtgtcccccaagcctaccatcttcctgccctctatcgccgagacaaagctccagaaggccggcacctacctgtgcctgctggaaaagttcttcccagatgtgattaagatccactggcaggaaaagaagtccaacaccatcctgggcagccaggaaggcaacaccatgaagaccaacgacacctacatgaagttcagctggctgaccgtgcccgagaagtccctggacaaagaacacagatgcatcgtgcggcacgaaaacaacaagaacggcgtggaccaggaaatcatcttcccacccatcaagaccgatgtgattacaatggaccccaaggacaactgctccaaggacgccaacgataccctgctgctccagctgaccaacaccagcgcctactacatgtacttgttgctgctgctgaagtccgtggtgtacttcgccatcatcacatgctgcctgctgcggagaaccgccttctgctgcaacggcgagaagtctagggccaagcgatctggatctggagcaacaaacttctcactactcaaacaagcaggtgacgtggaggagaatcccgggcctactagcatggccttaccagtgaccgccttgctcctgccgctggccttgctgctccacgccgccaggccgcagctccagctgcaagagtctggacctggcctggtcaagcctagcgagacactgagcctgacctgtaccgtgtccggcgatagcatcagcagcggcgattactactggggctggatcagacagcctcctggcaaaggactggaatggatcggccacatctactacagcggcgtgacctactacaaccccagcctgaagtccagagtgaccatcagcgtggacaccagccggaaccagttctccctgaagctgtctagcgtgacagccgccgataccgccgtgtactactgcaccagagaggacagcagcaactggcggagtagaggccagggaacactggtcacagttagctctggtaccggcggaggcggatctggcggcggaggtagcggtggcggaggatctgaattcgacatccagatgacacagagccctagcagcctgtctgccagcgtgggagacagagtgaccatcacatgcaaggccagcgaccacatcaacaactggctggcctggtatcagcagaagcctggacaggcccctaagctgctgatctacggcgctaccacactggaaacaggcgtgcccagcagattttctggcagcggctctggcaccgactacaccctgacaatatccagcctccagcctgaggacttcgccacctactactgtcagcagagctggaacaccccttggacattcggccagggcaccaagctggaaatcaagagaggcggaggcggaagtggaggcggaggatctggcggcggaggctctcaagttcagcttcaacagcctggcgctgagctggtcaaacctggcgcttctgtgaagatgagctgcaaagccagcggctacgccttcagcagctactggatcaactggatgaagcagaaacccggccagggactcgaatggatcggccaaatctatcccggcgacggcgacaccaactacaacggcaagttcaagggcagagccacactgaccgccgatacctctagcagcacagcctacatgcagctgagcagcctgaccagcgaagatagcgccgtgtacttctgtgcccggtccatcacaacagtcgtgggctgcgctatggactattggggccagggaacaagcgtgaccgtgtctagtacgcgtgagcagaaactgatctcggaagaggatgggagcggcagccagcctcacaccaagcccagcgtgttcgtgatgaagaacggcaccaacgtggcctgcctcgtgaaagagttctaccccaaggacatcaggatcaacctggtgtccagcaagaagatcaccgagttcgaccccgccatcgtgatctcccccagcggcaagtacaacgccgtgaagctggggaagtacgaggacagcaacagcgtgacctgctccgtgcagcacgacaacaagaccgtgcacagcaccgactttgaagtgaaaaccgactccaccgaccacgtgaagcccaaagagacagagaacaccaagcagcccagcaagagctgccacaagcccaaggccatcgtgcacaccgagaaagtgaacatgatgagcctgaccgtgctgggcctgcggatgctgttcgccaaaaccgtggccgtgaacttcctgctgaccgccaagctgttcttcctccgcgccaagagaagcggatctggcgtgaagcagaccctgaatttcgacctgctgaagctggctggcgacgtggaatccaacccaggcccttctagaggccatatgaccgagtacaagcccacggtgcgcctcgccacccgcgacgacgtccccagggccgtacgcaccctcgccgccgcgttcgccgactaccccgccacgcgccacaccgtcgatccggaccgccacatcgagcgggtcaccgagctgcaagaactcttcctcacgcgcgtcgggctcgacatcggcaaggtgtgggtcgcggacgacggcgccgcggtggcggtctggaccacgccggagagcgtcgaagcgggggcggtgttcgccgagatcggcccgcgcatggccgagttgagcggttcccggctggccgcgcagcaacagatggaaggcctcctggcgccgcaccggcccaaggagcccgcgtggttcctggccaccgtcggcgtctcgcccgaccaccagggcaagggtctgggcagcgccgtcgtgctccccggagtggaggcggccgagcgcgccggggtgcccgccttcctggagacctccgcgccccgcaacctccccttctacgagcggctcggcttcaccgtcaccgccgacgtcgaggtgcccgaaggaccgcgcacctggtgcatgacccgcaagcccggtgcctga

SEQ ID NO: 4135 - DNA, 3510 bp, Artificial Sequence
  Synthetic Polynucloetide
atggccttaccagtgaccgccttgctcctgccgctggccttgctgctccacgccgccaggccgcagctccagctgcaagagtctggacctggcctggtcaagcctagcgagacactgagcctgacctgtaccgtgtccggcgatagcatcagcagcggcgattactactggggctggatcagacagcctcctggcaaaggactggaatggatcggccacatctactacagcggcgtgacctactacaaccccagcctgaagtccagagtgaccatcagcgtggacaccagccggaaccagttctccctgaagctgtctagcgtgacagccgccgataccgccgtgtactactgcaccagagaggacagcagcaactggcggagtagaggccagggaacactggtcacagttagctctggtaccggcggaggcggatctggcggcggaggtagcggtggcggaggatctgaattcgacatccagatgacacagagccctagcagcctgtctgccagcgtgggagacagagtgaccatcacatgcaaggccagcgaccacatcaacaactggctggcctggtatcagcagaagcctggacaggcccctaagctgctgatctacggcgctaccacactggaaacaggcgtgcccagcagattttctggcagcggctctggcaccgactacaccctgacaatatccagcctccagcctgaggacttcgccacctactactgtcagcagagctggaacaccccttggacattcggccagggcaccaagctggaaatcaagagaggacagcctaaggccaatcctaccgtgacactgttccctccaagcagcgaagaactccaggccaacaaggccacacttgtgtgcctgatctccgacttctaccctggggctgtgacagtggcttggaaggccgatggatctcctgtgaaagccggcgtggaaaccaccaagccatccaagcagagcaacaacaaatacgccgccagctcctacctgagcctgacacctgagcagtggaagtcccacagatcctacagctgccaagtgacccacgaaggcagcaccgtggaaaagacagtggcccctacagagtgcagcggatcccagagcttcggcctgctggaccccaagctgtgctacctgctggatggcatcctgttcatctacggcgtgatcctgaccgccctgttcctgagagtgaagttcagcagaagcgccgacgcccctgcctaccagcagggacagaaccaactgtacaacgagctgaacctgggcagacgggaagagtacgacgtgctggacaagcggagaggcagggaccctgagatgggcggaaagccccagcggagaaagaacccccaggaaggactgtataacgaactccagaaagacaagatggccgaagcctacagcgagatcggcatgaagggcgagcggagaagaggcaagggccacgatggcctgtaccagggcctgagcaccgccaccaaggacacctatgacgccctgcacatgcaggccctgcctccaagaagggccaagcgatctggatctggagcaacaaacttctcactactcaaacaagcaggtgacgtggaggagaatcccgggcctactagtatggactggatttggcgcatccttttccttgtcggcgctgctaccggcgcgcattccttcgaacaagttcagcttcaacagcctggcgctgagctggtcaaacctggcgcttctgtgaagatgagctgcaaagccagcggctacgccttcagcagctactggatcaactggatgaagcagaaacccggccagggactcgaatggatcggccaaatctatcccggcgacggcgacaccaactacaacggcaagttcaagggcagagccacactgaccgccgatacctctagcagcacagcctacatgcagctgagcagcctgaccagcgaagatagcgccgtgtacttctgtgcccggtccatcacaacagtcgtgggctgcgctatggactattggggccagggaacaagcgtgaccgtgtctagtgcctctacaaagggaccctccgtgtttcctctggctcccagcagcaagtctacaagcggaggaacagccgctctgggctgcctggtcaaggattactttcccgagcctgtgaccgtgtcctggaatagcggagcactgacaagcggcgtgcacacctttccagccgtgctgcaaagcagcggcctgtactctctgagcagcgtggtcacagtgcctagctctagcctgggcacccagacctacatctgcaatgtgaaccacaagcctagcaacaccaaggtggacaagagagtggaacccaagagctgtggtacccagagttttgggttgttggaccctaaattgtgctatctgttggacggaatcctgttcatttacggagtgatcctgaccgcattgttcctgcgggttaagttttccagatccgcagacgcacccgcttaccaacaagggcagaaccaactctacaatgaacttaatttggggcggagggaagagtacgacgttctggacaaaaggaggggacgagatcccgagatgggcggaaagcctcagcgaaggaagaatccgcaagaggggctttataacgaactccagaaagataaaatggcagaagcctatagtgagattgggatgaagggagaaaggaggaggggtaaaggtcacgatgggttgtaccaaggattgagcacagccactaaagatacctatgatgcgctccacatgcaggccctgccgccaagacgcgccaagagaagcggatctggcgtgaagcagaccctgaatttcgacctgctgaagctggctggcgacgtggaatccaacccaggcccttctagaggccatatgaccgagtacaagcccacggtgcgcctcgccacccgcgacgacgtccccagggccgtacgcaccctcgccgccgcgttcgccgactaccccgccacgcgccacaccgtcgatccggaccgccacatcgagcgggtcaccgagctgcaagaactcttcctcacgcgcgtcgggctcgacatcggcaaggtgtgggtcgcggacgacggcgccgcggtggcggtctggaccacgccggagagcgtcgaagcgggggcggtgttcgccgagatcggcccgcgcatggccgagttgagcggttcccggctggccgcgcagcaacagatggaaggcctcctggcgccgcaccggcccaaggagcccgcgtggttcctggccaccgtcggcgtctcgcccgaccaccagggcaagggtctgggcagcgccgtcgtgctccccggagtggaggcggccgagcgcgccggggtgcccgccttcctggagacctccgcgccccgcaacctccccttctacgagcggctcggcttcaccgtcaccgccgacgtcgaggtgcccgaaggaccgcgcacctggtgcatgacccgcaagcccggtgcctga

SEQ ID NO: 4136 - DNA, 2865 bp, Artificial Sequence
  Synthetic Polynucloetide
atggccttaccagtgaccgccttgctcctgccgctggccttgctgctccacgccgccaggccgcagctccagctgcaagagtctggacctggcctggtcaagcctagcgagacactgagcctgacctgtaccgtgtccggcgatagcatcagcagcggcgattactactggggctggatcagacagcctcctggcaaaggactggaatggatcggccacatctactacagcggcgtgacctactacaaccccagcctgaagtccagagtgaccatcagcgtggacaccagccggaaccagttctccctgaagctgtctagcgtgacagccgccgataccgccgtgtactactgcaccagagaggacagcagcaactggcggagtagaggccagggaacactggtcacagttagctctggtaccggcggaggcggatctggcggcggaggtagcggtggcggaggatctgaattcgacatccagatgacacagagccctagcagcctgtctgccagcgtgggagacagagtgaccatcacatgcaaggccagcgaccacatcaacaactggctggcctggtatcagcagaagcctggacaggcccctaagctgctgatctacggcgctaccacactggaaacaggcgtgcccagcagattttctggcagcggctctggcaccgactacaccctgacaatatccagcctccagcctgaggacttcgccacctactactgtcagcagagctggaacaccccttggacattcggccagggcaccaagctggaaatcaagagactcgaggacctgaagaacgtgttcccacctgaggtggccgtgttcgagcctagcgaggccgagatcagccacacccagaaagccaccctcgtgtgcctggctaccggcttctaccccgaccatgtggaactgtcttggtgggtcaacggcaaagaggtgcacagcggcgtgtctaccgacccccagccactgaaagaacagcccgccctgaacgacagccggtactgcctgagcagcagactgagagtgtccgccaccttctggcagaacccccggaaccacttcagatgccaggtgcagttctacggcctgagcgagaacgacgagtggacccaggacagagccaagcccgtgacccagatcgtgtctgccgaagcctggggcagagccgattgcggatcccagagcttcggcctgctggaccccaagctgtgctacctgctggatggcatcctgttcatctacggcgtgatcctgaccgccctgttcctgagagtgaagttcagcagaagcgccgacgcccctgcctaccagcagggacagaaccaactgtacaacgagctgaacctgggcagacgggaagagtacgacgtgctggacaagcggagaggcagggaccctgagatgggcggaaagccccagcggagaaagaacccccaggaaggactgtataacgaactccagaaagacaagatggccgaagcctacagcgagatcggcatgaagggcgagcggagaagaggcaagggccacgatggcctgtaccagggcctgagcaccgccaccaaggacacctatgacgccctgcacatgcaggccctgcctccaagaagggccaagcgatctggatctggagcaacaaacttctcactactcaaacaagcaggtgacgtggaggagaatcccgggcctactagtatggactggatttggcgcatccttttccttgtcggcgctgctaccggcgcgcattccttcgaacaagttcagcttcaacagcctggcgctgagctggtcaaacctggcgcttctgtgaagatgagctgcaaagccagcggctacgccttcagcagctactggatcaactggatgaagcagaaacccggccagggactcgaatggatcggccaaatctatcccggcgacggcgacaccaactacaacggcaagttcaagggcagagccacactgaccgccgatacctctagcagcacagcctacatgcagctgagcagcctgaccagcgaagatagcgccgtgtacttctgtgcccggtccatcacaacagtcgtgggctgcgctatggactattggggccagggaacaagcgtgaccgtgtctagtacgcgtatccagaaccctgatcctgccgtgtaccagctgcgggatagcaagagcagcgacaagagcgtgtgtctgttcaccgacttcgacagccagaccaacgtgtcccagagcaaggactccgacgtgtacatcaccgataagaccgtgctggacatgcggagcatggacttcaagagcaactccgccgtggcctggtccaacaagtccgatttcgcctgcgccaacgccttcaacaacagcattatccccgaggacacattcttcccaagccccgagagcagctgcggtacccagagttttgggttgttggaccctaaattgtgctatctgttggacggaatcctgttcatttacggagtgatcctgaccgcattgttcctgcgggttaagttttccagatccgcagacgcacccgcttaccaacaagggcagaaccaactctacaatgaacttaatttggggcggagggaagagtacgacgttctggacaaaaggaggggacgagatcccgagatgggcggaaagcctcagcgaaggaagaatccgcaagaggggctttataacgaactccagaaagataaaatggcagaagcctatagtgagattgggatgaagggagaaaggaggaggggtaaaggtcacgatgggttgtaccaaggattgagcacagccactaaagatacctatgatgcgctccacatgcaggccctgccgccaaga

SEQ ID NO: 4137 - DNA, 2865 bp, Artificial Sequence
  Synthetic Polynucloetide
atggccttaccagtgaccgccttgctcctgccgctggccttgctgctccacgccgccaggccgcagctccagctgcaagagtctggacctggcctggtcaagcctagcgagacactgagcctgacctgtaccgtgtccggcgatagcatcagcagcggcgattactactggggctggatcagacagcctcctggcaaaggactggaatggatcggccacatctactacagcggcgtgacctactacaaccccagcctgaagtccagagtgaccatcagcgtggacaccagccggaaccagttctccctgaagctgtctagcgtgacagccgccgataccgccgtgtactactgcaccagagaggacagcagcaactggcggagtagaggccagggaacactggtcacagttagctctggtaccggcggaggcggatctggcggcggaggtagcggtggcggaggatctgaattcgacatccagatgacacagagccctagcagcctgtctgccagcgtgggagacagagtgaccatcacatgcaaggccagcgaccacatcaacaactggctggcctggtatcagcagaagcctggacaggcccctaagctgctgatctacggcgctaccacactggaaacaggcgtgcccagcagattttctggcagcggctctggcaccgactacaccctgacaatatccagcctccagcctgaggacttcgccacctactactgtcagcagagctggaacaccccttggacattcggccagggcaccaagctggaaatcaagagactcgaggacctgaagaacgtgttcccacctgaggtggccgtgttcgagcctagcaaggccgagatcgcccacacccagaaagccaccctcgtgtgcctggctaccggcttctaccccgaccatgtggaactgtcttggtgggtcaacggcaaagaggtgcacagcggcgtgtgtaccgacccccagccactgaaagaacagcccgccctgaacgacagccggtactgcctgagcagcagactgagagtgtccgccaccttctggcagaacccccggaaccacttcagatgccaggtgcagttctacggcctgagcgagaacgacgagtggacccaggacagagccaagcccgtgacccagatcgtgtctgccgaagcctggggcagagccgattgcggatcccagagcttcggcctgctggaccccaagctgtgctacctgctggatggcatcctgttcatctacggcgtgatcctgaccgccctgttcctgagagtgaagttcagcagaagcgccgacgcccctgcctaccagcagggacagaaccaactgtacaacgagctgaacctgggcagacgggaagagtacgacgtgctggacaagcggagaggcagggaccctgagatgggcggaaagccccagcggagaaagaacccccaggaaggactgtataacgaactccagaaagacaagatggccgaagcctacagcgagatcggcatgaagggcgagcggagaagaggcaagggccacgatggcctgtaccagggcctgagcaccgccaccaaggacacctatgacgccctgcacatgcaggccctgcctccaagaagggccaagcgatctggatctggagcaacaaacttctcactactcaaacaagcaggtgacgtggaggagaatcccgggcctactagtatggactggatttggcgcatccttttccttgtcggcgctgctaccggcgcgcattccttcgaacaagttcagcttcaacagcctggcgctgagctggtcaaacctggcgcttctgtgaagatgagctgcaaagccagcggctacgccttcagcagctactggatcaactggatgaagcagaaacccggccagggactcgaatggatcggccaaatctatcccggcgacggcgacaccaactacaacggcaagttcaagggcagagccacactgaccgccgatacctctagcagcacagcctacatgcagctgagcagcctgaccagcgaagatagcgccgtgtacttctgtgcccggtccatcacaacagtcgtgggctgcgctatggactattggggccagggaacaagcgtgaccgtgtctagtacgcgtatccagaaccctgatcctgccgtgtaccagctgcgggatagcaagagcagcgacaagagcgtgtgtctgttcaccgacttcgacagccagaccaacgtgtcccagagcaaggactccgacgtgtacatcaccgataagtgcgtgctggacatgcggagcatggacttcaagagcaactccgccgtggcctggtccaacaagtccgatttcgcctgcgccaacgccttcaacaacagcattatccccgaggacacattcttcccaagcagcgacgtgccctgcggtacccagagttttgggttgttggaccctaaattgtgctatctgttggacggaatcctgttcatttacggagtgatcctgaccgcattgttcctgcgggttaagttttccagatccgcagacgcacccgcttaccaacaagggcagaaccaactctacaatgaacttaatttggggcggagggaagagtacgacgttctggacaaaaggaggggacgagatcccgagatgggcggaaagcctcagcgaaggaagaatccgcaagaggggctttataacgaactccagaaagataaaatggcagaagcctatagtgagattgggatgaagggagaaaggaggaggggtaaaggtcacgatgggttgtaccaaggattgagcacagccactaaagatacctatgatgcgctccacatgcaggccctgccgccaaga

SEQ ID NO: 4138 - DNA, 3078 bp, Artificial Sequence
  Synthetic Polynucloetide
atggccttaccagtgaccgccttgctcctgccgctggccttgctgctccacgccgccaggccgcagctccagctgcaagagtctggacctggcctggtcaagcctagcgagacactgagcctgacctgtaccgtgtccggcgatagcatcagcagcggcgattactactggggctggatcagacagcctcctggcaaaggactggaatggatcggccacatctactacagcggcgtgacctactacaaccccagcctgaagtccagagtgaccatcagcgtggacaccagccggaaccagttctccctgaagctgtctagcgtgacagccgccgataccgccgtgtactactgcaccagagaggacagcagcaactggcggagtagaggccagggaacactggtcacagttagctctggtaccggcggaggcggatctggcggcggaggtagcggtggcggaggatctgaattcgacatccagatgacacagagccctagcagcctgtctgccagcgtgggagacagagtgaccatcacatgcaaggccagcgaccacatcaacaactggctggcctggtatcagcagaagcctggacaggcccctaagctgctgatctacggcgctaccacactggaaacaggcgtgcccagcagattttctggcagcggctctggcaccgactacaccctgacaatatccagcctccagcctgaggacttcgccacctactactgtcagcagagctggaacaccccttggacattcggccagggcaccaagctggaaatcaagagactcgaggggaaaccaattcccaaccctcttctgggactggattcaaccggcagcggcgaggacctgaagaacgtgttcccacctgaggtggccgtgttcgagcctagcgaggccgagatcagccacacccagaaagccaccctcgtgtgcctggctaccggcttctaccccgaccatgtggaactgtcttggtgggtcaacggcaaagaggtgcacagcggcgtgtctaccgacccccagccactgaaagaacagcccgccctgaacgacagccggtactgcctgagcagcagactgagagtgtccgccaccttctggcagaacccccggaaccacttcagatgccaggtgcagttctacggcctgagcgagaacgacgagtggacccaggacagagccaagcccgtgacccagatcgtgtctgccgaagcctggggcagagccgattgcggatcccagagcttcggcctgctggaccccaagctgtgctacctgctggatggcatcctgttcatctacggcgtgatcctgaccgccctgttcctgagagtgaagttcagcagaagcgccgacgcccctgcctaccagcagggacagaaccaactgtacaacgagctgaacctgggcagacgggaagagtacgacgtgctggacaagcggagaggcagggaccctgagatgggcggaaagccccagcggagaaagaacccccaggaaggactgtataacgaactccagaaagacaagatggccgaagcctacagcgagatcggcatgaagggcgagcggagaagaggcaagggccacgatggcctgtaccagggcctgagcaccgccaccaaggacacctatgacgccctgcacatgcaggccctgcctccaagaagggccaagcgatctggatctggagcaacaaacttctcactactcaaacaagcaggtgacgtggaggagaatcccgggcctactagtatggactggatttggcgcatccttttccttgtcggcgctgctaccggcgcgcattccttcgaacaagttcagcttcaacagcctggcgctgagctggtcaaacctggcgcttctgtgaagatgagctgcaaagccagcggctacgccttcagcagctactggatcaactggatgaagcagaaacccggccagggactcgaatggatcggccaaatctatcccggcgacggcgacaccaactacaacggcaagttcaagggcagagccacactgaccgccgatacctctagcagcacagcctacatgcagctgagcagcctgaccagcgaagatagcgccgtgtacttctgtgcccggtccatcacaacagtcgtgggctgcgctatggactattggggccagggaacaagcgtgaccgtgtctagtacgcgtgagcagaaactgatctcggaagaggatgggagcggcatccagaaccctgatcctgccgtgtaccagctgcgggatagcaagagcagcgacaagagcgtgtgtctgttcaccgacttcgacagccagaccaacgtgtcccagagcaaggactccgacgtgtacatcaccgataagaccgtgctggacatgcggagcatggacttcaagagcaactccgccgtggcctggtccaacaagtccgatttcgcctgcgccaacgccttcaacaacagcattatccccgaggacacattcttcccaagccccgagagcagctgcggtacccagagttttgggttgttggaccctaaattgtgctatctgttggacggaatcctgttcatttacggagtgatcctgaccgcattgttcctgaggagcaagcggtcacggctgctccacagcgattacatgaatatgacaccacgaagaccgggtcctactcgcaaacactaccaaccctacgcacctccccgcgactttgcagcgtaccgatctcgggttaagttttccagatccgcagacgcacccgcttaccaacaagggcagaaccaactctacaatgaacttaatttggggcggagggaagagtacgacgttctggacaaaaggaggggacgagatcccgagatgggcggaaagcctcagcgaaggaagaatccgcaagaggggctttataacgaactccagaaagataaaatggcagaagcctatagtgagattgggatgaagggagaaaggaggaggggtaaaggtcacgatgggttgtaccaaggattgagcacagccactaaagatacctatgatgcgctccacatgcaggccctgccgccaaga

SEQ ID NO: 4139 - DNA, 3201 bp, Artificial Sequence
  Synthetic Polynucloetide
atggccttaccagtgaccgccttgctcctgccgctggccttgctgctccacgccgccaggccgcagctccagctgcaagagtctggacctggcctggtcaagcctagcgagacactgagcctgacctgtaccgtgtccggcgatagcatcagcagcggcgattactactggggctggatcagacagcctcctggcaaaggactggaatggatcggccacatctactacagcggcgtgacctactacaaccccagcctgaagtccagagtgaccatcagcgtggacaccagccggaaccagttctccctgaagctgtctagcgtgacagccgccgataccgccgtgtactactgcaccagagaggacagcagcaactggcggagtagaggccagggaacactggtcacagttagctctggtaccggcggaggcggatctggcggcggaggtagcggtggcggaggatctgaattcgacatccagatgacacagagccctagcagcctgtctgccagcgtgggagacagagtgaccatcacatgcaaggccagcgaccacatcaacaactggctggcctggtatcagcagaagcctggacaggcccctaagctgctgatctacggcgctaccacactggaaacaggcgtgcccagcagattttctggcagcggctctggcaccgactacaccctgacaatatccagcctccagcctgaggacttcgccacctactactgtcagcagagctggaacaccccttggacattcggccagggcaccaagctggaaatcaagagactcgaggggaaaccaattcccaaccctcttctgggactggattcaaccggcagcggcgaggacctgaagaacgtgttcccacctgaggtggccgtgttcgagcctagcgaggccgagatcagccacacccagaaagccaccctcgtgtgcctggctaccggcttctaccccgaccatgtggaactgtcttggtgggtcaacggcaaagaggtgcacagcggcgtgtctaccgacccccagccactgaaagaacagcccgccctgaacgacagccggtactgcctgagcagcagactgagagtgtccgccaccttctggcagaacccccggaaccacttcagatgccaggtgcagttctacggcctgagcgagaacgacgagtggacccaggacagagccaagcccgtgacccagatcgtgtctgccgaagcctggggcagagccgattgcggatcccagagcttcggcctgctggaccccaagctgtgctacctgctggatggcatcctgttcatctacggcgtgatcctgaccgccctgttcctgaggagtaagaggagcaggctcctgcacagtgactacatgaacatgactccacgccgccccggacccacccgcaagcattaccagccctatgccccaccacgcgacttcgcagcctatcgctccagagtgaagttcagcagaagcgccgacgcccctgcctaccagcagggacagaaccaactgtacaacgagctgaacctgggcagacgggaagagtacgacgtgctggacaagcggagaggcagggaccctgagatgggcggaaagccccagcggagaaagaacccccaggaaggactgtataacgaactccagaaagacaagatggccgaagcctacagcgagatcggcatgaagggcgagcggagaagaggcaagggccacgatggcctgtaccagggcctgagcaccgccaccaaggacacctatgacgccctgcacatgcaggccctgcctccaagaagggccaagcgatctggatctggagcaacaaacttctcactactcaaacaagcaggtgacgtggaggagaatcccgggcctactagtatggactggatttggcgcatccttttccttgtcggcgctgctaccggcgcgcattccttcgaacaagttcagcttcaacagcctggcgctgagctggtcaaacctggcgcttctgtgaagatgagctgcaaagccagcggctacgccttcagcagctactggatcaactggatgaagcagaaacccggccagggactcgaatggatcggccaaatctatcccggcgacggcgacaccaactacaacggcaagttcaagggcagagccacactgaccgccgatacctctagcagcacagcctacatgcagctgagcagcctgaccagcgaagatagcgccgtgtacttctgtgcccggtccatcacaacagtcgtgggctgcgctatggactattggggccagggaacaagcgtgaccgtgtctagtacgcgtgagcagaaactgatctcggaagaggatgggagcggcatccagaaccctgatcctgccgtgtaccagctgcgggatagcaagagcagcgacaagagcgtgtgtctgttcaccgacttcgacagccagaccaacgtgtcccagagcaaggactccgacgtgtacatcaccgataagaccgtgctggacatgcggagcatggacttcaagagcaactccgccgtggcctggtccaacaagtccgatttcgcctgcgccaacgccttcaacaacagcattatccccgaggacacattcttcccaagccccgagagcagctgcggtacccagagttttgggttgttggaccctaaattgtgctatctgttggacggaatcctgttcatttacggagtgatcctgaccgcattgttcctgaggagcaagcggtcacggctgctccacagcgattacatgaatatgacaccacgaagaccgggtcctactcgcaaacactaccaaccctacgcacctccccgcgactttgcagcgtaccgatctcgggttaagttttccagatccgcagacgcacccgcttaccaacaagggcagaaccaactctacaatgaacttaatttggggcggagggaagagtacgacgttctggacaaaaggaggggacgagatcccgagatgggcggaaagcctcagcgaaggaagaatccgcaagaggggctttataacgaactccagaaagataaaatggcagaagcctatagtgagattgggatgaagggagaaaggaggaggggtaaaggtcacgatgggttgtaccaaggattgagcacagccactaaagatacctatgatgcgctccacatgcaggccctgccgccaaga

SEQ ID NO: 4140 - DNA, 3084 bp, Artificial Sequence
  Synthetic Polynucloetide
atggccttaccagtgaccgccttgctcctgccgctggccttgctgctccacgccgccaggccgcagctccagctgcaagagtctggacctggcctggtcaagcctagcgagacactgagcctgacctgtaccgtgtccggcgatagcatcagcagcggcgattactactggggctggatcagacagcctcctggcaaaggactggaatggatcggccacatctactacagcggcgtgacctactacaaccccagcctgaagtccagagtgaccatcagcgtggacaccagccggaaccagttctccctgaagctgtctagcgtgacagccgccgataccgccgtgtactactgcaccagagaggacagcagcaactggcggagtagaggccagggaacactggtcacagttagctctggtaccggcggaggcggatctggcggcggaggtagcggtggcggaggatctgaattcgacatccagatgacacagagccctagcagcctgtctgccagcgtgggagacagagtgaccatcacatgcaaggccagcgaccacatcaacaactggctggcctggtatcagcagaagcctggacaggcccctaagctgctgatctacggcgctaccacactggaaacaggcgtgcccagcagattttctggcagcggctctggcaccgactacaccctgacaatatccagcctccagcctgaggacttcgccacctactactgtcagcagagctggaacaccccttggacattcggccagggcaccaagctggaaatcaagagactcgaggggaaaccaattcccaaccctcttctgggactggattcaaccggcagcggcgaggacctgaagaacgtgttcccacctgaggtggccgtgttcgagcctagcgaggccgagatcagccacacccagaaagccaccctcgtgtgcctggctaccggcttctaccccgaccatgtggaactgtcttggtgggtcaacggcaaagaggtgcacagcggcgtgtctaccgacccccagccactgaaagaacagcccgccctgaacgacagccggtactgcctgagcagcagactgagagtgtccgccaccttctggcagaacccccggaaccacttcagatgccaggtgcagttctacggcctgagcgagaacgacgagtggacccaggacagagccaagcccgtgacccagatcgtgtctgccgaagcctggggcagagccgattgcggatcccagagcttcggcctgctggaccccaagctgtgctacctgctggatggcatcctgttcatctacggcgtgatcctgaccgccctgttcctgagagtgaagttcagcagaagcgccgacgcccctgcctaccagcagggacagaaccaactgtacaacgagctgaacctgggcagacgggaagagtacgacgtgctggacaagcggagaggcagggaccctgagatgggcggaaagccccagcggagaaagaacccccaggaaggactgtataacgaactccagaaagacaagatggccgaagcctacagcgagatcggcatgaagggcgagcggagaagaggcaagggccacgatggcctgtaccagggcctgagcaccgccaccaaggacacctatgacgccctgcacatgcaggccctgcctccaagaagggccaagcgatctggatctggagcaacaaacttctcactactcaaacaagcaggtgacgtggaggagaatcccgggcctactagtatggactggatttggcgcatccttttccttgtcggcgctgctaccggcgcgcattccttcgaacaagttcagcttcaacagcctggcgctgagctggtcaaacctggcgcttctgtgaagatgagctgcaaagccagcggctacgccttcagcagctactggatcaactggatgaagcagaaacccggccagggactcgaatggatcggccaaatctatcccggcgacggcgacaccaactacaacggcaagttcaagggcagagccacactgaccgccgatacctctagcagcacagcctacatgcagctgagcagcctgaccagcgaagatagcgccgtgtacttctgtgcccggtccatcacaacagtcgtgggctgcgctatggactattggggccagggaacaagcgtgaccgtgtctagtacgcgtgagcagaaactgatctcggaagaggatctggggagcggcatccagaaccctgatcctgccgtgtaccagctgcgggatagcaagagcagcgacaagagcgtgtgtctgttcaccgacttcgacagccagaccaacgtgtcccagagcaaggactccgacgtgtacatcaccgataagaccgtgctggacatgcggagcatggacttcaagagcaactccgccgtggcctggtccaacaagtccgatttcgcctgcgccaacgccttcaacaacagcattatccccgaggacacattcttcccaagccccgagagcagctgcggtacccagagttttgggttgttggaccctaaattgtgctatctgttggacggaatcctgttcatttacggagtgatcctgaccgcattgttcctgaagagaggccggaagaagctgctgtacatcttcaagcagcctttcatgcggcccgtgcagaccacccaggaagaggacggctgctcctgccggttccccgaggaagaagaaggcggctgcgagctgcgggttaagttttccagatccgcagacgcacccgcttaccaacaagggcagaaccaactctacaatgaacttaatttggggcggagggaagagtacgacgttctggacaaaaggaggggacgagatcccgagatgggcggaaagcctcagcgaaggaagaatccgcaagaggggctttataacgaactccagaaagataaaatggcagaagcctatagtgagattgggatgaagggagaaaggaggaggggtaaaggtcacgatgggttgtaccaaggattgagcacagccactaaagatacctatgatgcgctccacatgcaggccctgccgccaaga

SEQ ID NO: 4141 - DNA, 3210 bp, Artificial Sequence
  Synthetic Polynucloetide
atggccttaccagtgaccgccttgctcctgccgctggccttgctgctccacgccgccaggccgcagctccagctgcaagagtctggacctggcctggtcaagcctagcgagacactgagcctgacctgtaccgtgtccggcgatagcatcagcagcggcgattactactggggctggatcagacagcctcctggcaaaggactggaatggatcggccacatctactacagcggcgtgacctactacaaccccagcctgaagtccagagtgaccatcagcgtggacaccagccggaaccagttctccctgaagctgtctagcgtgacagccgccgataccgccgtgtactactgcaccagagaggacagcagcaactggcggagtagaggccagggaacactggtcacagttagctctggtaccggcggaggcggatctggcggcggaggtagcggtggcggaggatctgaattcgacatccagatgacacagagccctagcagcctgtctgccagcgtgggagacagagtgaccatcacatgcaaggccagcgaccacatcaacaactggctggcctggtatcagcagaagcctggacaggcccctaagctgctgatctacggcgctaccacactggaaacaggcgtgcccagcagattttctggcagcggctctggcaccgactacaccctgacaatatccagcctccagcctgaggacttcgccacctactactgtcagcagagctggaacaccccttggacattcggccagggcaccaagctggaaatcaagagactcgaggggaaaccaattcccaaccctcttctgggactggattcaaccggcagcggcgaggacctgaagaacgtgttcccacctgaggtggccgtgttcgagcctagcgaggccgagatcagccacacccagaaagccaccctcgtgtgcctggctaccggcttctaccccgaccatgtggaactgtcttggtgggtcaacggcaaagaggtgcacagcggcgtgtctaccgacccccagccactgaaagaacagcccgccctgaacgacagccggtactgcctgagcagcagactgagagtgtccgccaccttctggcagaacccccggaaccacttcagatgccaggtgcagttctacggcctgagcgagaacgacgagtggacccaggacagagccaagcccgtgacccagatcgtgtctgccgaagcctggggcagagccgattgcggatcccagagcttcggcctgctggaccccaagctgtgctacctgctggatggcatcctgttcatctacggcgtgatcctgaccgccctgttcctgaaacggggcagaaagaaactcctgtatatattcaaacaaccatttatgagaccagtacaaactactcaagaggaagatggctgtagctgccgatttccagaagaagaagaaggaggatgtgaactgagagtgaagttcagcagaagcgccgacgcccctgcctaccagcagggacagaaccaactgtacaacgagctgaacctgggcagacgggaagagtacgacgtgctggacaagcggagaggcagggaccctgagatgggcggaaagccccagcggagaaagaacccccaggaaggactgtataacgaactccagaaagacaagatggccgaagcctacagcgagatcggcatgaagggcgagcggagaagaggcaagggccacgatggcctgtaccagggcctgagcaccgccaccaaggacacctatgacgccctgcacatgcaggccctgcctccaagaagggccaagcgatctggatctggagcaacaaacttctcactactcaaacaagcaggtgacgtggaggagaatcccgggcctactagtatggactggatttggcgcatccttttccttgtcggcgctgctaccggcgcgcattccttcgaacaagttcagcttcaacagcctggcgctgagctggtcaaacctggcgcttctgtgaagatgagctgcaaagccagcggctacgccttcagcagctactggatcaactggatgaagcagaaacccggccagggactcgaatggatcggccaaatctatcccggcgacggcgacaccaactacaacggcaagttcaagggcagagccacactgaccgccgatacctctagcagcacagcctacatgcagctgagcagcctgaccagcgaagatagcgccgtgtacttctgtgcccggtccatcacaacagtcgtgggctgcgctatggactattggggccagggaacaagcgtgaccgtgtctagtacgcgtgagcagaaactgatctcggaagaggatctggggagcggcatccagaaccctgatcctgccgtgtaccagctgcgggatagcaagagcagcgacaagagcgtgtgtctgttcaccgacttcgacagccagaccaacgtgtcccagagcaaggactccgacgtgtacatcaccgataagaccgtgctggacatgcggagcatggacttcaagagcaactccgccgtggcctggtccaacaagtccgatttcgcctgcgccaacgccttcaacaacagcattatccccgaggacacattcttcccaagccccgagagcagctgcggtacccagagttttgggttgttggaccctaaattgtgctatctgttggacggaatcctgttcatttacggagtgatcctgaccgcattgttcctgaagagaggccggaagaagctgctgtacatcttcaagcagcctttcatgcggcccgtgcagaccacccaggaagaggacggctgctcctgccggttccccgaggaagaagaaggcggctgcgagctgcgggttaagttttccagatccgcagacgcacccgcttaccaacaagggcagaaccaactctacaatgaacttaatttggggcggagggaagagtacgacgttctggacaaaaggaggggacgagatcccgagatgggcggaaagcctcagcgaaggaagaatccgcaagaggggctttataacgaactccagaaagataaaatggcagaagcctatagtgagattgggatgaagggagaaaggaggaggggtaaaggtcacgatgggttgtaccaaggattgagcacagccactaaagatacctatgatgcgctccacatgcaggccctgccgccaaga

SEQ ID NO: 4142 - DNA, 2883 bp, Artificial Sequence
  Synthetic Polynucloetide
atggccttaccagtgaccgccttgctcctgccgctggccttgctgctccacgccgccaggccgcagctccagctgcaagagtctggacctggcctggtcaagcctagcgagacactgagcctgacctgtaccgtgtccggcgatagcatcagcagcggcgattactactggggctggatcagacagcctcctggcaaaggactggaatggatcggccacatctactacagcggcgtgacctactacaaccccagcctgaagtccagagtgaccatcagcgtggacaccagccggaaccagttctccctgaagctgtctagcgtgacagccgccgataccgccgtgtactactgcaccagagaggacagcagcaactggcggagtagaggccagggaacactggtcacagttagctctggtaccggcggaggcggatctggcggcggaggtagcggtggcggaggatctgaattcgacatccagatgacacagagccctagcagcctgtctgccagcgtgggagacagagtgaccatcacatgcaaggccagcgaccacatcaacaactggctggcctggtatcagcagaagcctggacaggcccctaagctgctgatctacggcgctaccacactggaaacaggcgtgcccagcagattttctggcagcggctctggcaccgactacaccctgacaatatccagcctccagcctgaggacttcgccacctactactgtcagcagagctggaacaccccttggacattcggccagggcaccaagctggaaatcaagagactcgagcagagcttcggcctgctggaccccaagctgtgctacctgctggatggcatcctgttcatctacggcgtgatcctgaccgccctgttcctgagagtgaagttcagcagaagcgccgacgcccctgcctaccagcagggacagaaccaactgtacaacgagctgaacctgggcagacgggaagagtacgacgtgctggacaagcggagaggcagggaccctgagatgggcggaaagccccagcggagaaagaacccccaggaaggactgtataacgaactccagaaagacaagatggccgaagcctacagcgagatcggcatgaagggcgagcggagaagaggcaagggccacgatggcctgtaccagggcctgagcaccgccaccaaggacacctatgacgccctgcacatgcaggccctgcctccaagaagggccaagcgatctggatctggagcaacaaacttctcactactcaaacaagcaggtgacgtggaggagaatcccgggcctactagtatggactggatttggcgcatccttttccttgtcggcgctgctaccggcgcgcattccttcgaacaagttcagcttcaacagcctggcgctgagctggtcaaacctggcgcttctgtgaagatgagctgcaaagccagcggctacgccttcagcagctactggatcaactggatgaagcagaaacccggccagggactcgaatggatcggccaaatctatcccggcgacggcgacaccaactacaacggcaagttcaagggcagagccacactgaccgccgatacctctagcagcacagcctacatgcagctgagcagcctgaccagcgaagatagcgccgtgtacttctgtgcccggtccatcacaacagtcgtgggctgcgctatggactattggggccagggaacaagcgtgaccgtgtctagtacgcgtcagagttttgggttgttggaccctaaattgtgctatctgttggacggaatcctgttcatttacggagtgatcctgaccgcattgttcctgcgggttaagttttccagatccgcagacgcacccgcttaccaacaagggcagaaccaactctacaatgaacttaatttggggcggagggaagagtacgacgttctggacaaaaggaggggacgagatcccgagatgggcggaaagcctcagcgaaggaagaatccgcaagaggggctttataacgaactccagaaagataaaatggcagaagcctatagtgagattgggatgaagggagaaaggaggaggggtaaaggtcacgatgggttgtaccaaggattgagcacagccactaaagatacctatgatgcgctccacatgcaggccctgccgccaagacgcgccaagagaagcggatctggcgtgaagcagaccctgaatttcgacctgctgaagctggctggcgacgtggaatccaacccaggcccttctagaggccatatgaccgagtacaagcccacggtgcgcctcgccacccgcgacgacgtccccagggccgtacgcaccctcgccgccgcgttcgccgactaccccgccacgcgccacaccgtcgatccggaccgccacatcgagcgggtcaccgagctgcaagaactcttcctcacgcgcgtcgggctcgacatcggcaaggtgtgggtcgcggacgacggcgccgcggtggcggtctggaccacgccggagagcgtcgaagcgggggcggtgttcgccgagatcggcccgcgcatggccgagttgagcggttcccggctggccgcgcagcaacagatggaaggcctcctggcgccgcaccggcccaaggagcccgcgtggttcctggccaccgtcggcgtctcgcccgaccaccagggcaagggtctgggcagcgccgtcgtgctccccggagtggaggcggccgagcgcgccggggtgcccgccttcctggagacctccgcgccccgcaacctccccttctacgagcggctcggcttcaccgtcaccgccgacgtcgaggtgcccgaaggaccgcgcacctggtgcatgacccgcaagcccggtgcctga

SEQ ID NO: 4143 - DNA, 2355 bp, Artificial Sequence
  Synthetic Polynucloetide
atggccttaccagtgaccgccttgctcctgccgctggccttgctgctccacgccgccaggccgcagctccagctgcaagagtctggacctggcctggtcaagcctagcgagacactgagcctgacctgtaccgtgtccggcgatagcatcagcagcggcgattactactggggctggatcagacagcctcctggcaaaggactggaatggatcggccacatctactacagcggcgtgacctactacaaccccagcctgaagtccagagtgaccatcagcgtggacaccagccggaaccagttctccctgaagctgtctagcgtgacagccgccgataccgccgtgtactactgcaccagagaggacagcagcaactggcggagtagaggccagggaacactggtcacagttagctctggtaccggcggaggcggatctggcggcggaggtagcggtggcggaggatctgaattcgacatccagatgacacagagccctagcagcctgtctgccagcgtgggagacagagtgaccatcacatgcaaggccagcgaccacatcaacaactggctggcctggtatcagcagaagcctggacaggcccctaagctgctgatctacggcgctaccacactggaaacaggcgtgcccagcagattttctggcagcggctctggcaccgactacaccctgacaatatccagcctccagcctgaggacttcgccacctactactgtcagcagagctggaacaccccttggacattcggccagggcaccaagctggaaatcaagagactcgagggacagcctaaggccaatcctaccgtgacactgttccctccaagcagcgaagaactccaggccaacaaggccacacttgtgtgcctgatctccgacttctaccctggggctgtgacagtggcttggaaggccgatggatctcctgtgaaagccggcgtggaaaccaccaagccatccaagcagagcaacaacaaatacgccgccagctcctacctgagcctgacacctgagcagtggaagtcccacagatcctacagctgccaagtgacccacgaaggcagcaccgtggaaaagacagtggcccctacagagtgcagccccatcaagaccgatgtgattacaatggaccccaaggacaactgctccaaggacgccaacgataccctgctgctccagctgaccaacaccagcgcctactacatgtacttgttgctgctgctgaagtccgtggtgtacttcgccatcatcacatgctgcctgctgcggagaaccgccttctgctgcaacggcgagaagtctagggccaagcgatctggatctggagcaacaaacttctcactactcaaacaagcaggtgacgtggaggagaatcccgggcctactagtatggactggatttggcgcatccttttccttgtcggcgctgctaccggcgcgcattccttcgaacaagttcagcttcaacagcctggcgctgagctggtcaaacctggcgcttctgtgaagatgagctgcaaagccagcggctacgccttcagcagctactggatcaactggatgaagcagaaacccggccagggactcgaatggatcggccaaatctatcccggcgacggcgacaccaactacaacggcaagttcaagggcagagccacactgaccgccgatacctctagcagcacagcctacatgcagctgagcagcctgaccagcgaagatagcgccgtgtacttctgtgcccggtccatcacaacagtcgtgggctgcgctatggactattggggccagggaacaagcgtgaccgtgtctagtacgcgtgcctctacaaagggaccctccgtgtttcctctggctcccagcagcaagtctacaagcggaggaacagccgctctgggctgcctggtcaaggattactttcccgagcctgtgaccgtgtcctggaatagcggagcactgacaagcggcgtgcacacctttccagccgtgctgcaaagcagcggcctgtactctctgagcagcgtggtcacagtgcctagctctagcctgggcacccagacctacatctgcaatgtgaaccacaagcctagcaacaccaaggtggacaagagagtggaacccaagagctgtgaagtgaaaaccgactccaccgaccacgtgaagcccaaagagacagagaacaccaagcagcccagcaagagctgccacaagcccaaggccatcgtgcacaccgagaaagtgaacatgatgagcctgaccgtgctgggcctgcggatgctgttcgccaaaaccgtggccgtgaacttcctgctgaccgccaagctgttcttcctc

SEQ ID NO: 4144 - DNA, 2289 bp, Artificial Sequence
  Synthetic Polynucloetide
atggccttaccagtgaccgccttgctcctgccgctggccttgctgctccacgccgccaggccgcagctccagctgcaagagtctggacctggcctggtcaagcctagcgagacactgagcctgacctgtaccgtgtccggcgatagcatcagcagcggcgattactactggggctggatcagacagcctcctggcaaaggactggaatggatcggccacatctactacagcggcgtgacctactacaaccccagcctgaagtccagagtgaccatcagcgtggacaccagccggaaccagttctccctgaagctgtctagcgtgacagccgccgataccgccgtgtactactgcaccagagaggacagcagcaactggcggagtagaggccagggaacactggtcacagttagctctggtaccggcggaggcggatctggcggcggaggtagcggtggcggaggatctgaattcgacatccagatgacacagagccctagcagcctgtctgccagcgtgggagacagagtgaccatcacatgcaaggccagcgaccacatcaacaactggctggcctggtatcagcagaagcctggacaggcccctaagctgctgatctacggcgctaccacactggaaacaggcgtgcccagcagattttctggcagcggctctggcaccgactacaccctgacaatatccagcctccagcctgaggacttcgccacctactactgtcagcagagctggaacaccccttggacattcggccagggcaccaagctggaaatcaagagactcgagggacagcctaaggccaatcctaccgtgacactgttccctccaagcagcgaagaactccaggccaacaaggccacacttgtgtgcctgatctccgacttctaccctggggctgtgacagtggcttggaaggccgatggatctcctgtgaaagccggcgtggaaaccaccaagccatccaagcagagcaacaacaaatacgccgccagctcctacctgagcctgacacctgagcagtggaagtcccacagatcctacagctgccaagtgacccacgaaggcagcaccgtggaaaagacagtggcccctacagagtgcagcggcagagccgattgcggcatcaccagcgccagctaccaccagggcgtgctgagcgccaccatcctgtacgagatcctgctgggcaaggccaccctgtacgccgtgctggtgtctgccctggtgctgatggctatggtcaagcggaaggacagccggggaagggccaagcgatctggatctggagcaacaaacttctcactactcaaacaagcaggtgacgtggaggagaatcccgggcctactagtatggactggatttggcgcatccttttccttgtcggcgctgctaccggcgcgcattccttcgaacaagttcagcttcaacagcctggcgctgagctggtcaaacctggcgcttctgtgaagatgagctgcaaagccagcggctacgccttcagcagctactggatcaactggatgaagcagaaacccggccagggactcgaatggatcggccaaatctatcccggcgacggcgacaccaactacaacggcaagttcaagggcagagccacactgaccgccgatacctctagcagcacagcctacatgcagctgagcagcctgaccagcgaagatagcgccgtgtacttctgtgcccggtccatcacaacagtcgtgggctgcgctatggactattggggccagggaacaagcgtgaccgtgtctagtacgcgtgcctctacaaagggaccctccgtgtttcctctggctcccagcagcaagtctacaagcggaggaacagccgctctgggctgcctggtcaaggattactttcccgagcctgtgaccgtgtcctggaatagcggagcactgacaagcggcgtgcacacctttccagccgtgctgcaaagcagcggcctgtactctctgagcagcgtggtcacagtgcctagctctagcctgggcacccagacctacatctgcaatgtgaaccacaagcctagcaacaccaaggtggacaagagagtggaacccaagagctgtatccccgaggacacattcttcccaagcagcgacgtgccctgcgacgtgaagctggtggaaaagagcttcgagacagacaccaacctgaacttccagaacctgagcgtgatcggcttcagaatcctgctgctgaaagtggccggctttaacctgctgatgaccctgcggctgtggtccagc

SEQ ID NO: 4145 - DNA, 2289 bp, Artificial Sequence
  Synthetic Polynucloetide
atggccttaccagtgaccgccttgctcctgccgctggccttgctgctccacgccgccaggccgcagctccagctgcaagagtctggacctggcctggtcaagcctagcgagacactgagcctgacctgtaccgtgtccggcgatagcatcagcagcggcgattactactggggctggatcagacagcctcctggcaaaggactggaatggatcggccacatctactacagcggcgtgacctactacaaccccagcctgaagtccagagtgaccatcagcgtggacaccagccggaaccagttctccctgaagctgtctagcgtgacagccgccgataccgccgtgtactactgcaccagagaggacagcagcaactggcggagtagaggccagggaacactggtcacagttagctctggtaccggcggaggcggatctggcggcggaggtagcggtggcggaggatctgaattcgacatccagatgacacagagccctagcagcctgtctgccagcgtgggagacagagtgaccatcacatgcaaggccagcgaccacatcaacaactggctggcctggtatcagcagaagcctggacaggcccctaagctgctgatctacggcgctaccacactggaaacaggcgtgcccagcagattttctggcagcggctctggcaccgactacaccctgacaatatccagcctccagcctgaggacttcgccacctactactgtcagcagagctggaacaccccttggacattcggccagggcaccaagctggaaatcaagagactcgagggacagcctaaggccaatcctaccgtgacactgttccctccaagcagcgaagaactccaggccaacaaggccacacttgtgtgcctgatctccgacttctaccctggggctgtgacagtggcttggaaggccgatggatctcctgtgaaagccggcgtggaaaccaccaagccatccaagcagagcaacaacaaatacgccgccagctcctacctgagcctgacacctgagcagtggaagtcccacagatcctacagctgccaagtgacccacgaaggcagcaccgtggaaaagacagtggcccctacagagtgcagcggcagagccgattgcggctttaccagcgagagctaccagcagggcgtgctgagcgccaccatcctgtacgagatcctgctgggcaaggccaccctgtacgccgtgctggtgtctgccctggtgctgatggctatggtcaagcggaaggacagccggggaagggccaagcgatctggatctggagcaacaaacttctcactactcaaacaagcaggtgacgtggaggagaatcccgggcctactagtatggactggatttggcgcatccttttccttgtcggcgctgctaccggcgcgcattccttcgaacaagttcagcttcaacagcctggcgctgagctggtcaaacctggcgcttctgtgaagatgagctgcaaagccagcggctacgccttcagcagctactggatcaactggatgaagcagaaacccggccagggactcgaatggatcggccaaatctatcccggcgacggcgacaccaactacaacggcaagttcaagggcagagccacactgaccgccgatacctctagcagcacagcctacatgcagctgagcagcctgaccagcgaagatagcgccgtgtacttctgtgcccggtccatcacaacagtcgtgggctgcgctatggactattggggccagggaacaagcgtgaccgtgtctagtacgcgtgcctctacaaagggaccctccgtgtttcctctggctcccagcagcaagtctacaagcggaggaacagccgctctgggctgcctggtcaaggattactttcccgagcctgtgaccgtgtcctggaatagcggagcactgacaagcggcgtgcacacctttccagccgtgctgcaaagcagcggcctgtactctctgagcagcgtggtcacagtgcctagctctagcctgggcacccagacctacatctgcaatgtgaaccacaagcctagcaacaccaaggtggacaagagagtggaacccaagagctgtatccccgaggacacattcttcccaagccccgagagcagctgcgacgtgaagctggtggaaaagagcttcgagacagacaccaacctgaacttccagaacctgagcgtgatcggcttcagaatcctgctgctgaaagtggccggctttaacctgctgatgaccctgcggctgtggtccagc

SEQ ID NO: 4146 - DNA, 1767 bp, Artificial Sequence
  Synthetic Polynucloetide
atggccttaccagtgaccgccttgctcctgccgctggccttgctgctccacgccgccaggccgcagctccagctgcaagagtctggacctggcctggtcaagcctagcgagacactgagcctgacctgtaccgtgtccggcgatagcatcagcagcggcgattactactggggctggatcagacagcctcctggcaaaggactggaatggatcggccacatctactacagcggcgtgacctactacaaccccagcctgaagtccagagtgaccatcagcgtggacaccagccggaaccagttctccctgaagctgtctagcgtgacagccgccgataccgccgtgtactactgcaccagagaggacagcagcaactggcggagtagaggccagggaacactggtcacagttagctctggtaccggcggaggcggatctggcggcggaggtagcggtggcggaggatctgaattcgacatccagatgacacagagccctagcagcctgtctgccagcgtgggagacagagtgaccatcacatgcaaggccagcgaccacatcaacaactggctggcctggtatcagcagaagcctggacaggcccctaagctgctgatctacggcgctaccacactggaaacaggcgtgcccagcagattttctggcagcggctctggcaccgactacaccctgacaatatccagcctccagcctgaggacttcgccacctactactgtcagcagagctggaacaccccttggacattcggccagggcaccaagctggaaatcaagagaggcggaggcggaagtggaggcggaggatctggcggcggaggctctcaagttcagcttcaacagcctggcgctgagctggtcaaacctggcgcttctgtgaagatgagctgcaaagccagcggctacgccttcagcagctactggatcaactggatgaagcagaaacccggccagggactcgaatggatcggccaaatctatcccggcgacggcgacaccaactacaacggcaagttcaagggcagagccacactgaccgccgatacctctagcagcacagcctacatgcagctgagcagcctgaccagcgaagatagcgccgtgtacttctgtgcccggtccatcacaacagtcgtgggctgcgctatggactattggggccagggaacaagcgtgaccgtgtctagtacgcgtgacggtaacgaggagatgggaggaatcactcaaaccccttacaaagtctcaatttcaggaacaactgttatccttacatgtccccagtatcctggcagcgagatcctttggcagcataacgacaagaatatagggggagatgaagacgataagaatatcggatctgacgaggatcacttgagcctgaaagagttctccgagcttgaacaaagcggatattatgtgtgctatccgcgcgggtcaaagccggaagacgctaacttttacctttatctccgagccagagtgtgcgaaaattgcatggaaatggacgttatgtccgttgctacaatagttatcgtagatatatgcatcacgggtggactgcttctgctggtttattattggtccaagaatagaaaggccaaagctaaacccgtgaccagaggcgctggcgcaggcggaaggcaaaggggacaaaacaaagaacggccaccaccagtgccaaatccagattatgagcctattcggaaaggacagagggacctgtactctggcctgaatcagagaagaatc

SEQ ID NO: 4147 - DNA, 1662 bp, Artificial Sequence
  Synthetic Polynucloetide
atggccttaccagtgaccgccttgctcctgccgctggccttgctgctccacgccgccaggccgcagctccagctgcaagagtctggacctggcctggtcaagcctagcgagacactgagcctgacctgtaccgtgtccggcgatagcatcagcagcggcgattactactggggctggatcagacagcctcctggcaaaggactggaatggatcggccacatctactacagcggcgtgacctactacaaccccagcctgaagtccagagtgaccatcagcgtggacaccagccggaaccagttctccctgaagctgtctagcgtgacagccgccgataccgccgtgtactactgcaccagagaggacagcagcaactggcggagtagaggccagggaacactggtcacagttagctctggtaccggcggaggcggatctggcggcggaggtagcggtggcggaggatctgaattcgacatccagatgacacagagccctagcagcctgtctgccagcgtgggagacagagtgaccatcacatgcaaggccagcgaccacatcaacaactggctggcctggtatcagcagaagcctggacaggcccctaagctgctgatctacggcgctaccacactggaaacaggcgtgcccagcagattttctggcagcggctctggcaccgactacaccctgacaatatccagcctccagcctgaggacttcgccacctactactgtcagcagagctggaacaccccttggacattcggccagggcaccaagctggaaatcaagagaggcggaggcggaagtggaggcggaggatctggcggcggaggctctcaagttcagcttcaacagcctggcgctgagctggtcaaacctggcgcttctgtgaagatgagctgcaaagccagcggctacgccttcagcagctactggatcaactggatgaagcagaaacccggccagggactcgaatggatcggccaaatctatcccggcgacggcgacaccaactacaacggcaagttcaagggcagagccacactgaccgccgatacctctagcagcacagcctacatgcagctgagcagcctgaccagcgaagatagcgccgtgtacttctgtgcccggtccatcacaacagtcgtgggctgcgctatggactattggggccagggaacaagcgtgaccgtgtctagtacgcgtttcaagatccccatcgaggaactggaagatcgggtgttcgtgaactgcaacacctctatcacctgggtggaaggcaccgtgggaacactgctgagcgacatcaccagactggacctcggcaagcggattctggaccctcggggcatctacagatgcaacggcaccgacatctacaaggacaaagaaagcaccgtgcaggtccactacagaatgtgccagtcctgcgtggaactggaccctgctacagtggccggcatcatcgtgaccgatgtgatcgctactctgctgctggctctgggagtgttctgcttcgccggacacgaaacaggcagactgtctggcgctgccgatacacaggccctgctgagaaacgaccaagtgtatcagcccctgcgcgacagagatgatgcccagtattctcacctcggcggcaactgggctagaaacaag

SEQ ID NO: 4148 - DNA, 1692 bp, Artificial Sequence
  Synthetic Polynucloetide
atggccttaccagtgaccgccttgctcctgccgctggccttgctgctccacgccgccaggccgcagctccagctgcaagagtctggacctggcctggtcaagcctagcgagacactgagcctgacctgtaccgtgtccggcgatagcatcagcagcggcgattactactggggctggatcagacagcctcctggcaaaggactggaatggatcggccacatctactacagcggcgtgacctactacaaccccagcctgaagtccagagtgaccatcagcgtggacaccagccggaaccagttctccctgaagctgtctagcgtgacagccgccgataccgccgtgtactactgcaccagagaggacagcagcaactggcggagtagaggccagggaacactggtcacagttagctctggtaccggcggaggcggatctggcggcggaggtagcggtggcggaggatctgaattcgacatccagatgacacagagccctagcagcctgtctgccagcgtgggagacagagtgaccatcacatgcaaggccagcgaccacatcaacaactggctggcctggtatcagcagaagcctggacaggcccctaagctgctgatctacggcgctaccacactggaaacaggcgtgcccagcagattttctggcagcggctctggcaccgactacaccctgacaatatccagcctccagcctgaggacttcgccacctactactgtcagcagagctggaacaccccttggacattcggccagggcaccaagctggaaatcaagagaggcggaggcggaagtggaggcggaggatctggcggcggaggctctcaagttcagcttcaacagcctggcgctgagctggtcaaacctggcgcttctgtgaagatgagctgcaaagccagcggctacgccttcagcagctactggatcaactggatgaagcagaaacccggccagggactcgaatggatcggccaaatctatcccggcgacggcgacaccaactacaacggcaagttcaagggcagagccacactgaccgccgatacctctagcagcacagcctacatgcagctgagcagcctgaccagcgaagatagcgccgtgtacttctgtgcccggtccatcacaacagtcgtgggctgcgctatggactattggggccagggaacaagcgtgaccgtgtctagtacgcgtcagagcatcaagggcaaccacctggtcaaggtgtacgactaccaagaggacggcagcgtgctgctgacatgtgatgccgaggccaagaacatcacctggtttaaggacggcaagatgatcggcttcctgaccgaggacaagaagaagtggaacctgggcagcaacgctaaggaccccagaggcatgtatcagtgcaagggcagccagaacaagagcaagcccctccaggtgtactaccggatgtgccagaactgcatcgagctgaacgccgctaccatcagcggctttctgttcgccgagatcgtgtccatcttcgtgctggccgtgggcgtgtactttatcgctggacaggatggcgtgcggcagagcagagcttccgataagcaaaccctgctgcctaacgaccagctgtaccagcctctgaaggacagagaggacgaccagtacagccacctccagggcaatcagctgagaagaaac

SEQ ID NO: 4149 - DNA, 1641 bp, Artificial Sequence
  Synthetic Polynucloetide
atggccttaccagtgaccgccttgctcctgccgctggccttgctgctccacgccgccaggccgcagctccagctgcaagagtctggacctggcctggtcaagcctagcgagacactgagcctgacctgtaccgtgtccggcgatagcatcagcagcggcgattactactggggctggatcagacagcctcctggcaaaggactggaatggatcggccacatctactacagcggcgtgacctactacaaccccagcctgaagtccagagtgaccatcagcgtggacaccagccggaaccagttctccctgaagctgtctagcgtgacagccgccgataccgccgtgtactactgcaccagagaggacagcagcaactggcggagtagaggccagggaacactggtcacagttagctctggtaccggcggaggcggatctggcggcggaggtagcggtggcggaggatctgaattcgacatccagatgacacagagccctagcagcctgtctgccagcgtgggagacagagtgaccatcacatgcaaggccagcgaccacatcaacaactggctggcctggtatcagcagaagcctggacaggcccctaagctgctgatctacggcgctaccacactggaaacaggcgtgcccagcagattttctggcagcggctctggcaccgactacaccctgacaatatccagcctccagcctgaggacttcgccacctactactgtcagcagagctggaacaccccttggacattcggccagggcaccaagctggaaatcaagagaggcggaggcggaagtggaggcggaggatctggcggcggaggctctcaagttcagcttcaacagcctggcgctgagctggtcaaacctggcgcttctgtgaagatgagctgcaaagccagcggctacgccttcagcagctactggatcaactggatgaagcagaaacccggccagggactcgaatggatcggccaaatctatcccggcgacggcgacaccaactacaacggcaagttcaagggcagagccacactgaccgccgatacctctagcagcacagcctacatgcagctgagcagcctgaccagcgaagatagcgccgtgtacttctgtgcccggtccatcacaacagtcgtgggctgcgctatggactattggggccagggaacaagcgtgaccgtgtctagtacgcgtcagagttttgggttgttggaccctaaattgtgctatctgttggacggaatcctgttcatttacggagtgatcctgaccgcattgttcctgcgggttaagttttccagatccgcagacgcacccgcttaccaacaagggcagaaccaactctacaatgaacttaatttggggcggagggaagagtacgacgttctggacaaaaggaggggacgagatcccgagatgggcggaaagcctcagcgaaggaagaatccgcaagaggggctttataacgaactccagaaagataaaatggcagaagcctatagtgagattgggatgaagggagaaaggaggaggggtaaaggtcacgatgggttgtaccaaggattgagcacagccactaaagatacctatgatgcgctccacatgcaggccctgccgccaaga

SEQ ID NO: 4150 - DNA, 2343 bp, Artificial Sequence
  Synthetic Polynucloetide
atggccttaccagtgaccgccttgctcctgccgctggccttgctgctccacgccgccaggccgcagctccagctgcaagagtctggacctggcctggtcaagcctagcgagacactgagcctgacctgtaccgtgtccggcgatagcatcagcagcggcgattactactggggctggatcagacagcctcctggcaaaggactggaatggatcggccacatctactacagcggcgtgacctactacaaccccagcctgaagtccagagtgaccatcagcgtggacaccagccggaaccagttctccctgaagctgtctagcgtgacagccgccgataccgccgtgtactactgcaccagagaggacagcagcaactggcggagtagaggccagggaacactggtcacagttagctctggtaccggcggaggcggatctggcggcggaggtagcggtggcggaggatctgaattcgacatccagatgacacagagccctagcagcctgtctgccagcgtgggagacagagtgaccatcacatgcaaggccagcgaccacatcaacaactggctggcctggtatcagcagaagcctggacaggcccctaagctgctgatctacggcgctaccacactggaaacaggcgtgcccagcagattttctggcagcggctctggcaccgactacaccctgacaatatccagcctccagcctgaggacttcgccacctactactgtcagcagagctggaacaccccttggacattcggccagggcaccaagctggaaatcaagagaggcggaggcggaagtggaggcggaggatctggcggcggaggctctcaagttcagcttcaacagcctggcgctgagctggtcaaacctggcgcttctgtgaagatgagctgcaaagccagcggctacgccttcagcagctactggatcaactggatgaagcagaaacccggccagggactcgaatggatcggccaaatctatcccggcgacggcgacaccaactacaacggcaagttcaagggcagagccacactgaccgccgatacctctagcagcacagcctacatgcagctgagcagcctgaccagcgaagatagcgccgtgtacttctgtgcccggtccatcacaacagtcgtgggctgcgctatggactattggggccagggaacaagcgtgaccgtgtctagtacgcgtgggagcggcatccagaaccctgatcctgccgtgtaccagctgcgggatagcaagagcagcgacaagagcgtgtgtctgttcaccgacttcgacagccagaccaacgtgtcccagagcaaggactccgacgtgtacatcaccgataagaccgtgctggacatgcggagcatggacttcaagagcaactccgccgtggcctggtccaacaagtccgatttcgcctgcgccaacgccttcaacaacagcattatccccgaggacacattcttcccaagccccgagagcagctgcgacgtgaagctggtggaaaagagcttcgagacagacaccaacctgaacttccagaacctgagcgtgatcggcttcagaatcctgctgctgaaagtggccggctttaacctgctgatgaccctgcggctgtggtccagccgcgccaagagaagcggatctggcgtgaagcagaccctgaatttcgacctgctgaagctggctggcgacgtggaatccaacccaggcccttctagaggccatatgaccgagtacaagcccacggtgcgcctcgccacccgcgacgacgtccccagggccgtacgcaccctcgccgccgcgttcgccgactaccccgccacgcgccacaccgtcgatccggaccgccacatcgagcgggtcaccgagctgcaagaactcttcctcacgcgcgtcgggctcgacatcggcaaggtgtgggtcgcggacgacggcgccgcggtggcggtctggaccacgccggagagcgtcgaagcgggggcggtgttcgccgagatcggcccgcgcatggccgagttgagcggttcccggctggccgcgcagcaacagatggaaggcctcctggcgccgcaccggcccaaggagcccgcgtggttcctggccaccgtcggcgtctcgcccgaccaccagggcaagggtctgggcagcgccgtcgtgctccccggagtggaggcggccgagcgcgccggggtgcccgccttcctggagacctccgcgccccgcaacctccccttctacgagcggctcggcttcaccgtcaccgccgacgtcgaggtgcccgaaggaccgcgcacctggtgcatgacccgcaagcccggtgcctga

SEQ ID NO: 4151 - DNA, 2439 bp, Artificial Sequence
  Synthetic Polynucloetide
atggccttaccagtgaccgccttgctcctgccgctggccttgctgctccacgccgccaggccgcagctccagctgcaagagtctggacctggcctggtcaagcctagcgagacactgagcctgacctgtaccgtgtccggcgatagcatcagcagcggcgattactactggggctggatcagacagcctcctggcaaaggactggaatggatcggccacatctactacagcggcgtgacctactacaaccccagcctgaagtccagagtgaccatcagcgtggacaccagccggaaccagttctccctgaagctgtctagcgtgacagccgccgataccgccgtgtactactgcaccagagaggacagcagcaactggcggagtagaggccagggaacactggtcacagttagctctggtaccggcggaggcggatctggcggcggaggtagcggtggcggaggatctgaattcgacatccagatgacacagagccctagcagcctgtctgccagcgtgggagacagagtgaccatcacatgcaaggccagcgaccacatcaacaactggctggcctggtatcagcagaagcctggacaggcccctaagctgctgatctacggcgctaccacactggaaacaggcgtgcccagcagattttctggcagcggctctggcaccgactacaccctgacaatatccagcctccagcctgaggacttcgccacctactactgtcagcagagctggaacaccccttggacattcggccagggcaccaagctggaaatcaagagaggcggaggcggaagtggaggcggaggatctggcggcggaggctctcaagttcagcttcaacagcctggcgctgagctggtcaaacctggcgcttctgtgaagatgagctgcaaagccagcggctacgccttcagcagctactggatcaactggatgaagcagaaacccggccagggactcgaatggatcggccaaatctatcccggcgacggcgacaccaactacaacggcaagttcaagggcagagccacactgaccgccgatacctctagcagcacagcctacatgcagctgagcagcctgaccagcgaagatagcgccgtgtacttctgtgcccggtccatcacaacagtcgtgggctgcgctatggactattggggccagggaacaagcgtgaccgtgtctagtctcgaggacctgaagaacgtgttcccacctgaggtggccgtgttcgagcctagcgaggccgagatcagccacacccagaaagccaccctcgtgtgcctggctaccggcttctaccccgaccatgtggaactgtcttggtgggtcaacggcaaagaggtgcacagcggcgtgtctaccgacccccagccactgaaagaacagcccgccctgaacgacagccggtactgcctgagcagcagactgagagtgtccgccaccttctggcagaacccccggaaccacttcagatgccaggtgcagttctacggcctgagcgagaacgacgagtggacccaggacagagccaagcccgtgacccagatcgtgtctgccgaagcctggggcagagccgattgcggctttaccagcgagagctaccagcagggcgtgctgagcgccaccatcctgtacgagatcctgctgggcaaggccaccctgtacgccgtgctggtgtctgccctggtgctgatggctatggtcaagcggaaggacagccggggaagggccaagcgatctggatctggagcaacaaacttctcactactcaaacaagcaggtgacgtggaggagaatcccgggcctactagaggccatatgaccgagtacaagcccacggtgcgcctcgccacccgcgacgacgtccccagggccgtacgcaccctcgccgccgcgttcgccgactaccccgccacgcgccacaccgtcgatccggaccgccacatcgagcgggtcaccgagctgcaagaactcttcctcacgcgcgtcgggctcgacatcggcaaggtgtgggtcgcggacgacggcgccgcggtggcggtctggaccacgccggagagcgtcgaagcgggggcggtgttcgccgagatcggcccgcgcatggccgagttgagcggttcccggctggccgcgcagcaacagatggaaggcctcctggcgccgcaccggcccaaggagcccgcgtggttcctggccaccgtcggcgtctcgcccgaccaccagggcaagggtctgggcagcgccgtcgtgctccccggagtggaggcggccgagcgcgccggggtgcccgccttcctggagacctccgcgccccgcaacctccccttctacgagcggctcggcttcaccgtcaccgccgacgtcgaggtgcccgaaggaccgcgcacctggtgcatgacccgcaagcccggtgcctga

SEQ ID NO: 4152 - DNA, 2589 bp, Artificial Sequence
  Synthetic Polynucloetide
atggccttaccagtgaccgccttgctcctgccgctggccttgctgctccacgccgccaggccgcagctccagctgcaagagtctggacctggcctggtcaagcctagcgagacactgagcctgacctgtaccgtgtccggcgatagcatcagcagcggcgattactactggggctggatcagacagcctcctggcaaaggactggaatggatcggccacatctactacagcggcgtgacctactacaaccccagcctgaagtccagagtgaccatcagcgtggacaccagccggaaccagttctccctgaagctgtctagcgtgacagccgccgataccgccgtgtactactgcaccagagaggacagcagcaactggcggagtagaggccagggaacactggtcacagttagctctggtaccggcggaggcggatctggcggcggaggtagcggtggcggaggatctgaattcgacatccagatgacacagagccctagcagcctgtctgccagcgtgggagacagagtgaccatcacatgcaaggccagcgaccacatcaacaactggctggcctggtatcagcagaagcctggacaggcccctaagctgctgatctacggcgctaccacactggaaacaggcgtgcccagcagattttctggcagcggctctggcaccgactacaccctgacaatatccagcctccagcctgaggacttcgccacctactactgtcagcagagctggaacaccccttggacattcggccagggcaccaagctggaaatcaagagaggcggaggcggaagtggaggcggaggatctggcggcggaggctctcaagttcagcttcaacagcctggcgctgagctggtcaaacctggcgcttctgtgaagatgagctgcaaagccagcggctacgccttcagcagctactggatcaactggatgaagcagaaacccggccagggactcgaatggatcggccaaatctatcccggcgacggcgacaccaactacaacggcaagttcaagggcagagccacactgaccgccgatacctctagcagcacagcctacatgcagctgagcagcctgaccagcgaagatagcgccgtgtacttctgtgcccggtccatcacaacagtcgtgggctgcgctatggactattggggccagggaacaagcgtgaccgtgtctagtacgcgtgagcagaaactgatctcggaagaggatctggggagcggcaccccattcccttctctggcccctcccatcatgctgctggtggacggcaagcagcagatggtggtcgtgtgcctggtgctggatgtggccccacctggactggacagccccatctggtttagcgccggcaatggctctgccctggacgcctttacctacggcccaagccctgccaccgatggcacctggacaaatctggcccacctgagcctgcccagcgaggaactggcttcttgggagcctctcgtgtgccacacaggacctggcgctgagggacacagcagatccacccagcctatgcacctgtctggcgaggccagcaccgccagaacctgtcctcaggaacctctgagaggcacccctggcggagcactgtggctgggagtgctgagactgctgctgttcaagctgctgctgtttgacctgctgctgacctgctcctgtctgtgcgatcctgccggccctctgccttctcctgccaccaccacaagactgagagccctgggcagccacagactgcaccctgccacagagacaggcggcagagaggccacaagcagccctagaccccagcccagagacagaagatggggcgataccccccctggcagaaagcctggatctccagtccgcgccaagagaagcggatctggcgtgaagcagaccctgaatttcgacctgctgaagctggctggcgacgtggaatccaacccaggcccttctagatctagaggccatatgaccgagtacaagcccacggtgcgcctcgccacccgcgacgacgtccccagggccgtacgcaccctcgccgccgcgttcgccgactaccccgccacgcgccacaccgtcgatccggaccgccacatcgagcgggtcaccgagctgcaagaactcttcctcacgcgcgtcgggctcgacatcggcaaggtgtgggtcgcggacgacggcgccgcggtggcggtctggaccacgccggagagcgtcgaagcgggggcggtgttcgccgagatcggcccgcgcatggccgagttgagcggttcccggctggccgcgcagcaacagatggaaggcctcctggcgccgcaccggcccaaggagcccgcgtggttcctggccaccgtcggcgtctcgcccgaccaccagggcaagggtctgggcagcgccgtcgtgctccccggagtggaggcggccgagcgcgccggggtgcccgccttcctggagacctccgcgccccgcaacctccccttctacgagcggctcggcttcaccgtcaccgccgacgtcgaggtgcccgaaggaccgcgcacctggtgcatgacccgcaagcccggtgcctga

SEQ ID NO: 4153 - DNA, 2031 bp, Artificial Sequence
  Synthetic Polynucloetide
atggccttaccagtgaccgccttgctcctgccgctggccttgctgctccacgccgccaggccgcagctccagctgcaagagtctggacctggcctggtcaagcctagcgagacactgagcctgacctgtaccgtgtccggcgatagcatcagcagcggcgattactactggggctggatcagacagcctcctggcaaaggactggaatggatcggccacatctactacagcggcgtgacctactacaaccccagcctgaagtccagagtgaccatcagcgtggacaccagccggaaccagttctccctgaagctgtctagcgtgacagccgccgataccgccgtgtactactgcaccagagaggacagcagcaactggcggagtagaggccagggaacactggtcacagttagctctggtaccggcggaggcggatctggcggcggaggtagcggtggcggaggatctgaattcgacatccagatgacacagagccctagcagcctgtctgccagcgtgggagacagagtgaccatcacatgcaaggccagcgaccacatcaacaactggctggcctggtatcagcagaagcctggacaggcccctaagctgctgatctacggcgctaccacactggaaacaggcgtgcccagcagattttctggcagcggctctggcaccgactacaccctgacaatatccagcctccagcctgaggacttcgccacctactactgtcagcagagctggaacaccccttggacattcggccagggcaccaagctggaaatcaagagactcgaggacctgaagaacgtgttcccacctgaggtggccgtgttcgagcctagcgaggccgagatcagccacacccagaaagccaccctcgtgtgcctggctaccggcttctaccccgaccatgtggaactgtcttggtgggtcaacggcaaagaggtgcacagcggcgtgtctaccgacccccagccactgaaagaacagcccgccctgaacgacagccggtactgcctgagcagcagactgagagtgtccgccaccttctggcagaacccccggaaccacttcagatgccaggtgcagttctacggcctgagcgagaacgacgagtggacccaggacagagccaagcccgtgacccagatcgtgtctgccgaagcctggggcagagccgattgcggctttaccagcgagagctaccagcagggcgtgctgagcgccaccatcctgtacgagatcctgctgggcaaggccaccctgtacgccgtgctggtgtctgccctggtgctgatggctatggtcaagcggaaggacagccggggaagggccaagcgatctggatctggagcaacaaacttctcactactcaaacaagcaggtgacgtggaggagaatcccgggcctactagaggccatatgaccgagtacaagcccacggtgcgcctcgccacccgcgacgacgtccccagggccgtacgcaccctcgccgccgcgttcgccgactaccccgccacgcgccacaccgtcgatccggaccgccacatcgagcgggtcaccgagctgcaagaactcttcctcacgcgcgtcgggctcgacatcggcaaggtgtgggtcgcggacgacggcgccgcggtggcggtctggaccacgccggagagcgtcgaagcgggggcggtgttcgccgagatcggcccgcgcatggccgagttgagcggttcccggctggccgcgcagcaacagatggaaggcctcctggcgccgcaccggcccaaggagcccgcgtggttcctggccaccgtcggcgtctcgcccgaccaccagggcaagggtctgggcagcgccgtcgtgctccccggagtggaggcggccgagcgcgccggggtgcccgccttcctggagacctccgcgccccgcaacctccccttctacgagcggctcggcttcaccgtcaccgccgacgtcgaggtgcccgaaggaccgcgcacctggtgcatgacccgcaagcccggtgcctga

SEQ ID NO: 4154 - DNA, 1338 bp, Artificial Sequence
  Synthetic Polynucloetide
atggccttaccagtgaccgccttgctcctgccgctggccttgctgctccacgccgccaggccgcagctccagctgcaagagtctggacctggcctggtcaagcctagcgagacactgagcctgacctgtaccgtgtccggcgatagcatcagcagcggcgattactactggggctggatcagacagcctcctggcaaaggactggaatggatcggccacatctactacagcggcgtgacctactacaaccccagcctgaagtccagagtgaccatcagcgtggacaccagccggaaccagttctccctgaagctgtctagcgtgacagccgccgataccgccgtgtactactgcaccagagaggacagcagcaactggcggagtagaggccagggaacactggtcacagttagctctggtaccggcggaggcggatctggcggcggaggtagcggtggcggaggatctgaattcgacatccagatgacacagagccctagcagcctgtctgccagcgtgggagacagagtgaccatcacatgcaaggccagcgaccacatcaacaactggctggcctggtatcagcagaagcctggacaggcccctaagctgctgatctacggcgctaccacactggaaacaggcgtgcccagcagattttctggcagcggctctggcaccgactacaccctgacaatatccagcctccagcctgaggacttcgccacctactactgtcagcagagctggaacaccccttggacattcggccagggcaccaagctggaaatcaagagactcgaggacctgaagaacgtgttcccacctgaggtggccgtgttcgagcctagcgaggccgagatcagccacacccagaaagccaccctcgtgtgcctggctaccggcttctaccccgaccatgtggaactgtcttggtgggtcaacggcaaagaggtgcacagcggcgtgtctaccgacccccagccactgaaagaacagcccgccctgaacgacagccggtactgcctgagcagcagactgagagtgtccgccaccttctggcagaacccccggaaccacttcagatgccaggtgcagttctacggcctgagcgagaacgacgagtggacccaggacagagccaagcccgtgacccagatcgtgtctgccgaagcctggggcagagccgattgcggctttaccagcgagagctaccagcagggcgtgctgagcgccaccatcctgtacgagatcctgctgggcaaggccaccctgtacgccgtgctggtgtctgccctggtgctgatggctatggtcaagcggaaggacagccgggga

SEQ ID NO: 4155 - DNA, 1353 bp, Artificial Sequence
  Synthetic Polynucloetide
atggactggatttggcgcatccttttccttgtcggcgctgctaccggcgcgcattccttcgaacaagttcagcttcaacagcctggcgctgagctggtcaaacctggcgcttctgtgaagatgagctgcaaagccagcggctacgccttcagcagctactggatcaactggatgaagcagaaacccggccagggactcgaatggatcggccaaatctatcccggcgacggcgacaccaactacaacggcaagttcaagggcagagccacactgaccgccgatacctctagcagcacagcctacatgcagctgagcagcctgaccagcgaagatagcgccgtgtacttctgtgcccggtccatcacaacagtcgtgggctgcgctatggactattggggccagggaacaagcgtgaccgtgtctagtacgcgtatccagaaccctgatcctgccgtgtaccagctgcgggatagcaagagcagcgacaagagcgtgtgtctgttcaccgacttcgacagccagaccaacgtgtcccagagcaaggactccgacgtgtacatcaccgataagaccgtgctggacatgcggagcatggacttcaagagcaactccgccgtggcctggtccaacaagtccgatttcgcctgcgccaacgccttcaacaacagcattatccccgaggacacattcttcccaagccccgagagcagctgcgacgtgaagctggtggaaaagagcttcgagacagacaccaacctgaacttccagaacctgagcgtgatcggcttcagaatcctgctgctgaaagtggccggctttaacctgctgatgaccctgcggctgtggtccagccgcgccaagagaagcggatctggcgtgaagcagaccctgaatttcgacctgctgaagctggctggcgacgtggaatccaacccaggcccttctagaggccatatggccaagcctttgtctcaagaagaatccaccctcattgaaagagcaacggctacaatcaacagcatccccatctctgaagactacagcgtcgccagcgcagctctctctagcgacggccgcatcttcactggtgtcaatgtatatcattttactgggggaccttgtgcagaactcgtggtgctgggcactgctgctgctgcggcagctggcaacctgacttgtatcgtcgcgatcggaaatgagaacaggggcatcttgagcccctgcggacggtgccgacaggtgcttctcgatctgcatcctgggatcaaagccatagtgaaggacagtgatggacagccgacggcagttgggattcgtgaattgctgccctctggttatgtgtgggagggctga

SEQ ID NO: 4156 - DNA, 852 bp, Artificial Sequence
  Synthetic Polynucloetide
atggactggatttggcgcatccttttccttgtcggcgctgctaccggcgcgcattccttcgaacaagttcagcttcaacagcctggcgctgagctggtcaaacctggcgcttctgtgaagatgagctgcaaagccagcggctacgccttcagcagctactggatcaactggatgaagcagaaacccggccagggactcgaatggatcggccaaatctatcccggcgacggcgacaccaactacaacggcaagttcaagggcagagccacactgaccgccgatacctctagcagcacagcctacatgcagctgagcagcctgaccagcgaagatagcgccgtgtacttctgtgcccggtccatcacaacagtcgtgggctgcgctatggactattggggccagggaacaagcgtgaccgtgtctagtacgcgtatccagaaccctgatcctgccgtgtaccagctgcgggatagcaagagcagcgacaagagcgtgtgtctgttcaccgacttcgacagccagaccaacgtgtcccagagcaaggactccgacgtgtacatcaccgataagaccgtgctggacatgcggagcatggacttcaagagcaactccgccgtggcctggtccaacaagtccgatttcgcctgcgccaacgccttcaacaacagcattatccccgaggacacattcttcccaagccccgagagcagctgcgacgtgaagctggtggaaaagagcttcgagacagacaccaacctgaacttccagaacctgagcgtgatcggcttcagaatcctgctgctgaaagtggccggctttaacctgctgatgaccctgcggctgtggtccagc

SEQ ID NO: 4157 - DNA, 2085 bp, Artificial Sequence
  Synthetic Polynucloetide
atggccttaccagtgaccgccttgctcctgccgctggccttgctgctccacgccgccaggccgcagctccagctgcaagagtctggacctggcctggtcaagcctagcgagacactgagcctgacctgtaccgtgtccggcgatagcatcagcagcggcgattactactggggctggatcagacagcctcctggcaaaggactggaatggatcggccacatctactacagcggcgtgacctactacaaccccagcctgaagtccagagtgaccatcagcgtggacaccagccggaaccagttctccctgaagctgtctagcgtgacagccgccgataccgccgtgtactactgcaccagagaggacagcagcaactggcggagtagaggccagggaacactggtcacagttagctctggtaccggcggaggcggatctggcggcggaggtagcggtggcggaggatctgaattcgacatccagatgacacagagccctagcagcctgtctgccagcgtgggagacagagtgaccatcacatgcaaggccagcgaccacatcaacaactggctggcctggtatcagcagaagcctggacaggcccctaagctgctgatctacggcgctaccacactggaaacaggcgtgcccagcagattttctggcagcggctctggcaccgactacaccctgacaatatccagcctccagcctgaggacttcgccacctactactgtcagcagagctggaacaccccttggacattcggccagggcaccaagctggaaatcaagagactcgaggggaaaccaattcccaaccctcttctgggactggattcaaccggcagcggcgaggacctgaagaacgtgttcccacctgaggtggccgtgttcgagcctagcgaggccgagatcagccacacccagaaagccaccctcgtgtgcctggctaccggcttctaccccgaccatgtggaactgtcttggtgggtcaacggcaaagaggtgcacagcggcgtgtgtaccgacccccagccactgaaagaacagcccgccctgaacgacagccggtactgcctgagcagcagactgagagtgtccgccaccttctggcagaacccccggaaccacttcagatgccaggtgcagttctacggcctgagcgagaacgacgagtggacccaggacagagccaagcccgtgacccagatcgtgtctgccgaagcctggggcagagccgattgcggctttaccagcgagagctaccagcagggcgtgctgagcgccaccatcctgtacgagatcctgctgggcaaggccaccctgtacgccgtgctggtgtctgccctggtgctgatggctatggtcaagcggaaggacagccggggaagggccaagcgatctggatctggagcaacaaacttctcactactcaaacaagcaggtgacgtggaggagaatcccgggcctactagaggccatatgaccgagtacaagcccacggtgcgcctcgccacccgcgacgacgtccccagggccgtacgcaccctcgccgccgcgttcgccgactaccccgccacgcgccacaccgtcgatccggaccgccacatcgagcgggtcaccgagctgcaagaactcttcctcacgcgcgtcgggctcgacatcggcaaggtgtgggtcgcggacgacggcgccgcggtggcggtctggaccacgccggagagcgtcgaagcgggggcggtgttcgccgagatcggcccgcgcatggccgagttgagcggttcccggctggccgcgcagcaacagatggaaggcctcctggcgccgcaccggcccaaggagcccgcgtggttcctggccaccgtcggcgtctcgcccgaccaccagggcaagggtctgggcagcgccgtcgtgctccccggagtggaggcggccgagcgcgccggggtgcccgccttcctggagacctccgcgccccgcaacctccccttctacgagcggctcggcttcaccgtcaccgccgacgtcgaggtgcccgaaggaccgcgcacctggtgcatgacccgcaagcccggtgcctga

SEQ ID NO: 4158 - DNA, 1395 bp, Artificial Sequence
  Synthetic Polynucloetide
atggccttaccagtgaccgccttgctcctgccgctggccttgctgctccacgccgccaggccgcagctccagctgcaagagtctggacctggcctggtcaagcctagcgagacactgagcctgacctgtaccgtgtccggcgatagcatcagcagcggcgattactactggggctggatcagacagcctcctggcaaaggactggaatggatcggccacatctactacagcggcgtgacctactacaaccccagcctgaagtccagagtgaccatcagcgtggacaccagccggaaccagttctccctgaagctgtctagcgtgacagccgccgataccgccgtgtactactgcaccagagaggacagcagcaactggcggagtagaggccagggaacactggtcacagttagctctggtaccggcggaggcggatctggcggcggaggtagcggtggcggaggatctgaattcgacatccagatgacacagagccctagcagcctgtctgccagcgtgggagacagagtgaccatcacatgcaaggccagcgaccacatcaacaactggctggcctggtatcagcagaagcctggacaggcccctaagctgctgatctacggcgctaccacactggaaacaggcgtgcccagcagattttctggcagcggctctggcaccgactacaccctgacaatatccagcctccagcctgaggacttcgccacctactactgtcagcagagctggaacaccccttggacattcggccagggcaccaagctggaaatcaagagactcgaggggaaaccaattcccaaccctcttctgggactggattcaaccggcagcggcgaggacctgaagaacgtgttcccacctgaggtggccgtgttcgagcctagcgaggccgagatcagccacacccagaaagccaccctcgtgtgcctggctaccggcttctaccccgaccatgtggaactgtcttggtgggtcaacggcaaagaggtgcacagcggcgtgtgtaccgacccccagccactgaaagaacagcccgccctgaacgacagccggtactgcctgagcagcagactgagagtgtccgccaccttctggcagaacccccggaaccacttcagatgccaggtgcagttctacggcctgagcgagaacgacgagtggacccaggacagagccaagcccgtgacccagatcgtgtctgccgaagcctggggcagagccgattgcggctttaccagcgagagctaccagcagggcgtgctgagcgccaccatcctgtacgagatcctgctgggcaaggccaccctgtacgccgtgctggtgtctgccctggtgctgatggctatggtcaagcggaaggacagccggggatga

SEQ ID NO: 4159 - DNA, 1389 bp, Artificial Sequence
  Synthetic Polynucloetide
atggactggatttggcgcatccttttccttgtcggcgctgctaccggcgcgcattccttcgaacaagttcagcttcaacagcctggcgctgagctggtcaaacctggcgcttctgtgaagatgagctgcaaagccagcggctacgccttcagcagctactggatcaactggatgaagcagaaacccggccagggactcgaatggatcggccaaatctatcccggcgacggcgacaccaactacaacggcaagttcaagggcagagccacactgaccgccgatacctctagcagcacagcctacatgcagctgagcagcctgaccagcgaagatagcgccgtgtacttctgtgcccggtccatcacaacagtcgtgggctgcgctatggactattggggccagggaacaagcgtgaccgtgtctagtacgcgtgagcagaaactgatctcggaagaggatgggagcggcatccagaaccctgatcctgccgtgtaccagctgcgggatagcaagagcagcgacaagagcgtgtgtctgttcaccgacttcgacagccagaccaacgtgtcccagagcaaggactccgacgtgtacatcaccgataagtgcgtgctggacatgcggagcatggacttcaagagcaactccgccgtggcctggtccaacaagtccgatttcgcctgcgccaacgccttcaacaacagcattatccccgaggacacattcttcccaagccccgagagcagctgcgacgtgaagctggtggaaaagagcttcgagacagacaccaacctgaacttccagaacctgagcgtgatcggcttcagaatcctgctgctgaaagtggccggctttaacctgctgatgaccctgcggctgtggtccagccgcgccaagagaagcggatctggcgtgaagcagaccctgaatttcgacctgctgaagctggctggcgacgtggaatccaacccaggcccttctagaggccatatggccaagcctttgtctcaagaagaatccaccctcattgaaagagcaacggctacaatcaacagcatccccatctctgaagactacagcgtcgccagcgcagctctctctagcgacggccgcatcttcactggtgtcaatgtatatcattttactgggggaccttgtgcagaactcgtggtgctgggcactgctgctgctgcggcagctggcaacctgacttgtatcgtcgcgatcggaaatgagaacaggggcatcttgagcccctgcggacggtgccgacaggtgcttctcgatctgcatcctgggatcaaagccatagtgaaggacagtgatggacagccgacggcagttgggattcgtgaattgctgccctctggttatgtgtgggagggctga

SEQ ID NO: 4160 - DNA, 891 bp, Artificial Sequence
  Synthetic Polynucloetide
atggactggatttggcgcatccttttccttgtcggcgctgctaccggcgcgcattccttcgaacaagttcagcttcaacagcctggcgctgagctggtcaaacctggcgcttctgtgaagatgagctgcaaagccagcggctacgccttcagcagctactggatcaactggatgaagcagaaacccggccagggactcgaatggatcggccaaatctatcccggcgacggcgacaccaactacaacggcaagttcaagggcagagccacactgaccgccgatacctctagcagcacagcctacatgcagctgagcagcctgaccagcgaagatagcgccgtgtacttctgtgcccggtccatcacaacagtcgtgggctgcgctatggactattggggccagggaacaagcgtgaccgtgtctagtacgcgtgagcagaaactgatctcggaagaggatgggagcggcatccagaaccctgatcctgccgtgtaccagctgcgggatagcaagagcagcgacaagagcgtgtgtctgttcaccgacttcgacagccagaccaacgtgtcccagagcaaggactccgacgtgtacatcaccgataagtgcgtgctggacatgcggagcatggacttcaagagcaactccgccgtggcctggtccaacaagtccgatttcgcctgcgccaacgccttcaacaacagcattatccccgaggacacattcttcccaagccccgagagcagctgcgacgtgaagctggtggaaaagagcttcgagacagacaccaacctgaacttccagaacctgagcgtgatcggcttcagaatcctgctgctgaaagtggccggctttaacctgctgatgaccctgcggctgtggtccagctga

SEQ ID NO: 4161 - DNA, 2343 bp, Artificial Sequence
  Synthetic Polynucloetide
atggccttaccagtgaccgccttgctcctgccgctggccttgctgctccacgccgccaggccgcagctccagctgcaagagtctggacctggcctggtcaagcctagcgagacactgagcctgacctgtaccgtgtccggcgatagcatcagcagcggcgattactactggggctggatcagacagcctcctggcaaaggactggaatggatcggccacatctactacagcggcgtgacctactacaaccccagcctgaagtccagagtgaccatcagcgtggacaccagccggaaccagttctccctgaagctgtctagcgtgacagccgccgataccgccgtgtactactgcaccagagaggacagcagcaactggcggagtagaggccagggaacactggtcacagttagctctggtaccggcggaggcggatctggcggcggaggtagcggtggcggaggatctgaattcgacatccagatgacacagagccctagcagcctgtctgccagcgtgggagacagagtgaccatcacatgcaaggccagcgaccacatcaacaactggctggcctggtatcagcagaagcctggacaggcccctaagctgctgatctacggcgctaccacactggaaacaggcgtgcccagcagattttctggcagcggctctggcaccgactacaccctgacaatatccagcctccagcctgaggacttcgccacctactactgtcagcagagctggaacaccccttggacattcggccagggcaccaagctggaaatcaagagaggcggaggcggaagtggaggcggaggatctggcggcggaggctctcaagttcagcttcaacagcctggcgctgagctggtcaaacctggcgcttctgtgaagatgagctgcaaagccagcggctacgccttcagcagctactggatcaactggatgaagcagaaacccggccagggactcgaatggatcggccaaatctatcccggcgacggcgacaccaactacaacggcaagttcaagggcagagccacactgaccgccgatacctctagcagcacagcctacatgcagctgagcagcctgaccagcgaagatagcgccgtgtacttctgtgcccggtccatcacaacagtcgtgggctgcgctatggactattggggccagggaacaagcgtgaccgtgtctagtacgcgtgggagcggcatccagaaccctgatcctgccgtgtaccagctgcgggatagcaagagcagcgacaagagcgtgtgtctgttcaccgacttcgacagccagaccaacgtgtcccagagcaaggactccgacgtgtacatcaccgataagaccgtgctggacatgcggagcatggacttcaagagcaactccgccgtggcctggtccaacaagtccgatttcgcctgcgccaacgccttcaacaacagcattatccccgaggacacattcttcccaagcagcgacgtgccctgcgacgtgaagctggtggaaaagagcttcgagacagacaccaacctgaacttccagaacctgagcgtgatcggcttcagaatcctgctgctgaaagtggccggctttaacctgctgatgaccctgcggctgtggtccagccgcgccaagagaagcggatctggcgtgaagcagaccctgaatttcgacctgctgaagctggctggcgacgtggaatccaacccaggcccttctagaggccatatgaccgagtacaagcccacggtgcgcctcgccacccgcgacgacgtccccagggccgtacgcaccctcgccgccgcgttcgccgactaccccgccacgcgccacaccgtcgatccggaccgccacatcgagcgggtcaccgagctgcaagaactcttcctcacgcgcgtcgggctcgacatcggcaaggtgtgggtcgcggacgacggcgccgcggtggcggtctggaccacgccggagagcgtcgaagcgggggcggtgttcgccgagatcggcccgcgcatggccgagttgagcggttcccggctggccgcgcagcaacagatggaaggcctcctggcgccgcaccggcccaaggagcccgcgtggttcctggccaccgtcggcgtctcgcccgaccaccagggcaagggtctgggcagcgccgtcgtgctccccggagtggaggcggccgagcgcgccggggtgcccgccttcctggagacctccgcgccccgcaacctccccttctacgagcggctcggcttcaccgtcaccgccgacgtcgaggtgcccgaaggaccgcgcacctggtgcatgacccgcaagcccggtgcctga

SEQ ID NO: 4162 - DNA, 2439 bp, Artificial Sequence
  Synthetic Polynucloetide
atggccttaccagtgaccgccttgctcctgccgctggccttgctgctccacgccgccaggccgcagctccagctgcaagagtctggacctggcctggtcaagcctagcgagacactgagcctgacctgtaccgtgtccggcgatagcatcagcagcggcgattactactggggctggatcagacagcctcctggcaaaggactggaatggatcggccacatctactacagcggcgtgacctactacaaccccagcctgaagtccagagtgaccatcagcgtggacaccagccggaaccagttctccctgaagctgtctagcgtgacagccgccgataccgccgtgtactactgcaccagagaggacagcagcaactggcggagtagaggccagggaacactggtcacagttagctctggtaccggcggaggcggatctggcggcggaggtagcggtggcggaggatctgaattcgacatccagatgacacagagccctagcagcctgtctgccagcgtgggagacagagtgaccatcacatgcaaggccagcgaccacatcaacaactggctggcctggtatcagcagaagcctggacaggcccctaagctgctgatctacggcgctaccacactggaaacaggcgtgcccagcagattttctggcagcggctctggcaccgactacaccctgacaatatccagcctccagcctgaggacttcgccacctactactgtcagcagagctggaacaccccttggacattcggccagggcaccaagctggaaatcaagagaggcggaggcggaagtggaggcggaggatctggcggcggaggctctcaagttcagcttcaacagcctggcgctgagctggtcaaacctggcgcttctgtgaagatgagctgcaaagccagcggctacgccttcagcagctactggatcaactggatgaagcagaaacccggccagggactcgaatggatcggccaaatctatcccggcgacggcgacaccaactacaacggcaagttcaagggcagagccacactgaccgccgatacctctagcagcacagcctacatgcagctgagcagcctgaccagcgaagatagcgccgtgtacttctgtgcccggtccatcacaacagtcgtgggctgcgctatggactattggggccagggaacaagcgtgaccgtgtctagtctcgaggacctgaagaacgtgttcccacctgaggtggccgtgttcgagcctagcaaggccgagatcgcccacacccagaaagccaccctcgtgtgcctggctaccggcttctaccccgaccatgtggaactgtcttggtgggtcaacggcaaagaggtgcacagcggcgtgtctaccgacccccagccactgaaagaacagcccgccctgaacgacagccggtactgcctgagcagcagactgagagtgtccgccaccttctggcagaacccccggaaccacttcagatgccaggtgcagttctacggcctgagcgagaacgacgagtggacccaggacagagccaagcccgtgacccagatcgtgtctgccgaagcctggggcagagccgattgcggcatcaccagcgccagctaccaccagggcgtgctgagcgccaccatcctgtacgagatcctgctgggcaaggccaccctgtacgccgtgctggtgtctgccctggtgctgatggctatggtcaagcggaaggacagccggggaagggccaagcgatctggatctggagcaacaaacttctcactactcaaacaagcaggtgacgtggaggagaatcccgggcctactagaggccatatgaccgagtacaagcccacggtgcgcctcgccacccgcgacgacgtccccagggccgtacgcaccctcgccgccgcgttcgccgactaccccgccacgcgccacaccgtcgatccggaccgccacatcgagcgggtcaccgagctgcaagaactcttcctcacgcgcgtcgggctcgacatcggcaaggtgtgggtcgcggacgacggcgccgcggtggcggtctggaccacgccggagagcgtcgaagcgggggcggtgttcgccgagatcggcccgcgcatggccgagttgagcggttcccggctggccgcgcagcaacagatggaaggcctcctggcgccgcaccggcccaaggagcccgcgtggttcctggccaccgtcggcgtctcgcccgaccaccagggcaagggtctgggcagcgccgtcgtgctccccggagtggaggcggccgagcgcgccggggtgcccgccttcctggagacctccgcgccccgcaacctccccttctacgagcggctcggcttcaccgtcaccgccgacgtcgaggtgcccgaaggaccgcgcacctggtgcatgacccgcaagcccggtgcctga

SEQ ID NO: 4163 - DNA, 3393 bp, Artificial Sequence
  Synthetic Polynucloetide
atggccttaccagtgaccgccttgctcctgccgctggccttgctgctccacgccgccaggccgcagctccagctgcaagagtctggacctggcctggtcaagcctagcgagacactgagcctgacctgtaccgtgtccggcgatagcatcagcagcggcgattactactggggctggatcagacagcctcctggcaaaggactggaatggatcggccacatctactacagcggcgtgacctactacaaccccagcctgaagtccagagtgaccatcagcgtggacaccagccggaaccagttctccctgaagctgtctagcgtgacagccgccgataccgccgtgtactactgcaccagagaggacagcagcaactggcggagtagaggccagggaacactggtcacagttagctctggtaccggcggaggcggatctggcggcggaggtagcggtggcggaggatctgaattcgacatccagatgacacagagccctagcagcctgtctgccagcgtgggagacagagtgaccatcacatgcaaggccagcgaccacatcaacaactggctggcctggtatcagcagaagcctggacaggcccctaagctgctgatctacggcgctaccacactggaaacaggcgtgcccagcagattttctggcagcggctctggcaccgactacaccctgacaatatccagcctccagcctgaggacttcgccacctactactgtcagcagagctggaacaccccttggacattcggccagggcaccaagctggaaatcaagagactcgagatccagaaccctgatcctgccgtgtaccagctgcgggatagcaagagcagcgacaagagcgtgtgtctgttcaccgacttcgacagccagaccaacgtgtcccagagcaaggactccgacgtgtacatcaccgataagtgcgtgctggacatgcggagcatggacttcaagagcaactccgccgtggcctggtccaacaagtccgatttcgcctgcgccaacgccttcaacaacagcattatccccgaggacacattcttcccaagcagcgacgtgccctgcgacgtgaagctggtggaaaagagcttcgagacagacaccaacctgaacttccagaacctgagcgtgatcggcttcagaatcctgctgctgaaagtggccggctttaacctgctgatgaccctgcggctgtggtccagccgcgccaagagaagcggatctggcgtgaagcagaccctgaatttcgacctgctgaagctggctggcgacgtggaatccaacccaggccctactagtatggactggatttggcgcatccttttccttgtcggcgctgctaccggcgcccattccgggccccaggttcagctgcaagagtctggcggaggacttgctcaagctggcggaagcctgagactgtcttgtgccgcctctggcagaaccttcagcatgggctggtttagacaggcccctggcaaagagagagagttcgtcgccgccatcacatacagcggcggcagcccttactacgcctcttctgtcagaggccggttcaccatcagccgggacaacgccaagaacaccgtgtacctccagatgaacagcctgaagccagaggacaccgccgtgtactactgtgccgccaatccaacctacggcagcgactggaatgccgagaattggggccagggcacccaagtgacagtgtctagtggatccggcggcggaggatctggcggaggcggatctgggggcggaggctctttcgaacaagttcagcttcaacagcctggcgctgagctggtcaaacctggcgcttctgtgaagatgagctgcaaagccagcggctacgccttcagcagctactggatcaactggatgaagcagaaacccggccagggactcgaatggatcggccaaatctatcccggcgacggcgacaccaactacaacggcaagttcaagggcagagccacactgaccgccgatacctctagcagcacagcctacatgcagctgagcagcctgaccagcgaagatagcgccgtgtacttctgtgcccggtccatcacaacagtcgtgggctgcgctatggactattggggccagggaacaagcgtgaccgtgtctagtacgcgtgaggacctgaagaacgtgttcccacctgaggtggccgtgttcgagcctagcaaggccgagatcgcccacacccagaaagccaccctcgtgtgcctggctaccggcttctaccccgaccatgtggaactgtcttggtgggtcaacggcaaagaggtgcacagcggcgtgtgtaccgacccccagccactgaaagaacagcccgccctgaacgacagccggtactgcctgagcagcagactgagagtgtccgccaccttctggcagaacccccggaaccacttcagatgccaggtgcagttctacggcctgagcgagaacgacgagtggacccaggacagagccaagcccgtgacccagatcgtgtctgccgaagcctggggcagagccgattgcggcatcaccagcgccagctaccaccagggcgtgctgagcgccaccatcctgtacgagatcctgctgggcaaggccaccctgtacgccgtgctggtgtctgccctggtgctgatggctatggtcaagcggaaggacagccggggaagggccaagcgatctggatctggagcaacaaacttctcactactcaaacaagcaggtgacgtggaggagaatcccgggccttctagaggccatatgaccgagtacaagcccacggtgcgcctcgccacccgcgacgacgtccccagggccgtacgcaccctcgccgccgcgttcgccgactaccccgccacgcgccacaccgtcgatccggaccgccacatcgagcgggtcaccgagctgcaagaactcttcctcacgcgcgtcgggctcgacatcggcaaggtgtgggtcgcggacgacggcgccgcggtggcggtctggaccacgccggagagcgtcgaagcgggggcggtgttcgccgagatcggcccgcgcatggccgagttgagcggttcccggctggccgcgcagcaacagatggaaggcctcctggcgccgcaccggcccaaggagcccgcgtggttcctggccaccgtcggcgtctcgcccgaccaccagggcaagggtctgggcagcgccgtcgtgctccccggagtggaggcggccgagcgcgccggggtgcccgccttcctggagacctccgcgccccgcaacctccccttctacgagcggctcggcttcaccgtcaccgccgacgtcgaggtgcccgaaggaccgcgcacctggtgcatgacccgcaagcccggtgcctga

SEQ ID NO: 4164 - DNA, 3390 bp, Artificial Sequence
  Synthetic Polynucloetide
atggccttaccagtgaccgccttgctcctgccgctggccttgctgctccacgccgccaggccgcagctccagctgcaagagtctggacctggcctggtcaagcctagcgagacactgagcctgacctgtaccgtgtccggcgatagcatcagcagcggcgattactactggggctggatcagacagcctcctggcaaaggactggaatggatcggccacatctactacagcggcgtgacctactacaaccccagcctgaagtccagagtgaccatcagcgtggacaccagccggaaccagttctccctgaagctgtctagcgtgacagccgccgataccgccgtgtactactgcaccagagaggacagcagcaactggcggagtagaggccagggaacactggtcacagttagctctggtaccggcggaggcggatctggcggcggaggtagcggtggcggaggatctgaattcgacatccagatgacacagagccctagcagcctgtctgccagcgtgggagacagagtgaccatcacatgcaaggccagcgaccacatcaacaactggctggcctggtatcagcagaagcctggacaggcccctaagctgctgatctacggcgctaccacactggaaacaggcgtgcccagcagattttctggcagcggctctggcaccgactacaccctgacaatatccagcctccagcctgaggacttcgccacctactactgtcagcagagctggaacaccccttggacattcggccagggcaccaagctggaaatcaagagactcgaggacctgaagaacgtgttcccacctgaggtggccgtgttcgagcctagcaaggccgagatcgcccacacccagaaagccaccctcgtgtgcctggctaccggcttctaccccgaccatgtggaactgtcttggtgggtcaacggcaaagaggtgcacagcggcgtgtgtaccgacccccagccactgaaagaacagcccgccctgaacgacagccggtactgcctgagcagcagactgagagtgtccgccaccttctggcagaacccccggaaccacttcagatgccaggtgcagttctacggcctgagcgagaacgacgagtggacccaggacagagccaagcccgtgacccagatcgtgtctgccgaagcctggggcagagccgattgcggcatcaccagcgccagctaccaccagggcgtgctgagcgccaccatcctgtacgagatcctgctgggcaaggccaccctgtacgccgtgctggtgtctgccctggtgctgatggctatggtcaagcggaaggacagccggggaagggccaagcgatctggatctggagcaacaaacttctcactactcaaacaagcaggtgacgtggaggagaatcccgggcctactagtatggactggatttggcgcatccttttccttgtcggcgctgctaccggcgcccattccgggccccaggttcagctgcaagagtctggcggaggacttgctcaagctggcggaagcctgagactgtcttgtgccgcctctggcagaaccttcagcatgggctggtttagacaggcccctggcaaagagagagagttcgtcgccgccatcacatacagcggcggcagcccttactacgcctcttctgtcagaggccggttcaccatcagccgggacaacgccaagaacaccgtgtacctccagatgaacagcctgaagccagaggacaccgccgtgtactactgtgccgccaatccaacctacggcagcgactggaatgccgagaattggggccagggcacccaagtgacagtgtctagtggatccggcggcggaggatctggcggaggcggatctgggggcggaggctctttcgaacaagttcagcttcaacagcctggcgctgagctggtcaaacctggcgcttctgtgaagatgagctgcaaagccagcggctacgccttcagcagctactggatcaactggatgaagcagaaacccggccagggactcgaatggatcggccaaatctatcccggcgacggcgacaccaactacaacggcaagttcaagggcagagccacactgaccgccgatacctctagcagcacagcctacatgcagctgagcagcctgaccagcgaagatagcgccgtgtacttctgtgcccggtccatcacaacagtcgtgggctgcgctatggactattggggccagggaacaagcgtgaccgtgtctagtacgcgtatccagaaccctgatcctgccgtgtaccagctgcgggatagcaagagcagcgacaagagcgtgtgtctgttcaccgacttcgacagccagaccaacgtgtcccagagcaaggactccgacgtgtacatcaccgataagtgcgtgctggacatgcggagcatggacttcaagagcaactccgccgtggcctggtccaacaagtccgatttcgcctgcgccaacgccttcaacaacagcattatccccgaggacacattcttcccaagcagcgacgtgccctgcgacgtgaagctggtggaaaagagcttcgagacagacaccaacctgaacttccagaacctgagcgtgatcggcttcagaatcctgctgctgaaagtggccggctttaacctgctgatgaccctgcggctgtggtccagccgcgccaagagaagcggatctggcgtgaagcagaccctgaatttcgacctgctgaagctggctggcgacgtggaatccaacccaggcccttctagaggccatatgaccgagtacaagcccacggtgcgcctcgccacccgcgacgacgtccccagggccgtacgcaccctcgccgccgcgttcgccgactaccccgccacgcgccacaccgtcgatccggaccgccacatcgagcgggtcaccgagctgcaagaactcttcctcacgcgcgtcgggctcgacatcggcaaggtgtgggtcgcggacgacggcgccgcggtggcggtctggaccacgccggagagcgtcgaagcgggggcggtgttcgccgagatcggcccgcgcatggccgagttgagcggttcccggctggccgcgcagcaacagatggaaggcctcctggcgccgcaccggcccaaggagcccgcgtggttcctggccaccgtcggcgtctcgcccgaccaccagggcaagggtctgggcagcgccgtcgtgctccccggagtggaggcggccgagcgcgccggggtgcccgccttcctggagacctccgcgccccgcaacctccccttctacgagcggctcggcttcaccgtcaccgccgacgtcgaggtgcccgaaggaccgcgcacctggtgcatgacccgcaagcccggtgcctga

SEQ ID NO: 4165 - DNA, 3390 bp, Artificial Sequence
  Synthetic Polynucloetide
atggccttaccagtgaccgccttgctcctgccgctggccttgctgctccacgccgccaggccgcagctccagctgcaagagtctggacctggcctggtcaagcctagcgagacactgagcctgacctgtaccgtgtccggcgatagcatcagcagcggcgattactactggggctggatcagacagcctcctggcaaaggactggaatggatcggccacatctactacagcggcgtgacctactacaaccccagcctgaagtccagagtgaccatcagcgtggacaccagccggaaccagttctccctgaagctgtctagcgtgacagccgccgataccgccgtgtactactgcaccagagaggacagcagcaactggcggagtagaggccagggaacactggtcacagttagctctggtaccggcggaggcggatctggcggcggaggtagcggtggcggaggatctgaattcgacatccagatgacacagagccctagcagcctgtctgccagcgtgggagacagagtgaccatcacatgcaaggccagcgaccacatcaacaactggctggcctggtatcagcagaagcctggacaggcccctaagctgctgatctacggcgctaccacactggaaacaggcgtgcccagcagattttctggcagcggctctggcaccgactacaccctgacaatatccagcctccagcctgaggacttcgccacctactactgtcagcagagctggaacaccccttggacattcggccagggcaccaagctggaaatcaagagactcgaggacctgaagaacgtgttcccacctgaggtggccgtgttcgagcctagcgaggccgagatcagccacacccagaaagccaccctcgtgtgcctggctaccggcttctaccccgaccatgtggaactgtcttggtgggtcaacggcaaagaggtgcacagcggcgtgtgtaccgacccccagccactgaaagaacagcccgccctgaacgacagccggtactgcctgagcagcagactgagagtgtccgccaccttctggcagaacccccggaaccacttcagatgccaggtgcagttctacggcctgagcgagaacgacgagtggacccaggacagagccaagcccgtgacccagatcgtgtctgccgaagcctggggcagagccgattgcggctttaccagcgagagctaccagcagggcgtgctgagcgccaccatcctgtacgagatcctgctgggcaaggccaccctgtacgccgtgctggtgtctgccctggtgctgatggctatggtcaagcggaaggacagccggggaagggccaagcgatctggatctggagcaacaaacttctcactactcaaacaagcaggtgacgtggaggagaatcccgggcctactagtatggactggatttggcgcatccttttccttgtcggcgctgctaccggcgcccattccgggccccaggttcagctgcaagagtctggcggaggacttgctcaagctggcggaagcctgagactgtcttgtgccgcctctggcagaaccttcagcatgggctggtttagacaggcccctggcaaagagagagagttcgtcgccgccatcacatacagcggcggcagcccttactacgcctcttctgtcagaggccggttcaccatcagccgggacaacgccaagaacaccgtgtacctccagatgaacagcctgaagccagaggacaccgccgtgtactactgtgccgccaatccaacctacggcagcgactggaatgccgagaattggggccagggcacccaagtgacagtgtctagtggatccggcggcggaggatctggcggaggcggatctgggggcggaggctctttcgaacaagttcagcttcaacagcctggcgctgagctggtcaaacctggcgcttctgtgaagatgagctgcaaagccagcggctacgccttcagcagctactggatcaactggatgaagcagaaacccggccagggactcgaatggatcggccaaatctatcccggcgacggcgacaccaactacaacggcaagttcaagggcagagccacactgaccgccgatacctctagcagcacagcctacatgcagctgagcagcctgaccagcgaagatagcgccgtgtacttctgtgcccggtccatcacaacagtcgtgggctgcgctatggactattggggccagggaacaagcgtgaccgtgtctagtacgcgtatccagaaccctgatcctgccgtgtaccagctgcgggatagcaagagcagcgacaagagcgtgtgtctgttcaccgacttcgacagccagaccaacgtgtcccagagcaaggactccgacgtgtacatcaccgataagtgcgtgctggacatgcggagcatggacttcaagagcaactccgccgtggcctggtccaacaagtccgatttcgcctgcgccaacgccttcaacaacagcattatccccgaggacacattcttcccaagccccgagagcagctgcgacgtgaagctggtggaaaagagcttcgagacagacaccaacctgaacttccagaacctgagcgtgatcggcttcagaatcctgctgctgaaagtggccggctttaacctgctgatgaccctgcggctgtggtccagccgcgccaagagaagcggatctggcgtgaagcagaccctgaatttcgacctgctgaagctggctggcgacgtggaatccaacccaggcccttctagaggccatatgaccgagtacaagcccacggtgcgcctcgccacccgcgacgacgtccccagggccgtacgcaccctcgccgccgcgttcgccgactaccccgccacgcgccacaccgtcgatccggaccgccacatcgagcgggtcaccgagctgcaagaactcttcctcacgcgcgtcgggctcgacatcggcaaggtgtgggtcgcggacgacggcgccgcggtggcggtctggaccacgccggagagcgtcgaagcgggggcggtgttcgccgagatcggcccgcgcatggccgagttgagcggttcccggctggccgcgcagcaacagatggaaggcctcctggcgccgcaccggcccaaggagcccgcgtggttcctggccaccgtcggcgtctcgcccgaccaccagggcaagggtctgggcagcgccgtcgtgctccccggagtggaggcggccgagcgcgccggggtgcccgccttcctggagacctccgcgccccgcaacctccccttctacgagcggctcggcttcaccgtcaccgccgacgtcgaggtgcccgaaggaccgcgcacctggtgcatgacccgcaagcccggtgcctga

SEQ ID NO: 4166 - DNA, 2688 bp, Artificial Sequence
  Synthetic Polynucloetide
atggccttaccagtgaccgccttgctcctgccgctggccttgctgctccacgccgccaggccgcagctccagctgcaagagtctggacctggcctggtcaagcctagcgagacactgagcctgacctgtaccgtgtccggcgatagcatcagcagcggcgattactactggggctggatcagacagcctcctggcaaaggactggaatggatcggccacatctactacagcggcgtgacctactacaaccccagcctgaagtccagagtgaccatcagcgtggacaccagccggaaccagttctccctgaagctgtctagcgtgacagccgccgataccgccgtgtactactgcaccagagaggacagcagcaactggcggagtagaggccagggaacactggtcacagttagctctggtaccggcggaggcggatctggcggcggaggtagcggtggcggaggatctgaattcgacatccagatgacacagagccctagcagcctgtctgccagcgtgggagacagagtgaccatcacatgcaaggccagcgaccacatcaacaactggctggcctggtatcagcagaagcctggacaggcccctaagctgctgatctacggcgctaccacactggaaacaggcgtgcccagcagattttctggcagcggctctggcaccgactacaccctgacaatatccagcctccagcctgaggacttcgccacctactactgtcagcagagctggaacaccccttggacattcggccagggcaccaagctggaaatcaagagactcgaggacctgaagaacgtgttcccacctgaggtggccgtgttcgagcctagcgaggccgagatcagccacacccagaaagccaccctcgtgtgcctggctaccggcttctaccccgaccatgtggaactgtcttggtgggtcaacggcaaagaggtgcacagcggcgtgtgtaccgacccccagccactgaaagaacagcccgccctgaacgacagccggtactgcctgagcagcagactgagagtgtccgccaccttctggcagaacccccggaaccacttcagatgccaggtgcagttctacggcctgagcgagaacgacgagtggacccaggacagagccaagcccgtgacccagatcgtgtctgccgaagcctggggcagagccgattgcggctttaccagcgagagctaccagcagggcgtgctgagcgccaccatcctgtacgagatcctgctgggcaaggccaccctgtacgccgtgctggtgtctgccctggtgctgatggctatggtcaagcggaaggacagccggggaagggccaagcgatctggatctggagcaacaaacttctcactactcaaacaagcaggtgacgtggaggagaatcccgggcctactagtatggactggatttggcgcatccttttccttgtcggcgctgctaccggcgcccattccgggccccaggttcagctgcaagagtctggcggaggacttgctcaagctggcggaagcctgagactgtcttgtgccgcctctggcagaaccttcagcatgggctggtttagacaggcccctggcaaagagagagagttcgtcgccgccatcacatacagcggcggcagcccttactacgcctcttctgtcagaggccggttcaccatcagccgggacaacgccaagaacaccgtgtacctccagatgaacagcctgaagccagaggacaccgccgtgtactactgtgccgccaatccaacctacggcagcgactggaatgccgagaattggggccagggcacccaagtgacagtgtctagtggatccggcggcggaggatctggcggaggcggatctgggggcggaggctctttcgaacaagttcagcttcaacagcctggcgctgagctggtcaaacctggcgcttctgtgaagatgagctgcaaagccagcggctacgccttcagcagctactggatcaactggatgaagcagaaacccggccagggactcgaatggatcggccaaatctatcccggcgacggcgacaccaactacaacggcaagttcaagggcagagccacactgaccgccgatacctctagcagcacagcctacatgcagctgagcagcctgaccagcgaagatagcgccgtgtacttctgtgcccggtccatcacaacagtcgtgggctgcgctatggactattggggccagggaacaagcgtgaccgtgtctagtacgcgtatccagaaccctgatcctgccgtgtaccagctgcgggatagcaagagcagcgacaagagcgtgtgtctgttcaccgacttcgacagccagaccaacgtgtcccagagcaaggactccgacgtgtacatcaccgataagtgcgtgctggacatgcggagcatggacttcaagagcaactccgccgtggcctggtccaacaagtccgatttcgcctgcgccaacgccttcaacaacagcattatccccgaggacacattcttcccaagccccgagagcagctgcgacgtgaagctggtggaaaagagcttcgagacagacaccaacctgaacttccagaacctgagcgtgatcggcttcagaatcctgctgctgaaagtggccggctttaacctgctgatgaccctgcggctgtggtccagc

SEQ ID NO: 4167 - DNA, 3363 bp, Artificial Sequence
  Synthetic Polynucloetide
atggccttaccagtgaccgccttgctcctgccgctggccttgctgctccacgccgccaggccgcagctccagctgcaagagtctggacctggcctggtcaagcctagcgagacactgagcctgacctgtaccgtgtccggcgatagcatcagcagcggcgattactactggggctggatcagacagcctcctggcaaaggactggaatggatcggccacatctactacagcggcgtgacctactacaaccccagcctgaagtccagagtgaccatcagcgtggacaccagccggaaccagttctccctgaagctgtctagcgtgacagccgccgataccgccgtgtactactgcaccagagaggacagcagcaactggcggagtagaggccagggaacactggtcacagttagctctggtaccggcggaggcggatctggcggcggaggtagcggtggcggaggatctgaattcgacatccagatgacacagagccctagcagcctgtctgccagcgtgggagacagagtgaccatcacatgcaaggccagcgaccacatcaacaactggctggcctggtatcagcagaagcctggacaggcccctaagctgctgatctacggcgctaccacactggaaacaggcgtgcccagcagattttctggcagcggctctggcaccgactacaccctgacaatatccagcctccagcctgaggacttcgccacctactactgtcagcagagctggaacaccccttggacattcggccagggcaccaagctggaaatcaagagactcgaggacctgaagaacgtgttcccacctgaggtggccgtgttcgagcctagcgaggccgagatcagccacacccagaaagccaccctcgtgtgcctggctaccggcttctaccccgaccatgtggaactgtcttggtgggtcaacggcaaagaggtgcacagcggcgtgtgtaccgacccccagccactgaaagaacagcccgccctgaacgacagccggtactgcctgagcagcagactgagagtgtccgccaccttctggcagaacccccggaaccacttcagatgccaggtgcagttctacggcctgagcgagaacgacgagtggacccaggacagagccaagcccgtgacccagatcgtgtctgccgaagcctggggcagagccgattgcggctttaccagcgagagctaccagcagggcgtgctgagcgccaccatcctgtacgagatcctgctgggcaaggccaccctgtacgccgtgctggtgtctgccctggtgctgatggctatggtcaagcggaaggacagccggggaagggccaagcgatctggatctggagcaacaaacttctcactactcaaacaagcaggtgacgtggaggagaatcccgggcctactagtatggactggatttggcgcatccttttccttgtcggcgctgctaccggcgcccattccgggccccaggttcagctgcaagagtctggcggaggacttgctcaagctggcggaagcctgagactgtcttgtgccgcctctggcagaaccttcagcatgggctggtttagacaggcccctggcaaagagagagagttcgtcgccgccatcacatacagcggcggcagcccttactacgcctcttctgtcagaggccggttcaccatcagccgggacaacgccaagaacaccgtgtacctccagatgaacagcctgaagccagaggacaccgccgtgtactactgtgccgccaatccaacctacggcagcgactggaatgccgagaattggggccagggcacccaagtgacagtgtctagtggatccggcggcggaggatctggcggaggcggatctgggggcggaggctctttcgaacaagttcagcttcaacagcctggcgctgagctggtcaaacctggcgcttctgtgaagatgagctgcaaagccagcggctacgccttcagcagctactggatcaactggatgaagcagaaacccggccagggactcgaatggatcggccaaatctatcccggcgacggcgacaccaactacaacggcaagttcaagggcagagccacactgaccgccgatacctctagcagcacagcctacatgcagctgagcagcctgaccagcgaagatagcgccgtgtacttctgtgcccggtccatcacaacagtcgtgggctgcgctatggactattggggccagggaacaagcgtgaccgtgtctagtacgcgtatccagaaccctgatcctgccgtgtaccagctgcgggatagcaagagcagcgacaagagcgtgtgtctgttcaccgacttcgacagccagaccaacgtgtcccagagcaaggactccgacgtgtacatcaccgataagtgcgtgctggacatgcggagcatggacttcaagagcaactccgccgtggcctggtccaacaagtccgatttcgcctgcgccaacgccttcaacaacagcattatccccgaggacacattcttcccaagccccgagagcagctgcgacgtgaagctggtggaaaagagcttcgagacagacaccaacctgaacttccagaacctgagcgtgatcggcttcagaatcctgctgctgaaagtggccggctttaacctgctgatgaccctgcggctgtggtccagccgcgccaagagaagcggatctggcgtgaagcagaccctgaatttcgacctgctgaagctggctggcgacgtggaatccaacccaggcccttctagaggcgggatccacaccatggctacctacgaggtgctgtgcgaggtggcaagaaagctgggcaccgacgacagagaagtggtgctgttcctgctgaacgtgttcatccctcagcctacactggcccagctgatcggtgcactgagagccctgaaagaggaaggccggctgacctttcctctgctggccgaatgcctgttcagagccggaagaagggatctgctgcgggacctgctgcatctggaccccagatttctggaaagacacctggccggcaccatgagctacttcagcccttaccagctgaccgtgctgcacgttgacggcgaactgtgcgccagagatattcggagcctgatcttcctgagcaaggacaccatcggcagccggtctacccctcagacatttctgcactgggtgtactgcatggaaaacctggacctgctcggccccacagatgtggatgccctgatgtccatgctgagaagcctgagcagagtggacctccagagacaggtgcagacactgatgggactgcacctgagcggacctagccacagccagcactacagacacacccct

SEQ ID NO: 4168 - DNA, 2700 bp, Artificial Sequence
  Synthetic Polynucloetide
atggccttaccagtgaccgccttgctcctgccgctggccttgctgctccacgccgccaggccgcagctccagctgcaagagtctggacctggcctggtcaagcctagcgagacactgagcctgacctgtaccgtgtccggcgatagcatcagcagcggcgattactactggggctggatcagacagcctcctggcaaaggactggaatggatcggccacatctactacagcggcgtgacctactacaaccccagcctgaagtccagagtgaccatcagcgtggacaccagccggaaccagttctccctgaagctgtctagcgtgacagccgccgataccgccgtgtactactgcaccagagaggacagcagcaactggcggagtagaggccagggaacactggtcacagttagctctggtaccggcggaggcggatctggcggcggaggtagcggtggcggaggatctgaattcgacatccagatgacacagagccctagcagcctgtctgccagcgtgggagacagagtgaccatcacatgcaaggccagcgaccacatcaacaactggctggcctggtatcagcagaagcctggacaggcccctaagctgctgatctacggcgctaccacactggaaacaggcgtgcccagcagattttctggcagcggctctggcaccgactacaccctgacaatatccagcctccagcctgaggacttcgccacctactactgtcagcagagctggaacaccccttggacattcggccagggcaccaagctggaaatcaagagactcgagatccagaaccctgatcctgccgtgtaccagctgcgggatagcaagagcagcgacaagagcgtgtgtctgttcaccgacttcgacagccagaccaacgtgtcccagagcaaggactccgacgtgtacatcaccgataagtgcgtgctggacatgcggagcatggacttcaagagcaactccgccgtggcctggtccaacaagtccgatttcgcctgcgccaacgccttcaacaacagcattatccccgaggacacattcttcccaagccccgagagcagctgcgacgtgaagctggtggaaaagagcttcgagacagacaccaacctgaacttccagaacctgagcgtgatcggcttcagaatcctgctgctgaaagtggccggctttaacctgctgatgaccctgcggctgtggtccagccgcgccaagagaagcggatctggcgtgaagcagaccctgaatttcgacctgctgaagctggctggcgacgtggaatccaacccaggccctactagtatggactggatttggcgcatccttttccttgtcggcgctgctaccggcgcccattccgggccccaggttcagctgcaagagtctggcggaggacttgctcaagctggcggaagcctgagactgtcttgtgccgcctctggcagaaccttcagcatgggctggtttagacaggcccctggcaaagagagagagttcgtcgccgccatcacatacagcggcggcagcccttactacgcctcttctgtcagaggccggttcaccatcagccgggacaacgccaagaacaccgtgtacctccagatgaacagcctgaagccagaggacaccgccgtgtactactgtgccgccaatccaacctacggcagcgactggaatgccgagaattggggccagggcacccaagtgacagtgtctagtggatccggcggcggaggatctggcggaggcggatctgggggcggaggctctttcgaacaagttcagcttcaacagcctggcgctgagctggtcaaacctggcgcttctgtgaagatgagctgcaaagccagcggctacgccttcagcagctactggatcaactggatgaagcagaaacccggccagggactcgaatggatcggccaaatctatcccggcgacggcgacaccaactacaacggcaagttcaagggcagagccacactgaccgccgatacctctagcagcacagcctacatgcagctgagcagcctgaccagcgaagatagcgccgtgtacttctgtgcccggtccatcacaacagtcgtgggctgcgctatggactattggggccagggaacaagcgtgaccgtgtctagtacgcgtgaggacctgaagaacgtgttcccacctgaggtggccgtgttcgagcctagcgaggccgagatcagccacacccagaaagccaccctcgtgtgcctggctaccggcttctaccccgaccatgtggaactgtcttggtgggtcaacggcaaagaggtgcacagcggcgtgtgtaccgacccccagccactgaaagaacagcccgccctgaacgacagccggtactgcctgagcagcagactgagagtgtccgccaccttctggcagaacccccggaaccacttcagatgccaggtgcagttctacggcctgagcgagaacgacgagtggacccaggacagagccaagcccgtgacccagatcgtgtctgccgaagcctggggcagagccgattgcggctttaccagcgagagctaccagcagggcgtgctgagcgccaccatcctgtacgagatcctgctgggcaaggccaccctgtacgccgtgctggtgtctgccctggtgctgatggctatggtcaagcggaaggacagccgggga

SEQ ID NO: 4169 - DNA, 3366 bp, Artificial Sequence
  Synthetic Polynucloetide
atggccttaccagtgaccgccttgctcctgccgctggccttgctgctccacgccgccaggccgcagctccagctgcaagagtctggacctggcctggtcaagcctagcgagacactgagcctgacctgtaccgtgtccggcgatagcatcagcagcggcgattactactggggctggatcagacagcctcctggcaaaggactggaatggatcggccacatctactacagcggcgtgacctactacaaccccagcctgaagtccagagtgaccatcagcgtggacaccagccggaaccagttctccctgaagctgtctagcgtgacagccgccgataccgccgtgtactactgcaccagagaggacagcagcaactggcggagtagaggccagggaacactggtcacagttagctctggtaccggcggaggcggatctggcggcggaggtagcggtggcggaggatctgaattcgacatccagatgacacagagccctagcagcctgtctgccagcgtgggagacagagtgaccatcacatgcaaggccagcgaccacatcaacaactggctggcctggtatcagcagaagcctggacaggcccctaagctgctgatctacggcgctaccacactggaaacaggcgtgcccagcagattttctggcagcggctctggcaccgactacaccctgacaatatccagcctccagcctgaggacttcgccacctactactgtcagcagagctggaacaccccttggacattcggccagggcaccaagctggaaatcaagagactcgagatccagaaccctgatcctgccgtgtaccagctgcgggatagcaagagcagcgacaagagcgtgtgtctgttcaccgacttcgacagccagaccaacgtgtcccagagcaaggactccgacgtgtacatcaccgataagtgcgtgctggacatgcggagcatggacttcaagagcaactccgccgtggcctggtccaacaagtccgatttcgcctgcgccaacgccttcaacaacagcattatccccgaggacacattcttcccaagccccgagagcagctgcgacgtgaagctggtggaaaagagcttcgagacagacaccaacctgaacttccagaacctgagcgtgatcggcttcagaatcctgctgctgaaagtggccggctttaacctgctgatgaccctgcggctgtggtccagccgcgccaagagaagcggatctggcgtgaagcagaccctgaatttcgacctgctgaagctggctggcgacgtggaatccaacccaggccctactagtatggactggatttggcgcatccttttccttgtcggcgctgctaccggcgcccattccgggccccaggttcagctgcaagagtctggcggaggacttgctcaagctggcggaagcctgagactgtcttgtgccgcctctggcagaaccttcagcatgggctggtttagacaggcccctggcaaagagagagagttcgtcgccgccatcacatacagcggcggcagcccttactacgcctcttctgtcagaggccggttcaccatcagccgggacaacgccaagaacaccgtgtacctccagatgaacagcctgaagccagaggacaccgccgtgtactactgtgccgccaatccaacctacggcagcgactggaatgccgagaattggggccagggcacccaagtgacagtgtctagtggatccggcggcggaggatctggcggaggcggatctgggggcggaggctctttcgaacaagttcagcttcaacagcctggcgctgagctggtcaaacctggcgcttctgtgaagatgagctgcaaagccagcggctacgccttcagcagctactggatcaactggatgaagcagaaacccggccagggactcgaatggatcggccaaatctatcccggcgacggcgacaccaactacaacggcaagttcaagggcagagccacactgaccgccgatacctctagcagcacagcctacatgcagctgagcagcctgaccagcgaagatagcgccgtgtacttctgtgcccggtccatcacaacagtcgtgggctgcgctatggactattggggccagggaacaagcgtgaccgtgtctagtacgcgtgaggacctgaagaacgtgttcccacctgaggtggccgtgttcgagcctagcgaggccgagatcagccacacccagaaagccaccctcgtgtgcctggctaccggcttctaccccgaccatgtggaactgtcttggtgggtcaacggcaaagaggtgcacagcggcgtgtgtaccgacccccagccactgaaagaacagcccgccctgaacgacagccggtactgcctgagcagcagactgagagtgtccgccaccttctggcagaacccccggaaccacttcagatgccaggtgcagttctacggcctgagcgagaacgacgagtggacccaggacagagccaagcccgtgacccagatcgtgtctgccgaagcctggggcagagccgattgcggctttaccagcgagagctaccagcagggcgtgctgagcgccaccatcctgtacgagatcctgctgggcaaggccaccctgtacgccgtgctggtgtctgccctggtgctgatggctatggtcaagcggaaggacagccggggaagggccaagcgatctggatctggagcaacaaacttctcactactcaaacaagcaggtgacgtggaggagaatcccgggccttctagaggcgggatccacaccatggctacctacgaggtgctgtgcgaggtggcaagaaagctgggcaccgacgacagagaagtggtgctgttcctgctgaacgtgttcatccctcagcctacactggcccagctgatcggtgcactgagagccctgaaagaggaaggccggctgacctttcctctgctggccgaatgcctgttcagagccggaagaagggatctgctgcgggacctgctgcatctggaccccagatttctggaaagacacctggccggcaccatgagctacttcagcccttaccagctgaccgtgctgcacgttgacggcgaactgtgcgccagagatattcggagcctgatcttcctgagcaaggacaccatcggcagccggtctacccctcagacatttctgcactgggtgtactgcatggaaaacctggacctgctcggccccacagatgtggatgccctgatgtccatgctgagaagcctgagcagagtggacctccagagacaggtgcagacactgatgggactgcacctgagcggacctagccacagccagcactacagacacacccct

SEQ ID NO: 4170 - DNA, 3390 bp, Artificial Sequence
  Synthetic Polynucloetide
atggccttaccagtgaccgccttgctcctgccgctggccttgctgctccacgccgccaggccgcagctccagctgcaagagtctggacctggcctggtcaagcctagcgagacactgagcctgacctgtaccgtgtccggcgatagcatcagcagcggcgattactactggggctggatcagacagcctcctggcaaaggactggaatggatcggccacatctactacagcggcgtgacctactacaaccccagcctgaagtccagagtgaccatcagcgtggacaccagccggaaccagttctccctgaagctgtctagcgtgacagccgccgataccgccgtgtactactgcaccagagaggacagcagcaactggcggagtagaggccagggaacactggtcacagttagctctggtaccggcggaggcggatctggcggcggaggtagcggtggcggaggatctgaattcgacatccagatgacacagagccctagcagcctgtctgccagcgtgggagacagagtgaccatcacatgcaaggccagcgaccacatcaacaactggctggcctggtatcagcagaagcctggacaggcccctaagctgctgatctacggcgctaccacactggaaacaggcgtgcccagcagattttctggcagcggctctggcaccgactacaccctgacaatatccagcctccagcctgaggacttcgccacctactactgtcagcagagctggaacaccccttggacattcggccagggcaccaagctggaaatcaagagactcgaggacctgaagaacgtgttcccacctgaggtggccgtgttcgagcctagcgaggccgagatcagccacacccagaaagccaccctcgtgtgcctggctaccggcttctaccccgaccatgtggaactgtcttggtgggtcaacggcaaagaggtgcacagcggcgtgtctaccgacccccagccactgaaagaacagcccgccctgaacgacagccggtactgcctgagcagcagactgagagtgtccgccaccttctggcagaacccccggaaccacttcagatgccaggtgcagttctacggcctgagcgagaacgacgagtggacccaggacagagccaagcccgtgacccagatcgtgtctgccgaagcctggggcagagccgattgcggctttaccagcgagagctaccagcagggcgtgctgagcgccaccatcctgtacgagatcctgctgggcaaggccaccctgtacgccgtgctggtgtctgccctggtgctgatggctatggtcaagcggaaggacagccggggaagggccaagcgatctggatctggagcaacaaacttctcactactcaaacaagcaggtgacgtggaggagaatcccgggcctactagtatggactggatttggcgcatccttttccttgtcggcgctgctaccggcgcccattccgggccccaggttcagctgcaagagtctggcggaggacttgctcaagctggcggaagcctgagactgtcttgtgccgcctctggcagaaccttcagcatgggctggtttagacaggcccctggcaaagagagagagttcgtcgccgccatcacatacagcggcggcagcccttactacgcctcttctgtcagaggccggttcaccatcagccgggacaacgccaagaacaccgtgtacctccagatgaacagcctgaagccagaggacaccgccgtgtactactgtgccgccaatccaacctacggcagcgactggaatgccgagaattggggccagggcacccaagtgacagtgtctagtggatccggcggcggaggatctggcggaggcggatctgggggcggaggctctttcgaacaagttcagcttcaacagcctggcgctgagctggtcaaacctggcgcttctgtgaagatgagctgcaaagccagcggctacgccttcagcagctactggatcaactggatgaagcagaaacccggccagggactcgaatggatcggccaaatctatcccggcgacggcgacaccaactacaacggcaagttcaagggcagagccacactgaccgccgatacctctagcagcacagcctacatgcagctgagcagcctgaccagcgaagatagcgccgtgtacttctgtgcccggtccatcacaacagtcgtgggctgcgctatggactattggggccagggaacaagcgtgaccgtgtctagtacgcgtatccagaaccctgatcctgccgtgtaccagctgcgggatagcaagagcagcgacaagagcgtgtgtctgttcaccgacttcgacagccagaccaacgtgtcccagagcaaggactccgacgtgtacatcaccgataagaccgtgctggacatgcggagcatggacttcaagagcaactccgccgtggcctggtccaacaagtccgatttcgcctgcgccaacgccttcaacaacagcattatccccgaggacacattcttcccaagccccgagagcagctgcgacgtgaagctggtggaaaagagcttcgagacagacaccaacctgaacttccagaacctgagcgtgatcggcttcagaatcctgctgctgaaagtggccggctttaacctgctgatgaccctgcggctgtggtccagccgcgccaagagaagcggatctggcgtgaagcagaccctgaatttcgacctgctgaagctggctggcgacgtggaatccaacccaggcccttctagaggccatatgaccgagtacaagcccacggtgcgcctcgccacccgcgacgacgtccccagggccgtacgcaccctcgccgccgcgttcgccgactaccccgccacgcgccacaccgtcgatccggaccgccacatcgagcgggtcaccgagctgcaagaactcttcctcacgcgcgtcgggctcgacatcggcaaggtgtgggtcgcggacgacggcgccgcggtggcggtctggaccacgccggagagcgtcgaagcgggggcggtgttcgccgagatcggcccgcgcatggccgagttgagcggttcccggctggccgcgcagcaacagatggaaggcctcctggcgccgcaccggcccaaggagcccgcgtggttcctggccaccgtcggcgtctcgcccgaccaccagggcaagggtctgggcagcgccgtcgtgctccccggagtggaggcggccgagcgcgccggggtgcccgccttcctggagacctccgcgccccgcaacctccccttctacgagcggctcggcttcaccgtcaccgccgacgtcgaggtgcccgaaggaccgcgcacctggtgcatgacccgcaagcccggtgcctga

SEQ ID NO: 4171 - DNA, 3636 bp, Artificial Sequence
  Synthetic Polynucloetide
atggccttaccagtgaccgccttgctcctgccgctggccttgctgctccacgccgccaggccgcagctccagctgcaagagtctggacctggcctggtcaagcctagcgagacactgagcctgacctgtaccgtgtccggcgatagcatcagcagcggcgattactactggggctggatcagacagcctcctggcaaaggactggaatggatcggccacatctactacagcggcgtgacctactacaaccccagcctgaagtccagagtgaccatcagcgtggacaccagccggaaccagttctccctgaagctgtctagcgtgacagccgccgataccgccgtgtactactgcaccagagaggacagcagcaactggcggagtagaggccagggaacactggtcacagttagctctggtaccggcggaggcggatctggcggcggaggtagcggtggcggaggatctgaattcgacatccagatgacacagagccctagcagcctgtctgccagcgtgggagacagagtgaccatcacatgcaaggccagcgaccacatcaacaactggctggcctggtatcagcagaagcctggacaggcccctaagctgctgatctacggcgctaccacactggaaacaggcgtgcccagcagattttctggcagcggctctggcaccgactacaccctgacaatatccagcctccagcctgaggacttcgccacctactactgtcagcagagctggaacaccccttggacattcggccagggcaccaagctggaaatcaagagactcgaggacctgaagaacgtgttcccacctgaggtggccgtgttcgagcctagcgaggccgagatcagccacacccagaaagccaccctcgtgtgcctggctaccggcttctaccccgaccatgtggaactgtcttggtgggtcaacggcaaagaggtgcacagcggcgtgtctaccgacccccagccactgaaagaacagcccgccctgaacgacagccggtactgcctgagcagcagactgagagtgtccgccaccttctggcagaacccccggaaccacttcagatgccaggtgcagttctacggcctgagcgagaacgacgagtggacccaggacagagccaagcccgtgacccagatcgtgtctgccgaagcctggggcagagccgattgcggctttaccagcgagagctaccagcagggcgtgctgagcgccaccatcctgtacgagatcctgctgggcaaggccaccctgtacgccgtgctggtgtctgccctggtgctgatggctatggtcaagcggaaggacagccggggaagggccaagcgatctggatctggagcaacaaacttctcactactcaaacaagcaggtgacgtggaggagaatcccgggcctactagtatggactggatttggcgcatccttttccttgtcggcgctgctaccggcgcccattccgggccccaggttcagctgcaagagtctggcggaggacttgctcaagctggcggaagcctgagactgtcttgtgccgcctctggcagaaccttcagcatgggctggtttagacaggcccctggcaaagagagagagttcgtcgccgccatcacatacagcggcggcagcccttactacgcctcttctgtcagaggccggttcaccatcagccgggacaacgccaagaacaccgtgtacctccagatgaacagcctgaagccagaggacaccgccgtgtactactgtgccgccaatccaacctacggcagcgactggaatgccgagaattggggccagggcacccaagtgacagtgtctagtggatccggcggcggaggatctggcggaggcggatctgggggcggaggctctttcgaacaagttcagcttcaacagcctggcgctgagctggtcaaacctggcgcttctgtgaagatgagctgcaaagccagcggctacgccttcagcagctactggatcaactggatgaagcagaaacccggccagggactcgaatggatcggccaaatctatcccggcgacggcgacaccaactacaacggcaagttcaagggcagagccacactgaccgccgatacctctagcagcacagcctacatgcagctgagcagcctgaccagcgaagatagcgccgtgtacttctgtgcccggtccatcacaacagtcgtgggctgcgctatggactattggggccagggaacaagcgtgaccgtgtctagtacgcgtgagcagaaactgatctcggaagaggatgggagcggcaccccattcccttctctggcccctcccatcatgctgctggtggacggcaagcagcagatggtggtcgtgtgcctggtgctggatgtggccccacctggactggacagccccatctggtttagcgccggcaatggctctgccctggacgcctttacctacggcccaagccctgccaccgatggcacctggacaaatctggcccacctgagcctgcccagcgaggaactggcttcttgggagcctctcgtgtgccacacaggacctggcgctgagggacacagcagatccacccagcctatgcacctgtctggcgaggccagcaccgccagaacctgtcctcaggaacctctgagaggcacccctggcggagcactgtggctgggagtgctgagactgctgctgttcaagctgctgctgtttgacctgctgctgacctgctcctgtctgtgcgatcctgccggccctctgccttctcctgccaccaccacaagactgagagccctgggcagccacagactgcaccctgccacagagacaggcggcagagaggccacaagcagccctagaccccagcccagagacagaagatggggcgataccccccctggcagaaagcctggatctccagtccgcgccaagagaagcggatctggcgtgaagcagaccctgaatttcgacctgctgaagctggctggcgacgtggaatccaacccaggcccttctagaggccatatgaccgagtacaagcccacggtgcgcctcgccacccgcgacgacgtccccagggccgtacgcaccctcgccgccgcgttcgccgactaccccgccacgcgccacaccgtcgatccggaccgccacatcgagcgggtcaccgagctgcaagaactcttcctcacgcgcgtcgggctcgacatcggcaaggtgtgggtcgcggacgacggcgccgcggtggcggtctggaccacgccggagagcgtcgaagcgggggcggtgttcgccgagatcggcccgcgcatggccgagttgagcggttcccggctggccgcgcagcaacagatggaaggcctcctggcgccgcaccggcccaaggagcccgcgtggttcctggccaccgtcggcgtctcgcccgaccaccagggcaagggtctgggcagcgccgtcgtgctccccggagtggaggcggccgagcgcgccggggtgcccgccttcctggagacctccgcgccccgcaacctccccttctacgagcggctcggcttcaccgtcaccgccgacgtcgaggtgcccgaaggaccgcgcacctggtgcatgacccgcaagcccggtgcctga

SEQ ID NO: 4172 - DNA, 3501 bp, Artificial Sequence
  Synthetic Polynucloetide
atggccttaccagtgaccgccttgctcctgccgctggccttgctgctccacgccgccaggccgcagctccagctgcaagagtctggacctggcctggtcaagcctagcgagacactgagcctgacctgtaccgtgtccggcgatagcatcagcagcggcgattactactggggctggatcagacagcctcctggcaaaggactggaatggatcggccacatctactacagcggcgtgacctactacaaccccagcctgaagtccagagtgaccatcagcgtggacaccagccggaaccagttctccctgaagctgtctagcgtgacagccgccgataccgccgtgtactactgcaccagagaggacagcagcaactggcggagtagaggccagggaacactggtcacagttagctctggtaccggcggaggcggatctggcggcggaggtagcggtggcggaggatctgaattcgacatccagatgacacagagccctagcagcctgtctgccagcgtgggagacagagtgaccatcacatgcaaggccagcgaccacatcaacaactggctggcctggtatcagcagaagcctggacaggcccctaagctgctgatctacggcgctaccacactggaaacaggcgtgcccagcagattttctggcagcggctctggcaccgactacaccctgacaatatccagcctccagcctgaggacttcgccacctactactgtcagcagagctggaacaccccttggacattcggccagggcaccaagctggaaatcaagagactcgaggggaaaccaattcccaaccctcttctgggactggattcaaccggcagcggcgacaagcagctggacgccgacgtgtcccccaagcctaccatcttcctgccctctatcgccgagacaaagctccagaaggccggcacctacctgtgcctgctggaaaagttcttcccagatgtgattaagatccactggcaggaaaagaagtccaacaccatcctgggcagccaggaaggcaacaccatgaagaccaacgacacctacatgaagttcagctggctgaccgtgcccgagaagtccctggacaaagaacacagatgcatcgtgcggcacgaaaacaacaagaacggcgtggaccaggaaatcatcttcccacccatcaagaccgatgtgattacaatggaccccaaggacaactgctccaaggacgccaacgataccctgctgctccagctgaccaacaccagcgcctactacatgtacttgttgctgctgctgaagtccgtggtgtacttcgccatcatcacatgctgcctgctgcggagaaccgccttctgctgcaacggcgagaagtctagggccaagcgatctggatctggagcaacaaacttctcactactcaaacaagcaggtgacgtggaggagaatcccgggcctactagtatggactggatttggcgcatccttttccttgtcggcgctgctaccggcgcccattccgggccccaggttcagctgcaagagtctggcggaggacttgctcaagctggcggaagcctgagactgtcttgtgccgcctctggcagaaccttcagcatgggctggtttagacaggcccctggcaaagagagagagttcgtcgccgccatcacatacagcggcggcagcccttactacgcctcttctgtcagaggccggttcaccatcagccgggacaacgccaagaacaccgtgtacctccagatgaacagcctgaagccagaggacaccgccgtgtactactgtgccgccaatccaacctacggcagcgactggaatgccgagaattggggccagggcacccaagtgacagtgtctagtggatccggcggcggaggatctggcggaggcggatctgggggcggaggctctttcgaacaagttcagcttcaacagcctggcgctgagctggtcaaacctggcgcttctgtgaagatgagctgcaaagccagcggctacgccttcagcagctactggatcaactggatgaagcagaaacccggccagggactcgaatggatcggccaaatctatcccggcgacggcgacaccaactacaacggcaagttcaagggcagagccacactgaccgccgatacctctagcagcacagcctacatgcagctgagcagcctgaccagcgaagatagcgccgtgtacttctgtgcccggtccatcacaacagtcgtgggctgcgctatggactattggggccagggaacaagcgtgaccgtgtctagtacgcgtgagcagaaactgatctcggaagaggatgggagcggcagccagcctcacaccaagcccagcgtgttcgtgatgaagaacggcaccaacgtggcctgcctcgtgaaagagttctaccccaaggacatcaggatcaacctggtgtccagcaagaagatcaccgagttcgaccccgccatcgtgatctcccccagcggcaagtacaacgccgtgaagctggggaagtacgaggacagcaacagcgtgacctgctccgtgcagcacgacaacaagaccgtgcacagcaccgactttgaagtgaaaaccgactccaccgaccacgtgaagcccaaagagacagagaacaccaagcagcccagcaagagctgccacaagcccaaggccatcgtgcacaccgagaaagtgaacatgatgagcctgaccgtgctgggcctgcggatgctgttcgccaaaaccgtggccgtgaacttcctgctgaccgccaagctgttcttcctccgcgccaagagaagcggatctggcgtgaagcagaccctgaatttcgacctgctgaagctggctggcgacgtggaatccaacccaggcccttctagaggccatatgaccgagtacaagcccacggtgcgcctcgccacccgcgacgacgtccccagggccgtacgcaccctcgccgccgcgttcgccgactaccccgccacgcgccacaccgtcgatccggaccgccacatcgagcgggtcaccgagctgcaagaactcttcctcacgcgcgtcgggctcgacatcggcaaggtgtgggtcgcggacgacggcgccgcggtggcggtctggaccacgccggagagcgtcgaagcgggggcggtgttcgccgagatcggcccgcgcatggccgagttgagcggttcccggctggccgcgcagcaacagatggaaggcctcctggcgccgcaccggcccaaggagcccgcgtggttcctggccaccgtcggcgtctcgcccgaccaccagggcaagggtctgggcagcgccgtcgtgctccccggagtggaggcggccgagcgcgccggggtgcccgccttcctggagacctccgcgccccgcaacctccccttctacgagcggctcggcttcaccgtcaccgccgacgtcgaggtgcccgaaggaccgcgcacctggtgcatgacccgcaagcccggtgcctga

SEQ ID NO: 4173 - DNA, 2712 bp, Artificial Sequence
  Synthetic Polynucloetide
atggccttaccagtgaccgccttgctcctgccgctggccttgctgctccacgccgccaggccgcagctccagctgcaagagtctggacctggcctggtcaagcctagcgagacactgagcctgacctgtaccgtgtccggcgatagcatcagcagcggcgattactactggggctggatcagacagcctcctggcaaaggactggaatggatcggccacatctactacagcggcgtgacctactacaaccccagcctgaagtccagagtgaccatcagcgtggacaccagccggaaccagttctccctgaagctgtctagcgtgacagccgccgataccgccgtgtactactgcaccagagaggacagcagcaactggcggagtagaggccagggaacactggtcacagttagctctggtaccggcggaggcggatctggcggcggaggtagcggtggcggaggatctgaattcgacatccagatgacacagagccctagcagcctgtctgccagcgtgggagacagagtgaccatcacatgcaaggccagcgaccacatcaacaactggctggcctggtatcagcagaagcctggacaggcccctaagctgctgatctacggcgctaccacactggaaacaggcgtgcccagcagattttctggcagcggctctggcaccgactacaccctgacaatatccagcctccagcctgaggacttcgccacctactactgtcagcagagctggaacaccccttggacattcggccagggcaccaagctggaaatcaagagactcgagagccagcctcacaccaagcccagcgtgttcgtgatgaagaacggcaccaacgtggcctgcctcgtgaaagagttctaccccaaggacatcaggatcaacctggtgtccagcaagaagatcaccgagttcgaccccgccatcgtgatctcccccagcggcaagtacaacgccgtgaagctggggaagtacgaggacagcaacagcgtgacctgctccgtgcagcacgacaacaagaccgtgcacagcaccgactttgaagtgaaaaccgactccaccgaccacgtgaagcccaaagagacagagaacaccaagcagcccagcaagagctgccacaagcccaaggccatcgtgcacaccgagaaagtgaacatgatgagcctgaccgtgctgggcctgcggatgctgttcgccaaaaccgtggccgtgaacttcctgctgaccgccaagctgttcttcctcagggccaagcgatctggatctggagcaacaaacttctcactactcaaacaagcaggtgacgtggaggagaatcccgggcctactagtatggactggatttggcgcatccttttccttgtcggcgctgctaccggcgcccattccgggccccaggttcagctgcaagagtctggcggaggacttgctcaagctggcggaagcctgagactgtcttgtgccgcctctggcagaaccttcagcatgggctggtttagacaggcccctggcaaagagagagagttcgtcgccgccatcacatacagcggcggcagcccttactacgcctcttctgtcagaggccggttcaccatcagccgggacaacgccaagaacaccgtgtacctccagatgaacagcctgaagccagaggacaccgccgtgtactactgtgccgccaatccaacctacggcagcgactggaatgccgagaattggggccagggcacccaagtgacagtgtctagtggatccggcggcggaggatctggcggaggcggatctgggggcggaggctctttcgaacaagttcagcttcaacagcctggcgctgagctggtcaaacctggcgcttctgtgaagatgagctgcaaagccagcggctacgccttcagcagctactggatcaactggatgaagcagaaacccggccagggactcgaatggatcggccaaatctatcccggcgacggcgacaccaactacaacggcaagttcaagggcagagccacactgaccgccgatacctctagcagcacagcctacatgcagctgagcagcctgaccagcgaagatagcgccgtgtacttctgtgcccggtccatcacaacagtcgtgggctgcgctatggactattggggccagggaacaagcgtgaccgtgtctagtacgcgtgacaagcagctggacgccgacgtgtcccccaagcctaccatcttcctgccctctatcgccgagacaaagctccagaaggccggcacctacctgtgcctgctggaaaagttcttcccagatgtgattaagatccactggcaggaaaagaagtccaacaccatcctgggcagccaggaaggcaacaccatgaagaccaacgacacctacatgaagttcagctggctgaccgtgcccgagaagtccctggacaaagaacacagatgcatcgtgcggcacgaaaacaacaagaacggcgtggaccaggaaatcatcttcccacccatcaagaccgatgtgattacaatggaccccaaggacaactgctccaaggacgccaacgataccctgctgctccagctgaccaacaccagcgcctactacatgtacttgttgctgctgctgaagtccgtggtgtacttcgccatcatcacatgctgcctgctgcggagaaccgccttctgctgcaacggcgagaagtct

SEQ ID NO: 4174 - DNA, 3921 bp, Artificial Sequence
  Synthetic Polynucloetide
atggccttaccagtgaccgccttgctcctgccgctggccttgctgctccacgccgccaggccgcagctccagctgcaagagtctggacctggcctggtcaagcctagcgagacactgagcctgacctgtaccgtgtccggcgatagcatcagcagcggcgattactactggggctggatcagacagcctcctggcaaaggactggaatggatcggccacatctactacagcggcgtgacctactacaaccccagcctgaagtccagagtgaccatcagcgtggacaccagccggaaccagttctccctgaagctgtctagcgtgacagccgccgataccgccgtgtactactgcaccagagaggacagcagcaactggcggagtagaggccagggaacactggtcacagttagctctggtaccggcggaggcggatctggcggcggaggtagcggtggcggaggatctgaattcgacatccagatgacacagagccctagcagcctgtctgccagcgtgggagacagagtgaccatcacatgcaaggccagcgaccacatcaacaactggctggcctggtatcagcagaagcctggacaggcccctaagctgctgatctacggcgctaccacactggaaacaggcgtgcccagcagattttctggcagcggctctggcaccgactacaccctgacaatatccagcctccagcctgaggacttcgccacctactactgtcagcagagctggaacaccccttggacattcggccagggcaccaagctggaaatcaagagaggacagcctaaggccaatcctaccgtgacactgttccctccaagcagcgaagaactccaggccaacaaggccacacttgtgtgcctgatctccgacttctaccctggggctgtgacagtggcttggaaggccgatggatctcctgtgaaagccggcgtggaaaccaccaagccatccaagcagagcaacaacaaatacgccgccagctcctacctgagcctgacacctgagcagtggaagtcccacagatcctacagctgccaagtgacccacgaaggcagcaccgtggaaaagacagtggcccctacagagtgcagcggatcccagagcttcggcctgctggaccccaagctgtgctacctgctggatggcatcctgttcatctacggcgtgatcctgaccgccctgttcctgagagtgaagttcagcagaagcgccgacgcccctgcctaccagcagggacagaaccaactgtacaacgagctgaacctgggcagacgggaagagtacgacgtgctggacaagcggagaggcagggaccctgagatgggcggaaagccccagcggagaaagaacccccaggaaggactgtataacgaactccagaaagacaagatggccgaagcctacagcgagatcggcatgaagggcgagcggagaagaggcaagggccacgatggcctgtaccagggcctgagcaccgccaccaaggacacctatgacgccctgcacatgcaggccctgcctccaagaagggccaagcgatctggatctggagcaacaaacttctcactactcaaacaagcaggtgacgtggaggagaatcccgggcctactagtatggactggatttggcgcatccttttccttgtcggcgctgctaccggcgcccattccgggccccaggttcagctgcaagagtctggcggaggacttgctcaagctggcggaagcctgagactgtcttgtgccgcctctggcagaaccttcagcatgggctggtttagacaggcccctggcaaagagagagagttcgtcgccgccatcacatacagcggcggcagcccttactacgcctcttctgtcagaggccggttcaccatcagccgggacaacgccaagaacaccgtgtacctccagatgaacagcctgaagccagaggacaccgccgtgtactactgtgccgccaatccaacctacggcagcgactggaatgccgagaattggggccagggcacccaagtgacagtgtctagtggatccggcggcggaggatctggcggaggcggatctgggggcggaggctctttcgaacaagttcagcttcaacagcctggcgctgagctggtcaaacctggcgcttctgtgaagatgagctgcaaagccagcggctacgccttcagcagctactggatcaactggatgaagcagaaacccggccagggactcgaatggatcggccaaatctatcccggcgacggcgacaccaactacaacggcaagttcaagggcagagccacactgaccgccgatacctctagcagcacagcctacatgcagctgagcagcctgaccagcgaagatagcgccgtgtacttctgtgcccggtccatcacaacagtcgtgggctgcgctatggactattggggccagggaacaagcgtgaccgtgtctagtgcctctacaaagggaccctccgtgtttcctctggctcccagcagcaagtctacaagcggaggaacagccgctctgggctgcctggtcaaggattactttcccgagcctgtgaccgtgtcctggaatagcggagcactgacaagcggcgtgcacacctttccagccgtgctgcaaagcagcggcctgtactctctgagcagcgtggtcacagtgcctagctctagcctgggcacccagacctacatctgcaatgtgaaccacaagcctagcaacaccaaggtggacaagagagtggaacccaagagctgtggtacccagagttttgggttgttggaccctaaattgtgctatctgttggacggaatcctgttcatttacggagtgatcctgaccgcattgttcctgcgggttaagttttccagatccgcagacgcacccgcttaccaacaagggcagaaccaactctacaatgaacttaatttggggcggagggaagagtacgacgttctggacaaaaggaggggacgagatcccgagatgggcggaaagcctcagcgaaggaagaatccgcaagaggggctttataacgaactccagaaagataaaatggcagaagcctatagtgagattgggatgaagggagaaaggaggaggggtaaaggtcacgatgggttgtaccaaggattgagcacagccactaaagatacctatgatgcgctccacatgcaggccctgccgccaagacgcgccaagagaagcggatctggcgtgaagcagaccctgaatttcgacctgctgaagctggctggcgacgtggaatccaacccaggcccttctagaggccatatgaccgagtacaagcccacggtgcgcctcgccacccgcgacgacgtccccagggccgtacgcaccctcgccgccgcgttcgccgactaccccgccacgcgccacaccgtcgatccggaccgccacatcgagcgggtcaccgagctgcaagaactcttcctcacgcgcgtcgggctcgacatcggcaaggtgtgggtcgcggacgacggcgccgcggtggcggtctggaccacgccggagagcgtcgaagcgggggcggtgttcgccgagatcggcccgcgcatggccgagttgagcggttcccggctggccgcgcagcaacagatggaaggcctcctggcgccgcaccggcccaaggagcccgcgtggttcctggccaccgtcggcgtctcgcccgaccaccagggcaagggtctgggcagcgccgtcgtgctccccggagtggaggcggccgagcgcgccggggtgcccgccttcctggagacctccgcgccccgcaacctccccttctacgagcggctcggcttcaccgtcaccgccgacgtcgaggtgcccgaaggaccgcgcacctggtgcatgacccgcaagcccggtgcctga

SEQ ID NO: 4175 - DNA, 3276 bp, Artificial Sequence
  Synthetic Polynucloetide
atggccttaccagtgaccgccttgctcctgccgctggccttgctgctccacgccgccaggccgcagctccagctgcaagagtctggacctggcctggtcaagcctagcgagacactgagcctgacctgtaccgtgtccggcgatagcatcagcagcggcgattactactggggctggatcagacagcctcctggcaaaggactggaatggatcggccacatctactacagcggcgtgacctactacaaccccagcctgaagtccagagtgaccatcagcgtggacaccagccggaaccagttctccctgaagctgtctagcgtgacagccgccgataccgccgtgtactactgcaccagagaggacagcagcaactggcggagtagaggccagggaacactggtcacagttagctctggtaccggcggaggcggatctggcggcggaggtagcggtggcggaggatctgaattcgacatccagatgacacagagccctagcagcctgtctgccagcgtgggagacagagtgaccatcacatgcaaggccagcgaccacatcaacaactggctggcctggtatcagcagaagcctggacaggcccctaagctgctgatctacggcgctaccacactggaaacaggcgtgcccagcagattttctggcagcggctctggcaccgactacaccctgacaatatccagcctccagcctgaggacttcgccacctactactgtcagcagagctggaacaccccttggacattcggccagggcaccaagctggaaatcaagagactcgaggacctgaagaacgtgttcccacctgaggtggccgtgttcgagcctagcgaggccgagatcagccacacccagaaagccaccctcgtgtgcctggctaccggcttctaccccgaccatgtggaactgtcttggtgggtcaacggcaaagaggtgcacagcggcgtgtctaccgacccccagccactgaaagaacagcccgccctgaacgacagccggtactgcctgagcagcagactgagagtgtccgccaccttctggcagaacccccggaaccacttcagatgccaggtgcagttctacggcctgagcgagaacgacgagtggacccaggacagagccaagcccgtgacccagatcgtgtctgccgaagcctggggcagagccgattgcggatcccagagcttcggcctgctggaccccaagctgtgctacctgctggatggcatcctgttcatctacggcgtgatcctgaccgccctgttcctgagagtgaagttcagcagaagcgccgacgcccctgcctaccagcagggacagaaccaactgtacaacgagctgaacctgggcagacgggaagagtacgacgtgctggacaagcggagaggcagggaccctgagatgggcggaaagccccagcggagaaagaacccccaggaaggactgtataacgaactccagaaagacaagatggccgaagcctacagcgagatcggcatgaagggcgagcggagaagaggcaagggccacgatggcctgtaccagggcctgagcaccgccaccaaggacacctatgacgccctgcacatgcaggccctgcctccaagaagggccaagcgatctggatctggagcaacaaacttctcactactcaaacaagcaggtgacgtggaggagaatcccgggcctactagtatggactggatttggcgcatccttttccttgtcggcgctgctaccggcgcccattccgggccccaggttcagctgcaagagtctggcggaggacttgctcaagctggcggaagcctgagactgtcttgtgccgcctctggcagaaccttcagcatgggctggtttagacaggcccctggcaaagagagagagttcgtcgccgccatcacatacagcggcggcagcccttactacgcctcttctgtcagaggccggttcaccatcagccgggacaacgccaagaacaccgtgtacctccagatgaacagcctgaagccagaggacaccgccgtgtactactgtgccgccaatccaacctacggcagcgactggaatgccgagaattggggccagggcacccaagtgacagtgtctagtggatccggcggcggaggatctggcggaggcggatctgggggcggaggctctttcgaacaagttcagcttcaacagcctggcgctgagctggtcaaacctggcgcttctgtgaagatgagctgcaaagccagcggctacgccttcagcagctactggatcaactggatgaagcagaaacccggccagggactcgaatggatcggccaaatctatcccggcgacggcgacaccaactacaacggcaagttcaagggcagagccacactgaccgccgatacctctagcagcacagcctacatgcagctgagcagcctgaccagcgaagatagcgccgtgtacttctgtgcccggtccatcacaacagtcgtgggctgcgctatggactattggggccagggaacaagcgtgaccgtgtctagtacgcgtatccagaaccctgatcctgccgtgtaccagctgcgggatagcaagagcagcgacaagagcgtgtgtctgttcaccgacttcgacagccagaccaacgtgtcccagagcaaggactccgacgtgtacatcaccgataagaccgtgctggacatgcggagcatggacttcaagagcaactccgccgtggcctggtccaacaagtccgatttcgcctgcgccaacgccttcaacaacagcattatccccgaggacacattcttcccaagccccgagagcagctgcggtacccagagttttgggttgttggaccctaaattgtgctatctgttggacggaatcctgttcatttacggagtgatcctgaccgcattgttcctgcgggttaagttttccagatccgcagacgcacccgcttaccaacaagggcagaaccaactctacaatgaacttaatttggggcggagggaagagtacgacgttctggacaaaaggaggggacgagatcccgagatgggcggaaagcctcagcgaaggaagaatccgcaagaggggctttataacgaactccagaaagataaaatggcagaagcctatagtgagattgggatgaagggagaaaggaggaggggtaaaggtcacgatgggttgtaccaaggattgagcacagccactaaagatacctatgatgcgctccacatgcaggccctgccgccaaga

SEQ ID NO: 4176 - DNA, 3276 bp, Artificial Sequence
  Synthetic Polynucloetide
atggccttaccagtgaccgccttgctcctgccgctggccttgctgctccacgccgccaggccgcagctccagctgcaagagtctggacctggcctggtcaagcctagcgagacactgagcctgacctgtaccgtgtccggcgatagcatcagcagcggcgattactactggggctggatcagacagcctcctggcaaaggactggaatggatcggccacatctactacagcggcgtgacctactacaaccccagcctgaagtccagagtgaccatcagcgtggacaccagccggaaccagttctccctgaagctgtctagcgtgacagccgccgataccgccgtgtactactgcaccagagaggacagcagcaactggcggagtagaggccagggaacactggtcacagttagctctggtaccggcggaggcggatctggcggcggaggtagcggtggcggaggatctgaattcgacatccagatgacacagagccctagcagcctgtctgccagcgtgggagacagagtgaccatcacatgcaaggccagcgaccacatcaacaactggctggcctggtatcagcagaagcctggacaggcccctaagctgctgatctacggcgctaccacactggaaacaggcgtgcccagcagattttctggcagcggctctggcaccgactacaccctgacaatatccagcctccagcctgaggacttcgccacctactactgtcagcagagctggaacaccccttggacattcggccagggcaccaagctggaaatcaagagactcgaggacctgaagaacgtgttcccacctgaggtggccgtgttcgagcctagcaaggccgagatcgcccacacccagaaagccaccctcgtgtgcctggctaccggcttctaccccgaccatgtggaactgtcttggtgggtcaacggcaaagaggtgcacagcggcgtgtgtaccgacccccagccactgaaagaacagcccgccctgaacgacagccggtactgcctgagcagcagactgagagtgtccgccaccttctggcagaacccccggaaccacttcagatgccaggtgcagttctacggcctgagcgagaacgacgagtggacccaggacagagccaagcccgtgacccagatcgtgtctgccgaagcctggggcagagccgattgcggatcccagagcttcggcctgctggaccccaagctgtgctacctgctggatggcatcctgttcatctacggcgtgatcctgaccgccctgttcctgagagtgaagttcagcagaagcgccgacgcccctgcctaccagcagggacagaaccaactgtacaacgagctgaacctgggcagacgggaagagtacgacgtgctggacaagcggagaggcagggaccctgagatgggcggaaagccccagcggagaaagaacccccaggaaggactgtataacgaactccagaaagacaagatggccgaagcctacagcgagatcggcatgaagggcgagcggagaagaggcaagggccacgatggcctgtaccagggcctgagcaccgccaccaaggacacctatgacgccctgcacatgcaggccctgcctccaagaagggccaagcgatctggatctggagcaacaaacttctcactactcaaacaagcaggtgacgtggaggagaatcccgggcctactagtatggactggatttggcgcatccttttccttgtcggcgctgctaccggcgcccattccgggccccaggttcagctgcaagagtctggcggaggacttgctcaagctggcggaagcctgagactgtcttgtgccgcctctggcagaaccttcagcatgggctggtttagacaggcccctggcaaagagagagagttcgtcgccgccatcacatacagcggcggcagcccttactacgcctcttctgtcagaggccggttcaccatcagccgggacaacgccaagaacaccgtgtacctccagatgaacagcctgaagccagaggacaccgccgtgtactactgtgccgccaatccaacctacggcagcgactggaatgccgagaattggggccagggcacccaagtgacagtgtctagtggatccggcggcggaggatctggcggaggcggatctgggggcggaggctctttcgaacaagttcagcttcaacagcctggcgctgagctggtcaaacctggcgcttctgtgaagatgagctgcaaagccagcggctacgccttcagcagctactggatcaactggatgaagcagaaacccggccagggactcgaatggatcggccaaatctatcccggcgacggcgacaccaactacaacggcaagttcaagggcagagccacactgaccgccgatacctctagcagcacagcctacatgcagctgagcagcctgaccagcgaagatagcgccgtgtacttctgtgcccggtccatcacaacagtcgtgggctgcgctatggactattggggccagggaacaagcgtgaccgtgtctagtacgcgtatccagaaccctgatcctgccgtgtaccagctgcgggatagcaagagcagcgacaagagcgtgtgtctgttcaccgacttcgacagccagaccaacgtgtcccagagcaaggactccgacgtgtacatcaccgataagtgcgtgctggacatgcggagcatggacttcaagagcaactccgccgtggcctggtccaacaagtccgatttcgcctgcgccaacgccttcaacaacagcattatccccgaggacacattcttcccaagcagcgacgtgccctgcggtacccagagttttgggttgttggaccctaaattgtgctatctgttggacggaatcctgttcatttacggagtgatcctgaccgcattgttcctgcgggttaagttttccagatccgcagacgcacccgcttaccaacaagggcagaaccaactctacaatgaacttaatttggggcggagggaagagtacgacgttctggacaaaaggaggggacgagatcccgagatgggcggaaagcctcagcgaaggaagaatccgcaagaggggctttataacgaactccagaaagataaaatggcagaagcctatagtgagattgggatgaagggagaaaggaggaggggtaaaggtcacgatgggttgtaccaaggattgagcacagccactaaagatacctatgatgcgctccacatgcaggccctgccgccaaga

SEQ ID NO: 4177 - DNA, 3489 bp, Artificial Sequence
  Synthetic Polynucloetide
atggccttaccagtgaccgccttgctcctgccgctggccttgctgctccacgccgccaggccgcagctccagctgcaagagtctggacctggcctggtcaagcctagcgagacactgagcctgacctgtaccgtgtccggcgatagcatcagcagcggcgattactactggggctggatcagacagcctcctggcaaaggactggaatggatcggccacatctactacagcggcgtgacctactacaaccccagcctgaagtccagagtgaccatcagcgtggacaccagccggaaccagttctccctgaagctgtctagcgtgacagccgccgataccgccgtgtactactgcaccagagaggacagcagcaactggcggagtagaggccagggaacactggtcacagttagctctggtaccggcggaggcggatctggcggcggaggtagcggtggcggaggatctgaattcgacatccagatgacacagagccctagcagcctgtctgccagcgtgggagacagagtgaccatcacatgcaaggccagcgaccacatcaacaactggctggcctggtatcagcagaagcctggacaggcccctaagctgctgatctacggcgctaccacactggaaacaggcgtgcccagcagattttctggcagcggctctggcaccgactacaccctgacaatatccagcctccagcctgaggacttcgccacctactactgtcagcagagctggaacaccccttggacattcggccagggcaccaagctggaaatcaagagactcgaggggaaaccaattcccaaccctcttctgggactggattcaaccggcagcggcgaggacctgaagaacgtgttcccacctgaggtggccgtgttcgagcctagcgaggccgagatcagccacacccagaaagccaccctcgtgtgcctggctaccggcttctaccccgaccatgtggaactgtcttggtgggtcaacggcaaagaggtgcacagcggcgtgtctaccgacccccagccactgaaagaacagcccgccctgaacgacagccggtactgcctgagcagcagactgagagtgtccgccaccttctggcagaacccccggaaccacttcagatgccaggtgcagttctacggcctgagcgagaacgacgagtggacccaggacagagccaagcccgtgacccagatcgtgtctgccgaagcctggggcagagccgattgcggatcccagagcttcggcctgctggaccccaagctgtgctacctgctggatggcatcctgttcatctacggcgtgatcctgaccgccctgttcctgagagtgaagttcagcagaagcgccgacgcccctgcctaccagcagggacagaaccaactgtacaacgagctgaacctgggcagacgggaagagtacgacgtgctggacaagcggagaggcagggaccctgagatgggcggaaagccccagcggagaaagaacccccaggaaggactgtataacgaactccagaaagacaagatggccgaagcctacagcgagatcggcatgaagggcgagcggagaagaggcaagggccacgatggcctgtaccagggcctgagcaccgccaccaaggacacctatgacgccctgcacatgcaggccctgcctccaagaagggccaagcgatctggatctggagcaacaaacttctcactactcaaacaagcaggtgacgtggaggagaatcccgggcctactagtatggactggatttggcgcatccttttccttgtcggcgctgctaccggcgcccattccgggccccaggttcagctgcaagagtctggcggaggacttgctcaagctggcggaagcctgagactgtcttgtgccgcctctggcagaaccttcagcatgggctggtttagacaggcccctggcaaagagagagagttcgtcgccgccatcacatacagcggcggcagcccttactacgcctcttctgtcagaggccggttcaccatcagccgggacaacgccaagaacaccgtgtacctccagatgaacagcctgaagccagaggacaccgccgtgtactactgtgccgccaatccaacctacggcagcgactggaatgccgagaattggggccagggcacccaagtgacagtgtctagtggatccggcggcggaggatctggcggaggcggatctgggggcggaggctctttcgaacaagttcagcttcaacagcctggcgctgagctggtcaaacctggcgcttctgtgaagatgagctgcaaagccagcggctacgccttcagcagctactggatcaactggatgaagcagaaacccggccagggactcgaatggatcggccaaatctatcccggcgacggcgacaccaactacaacggcaagttcaagggcagagccacactgaccgccgatacctctagcagcacagcctacatgcagctgagcagcctgaccagcgaagatagcgccgtgtacttctgtgcccggtccatcacaacagtcgtgggctgcgctatggactattggggccagggaacaagcgtgaccgtgtctagtacgcgtgagcagaaactgatctcggaagaggatgggagcggcatccagaaccctgatcctgccgtgtaccagctgcgggatagcaagagcagcgacaagagcgtgtgtctgttcaccgacttcgacagccagaccaacgtgtcccagagcaaggactccgacgtgtacatcaccgataagaccgtgctggacatgcggagcatggacttcaagagcaactccgccgtggcctggtccaacaagtccgatttcgcctgcgccaacgccttcaacaacagcattatccccgaggacacattcttcccaagccccgagagcagctgcggtacccagagttttgggttgttggaccctaaattgtgctatctgttggacggaatcctgttcatttacggagtgatcctgaccgcattgttcctgaggagcaagcggtcacggctgctccacagcgattacatgaatatgacaccacgaagaccgggtcctactcgcaaacactaccaaccctacgcacctccccgcgactttgcagcgtaccgatctcgggttaagttttccagatccgcagacgcacccgcttaccaacaagggcagaaccaactctacaatgaacttaatttggggcggagggaagagtacgacgttctggacaaaaggaggggacgagatcccgagatgggcggaaagcctcagcgaaggaagaatccgcaagaggggctttataacgaactccagaaagataaaatggcagaagcctatagtgagattgggatgaagggagaaaggaggaggggtaaaggtcacgatgggttgtaccaaggattgagcacagccactaaagatacctatgatgcgctccacatgcaggccctgccgccaaga

SEQ ID NO: 4178 - DNA, 3612 bp, Artificial Sequence
  Synthetic Polynucloetide
atggccttaccagtgaccgccttgctcctgccgctggccttgctgctccacgccgccaggccgcagctccagctgcaagagtctggacctggcctggtcaagcctagcgagacactgagcctgacctgtaccgtgtccggcgatagcatcagcagcggcgattactactggggctggatcagacagcctcctggcaaaggactggaatggatcggccacatctactacagcggcgtgacctactacaaccccagcctgaagtccagagtgaccatcagcgtggacaccagccggaaccagttctccctgaagctgtctagcgtgacagccgccgataccgccgtgtactactgcaccagagaggacagcagcaactggcggagtagaggccagggaacactggtcacagttagctctggtaccggcggaggcggatctggcggcggaggtagcggtggcggaggatctgaattcgacatccagatgacacagagccctagcagcctgtctgccagcgtgggagacagagtgaccatcacatgcaaggccagcgaccacatcaacaactggctggcctggtatcagcagaagcctggacaggcccctaagctgctgatctacggcgctaccacactggaaacaggcgtgcccagcagattttctggcagcggctctggcaccgactacaccctgacaatatccagcctccagcctgaggacttcgccacctactactgtcagcagagctggaacaccccttggacattcggccagggcaccaagctggaaatcaagagactcgaggggaaaccaattcccaaccctcttctgggactggattcaaccggcagcggcgaggacctgaagaacgtgttcccacctgaggtggccgtgttcgagcctagcgaggccgagatcagccacacccagaaagccaccctcgtgtgcctggctaccggcttctaccccgaccatgtggaactgtcttggtgggtcaacggcaaagaggtgcacagcggcgtgtctaccgacccccagccactgaaagaacagcccgccctgaacgacagccggtactgcctgagcagcagactgagagtgtccgccaccttctggcagaacccccggaaccacttcagatgccaggtgcagttctacggcctgagcgagaacgacgagtggacccaggacagagccaagcccgtgacccagatcgtgtctgccgaagcctggggcagagccgattgcggatcccagagcttcggcctgctggaccccaagctgtgctacctgctggatggcatcctgttcatctacggcgtgatcctgaccgccctgttcctgaggagtaagaggagcaggctcctgcacagtgactacatgaacatgactccacgccgccccggacccacccgcaagcattaccagccctatgccccaccacgcgacttcgcagcctatcgctccagagtgaagttcagcagaagcgccgacgcccctgcctaccagcagggacagaaccaactgtacaacgagctgaacctgggcagacgggaagagtacgacgtgctggacaagcggagaggcagggaccctgagatgggcggaaagccccagcggagaaagaacccccaggaaggactgtataacgaactccagaaagacaagatggccgaagcctacagcgagatcggcatgaagggcgagcggagaagaggcaagggccacgatggcctgtaccagggcctgagcaccgccaccaaggacacctatgacgccctgcacatgcaggccctgcctccaagaagggccaagcgatctggatctggagcaacaaacttctcactactcaaacaagcaggtgacgtggaggagaatcccgggcctactagtatggactggatttggcgcatccttttccttgtcggcgctgctaccggcgcccattccgggccccaggttcagctgcaagagtctggcggaggacttgctcaagctggcggaagcctgagactgtcttgtgccgcctctggcagaaccttcagcatgggctggtttagacaggcccctggcaaagagagagagttcgtcgccgccatcacatacagcggcggcagcccttactacgcctcttctgtcagaggccggttcaccatcagccgggacaacgccaagaacaccgtgtacctccagatgaacagcctgaagccagaggacaccgccgtgtactactgtgccgccaatccaacctacggcagcgactggaatgccgagaattggggccagggcacccaagtgacagtgtctagtggatccggcggcggaggatctggcggaggcggatctgggggcggaggctctttcgaacaagttcagcttcaacagcctggcgctgagctggtcaaacctggcgcttctgtgaagatgagctgcaaagccagcggctacgccttcagcagctactggatcaactggatgaagcagaaacccggccagggactcgaatggatcggccaaatctatcccggcgacggcgacaccaactacaacggcaagttcaagggcagagccacactgaccgccgatacctctagcagcacagcctacatgcagctgagcagcctgaccagcgaagatagcgccgtgtacttctgtgcccggtccatcacaacagtcgtgggctgcgctatggactattggggccagggaacaagcgtgaccgtgtctagtacgcgtgagcagaaactgatctcggaagaggatgggagcggcatccagaaccctgatcctgccgtgtaccagctgcgggatagcaagagcagcgacaagagcgtgtgtctgttcaccgacttcgacagccagaccaacgtgtcccagagcaaggactccgacgtgtacatcaccgataagaccgtgctggacatgcggagcatggacttcaagagcaactccgccgtggcctggtccaacaagtccgatttcgcctgcgccaacgccttcaacaacagcattatccccgaggacacattcttcccaagccccgagagcagctgcggtacccagagttttgggttgttggaccctaaattgtgctatctgttggacggaatcctgttcatttacggagtgatcctgaccgcattgttcctgaggagcaagcggtcacggctgctccacagcgattacatgaatatgacaccacgaagaccgggtcctactcgcaaacactaccaaccctacgcacctccccgcgactttgcagcgtaccgatctcgggttaagttttccagatccgcagacgcacccgcttaccaacaagggcagaaccaactctacaatgaacttaatttggggcggagggaagagtacgacgttctggacaaaaggaggggacgagatcccgagatgggcggaaagcctcagcgaaggaagaatccgcaagaggggctttataacgaactccagaaagataaaatggcagaagcctatagtgagattgggatgaagggagaaaggaggaggggtaaaggtcacgatgggttgtaccaaggattgagcacagccactaaagatacctatgatgcgctccacatgcaggccctgccgccaaga

SEQ ID NO: 4179 - DNA, 3495 bp, Artificial Sequence
  Synthetic Polynucloetide
atggccttaccagtgaccgccttgctcctgccgctggccttgctgctccacgccgccaggccgcagctccagctgcaagagtctggacctggcctggtcaagcctagcgagacactgagcctgacctgtaccgtgtccggcgatagcatcagcagcggcgattactactggggctggatcagacagcctcctggcaaaggactggaatggatcggccacatctactacagcggcgtgacctactacaaccccagcctgaagtccagagtgaccatcagcgtggacaccagccggaaccagttctccctgaagctgtctagcgtgacagccgccgataccgccgtgtactactgcaccagagaggacagcagcaactggcggagtagaggccagggaacactggtcacagttagctctggtaccggcggaggcggatctggcggcggaggtagcggtggcggaggatctgaattcgacatccagatgacacagagccctagcagcctgtctgccagcgtgggagacagagtgaccatcacatgcaaggccagcgaccacatcaacaactggctggcctggtatcagcagaagcctggacaggcccctaagctgctgatctacggcgctaccacactggaaacaggcgtgcccagcagattttctggcagcggctctggcaccgactacaccctgacaatatccagcctccagcctgaggacttcgccacctactactgtcagcagagctggaacaccccttggacattcggccagggcaccaagctggaaatcaagagactcgaggggaaaccaattcccaaccctcttctgggactggattcaaccggcagcggcgaggacctgaagaacgtgttcccacctgaggtggccgtgttcgagcctagcgaggccgagatcagccacacccagaaagccaccctcgtgtgcctggctaccggcttctaccccgaccatgtggaactgtcttggtgggtcaacggcaaagaggtgcacagcggcgtgtctaccgacccccagccactgaaagaacagcccgccctgaacgacagccggtactgcctgagcagcagactgagagtgtccgccaccttctggcagaacccccggaaccacttcagatgccaggtgcagttctacggcctgagcgagaacgacgagtggacccaggacagagccaagcccgtgacccagatcgtgtctgccgaagcctggggcagagccgattgcggatcccagagcttcggcctgctggaccccaagctgtgctacctgctggatggcatcctgttcatctacggcgtgatcctgaccgccctgttcctgagagtgaagttcagcagaagcgccgacgcccctgcctaccagcagggacagaaccaactgtacaacgagctgaacctgggcagacgggaagagtacgacgtgctggacaagcggagaggcagggaccctgagatgggcggaaagccccagcggagaaagaacccccaggaaggactgtataacgaactccagaaagacaagatggccgaagcctacagcgagatcggcatgaagggcgagcggagaagaggcaagggccacgatggcctgtaccagggcctgagcaccgccaccaaggacacctatgacgccctgcacatgcaggccctgcctccaagaagggccaagcgatctggatctggagcaacaaacttctcactactcaaacaagcaggtgacgtggaggagaatcccgggcctactagtatggactggatttggcgcatccttttccttgtcggcgctgctaccggcgcccattccgggccccaggttcagctgcaagagtctggcggaggacttgctcaagctggcggaagcctgagactgtcttgtgccgcctctggcagaaccttcagcatgggctggtttagacaggcccctggcaaagagagagagttcgtcgccgccatcacatacagcggcggcagcccttactacgcctcttctgtcagaggccggttcaccatcagccgggacaacgccaagaacaccgtgtacctccagatgaacagcctgaagccagaggacaccgccgtgtactactgtgccgccaatccaacctacggcagcgactggaatgccgagaattggggccagggcacccaagtgacagtgtctagtggatccggcggcggaggatctggcggaggcggatctgggggcggaggctctttcgaacaagttcagcttcaacagcctggcgctgagctggtcaaacctggcgcttctgtgaagatgagctgcaaagccagcggctacgccttcagcagctactggatcaactggatgaagcagaaacccggccagggactcgaatggatcggccaaatctatcccggcgacggcgacaccaactacaacggcaagttcaagggcagagccacactgaccgccgatacctctagcagcacagcctacatgcagctgagcagcctgaccagcgaagatagcgccgtgtacttctgtgcccggtccatcacaacagtcgtgggctgcgctatggactattggggccagggaacaagcgtgaccgtgtctagtacgcgtgagcagaaactgatctcggaagaggatctggggagcggcatccagaaccctgatcctgccgtgtaccagctgcgggatagcaagagcagcgacaagagcgtgtgtctgttcaccgacttcgacagccagaccaacgtgtcccagagcaaggactccgacgtgtacatcaccgataagaccgtgctggacatgcggagcatggacttcaagagcaactccgccgtggcctggtccaacaagtccgatttcgcctgcgccaacgccttcaacaacagcattatccccgaggacacattcttcccaagccccgagagcagctgcggtacccagagttttgggttgttggaccctaaattgtgctatctgttggacggaatcctgttcatttacggagtgatcctgaccgcattgttcctgaagagaggccggaagaagctgctgtacatcttcaagcagcctttcatgcggcccgtgcagaccacccaggaagaggacggctgctcctgccggttccccgaggaagaagaaggcggctgcgagctgcgggttaagttttccagatccgcagacgcacccgcttaccaacaagggcagaaccaactctacaatgaacttaatttggggcggagggaagagtacgacgttctggacaaaaggaggggacgagatcccgagatgggcggaaagcctcagcgaaggaagaatccgcaagaggggctttataacgaactccagaaagataaaatggcagaagcctatagtgagattgggatgaagggagaaaggaggaggggtaaaggtcacgatgggttgtaccaaggattgagcacagccactaaagatacctatgatgcgctccacatgcaggccctgccgccaaga

SEQ ID NO: 4180 - DNA, 3621 bp, Artificial Sequence
  Synthetic Polynucloetide
atggccttaccagtgaccgccttgctcctgccgctggccttgctgctccacgccgccaggccgcagctccagctgcaagagtctggacctggcctggtcaagcctagcgagacactgagcctgacctgtaccgtgtccggcgatagcatcagcagcggcgattactactggggctggatcagacagcctcctggcaaaggactggaatggatcggccacatctactacagcggcgtgacctactacaaccccagcctgaagtccagagtgaccatcagcgtggacaccagccggaaccagttctccctgaagctgtctagcgtgacagccgccgataccgccgtgtactactgcaccagagaggacagcagcaactggcggagtagaggccagggaacactggtcacagttagctctggtaccggcggaggcggatctggcggcggaggtagcggtggcggaggatctgaattcgacatccagatgacacagagccctagcagcctgtctgccagcgtgggagacagagtgaccatcacatgcaaggccagcgaccacatcaacaactggctggcctggtatcagcagaagcctggacaggcccctaagctgctgatctacggcgctaccacactggaaacaggcgtgcccagcagattttctggcagcggctctggcaccgactacaccctgacaatatccagcctccagcctgaggacttcgccacctactactgtcagcagagctggaacaccccttggacattcggccagggcaccaagctggaaatcaagagactcgaggggaaaccaattcccaaccctcttctgggactggattcaaccggcagcggcgaggacctgaagaacgtgttcccacctgaggtggccgtgttcgagcctagcgaggccgagatcagccacacccagaaagccaccctcgtgtgcctggctaccggcttctaccccgaccatgtggaactgtcttggtgggtcaacggcaaagaggtgcacagcggcgtgtctaccgacccccagccactgaaagaacagcccgccctgaacgacagccggtactgcctgagcagcagactgagagtgtccgccaccttctggcagaacccccggaaccacttcagatgccaggtgcagttctacggcctgagcgagaacgacgagtggacccaggacagagccaagcccgtgacccagatcgtgtctgccgaagcctggggcagagccgattgcggatcccagagcttcggcctgctggaccccaagctgtgctacctgctggatggcatcctgttcatctacggcgtgatcctgaccgccctgttcctgaaacggggcagaaagaaactcctgtatatattcaaacaaccatttatgagaccagtacaaactactcaagaggaagatggctgtagctgccgatttccagaagaagaagaaggaggatgtgaactgagagtgaagttcagcagaagcgccgacgcccctgcctaccagcagggacagaaccaactgtacaacgagctgaacctgggcagacgggaagagtacgacgtgctggacaagcggagaggcagggaccctgagatgggcggaaagccccagcggagaaagaacccccaggaaggactgtataacgaactccagaaagacaagatggccgaagcctacagcgagatcggcatgaagggcgagcggagaagaggcaagggccacgatggcctgtaccagggcctgagcaccgccaccaaggacacctatgacgccctgcacatgcaggccctgcctccaagaagggccaagcgatctggatctggagcaacaaacttctcactactcaaacaagcaggtgacgtggaggagaatcccgggcctactagtatggactggatttggcgcatccttttccttgtcggcgctgctaccggcgcccattccgggccccaggttcagctgcaagagtctggcggaggacttgctcaagctggcggaagcctgagactgtcttgtgccgcctctggcagaaccttcagcatgggctggtttagacaggcccctggcaaagagagagagttcgtcgccgccatcacatacagcggcggcagcccttactacgcctcttctgtcagaggccggttcaccatcagccgggacaacgccaagaacaccgtgtacctccagatgaacagcctgaagccagaggacaccgccgtgtactactgtgccgccaatccaacctacggcagcgactggaatgccgagaattggggccagggcacccaagtgacagtgtctagtggatccggcggcggaggatctggcggaggcggatctgggggcggaggctctttcgaacaagttcagcttcaacagcctggcgctgagctggtcaaacctggcgcttctgtgaagatgagctgcaaagccagcggctacgccttcagcagctactggatcaactggatgaagcagaaacccggccagggactcgaatggatcggccaaatctatcccggcgacggcgacaccaactacaacggcaagttcaagggcagagccacactgaccgccgatacctctagcagcacagcctacatgcagctgagcagcctgaccagcgaagatagcgccgtgtacttctgtgcccggtccatcacaacagtcgtgggctgcgctatggactattggggccagggaacaagcgtgaccgtgtctagtacgcgtgagcagaaactgatctcggaagaggatctggggagcggcatccagaaccctgatcctgccgtgtaccagctgcgggatagcaagagcagcgacaagagcgtgtgtctgttcaccgacttcgacagccagaccaacgtgtcccagagcaaggactccgacgtgtacatcaccgataagaccgtgctggacatgcggagcatggacttcaagagcaactccgccgtggcctggtccaacaagtccgatttcgcctgcgccaacgccttcaacaacagcattatccccgaggacacattcttcccaagccccgagagcagctgcggtacccagagttttgggttgttggaccctaaattgtgctatctgttggacggaatcctgttcatttacggagtgatcctgaccgcattgttcctgaagagaggccggaagaagctgctgtacatcttcaagcagcctttcatgcggcccgtgcagaccacccaggaagaggacggctgctcctgccggttccccgaggaagaagaaggcggctgcgagctgcgggttaagttttccagatccgcagacgcacccgcttaccaacaagggcagaaccaactctacaatgaacttaatttggggcggagggaagagtacgacgttctggacaaaaggaggggacgagatcccgagatgggcggaaagcctcagcgaaggaagaatccgcaagaggggctttataacgaactccagaaagataaaatggcagaagcctatagtgagattgggatgaagggagaaaggaggaggggtaaaggtcacgatgggttgtaccaaggattgagcacagccactaaagatacctatgatgcgctccacatgcaggccctgccgccaaga

SEQ ID NO: 4181 - DNA, 3294 bp, Artificial Sequence
  Synthetic Polynucloetide
atggccttaccagtgaccgccttgctcctgccgctggccttgctgctccacgccgccaggccgcagctccagctgcaagagtctggacctggcctggtcaagcctagcgagacactgagcctgacctgtaccgtgtccggcgatagcatcagcagcggcgattactactggggctggatcagacagcctcctggcaaaggactggaatggatcggccacatctactacagcggcgtgacctactacaaccccagcctgaagtccagagtgaccatcagcgtggacaccagccggaaccagttctccctgaagctgtctagcgtgacagccgccgataccgccgtgtactactgcaccagagaggacagcagcaactggcggagtagaggccagggaacactggtcacagttagctctggtaccggcggaggcggatctggcggcggaggtagcggtggcggaggatctgaattcgacatccagatgacacagagccctagcagcctgtctgccagcgtgggagacagagtgaccatcacatgcaaggccagcgaccacatcaacaactggctggcctggtatcagcagaagcctggacaggcccctaagctgctgatctacggcgctaccacactggaaacaggcgtgcccagcagattttctggcagcggctctggcaccgactacaccctgacaatatccagcctccagcctgaggacttcgccacctactactgtcagcagagctggaacaccccttggacattcggccagggcaccaagctggaaatcaagagactcgagcagagcttcggcctgctggaccccaagctgtgctacctgctggatggcatcctgttcatctacggcgtgatcctgaccgccctgttcctgagagtgaagttcagcagaagcgccgacgcccctgcctaccagcagggacagaaccaactgtacaacgagctgaacctgggcagacgggaagagtacgacgtgctggacaagcggagaggcagggaccctgagatgggcggaaagccccagcggagaaagaacccccaggaaggactgtataacgaactccagaaagacaagatggccgaagcctacagcgagatcggcatgaagggcgagcggagaagaggcaagggccacgatggcctgtaccagggcctgagcaccgccaccaaggacacctatgacgccctgcacatgcaggccctgcctccaagaagggccaagcgatctggatctggagcaacaaacttctcactactcaaacaagcaggtgacgtggaggagaatcccgggcctactagtatggactggatttggcgcatccttttccttgtcggcgctgctaccggcgcccattccgggccccaggttcagctgcaagagtctggcggaggacttgctcaagctggcggaagcctgagactgtcttgtgccgcctctggcagaaccttcagcatgggctggtttagacaggcccctggcaaagagagagagttcgtcgccgccatcacatacagcggcggcagcccttactacgcctcttctgtcagaggccggttcaccatcagccgggacaacgccaagaacaccgtgtacctccagatgaacagcctgaagccagaggacaccgccgtgtactactgtgccgccaatccaacctacggcagcgactggaatgccgagaattggggccagggcacccaagtgacagtgtctagtggatccggcggcggaggatctggcggaggcggatctgggggcggaggctctttcgaacaagttcagcttcaacagcctggcgctgagctggtcaaacctggcgcttctgtgaagatgagctgcaaagccagcggctacgccttcagcagctactggatcaactggatgaagcagaaacccggccagggactcgaatggatcggccaaatctatcccggcgacggcgacaccaactacaacggcaagttcaagggcagagccacactgaccgccgatacctctagcagcacagcctacatgcagctgagcagcctgaccagcgaagatagcgccgtgtacttctgtgcccggtccatcacaacagtcgtgggctgcgctatggactattggggccagggaacaagcgtgaccgtgtctagtacgcgtcagagttttgggttgttggaccctaaattgtgctatctgttggacggaatcctgttcatttacggagtgatcctgaccgcattgttcctgcgggttaagttttccagatccgcagacgcacccgcttaccaacaagggcagaaccaactctacaatgaacttaatttggggcggagggaagagtacgacgttctggacaaaaggaggggacgagatcccgagatgggcggaaagcctcagcgaaggaagaatccgcaagaggggctttataacgaactccagaaagataaaatggcagaagcctatagtgagattgggatgaagggagaaaggaggaggggtaaaggtcacgatgggttgtaccaaggattgagcacagccactaaagatacctatgatgcgctccacatgcaggccctgccgccaagacgcgccaagagaagcggatctggcgtgaagcagaccctgaatttcgacctgctgaagctggctggcgacgtggaatccaacccaggcccttctagaggccatatgaccgagtacaagcccacggtgcgcctcgccacccgcgacgacgtccccagggccgtacgcaccctcgccgccgcgttcgccgactaccccgccacgcgccacaccgtcgatccggaccgccacatcgagcgggtcaccgagctgcaagaactcttcctcacgcgcgtcgggctcgacatcggcaaggtgtgggtcgcggacgacggcgccgcggtggcggtctggaccacgccggagagcgtcgaagcgggggcggtgttcgccgagatcggcccgcgcatggccgagttgagcggttcccggctggccgcgcagcaacagatggaaggcctcctggcgccgcaccggcccaaggagcccgcgtggttcctggccaccgtcggcgtctcgcccgaccaccagggcaagggtctgggcagcgccgtcgtgctccccggagtggaggcggccgagcgcgccggggtgcccgccttcctggagacctccgcgccccgcaacctccccttctacgagcggctcggcttcaccgtcaccgccgacgtcgaggtgcccgaaggaccgcgcacctggtgcatgacccgcaagcccggtgcctga

SEQ ID NO: 4182 - DNA, 2766 bp, Artificial Sequence
  Synthetic Polynucloetide
atggccttaccagtgaccgccttgctcctgccgctggccttgctgctccacgccgccaggccgcagctccagctgcaagagtctggacctggcctggtcaagcctagcgagacactgagcctgacctgtaccgtgtccggcgatagcatcagcagcggcgattactactggggctggatcagacagcctcctggcaaaggactggaatggatcggccacatctactacagcggcgtgacctactacaaccccagcctgaagtccagagtgaccatcagcgtggacaccagccggaaccagttctccctgaagctgtctagcgtgacagccgccgataccgccgtgtactactgcaccagagaggacagcagcaactggcggagtagaggccagggaacactggtcacagttagctctggtaccggcggaggcggatctggcggcggaggtagcggtggcggaggatctgaattcgacatccagatgacacagagccctagcagcctgtctgccagcgtgggagacagagtgaccatcacatgcaaggccagcgaccacatcaacaactggctggcctggtatcagcagaagcctggacaggcccctaagctgctgatctacggcgctaccacactggaaacaggcgtgcccagcagattttctggcagcggctctggcaccgactacaccctgacaatatccagcctccagcctgaggacttcgccacctactactgtcagcagagctggaacaccccttggacattcggccagggcaccaagctggaaatcaagagactcgagggacagcctaaggccaatcctaccgtgacactgttccctccaagcagcgaagaactccaggccaacaaggccacacttgtgtgcctgatctccgacttctaccctggggctgtgacagtggcttggaaggccgatggatctcctgtgaaagccggcgtggaaaccaccaagccatccaagcagagcaacaacaaatacgccgccagctcctacctgagcctgacacctgagcagtggaagtcccacagatcctacagctgccaagtgacccacgaaggcagcaccgtggaaaagacagtggcccctacagagtgcagccccatcaagaccgatgtgattacaatggaccccaaggacaactgctccaaggacgccaacgataccctgctgctccagctgaccaacaccagcgcctactacatgtacttgttgctgctgctgaagtccgtggtgtacttcgccatcatcacatgctgcctgctgcggagaaccgccttctgctgcaacggcgagaagtctagggccaagcgatctggatctggagcaacaaacttctcactactcaaacaagcaggtgacgtggaggagaatcccgggcctactagtatggactggatttggcgcatccttttccttgtcggcgctgctaccggcgcccattccgggccccaggttcagctgcaagagtctggcggaggacttgctcaagctggcggaagcctgagactgtcttgtgccgcctctggcagaaccttcagcatgggctggtttagacaggcccctggcaaagagagagagttcgtcgccgccatcacatacagcggcggcagcccttactacgcctcttctgtcagaggccggttcaccatcagccgggacaacgccaagaacaccgtgtacctccagatgaacagcctgaagccagaggacaccgccgtgtactactgtgccgccaatccaacctacggcagcgactggaatgccgagaattggggccagggcacccaagtgacagtgtctagtggatccggcggcggaggatctggcggaggcggatctgggggcggaggctctttcgaacaagttcagcttcaacagcctggcgctgagctggtcaaacctggcgcttctgtgaagatgagctgcaaagccagcggctacgccttcagcagctactggatcaactggatgaagcagaaacccggccagggactcgaatggatcggccaaatctatcccggcgacggcgacaccaactacaacggcaagttcaagggcagagccacactgaccgccgatacctctagcagcacagcctacatgcagctgagcagcctgaccagcgaagatagcgccgtgtacttctgtgcccggtccatcacaacagtcgtgggctgcgctatggactattggggccagggaacaagcgtgaccgtgtctagtacgcgtgcctctacaaagggaccctccgtgtttcctctggctcccagcagcaagtctacaagcggaggaacagccgctctgggctgcctggtcaaggattactttcccgagcctgtgaccgtgtcctggaatagcggagcactgacaagcggcgtgcacacctttccagccgtgctgcaaagcagcggcctgtactctctgagcagcgtggtcacagtgcctagctctagcctgggcacccagacctacatctgcaatgtgaaccacaagcctagcaacaccaaggtggacaagagagtggaacccaagagctgtgaagtgaaaaccgactccaccgaccacgtgaagcccaaagagacagagaacaccaagcagcccagcaagagctgccacaagcccaaggccatcgtgcacaccgagaaagtgaacatgatgagcctgaccgtgctgggcctgcggatgctgttcgccaaaaccgtggccgtgaacttcctgctgaccgccaagctgttcttcctc

SEQ ID NO: 4183 - DNA, 2700 bp, Artificial Sequence
  Synthetic Polynucloetide
atggccttaccagtgaccgccttgctcctgccgctggccttgctgctccacgccgccaggccgcagctccagctgcaagagtctggacctggcctggtcaagcctagcgagacactgagcctgacctgtaccgtgtccggcgatagcatcagcagcggcgattactactggggctggatcagacagcctcctggcaaaggactggaatggatcggccacatctactacagcggcgtgacctactacaaccccagcctgaagtccagagtgaccatcagcgtggacaccagccggaaccagttctccctgaagctgtctagcgtgacagccgccgataccgccgtgtactactgcaccagagaggacagcagcaactggcggagtagaggccagggaacactggtcacagttagctctggtaccggcggaggcggatctggcggcggaggtagcggtggcggaggatctgaattcgacatccagatgacacagagccctagcagcctgtctgccagcgtgggagacagagtgaccatcacatgcaaggccagcgaccacatcaacaactggctggcctggtatcagcagaagcctggacaggcccctaagctgctgatctacggcgctaccacactggaaacaggcgtgcccagcagattttctggcagcggctctggcaccgactacaccctgacaatatccagcctccagcctgaggacttcgccacctactactgtcagcagagctggaacaccccttggacattcggccagggcaccaagctggaaatcaagagactcgagggacagcctaaggccaatcctaccgtgacactgttccctccaagcagcgaagaactccaggccaacaaggccacacttgtgtgcctgatctccgacttctaccctggggctgtgacagtggcttggaaggccgatggatctcctgtgaaagccggcgtggaaaccaccaagccatccaagcagagcaacaacaaatacgccgccagctcctacctgagcctgacacctgagcagtggaagtcccacagatcctacagctgccaagtgacccacgaaggcagcaccgtggaaaagacagtggcccctacagagtgcagcggcagagccgattgcggcatcaccagcgccagctaccaccagggcgtgctgagcgccaccatcctgtacgagatcctgctgggcaaggccaccctgtacgccgtgctggtgtctgccctggtgctgatggctatggtcaagcggaaggacagccggggaagggccaagcgatctggatctggagcaacaaacttctcactactcaaacaagcaggtgacgtggaggagaatcccgggcctactagtatggactggatttggcgcatccttttccttgtcggcgctgctaccggcgcccattccgggccccaggttcagctgcaagagtctggcggaggacttgctcaagctggcggaagcctgagactgtcttgtgccgcctctggcagaaccttcagcatgggctggtttagacaggcccctggcaaagagagagagttcgtcgccgccatcacatacagcggcggcagcccttactacgcctcttctgtcagaggccggttcaccatcagccgggacaacgccaagaacaccgtgtacctccagatgaacagcctgaagccagaggacaccgccgtgtactactgtgccgccaatccaacctacggcagcgactggaatgccgagaattggggccagggcacccaagtgacagtgtctagtggatccggcggcggaggatctggcggaggcggatctgggggcggaggctctttcgaacaagttcagcttcaacagcctggcgctgagctggtcaaacctggcgcttctgtgaagatgagctgcaaagccagcggctacgccttcagcagctactggatcaactggatgaagcagaaacccggccagggactcgaatggatcggccaaatctatcccggcgacggcgacaccaactacaacggcaagttcaagggcagagccacactgaccgccgatacctctagcagcacagcctacatgcagctgagcagcctgaccagcgaagatagcgccgtgtacttctgtgcccggtccatcacaacagtcgtgggctgcgctatggactattggggccagggaacaagcgtgaccgtgtctagtacgcgtgcctctacaaagggaccctccgtgtttcctctggctcccagcagcaagtctacaagcggaggaacagccgctctgggctgcctggtcaaggattactttcccgagcctgtgaccgtgtcctggaatagcggagcactgacaagcggcgtgcacacctttccagccgtgctgcaaagcagcggcctgtactctctgagcagcgtggtcacagtgcctagctctagcctgggcacccagacctacatctgcaatgtgaaccacaagcctagcaacaccaaggtggacaagagagtggaacccaagagctgtatccccgaggacacattcttcccaagcagcgacgtgccctgcgacgtgaagctggtggaaaagagcttcgagacagacaccaacctgaacttccagaacctgagcgtgatcggcttcagaatcctgctgctgaaagtggccggctttaacctgctgatgaccctgcggctgtggtccagc

SEQ ID NO: 4184 - DNA, 2700 bp, Artificial Sequence
  Synthetic Polynucloetide
atggccttaccagtgaccgccttgctcctgccgctggccttgctgctccacgccgccaggccgcagctccagctgcaagagtctggacctggcctggtcaagcctagcgagacactgagcctgacctgtaccgtgtccggcgatagcatcagcagcggcgattactactggggctggatcagacagcctcctggcaaaggactggaatggatcggccacatctactacagcggcgtgacctactacaaccccagcctgaagtccagagtgaccatcagcgtggacaccagccggaaccagttctccctgaagctgtctagcgtgacagccgccgataccgccgtgtactactgcaccagagaggacagcagcaactggcggagtagaggccagggaacactggtcacagttagctctggtaccggcggaggcggatctggcggcggaggtagcggtggcggaggatctgaattcgacatccagatgacacagagccctagcagcctgtctgccagcgtgggagacagagtgaccatcacatgcaaggccagcgaccacatcaacaactggctggcctggtatcagcagaagcctggacaggcccctaagctgctgatctacggcgctaccacactggaaacaggcgtgcccagcagattttctggcagcggctctggcaccgactacaccctgacaatatccagcctccagcctgaggacttcgccacctactactgtcagcagagctggaacaccccttggacattcggccagggcaccaagctggaaatcaagagactcgagggacagcctaaggccaatcctaccgtgacactgttccctccaagcagcgaagaactccaggccaacaaggccacacttgtgtgcctgatctccgacttctaccctggggctgtgacagtggcttggaaggccgatggatctcctgtgaaagccggcgtggaaaccaccaagccatccaagcagagcaacaacaaatacgccgccagctcctacctgagcctgacacctgagcagtggaagtcccacagatcctacagctgccaagtgacccacgaaggcagcaccgtggaaaagacagtggcccctacagagtgcagcggcagagccgattgcggctttaccagcgagagctaccagcagggcgtgctgagcgccaccatcctgtacgagatcctgctgggcaaggccaccctgtacgccgtgctggtgtctgccctggtgctgatggctatggtcaagcggaaggacagccggggaagggccaagcgatctggatctggagcaacaaacttctcactactcaaacaagcaggtgacgtggaggagaatcccgggcctactagtatggactggatttggcgcatccttttccttgtcggcgctgctaccggcgcccattccgggccccaggttcagctgcaagagtctggcggaggacttgctcaagctggcggaagcctgagactgtcttgtgccgcctctggcagaaccttcagcatgggctggtttagacaggcccctggcaaagagagagagttcgtcgccgccatcacatacagcggcggcagcccttactacgcctcttctgtcagaggccggttcaccatcagccgggacaacgccaagaacaccgtgtacctccagatgaacagcctgaagccagaggacaccgccgtgtactactgtgccgccaatccaacctacggcagcgactggaatgccgagaattggggccagggcacccaagtgacagtgtctagtggatccggcggcggaggatctggcggaggcggatctgggggcggaggctctttcgaacaagttcagcttcaacagcctggcgctgagctggtcaaacctggcgcttctgtgaagatgagctgcaaagccagcggctacgccttcagcagctactggatcaactggatgaagcagaaacccggccagggactcgaatggatcggccaaatctatcccggcgacggcgacaccaactacaacggcaagttcaagggcagagccacactgaccgccgatacctctagcagcacagcctacatgcagctgagcagcctgaccagcgaagatagcgccgtgtacttctgtgcccggtccatcacaacagtcgtgggctgcgctatggactattggggccagggaacaagcgtgaccgtgtctagtacgcgtgcctctacaaagggaccctccgtgtttcctctggctcccagcagcaagtctacaagcggaggaacagccgctctgggctgcctggtcaaggattactttcccgagcctgtgaccgtgtcctggaatagcggagcactgacaagcggcgtgcacacctttccagccgtgctgcaaagcagcggcctgtactctctgagcagcgtggtcacagtgcctagctctagcctgggcacccagacctacatctgcaatgtgaaccacaagcctagcaacaccaaggtggacaagagagtggaacccaagagctgtatccccgaggacacattcttcccaagccccgagagcagctgcgacgtgaagctggtggaaaagagcttcgagacagacaccaacctgaacttccagaacctgagcgtgatcggcttcagaatcctgctgctgaaagtggccggctttaacctgctgatgaccctgcggctgtggtccagc

SEQ ID NO: 4185 - DNA, 2601 bp, Artificial Sequence
  Synthetic Polynucloetide
atggccttaccagtgaccgccttgctcctgccgctggccttgctgctccacgccgccaggccgcagctccagctgcaagagtctggacctggcctggtcaagcctagcgagacactgagcctgacctgtaccgtgtccggcgatagcatcagcagcggcgattactactggggctggatcagacagcctcctggcaaaggactggaatggatcggccacatctactacagcggcgtgacctactacaaccccagcctgaagtccagagtgaccatcagcgtggacaccagccggaaccagttctccctgaagctgtctagcgtgacagccgccgataccgccgtgtactactgcaccagagaggacagcagcaactggcggagtagaggccagggaacactggtcacagttagctctctcgagggacagcctaaggccaatcctaccgtgacactgttccctccaagcagcgaagaactccaggccaacaaggccacacttgtgtgcctgatctccgacttctaccctggggctgtgacagtggcttggaaggccgatggatctcctgtgaaagccggcgtggaaaccaccaagccatccaagcagagcaacaacaaatacgccgccagctcctacctgagcctgacacctgagcagtggaagtcccacagatcctacagctgccaagtgacccacgaaggcagcaccgtggaaaagacagtggcccctacagagtgcagcggcagagccgattgcggctttaccagcgagagctaccagcagggcgtgctgagcgccaccatcctgtacgagatcctgctgggcaaggccaccctgtacgccgtgctggtgtctgccctggtgctgatggctatggtcaagcggaaggacagccggggaagggccaagcgatctggatctggagcaacaaacttctcactactcaaacaagcaggtgacgtggaggagaatcccgggcctactagtatggactggatttggcgcatccttttccttgtcggcgctgctaccggcgcgcattccgggccccaggttcagctgcaagagtctggcggaggacttgctcaagctggcggaagcctgagactgtcttgtgccgcctctggcagaaccttcagcatgggctggtttagacaggcccctggcaaagagagagagttcgtcgccgccatcacatacagcggcggcagcccttactacgcctcttctgtcagaggccggttcaccatcagccgggacaacgccaagaacaccgtgtacctccagatgaacagcctgaagccagaggacaccgccgtgtactactgtgccgccaatccaacctacggcagcgactggaatgccgagaattggggccagggcacccaagtgacagtgtctagtacgcgtgcctctacaaagggaccctccgtgtttcctctggctcccagcagcaagtctacaagcggaggaacagccgctctgggctgcctggtcaaggattactttcccgagcctgtgaccgtgtcctggaatagcggagcactgacaagcggcgtgcacacctttccagccgtgctgcaaagcagcggcctgtactctctgagcagcgtggtcacagtgcctagctctagcctgggcacccagacctacatctgcaatgtgaaccacaagcctagcaacaccaaggtggacaagagagtggaacccaagagctgtatccccgaggacacattcttcccaagccccgagagcagctgcgacgtgaagctggtggaaaagagcttcgagacagacaccaacctgaacttccagaacctgagcgtgatcggcttcagaatcctgctgctgaaagtggccggctttaacctgctgatgaccctgcggctgtggtccagccgcgccaagagaagcggatctggcgtgaagcagaccctgaatttcgacctgctgaagctggctggcgacgtggaatccaacccaggcccttctagaggccatatgaccgagtacaagcccacggtgcgcctcgccacccgcgacgacgtccccagggccgtacgcaccctcgccgccgcgttcgccgactaccccgccacgcgccacaccgtcgatccggaccgccacatcgagcgggtcaccgagctgcaagaactcttcctcacgcgcgtcgggctcgacatcggcaaggtgtgggtcgcggacgacggcgccgcggtggcggtctggaccacgccggagagcgtcgaagcgggggcggtgttcgccgagatcggcccgcgcatggccgagttgagcggttcccggctggccgcgcagcaacagatggaaggcctcctggcgccgcaccggcccaaggagcccgcgtggttcctggccaccgtcggcgtctcgcccgaccaccagggcaagggtctgggcagcgccgtcgtgctccccggagtggaggcggccgagcgcgccggggtgcccgccttcctggagacctccgcgccccgcaacctccccttctacgagcggctcggcttcaccgtcaccgccgacgtcgaggtgcccgaaggaccgcgcacctggtgcatgacccgcaagcccggtgcctga

SEQ ID NO: 4186 - DNA, 1899 bp, Artificial Sequence
  Synthetic Polynucloetide
atggccttaccagtgaccgccttgctcctgccgctggccttgctgctccacgccgccaggccgcagctccagctgcaagagtctggacctggcctggtcaagcctagcgagacactgagcctgacctgtaccgtgtccggcgatagcatcagcagcggcgattactactggggctggatcagacagcctcctggcaaaggactggaatggatcggccacatctactacagcggcgtgacctactacaaccccagcctgaagtccagagtgaccatcagcgtggacaccagccggaaccagttctccctgaagctgtctagcgtgacagccgccgataccgccgtgtactactgcaccagagaggacagcagcaactggcggagtagaggccagggaacactggtcacagttagctctctcgagggacagcctaaggccaatcctaccgtgacactgttccctccaagcagcgaagaactccaggccaacaaggccacacttgtgtgcctgatctccgacttctaccctggggctgtgacagtggcttggaaggccgatggatctcctgtgaaagccggcgtggaaaccaccaagccatccaagcagagcaacaacaaatacgccgccagctcctacctgagcctgacacctgagcagtggaagtcccacagatcctacagctgccaagtgacccacgaaggcagcaccgtggaaaagacagtggcccctacagagtgcagcggcagagccgattgcggctttaccagcgagagctaccagcagggcgtgctgagcgccaccatcctgtacgagatcctgctgggcaaggccaccctgtacgccgtgctggtgtctgccctggtgctgatggctatggtcaagcggaaggacagccggggaagggccaagcgatctggatctggagcaacaaacttctcactactcaaacaagcaggtgacgtggaggagaatcccgggcctactagtatggactggatttggcgcatccttttccttgtcggcgctgctaccggcgcgcattccgggccccaggttcagctgcaagagtctggcggaggacttgctcaagctggcggaagcctgagactgtcttgtgccgcctctggcagaaccttcagcatgggctggtttagacaggcccctggcaaagagagagagttcgtcgccgccatcacatacagcggcggcagcccttactacgcctcttctgtcagaggccggttcaccatcagccgggacaacgccaagaacaccgtgtacctccagatgaacagcctgaagccagaggacaccgccgtgtactactgtgccgccaatccaacctacggcagcgactggaatgccgagaattggggccagggcacccaagtgacagtgtctagtacgcgtgcctctacaaagggaccctccgtgtttcctctggctcccagcagcaagtctacaagcggaggaacagccgctctgggctgcctggtcaaggattactttcccgagcctgtgaccgtgtcctggaatagcggagcactgacaagcggcgtgcacacctttccagccgtgctgcaaagcagcggcctgtactctctgagcagcgtggtcacagtgcctagctctagcctgggcacccagacctacatctgcaatgtgaaccacaagcctagcaacaccaaggtggacaagagagtggaacccaagagctgtatccccgaggacacattcttcccaagccccgagagcagctgcgacgtgaagctggtggaaaagagcttcgagacagacaccaacctgaacttccagaacctgagcgtgatcggcttcagaatcctgctgctgaaagtggccggctttaacctgctgatgaccctgcggctgtggtccagc

SEQ ID NO: 4187 - DNA, 1986 bp, Artificial Sequence
  Synthetic Polynucloetide
atggccttaccagtgaccgccttgctcctgccgctggccttgctgctccacgccgccaggccgcagctccagctgcaagagtctggacctggcctggtcaagcctagcgagacactgagcctgacctgtaccgtgtccggcgatagcatcagcagcggcgattactactggggctggatcagacagcctcctggcaaaggactggaatggatcggccacatctactacagcggcgtgacctactacaaccccagcctgaagtccagagtgaccatcagcgtggacaccagccggaaccagttctccctgaagctgtctagcgtgacagccgccgataccgccgtgtactactgcaccagagaggacagcagcaactggcggagtagaggccagggaacactggtcacagttagctctctcgagggatctggcagagccgattgcggctttaccagcgagagctaccagcagggcgtgctgagcgccaccatcctgtacgagatcctgctgggcaaggccaccctgtacgccgtgctggtgtctgccctggtgctgatggctatggtcaagcggaaggacagccggggaagggccaagcgatctggatctggagcaacaaacttctcactactcaaacaagcaggtgacgtggaggagaatcccgggcctactagtatggactggatttggcgcatccttttccttgtcggcgctgctaccggcgcgcattccgggccccaggttcagctgcaagagtctggcggaggacttgctcaagctggcggaagcctgagactgtcttgtgccgcctctggcagaaccttcagcatgggctggtttagacaggcccctggcaaagagagagagttcgtcgccgccatcacatacagcggcggcagcccttactacgcctcttctgtcagaggccggttcaccatcagccgggacaacgccaagaacaccgtgtacctccagatgaacagcctgaagccagaggacaccgccgtgtactactgtgccgccaatccaacctacggcagcgactggaatgccgagaattggggccagggcacccaagtgacagtgtctagtacgcgtggcagcatccccgaggacacattcttcccaagccccgagagcagctgcgacgtgaagctggtggaaaagagcttcgagacagacaccaacctgaacttccagaacctgagcgtgatcggcttcagaatcctgctgctgaaagtggccggctttaacctgctgatgaccctgcggctgtggtccagccgcgccaagagaagcggatctggcgtgaagcagaccctgaatttcgacctgctgaagctggctggcgacgtggaatccaacccaggcccttctagaggccatatgaccgagtacaagcccacggtgcgcctcgccacccgcgacgacgtccccagggccgtacgcaccctcgccgccgcgttcgccgactaccccgccacgcgccacaccgtcgatccggaccgccacatcgagcgggtcaccgagctgcaagaactcttcctcacgcgcgtcgggctcgacatcggcaaggtgtgggtcgcggacgacggcgccgcggtggcggtctggaccacgccggagagcgtcgaagcgggggcggtgttcgccgagatcggcccgcgcatggccgagttgagcggttcccggctggccgcgcagcaacagatggaaggcctcctggcgccgcaccggcccaaggagcccgcgtggttcctggccaccgtcggcgtctcgcccgaccaccagggcaagggtctgggcagcgccgtcgtgctccccggagtggaggcggccgagcgcgccggggtgcccgccttcctggagacctccgcgccccgcaacctccccttctacgagcggctcggcttcaccgtcaccgccgacgtcgaggtgcccgaaggaccgcgcacctggtgcatgacccgcaagcccggtgcctga

SEQ ID NO: 4188 - DNA, 1284 bp, Artificial Sequence
  Synthetic Polynucloetide
atggccttaccagtgaccgccttgctcctgccgctggccttgctgctccacgccgccaggccgcagctccagctgcaagagtctggacctggcctggtcaagcctagcgagacactgagcctgacctgtaccgtgtccggcgatagcatcagcagcggcgattactactggggctggatcagacagcctcctggcaaaggactggaatggatcggccacatctactacagcggcgtgacctactacaaccccagcctgaagtccagagtgaccatcagcgtggacaccagccggaaccagttctccctgaagctgtctagcgtgacagccgccgataccgccgtgtactactgcaccagagaggacagcagcaactggcggagtagaggccagggaacactggtcacagttagctctctcgagggatctggcagagccgattgcggctttaccagcgagagctaccagcagggcgtgctgagcgccaccatcctgtacgagatcctgctgggcaaggccaccctgtacgccgtgctggtgtctgccctggtgctgatggctatggtcaagcggaaggacagccggggaagggccaagcgatctggatctggagcaacaaacttctcactactcaaacaagcaggtgacgtggaggagaatcccgggcctactagtatggactggatttggcgcatccttttccttgtcggcgctgctaccggcgcgcattccgggccccaggttcagctgcaagagtctggcggaggacttgctcaagctggcggaagcctgagactgtcttgtgccgcctctggcagaaccttcagcatgggctggtttagacaggcccctggcaaagagagagagttcgtcgccgccatcacatacagcggcggcagcccttactacgcctcttctgtcagaggccggttcaccatcagccgggacaacgccaagaacaccgtgtacctccagatgaacagcctgaagccagaggacaccgccgtgtactactgtgccgccaatccaacctacggcagcgactggaatgccgagaattggggccagggcacccaagtgacagtgtctagtacgcgtggcagcatccccgaggacacattcttcccaagccccgagagcagctgcgacgtgaagctggtggaaaagagcttcgagacagacaccaacctgaacttccagaacctgagcgtgatcggcttcagaatcctgctgctgaaagtggccggctttaacctgctgatgaccctgcggctgtggtccagc

SEQ ID NO: 4189 - DNA, 2013 bp, Artificial Sequence
  Synthetic Polynucloetide
atggccttaccagtgaccgccttgctcctgccgctggccttgctgctccacgccgccaggccgcagctccagctgcaagagtctggacctggcctggtcaagcctagcgagacactgagcctgacctgtaccgtgtccggcgatagcatcagcagcggcgattactactggggctggatcagacagcctcctggcaaaggactggaatggatcggccacatctactacagcggcgtgacctactacaaccccagcctgaagtccagagtgaccatcagcgtggacaccagccggaaccagttctccctgaagctgtctagcgtgacagccgccgataccgccgtgtactactgcaccagagaggacagcagcaactggcggagtagaggccagggaacactggtcacagttagctctctcgaggacaaaactcacacatgcccaccgtgcccagcaggcagagccgattgcggctttaccagcgagagctaccagcagggcgtgctgagcgccaccatcctgtacgagatcctgctgggcaaggccaccctgtacgccgtgctggtgtctgccctggtgctgatggctatggtcaagcggaaggacagccggggaagggccaagcgatctggatctggagcaacaaacttctcactactcaaacaagcaggtgacgtggaggagaatcccgggcctactagtatggactggatttggcgcatccttttccttgtcggcgctgctaccggcgcgcattccgggccccaggttcagctgcaagagtctggcggaggacttgctcaagctggcggaagcctgagactgtcttgtgccgcctctggcagaaccttcagcatgggctggtttagacaggcccctggcaaagagagagagttcgtcgccgccatcacatacagcggcggcagcccttactacgcctcttctgtcagaggccggttcaccatcagccgggacaacgccaagaacaccgtgtacctccagatgaacagcctgaagccagaggacaccgccgtgtactactgtgccgccaatccaacctacggcagcgactggaatgccgagaattggggccagggcacccaagtgacagtgtctagtacgcgtggcagcatccccgaggacacattcttcccaagccccgagagcagctgcgacgtgaagctggtggaaaagagcttcgagacagacaccaacctgaacttccagaacctgagcgtgatcggcttcagaatcctgctgctgaaagtggccggctttaacctgctgatgaccctgcggctgtggtccagccgcgccaagagaagcggatctggcgtgaagcagaccctgaatttcgacctgctgaagctggctggcgacgtggaatccaacccaggcccttctagaggccatatgaccgagtacaagcccacggtgcgcctcgccacccgcgacgacgtccccagggccgtacgcaccctcgccgccgcgttcgccgactaccccgccacgcgccacaccgtcgatccggaccgccacatcgagcgggtcaccgagctgcaagaactcttcctcacgcgcgtcgggctcgacatcggcaaggtgtgggtcgcggacgacggcgccgcggtggcggtctggaccacgccggagagcgtcgaagcgggggcggtgttcgccgagatcggcccgcgcatggccgagttgagcggttcccggctggccgcgcagcaacagatggaaggcctcctggcgccgcaccggcccaaggagcccgcgtggttcctggccaccgtcggcgtctcgcccgaccaccagggcaagggtctgggcagcgccgtcgtgctccccggagtggaggcggccgagcgcgccggggtgcccgccttcctggagacctccgcgccccgcaacctccccttctacgagcggctcggcttcaccgtcaccgccgacgtcgaggtgcccgaaggaccgcgcacctggtgcatgacccgcaagcccggtgcctga

SEQ ID NO: 4190 - DNA, 2013 bp, Artificial Sequence
  Synthetic Polynucloetide
atggccttaccagtgaccgccttgctcctgccgctggccttgctgctccacgccgccaggccgcagctccagctgcaagagtctggacctggcctggtcaagcctagcgagacactgagcctgacctgtaccgtgtccggcgatagcatcagcagcggcgattactactggggctggatcagacagcctcctggcaaaggactggaatggatcggccacatctactacagcggcgtgacctactacaaccccagcctgaagtccagagtgaccatcagcgtggacaccagccggaaccagttctccctgaagctgtctagcgtgacagccgccgataccgccgtgtactactgcaccagagaggacagcagcaactggcggagtagaggccagggaacactggtcacagttagctctctcgagggatctggcagagccgattgcggctttaccagcgagagctaccagcagggcgtgctgagcgccaccatcctgtacgagatcctgctgggcaaggccaccctgtacgccgtgctggtgtctgccctggtgctgatggctatggtcaagcggaaggacagccggggaagggccaagcgatctggatctggagcaacaaacttctcactactcaaacaagcaggtgacgtggaggagaatcccgggcctactagtatggactggatttggcgcatccttttccttgtcggcgctgctaccggcgcgcattccgggccccaggttcagctgcaagagtctggcggaggacttgctcaagctggcggaagcctgagactgtcttgtgccgcctctggcagaaccttcagcatgggctggtttagacaggcccctggcaaagagagagagttcgtcgccgccatcacatacagcggcggcagcccttactacgcctcttctgtcagaggccggttcaccatcagccgggacaacgccaagaacaccgtgtacctccagatgaacagcctgaagccagaggacaccgccgtgtactactgtgccgccaatccaacctacggcagcgactggaatgccgagaattggggccagggcacccaagtgacagtgtctagtacgcgtgataaaactcatacctgtccgccatgcccggcaatccccgaggacacattcttcccaagccccgagagcagctgcgacgtgaagctggtggaaaagagcttcgagacagacaccaacctgaacttccagaacctgagcgtgatcggcttcagaatcctgctgctgaaagtggccggctttaacctgctgatgaccctgcggctgtggtccagccgcgccaagagaagcggatctggcgtgaagcagaccctgaatttcgacctgctgaagctggctggcgacgtggaatccaacccaggcccttctagaggccatatgaccgagtacaagcccacggtgcgcctcgccacccgcgacgacgtccccagggccgtacgcaccctcgccgccgcgttcgccgactaccccgccacgcgccacaccgtcgatccggaccgccacatcgagcgggtcaccgagctgcaagaactcttcctcacgcgcgtcgggctcgacatcggcaaggtgtgggtcgcggacgacggcgccgcggtggcggtctggaccacgccggagagcgtcgaagcgggggcggtgttcgccgagatcggcccgcgcatggccgagttgagcggttcccggctggccgcgcagcaacagatggaaggcctcctggcgccgcaccggcccaaggagcccgcgtggttcctggccaccgtcggcgtctcgcccgaccaccagggcaagggtctgggcagcgccgtcgtgctccccggagtggaggcggccgagcgcgccggggtgcccgccttcctggagacctccgcgccccgcaacctccccttctacgagcggctcggcttcaccgtcaccgccgacgtcgaggtgcccgaaggaccgcgcacctggtgcatgacccgcaagcccggtgcctga

SEQ ID NO: 4191 - DNA, 2040 bp, Artificial Sequence
  Synthetic Polynucloetide
atggccttaccagtgaccgccttgctcctgccgctggccttgctgctccacgccgccaggccgcagctccagctgcaagagtctggacctggcctggtcaagcctagcgagacactgagcctgacctgtaccgtgtccggcgatagcatcagcagcggcgattactactggggctggatcagacagcctcctggcaaaggactggaatggatcggccacatctactacagcggcgtgacctactacaaccccagcctgaagtccagagtgaccatcagcgtggacaccagccggaaccagttctccctgaagctgtctagcgtgacagccgccgataccgccgtgtactactgcaccagagaggacagcagcaactggcggagtagaggccagggaacactggtcacagttagctctctcgaggacaaaactcacacatgcccaccgtgcccagcaggcagagccgattgcggctttaccagcgagagctaccagcagggcgtgctgagcgccaccatcctgtacgagatcctgctgggcaaggccaccctgtacgccgtgctggtgtctgccctggtgctgatggctatggtcaagcggaaggacagccggggaagggccaagcgatctggatctggagcaacaaacttctcactactcaaacaagcaggtgacgtggaggagaatcccgggcctactagtatggactggatttggcgcatccttttccttgtcggcgctgctaccggcgcgcattccgggccccaggttcagctgcaagagtctggcggaggacttgctcaagctggcggaagcctgagactgtcttgtgccgcctctggcagaaccttcagcatgggctggtttagacaggcccctggcaaagagagagagttcgtcgccgccatcacatacagcggcggcagcccttactacgcctcttctgtcagaggccggttcaccatcagccgggacaacgccaagaacaccgtgtacctccagatgaacagcctgaagccagaggacaccgccgtgtactactgtgccgccaatccaacctacggcagcgactggaatgccgagaattggggccagggcacccaagtgacagtgtctagtacgcgtgataaaactcatacctgtccgccatgcccggcaatccccgaggacacattcttcccaagccccgagagcagctgcgacgtgaagctggtggaaaagagcttcgagacagacaccaacctgaacttccagaacctgagcgtgatcggcttcagaatcctgctgctgaaagtggccggctttaacctgctgatgaccctgcggctgtggtccagccgcgccaagagaagcggatctggcgtgaagcagaccctgaatttcgacctgctgaagctggctggcgacgtggaatccaacccaggcccttctagaggccatatgaccgagtacaagcccacggtgcgcctcgccacccgcgacgacgtccccagggccgtacgcaccctcgccgccgcgttcgccgactaccccgccacgcgccacaccgtcgatccggaccgccacatcgagcgggtcaccgagctgcaagaactcttcctcacgcgcgtcgggctcgacatcggcaaggtgtgggtcgcggacgacggcgccgcggtggcggtctggaccacgccggagagcgtcgaagcgggggcggtgttcgccgagatcggcccgcgcatggccgagttgagcggttcccggctggccgcgcagcaacagatggaaggcctcctggcgccgcaccggcccaaggagcccgcgtggttcctggccaccgtcggcgtctcgcccgaccaccagggcaagggtctgggcagcgccgtcgtgctccccggagtggaggcggccgagcgcgccggggtgcccgccttcctggagacctccgcgccccgcaacctccccttctacgagcggctcggcttcaccgtcaccgccgacgtcgaggtgcccgaaggaccgcgcacctggtgcatgacccgcaagcccggtgcctga

SEQ ID NO: 4192 - DNA, 1338 bp, Artificial Sequence
  Synthetic Polynucloetide
atggccttaccagtgaccgccttgctcctgccgctggccttgctgctccacgccgccaggccgcagctccagctgcaagagtctggacctggcctggtcaagcctagcgagacactgagcctgacctgtaccgtgtccggcgatagcatcagcagcggcgattactactggggctggatcagacagcctcctggcaaaggactggaatggatcggccacatctactacagcggcgtgacctactacaaccccagcctgaagtccagagtgaccatcagcgtggacaccagccggaaccagttctccctgaagctgtctagcgtgacagccgccgataccgccgtgtactactgcaccagagaggacagcagcaactggcggagtagaggccagggaacactggtcacagttagctctctcgaggacaaaactcacacatgcccaccgtgcccagcaggcagagccgattgcggctttaccagcgagagctaccagcagggcgtgctgagcgccaccatcctgtacgagatcctgctgggcaaggccaccctgtacgccgtgctggtgtctgccctggtgctgatggctatggtcaagcggaaggacagccggggaagggccaagcgatctggatctggagcaacaaacttctcactactcaaacaagcaggtgacgtggaggagaatcccgggcctactagtatggactggatttggcgcatccttttccttgtcggcgctgctaccggcgcgcattccgggccccaggttcagctgcaagagtctggcggaggacttgctcaagctggcggaagcctgagactgtcttgtgccgcctctggcagaaccttcagcatgggctggtttagacaggcccctggcaaagagagagagttcgtcgccgccatcacatacagcggcggcagcccttactacgcctcttctgtcagaggccggttcaccatcagccgggacaacgccaagaacaccgtgtacctccagatgaacagcctgaagccagaggacaccgccgtgtactactgtgccgccaatccaacctacggcagcgactggaatgccgagaattggggccagggcacccaagtgacagtgtctagtacgcgtgataaaactcatacctgtccgccatgcccggcaatccccgaggacacattcttcccaagccccgagagcagctgcgacgtgaagctggtggaaaagagcttcgagacagacaccaacctgaacttccagaacctgagcgtgatcggcttcagaatcctgctgctgaaagtggccggctttaacctgctgatgaccctgcggctgtggtccagc

SEQ ID NO: 4193 - DNA, 1311 bp, Artificial Sequence
  Synthetic Polynucloetide
atggccttaccagtgaccgccttgctcctgccgctggccttgctgctccacgccgccaggccgcagctccagctgcaagagtctggacctggcctggtcaagcctagcgagacactgagcctgacctgtaccgtgtccggcgatagcatcagcagcggcgattactactggggctggatcagacagcctcctggcaaaggactggaatggatcggccacatctactacagcggcgtgacctactacaaccccagcctgaagtccagagtgaccatcagcgtggacaccagccggaaccagttctccctgaagctgtctagcgtgacagccgccgataccgccgtgtactactgcaccagagaggacagcagcaactggcggagtagaggccagggaacactggtcacagttagctctctcgagggatctggcagagccgattgcggctttaccagcgagagctaccagcagggcgtgctgagcgccaccatcctgtacgagatcctgctgggcaaggccaccctgtacgccgtgctggtgtctgccctggtgctgatggctatggtcaagcggaaggacagccggggaagggccaagcgatctggatctggagcaacaaacttctcactactcaaacaagcaggtgacgtggaggagaatcccgggcctactagtatggactggatttggcgcatccttttccttgtcggcgctgctaccggcgcgcattccgggccccaggttcagctgcaagagtctggcggaggacttgctcaagctggcggaagcctgagactgtcttgtgccgcctctggcagaaccttcagcatgggctggtttagacaggcccctggcaaagagagagagttcgtcgccgccatcacatacagcggcggcagcccttactacgcctcttctgtcagaggccggttcaccatcagccgggacaacgccaagaacaccgtgtacctccagatgaacagcctgaagccagaggacaccgccgtgtactactgtgccgccaatccaacctacggcagcgactggaatgccgagaattggggccagggcacccaagtgacagtgtctagtacgcgtgataaaactcatacctgtccgccatgcccggcaatccccgaggacacattcttcccaagccccgagagcagctgcgacgtgaagctggtggaaaagagcttcgagacagacaccaacctgaacttccagaacctgagcgtgatcggcttcagaatcctgctgctgaaagtggccggctttaacctgctgatgaccctgcggctgtggtccagc

SEQ ID NO: 4194 - DNA, 2667 bp, Artificial Sequence
  Synthetic Polynucloetide
atggccttaccagtgaccgccttgctcctgccgctggccttgctgctccacgccgccaggccgcagctccagctgcaagagtctggacctggcctggtcaagcctagcgagacactgagcctgacctgtaccgtgtccggcgatagcatcagcagcggcgattactactggggctggatcagacagcctcctggcaaaggactggaatggatcggccacatctactacagcggcgtgacctactacaaccccagcctgaagtccagagtgaccatcagcgtggacaccagccggaaccagttctccctgaagctgtctagcgtgacagccgccgataccgccgtgtactactgcaccagagaggacagcagcaactggcggagtagaggccagggaacactggtcacagttagctctctcgagggacagcctaaggccaatcctaccgtgacactgttccctccaagcagcgaagaactccaggccaacaaggccacacttgtgtgcctgatctccgacttctaccctggggctgtgacagtggcttggaaggccgatggatctcctgtgaaagccggcgtggaaaccaccaagccatccaagcagagcaacaacaaatacgccgccagctcctacctgagcctgacacctgagcagtggaagtcccacagatcctacagctgccaagtgacccacgaaggcagcaccgtggaaaagacagtggcccctacagagtgcagccccatcaagaccgatgtgattacaatggaccccaaggacaactgctccaaggacgccaacgataccctgctgctccagctgaccaacaccagcgcctactacatgtacttgttgctgctgctgaagtccgtggtgtacttcgccatcatcacatgctgcctgctgcggagaaccgccttctgctgcaacggcgagaagtctagggccaagcgatctggatctggagcaacaaacttctcactactcaaacaagcaggtgacgtggaggagaatcccgggcctactagtatggactggatttggcgcatccttttccttgtcggcgctgctaccggcgcgcattccgggccccaggttcagctgcaagagtctggcggaggacttgctcaagctggcggaagcctgagactgtcttgtgccgcctctggcagaaccttcagcatgggctggtttagacaggcccctggcaaagagagagagttcgtcgccgccatcacatacagcggcggcagcccttactacgcctcttctgtcagaggccggttcaccatcagccgggacaacgccaagaacaccgtgtacctccagatgaacagcctgaagccagaggacaccgccgtgtactactgtgccgccaatccaacctacggcagcgactggaatgccgagaattggggccagggcacccaagtgacagtgtctagtacgcgtgcctctacaaagggaccctccgtgtttcctctggctcccagcagcaagtctacaagcggaggaacagccgctctgggctgcctggtcaaggattactttcccgagcctgtgaccgtgtcctggaatagcggagcactgacaagcggcgtgcacacctttccagccgtgctgcaaagcagcggcctgtactctctgagcagcgtggtcacagtgcctagctctagcctgggcacccagacctacatctgcaatgtgaaccacaagcctagcaacaccaaggtggacaagagagtggaacccaagagctgtgaagtgaaaaccgactccaccgaccacgtgaagcccaaagagacagagaacaccaagcagcccagcaagagctgccacaagcccaaggccatcgtgcacaccgagaaagtgaacatgatgagcctgaccgtgctgggcctgcggatgctgttcgccaaaaccgtggccgtgaacttcctgctgaccgccaagctgttcttcctccgcgccaagagaagcggatctggcgtgaagcagaccctgaatttcgacctgctgaagctggctggcgacgtggaatccaacccaggcccttctagaggccatatgaccgagtacaagcccacggtgcgcctcgccacccgcgacgacgtccccagggccgtacgcaccctcgccgccgcgttcgccgactaccccgccacgcgccacaccgtcgatccggaccgccacatcgagcgggtcaccgagctgcaagaactcttcctcacgcgcgtcgggctcgacatcggcaaggtgtgggtcgcggacgacggcgccgcggtggcggtctggaccacgccggagagcgtcgaagcgggggcggtgttcgccgagatcggcccgcgcatggccgagttgagcggttcccggctggccgcgcagcaacagatggaaggcctcctggcgccgcaccggcccaaggagcccgcgtggttcctggccaccgtcggcgtctcgcccgaccaccagggcaagggtctgggcagcgccgtcgtgctccccggagtggaggcggccgagcgcgccggggtgcccgccttcctggagacctccgcgccccgcaacctccccttctacgagcggctcggcttcaccgtcaccgccgacgtcgaggtgcccgaaggaccgcgcacctggtgcatgacccgcaagcccggtgcctga

SEQ ID NO: 4195 - DNA, 1965 bp, Artificial Sequence
  Synthetic Polynucloetide
atggccttaccagtgaccgccttgctcctgccgctggccttgctgctccacgccgccaggccgcagctccagctgcaagagtctggacctggcctggtcaagcctagcgagacactgagcctgacctgtaccgtgtccggcgatagcatcagcagcggcgattactactggggctggatcagacagcctcctggcaaaggactggaatggatcggccacatctactacagcggcgtgacctactacaaccccagcctgaagtccagagtgaccatcagcgtggacaccagccggaaccagttctccctgaagctgtctagcgtgacagccgccgataccgccgtgtactactgcaccagagaggacagcagcaactggcggagtagaggccagggaacactggtcacagttagctctctcgagggacagcctaaggccaatcctaccgtgacactgttccctccaagcagcgaagaactccaggccaacaaggccacacttgtgtgcctgatctccgacttctaccctggggctgtgacagtggcttggaaggccgatggatctcctgtgaaagccggcgtggaaaccaccaagccatccaagcagagcaacaacaaatacgccgccagctcctacctgagcctgacacctgagcagtggaagtcccacagatcctacagctgccaagtgacccacgaaggcagcaccgtggaaaagacagtggcccctacagagtgcagccccatcaagaccgatgtgattacaatggaccccaaggacaactgctccaaggacgccaacgataccctgctgctccagctgaccaacaccagcgcctactacatgtacttgttgctgctgctgaagtccgtggtgtacttcgccatcatcacatgctgcctgctgcggagaaccgccttctgctgcaacggcgagaagtctagggccaagcgatctggatctggagcaacaaacttctcactactcaaacaagcaggtgacgtggaggagaatcccgggcctactagtatggactggatttggcgcatccttttccttgtcggcgctgctaccggcgcgcattccgggccccaggttcagctgcaagagtctggcggaggacttgctcaagctggcggaagcctgagactgtcttgtgccgcctctggcagaaccttcagcatgggctggtttagacaggcccctggcaaagagagagagttcgtcgccgccatcacatacagcggcggcagcccttactacgcctcttctgtcagaggccggttcaccatcagccgggacaacgccaagaacaccgtgtacctccagatgaacagcctgaagccagaggacaccgccgtgtactactgtgccgccaatccaacctacggcagcgactggaatgccgagaattggggccagggcacccaagtgacagtgtctagtacgcgtgcctctacaaagggaccctccgtgtttcctctggctcccagcagcaagtctacaagcggaggaacagccgctctgggctgcctggtcaaggattactttcccgagcctgtgaccgtgtcctggaatagcggagcactgacaagcggcgtgcacacctttccagccgtgctgcaaagcagcggcctgtactctctgagcagcgtggtcacagtgcctagctctagcctgggcacccagacctacatctgcaatgtgaaccacaagcctagcaacaccaaggtggacaagagagtggaacccaagagctgtgaagtgaaaaccgactccaccgaccacgtgaagcccaaagagacagagaacaccaagcagcccagcaagagctgccacaagcccaaggccatcgtgcacaccgagaaagtgaacatgatgagcctgaccgtgctgggcctgcggatgctgttcgccaaaaccgtggccgtgaacttcctgctgaccgccaagctgttcttcctc

SEQ ID NO: 4196 - DNA, 2052 bp, Artificial Sequence
  Synthetic Polynucloetide
atggccttaccagtgaccgccttgctcctgccgctggccttgctgctccacgccgccaggccgcagctccagctgcaagagtctggacctggcctggtcaagcctagcgagacactgagcctgacctgtaccgtgtccggcgatagcatcagcagcggcgattactactggggctggatcagacagcctcctggcaaaggactggaatggatcggccacatctactacagcggcgtgacctactacaaccccagcctgaagtccagagtgaccatcagcgtggacaccagccggaaccagttctccctgaagctgtctagcgtgacagccgccgataccgccgtgtactactgcaccagagaggacagcagcaactggcggagtagaggccagggaacactggtcacagttagctctctcgagggatctcccatcaagaccgatgtgattacaatggaccccaaggacaactgctccaaggacgccaacgataccctgctgctccagctgaccaacaccagcgcctactacatgtacttgttgctgctgctgaagtccgtggtgtacttcgccatcatcacatgctgcctgctgcggagaaccgccttctgctgcaacggcgagaagtctagggccaagcgatctggatctggagcaacaaacttctcactactcaaacaagcaggtgacgtggaggagaatcccgggcctactagtatggactggatttggcgcatccttttccttgtcggcgctgctaccggcgcgcattccgggccccaggttcagctgcaagagtctggcggaggacttgctcaagctggcggaagcctgagactgtcttgtgccgcctctggcagaaccttcagcatgggctggtttagacaggcccctggcaaagagagagagttcgtcgccgccatcacatacagcggcggcagcccttactacgcctcttctgtcagaggccggttcaccatcagccgggacaacgccaagaacaccgtgtacctccagatgaacagcctgaagccagaggacaccgccgtgtactactgtgccgccaatccaacctacggcagcgactggaatgccgagaattggggccagggcacccaagtgacagtgtctagtacgcgtggcagcgaagtgaaaaccgactccaccgaccacgtgaagcccaaagagacagagaacaccaagcagcccagcaagagctgccacaagcccaaggccatcgtgcacaccgagaaagtgaacatgatgagcctgaccgtgctgggcctgcggatgctgttcgccaaaaccgtggccgtgaacttcctgctgaccgccaagctgttcttcctccgcgccaagagaagcggatctggcgtgaagcagaccctgaatttcgacctgctgaagctggctggcgacgtggaatccaacccaggcccttctagaggccatatgaccgagtacaagcccacggtgcgcctcgccacccgcgacgacgtccccagggccgtacgcaccctcgccgccgcgttcgccgactaccccgccacgcgccacaccgtcgatccggaccgccacatcgagcgggtcaccgagctgcaagaactcttcctcacgcgcgtcgggctcgacatcggcaaggtgtgggtcgcggacgacggcgccgcggtggcggtctggaccacgccggagagcgtcgaagcgggggcggtgttcgccgagatcggcccgcgcatggccgagttgagcggttcccggctggccgcgcagcaacagatggaaggcctcctggcgccgcaccggcccaaggagcccgcgtggttcctggccaccgtcggcgtctcgcccgaccaccagggcaagggtctgggcagcgccgtcgtgctccccggagtggaggcggccgagcgcgccggggtgcccgccttcctggagacctccgcgccccgcaacctccccttctacgagcggctcggcttcaccgtcaccgccgacgtcgaggtgcccgaaggaccgcgcacctggtgcatgacccgcaagcccggtgcctga

SEQ ID NO: 4197 - DNA, 1350 bp, Artificial Sequence
  Synthetic Polynucloetide
atggccttaccagtgaccgccttgctcctgccgctggccttgctgctccacgccgccaggccgcagctccagctgcaagagtctggacctggcctggtcaagcctagcgagacactgagcctgacctgtaccgtgtccggcgatagcatcagcagcggcgattactactggggctggatcagacagcctcctggcaaaggactggaatggatcggccacatctactacagcggcgtgacctactacaaccccagcctgaagtccagagtgaccatcagcgtggacaccagccggaaccagttctccctgaagctgtctagcgtgacagccgccgataccgccgtgtactactgcaccagagaggacagcagcaactggcggagtagaggccagggaacactggtcacagttagctctctcgagggatctcccatcaagaccgatgtgattacaatggaccccaaggacaactgctccaaggacgccaacgataccctgctgctccagctgaccaacaccagcgcctactacatgtacttgttgctgctgctgaagtccgtggtgtacttcgccatcatcacatgctgcctgctgcggagaaccgccttctgctgcaacggcgagaagtctagggccaagcgatctggatctggagcaacaaacttctcactactcaaacaagcaggtgacgtggaggagaatcccgggcctactagtatggactggatttggcgcatccttttccttgtcggcgctgctaccggcgcgcattccgggccccaggttcagctgcaagagtctggcggaggacttgctcaagctggcggaagcctgagactgtcttgtgccgcctctggcagaaccttcagcatgggctggtttagacaggcccctggcaaagagagagagttcgtcgccgccatcacatacagcggcggcagcccttactacgcctcttctgtcagaggccggttcaccatcagccgggacaacgccaagaacaccgtgtacctccagatgaacagcctgaagccagaggacaccgccgtgtactactgtgccgccaatccaacctacggcagcgactggaatgccgagaattggggccagggcacccaagtgacagtgtctagtacgcgtggcagcgaagtgaaaaccgactccaccgaccacgtgaagcccaaagagacagagaacaccaagcagcccagcaagagctgccacaagcccaaggccatcgtgcacaccgagaaagtgaacatgatgagcctgaccgtgctgggcctgcggatgctgttcgccaaaaccgtggccgtgaacttcctgctgaccgccaagctgttcttcctc

SEQ ID NO: 4198 - DNA, 2079 bp, Artificial Sequence
  Synthetic Polynucloetide
atggccttaccagtgaccgccttgctcctgccgctggccttgctgctccacgccgccaggccgcagctccagctgcaagagtctggacctggcctggtcaagcctagcgagacactgagcctgacctgtaccgtgtccggcgatagcatcagcagcggcgattactactggggctggatcagacagcctcctggcaaaggactggaatggatcggccacatctactacagcggcgtgacctactacaaccccagcctgaagtccagagtgaccatcagcgtggacaccagccggaaccagttctccctgaagctgtctagcgtgacagccgccgataccgccgtgtactactgcaccagagaggacagcagcaactggcggagtagaggccagggaacactggtcacagttagctctctcgaggacaaaactcacacatgcccaccgtgcccagcacccatcaagaccgatgtgattacaatggaccccaaggacaactgctccaaggacgccaacgataccctgctgctccagctgaccaacaccagcgcctactacatgtacttgttgctgctgctgaagtccgtggtgtacttcgccatcatcacatgctgcctgctgcggagaaccgccttctgctgcaacggcgagaagtctagggccaagcgatctggatctggagcaacaaacttctcactactcaaacaagcaggtgacgtggaggagaatcccgggcctactagtatggactggatttggcgcatccttttccttgtcggcgctgctaccggcgcgcattccgggccccaggttcagctgcaagagtctggcggaggacttgctcaagctggcggaagcctgagactgtcttgtgccgcctctggcagaaccttcagcatgggctggtttagacaggcccctggcaaagagagagagttcgtcgccgccatcacatacagcggcggcagcccttactacgcctcttctgtcagaggccggttcaccatcagccgggacaacgccaagaacaccgtgtacctccagatgaacagcctgaagccagaggacaccgccgtgtactactgtgccgccaatccaacctacggcagcgactggaatgccgagaattggggccagggcacccaagtgacagtgtctagtacgcgtggcagcgaagtgaaaaccgactccaccgaccacgtgaagcccaaagagacagagaacaccaagcagcccagcaagagctgccacaagcccaaggccatcgtgcacaccgagaaagtgaacatgatgagcctgaccgtgctgggcctgcggatgctgttcgccaaaaccgtggccgtgaacttcctgctgaccgccaagctgttcttcctccgcgccaagagaagcggatctggcgtgaagcagaccctgaatttcgacctgctgaagctggctggcgacgtggaatccaacccaggcccttctagaggccatatgaccgagtacaagcccacggtgcgcctcgccacccgcgacgacgtccccagggccgtacgcaccctcgccgccgcgttcgccgactaccccgccacgcgccacaccgtcgatccggaccgccacatcgagcgggtcaccgagctgcaagaactcttcctcacgcgcgtcgggctcgacatcggcaaggtgtgggtcgcggacgacggcgccgcggtggcggtctggaccacgccggagagcgtcgaagcgggggcggtgttcgccgagatcggcccgcgcatggccgagttgagcggttcccggctggccgcgcagcaacagatggaaggcctcctggcgccgcaccggcccaaggagcccgcgtggttcctggccaccgtcggcgtctcgcccgaccaccagggcaagggtctgggcagcgccgtcgtgctccccggagtggaggcggccgagcgcgccggggtgcccgccttcctggagacctccgcgccccgcaacctccccttctacgagcggctcggcttcaccgtcaccgccgacgtcgaggtgcccgaaggaccgcgcacctggtgcatgacccgcaagcccggtgcctga

SEQ ID NO: 4199 - DNA, 2079 bp, Artificial Sequence
  Synthetic Polynucloetide
atggccttaccagtgaccgccttgctcctgccgctggccttgctgctccacgccgccaggccgcagctccagctgcaagagtctggacctggcctggtcaagcctagcgagacactgagcctgacctgtaccgtgtccggcgatagcatcagcagcggcgattactactggggctggatcagacagcctcctggcaaaggactggaatggatcggccacatctactacagcggcgtgacctactacaaccccagcctgaagtccagagtgaccatcagcgtggacaccagccggaaccagttctccctgaagctgtctagcgtgacagccgccgataccgccgtgtactactgcaccagagaggacagcagcaactggcggagtagaggccagggaacactggtcacagttagctctctcgagggatctcccatcaagaccgatgtgattacaatggaccccaaggacaactgctccaaggacgccaacgataccctgctgctccagctgaccaacaccagcgcctactacatgtacttgttgctgctgctgaagtccgtggtgtacttcgccatcatcacatgctgcctgctgcggagaaccgccttctgctgcaacggcgagaagtctagggccaagcgatctggatctggagcaacaaacttctcactactcaaacaagcaggtgacgtggaggagaatcccgggcctactagtatggactggatttggcgcatccttttccttgtcggcgctgctaccggcgcgcattccgggccccaggttcagctgcaagagtctggcggaggacttgctcaagctggcggaagcctgagactgtcttgtgccgcctctggcagaaccttcagcatgggctggtttagacaggcccctggcaaagagagagagttcgtcgccgccatcacatacagcggcggcagcccttactacgcctcttctgtcagaggccggttcaccatcagccgggacaacgccaagaacaccgtgtacctccagatgaacagcctgaagccagaggacaccgccgtgtactactgtgccgccaatccaacctacggcagcgactggaatgccgagaattggggccagggcacccaagtgacagtgtctagtacgcgtgataaaactcatacctgtccgccatgcccggcagaagtgaaaaccgactccaccgaccacgtgaagcccaaagagacagagaacaccaagcagcccagcaagagctgccacaagcccaaggccatcgtgcacaccgagaaagtgaacatgatgagcctgaccgtgctgggcctgcggatgctgttcgccaaaaccgtggccgtgaacttcctgctgaccgccaagctgttcttcctccgcgccaagagaagcggatctggcgtgaagcagaccctgaatttcgacctgctgaagctggctggcgacgtggaatccaacccaggcccttctagaggccatatgaccgagtacaagcccacggtgcgcctcgccacccgcgacgacgtccccagggccgtacgcaccctcgccgccgcgttcgccgactaccccgccacgcgccacaccgtcgatccggaccgccacatcgagcgggtcaccgagctgcaagaactcttcctcacgcgcgtcgggctcgacatcggcaaggtgtgggtcgcggacgacggcgccgcggtggcggtctggaccacgccggagagcgtcgaagcgggggcggtgttcgccgagatcggcccgcgcatggccgagttgagcggttcccggctggccgcgcagcaacagatggaaggcctcctggcgccgcaccggcccaaggagcccgcgtggttcctggccaccgtcggcgtctcgcccgaccaccagggcaagggtctgggcagcgccgtcgtgctccccggagtggaggcggccgagcgcgccggggtgcccgccttcctggagacctccgcgccccgcaacctccccttctacgagcggctcggcttcaccgtcaccgccgacgtcgaggtgcccgaaggaccgcgcacctggtgcatgacccgcaagcccggtgcctga

SEQ ID NO: 4200 - DNA, 2106 bp, Artificial Sequence
  Synthetic Polynucloetide
atggccttaccagtgaccgccttgctcctgccgctggccttgctgctccacgccgccaggccgcagctccagctgcaagagtctggacctggcctggtcaagcctagcgagacactgagcctgacctgtaccgtgtccggcgatagcatcagcagcggcgattactactggggctggatcagacagcctcctggcaaaggactggaatggatcggccacatctactacagcggcgtgacctactacaaccccagcctgaagtccagagtgaccatcagcgtggacaccagccggaaccagttctccctgaagctgtctagcgtgacagccgccgataccgccgtgtactactgcaccagagaggacagcagcaactggcggagtagaggccagggaacactggtcacagttagctctctcgaggacaaaactcacacatgcccaccgtgcccagcacccatcaagaccgatgtgattacaatggaccccaaggacaactgctccaaggacgccaacgataccctgctgctccagctgaccaacaccagcgcctactacatgtacttgttgctgctgctgaagtccgtggtgtacttcgccatcatcacatgctgcctgctgcggagaaccgccttctgctgcaacggcgagaagtctagggccaagcgatctggatctggagcaacaaacttctcactactcaaacaagcaggtgacgtggaggagaatcccgggcctactagtatggactggatttggcgcatccttttccttgtcggcgctgctaccggcgcgcattccgggccccaggttcagctgcaagagtctggcggaggacttgctcaagctggcggaagcctgagactgtcttgtgccgcctctggcagaaccttcagcatgggctggtttagacaggcccctggcaaagagagagagttcgtcgccgccatcacatacagcggcggcagcccttactacgcctcttctgtcagaggccggttcaccatcagccgggacaacgccaagaacaccgtgtacctccagatgaacagcctgaagccagaggacaccgccgtgtactactgtgccgccaatccaacctacggcagcgactggaatgccgagaattggggccagggcacccaagtgacagtgtctagtacgcgtgataaaactcatacctgtccgccatgcccggcagaagtgaaaaccgactccaccgaccacgtgaagcccaaagagacagagaacaccaagcagcccagcaagagctgccacaagcccaaggccatcgtgcacaccgagaaagtgaacatgatgagcctgaccgtgctgggcctgcggatgctgttcgccaaaaccgtggccgtgaacttcctgctgaccgccaagctgttcttcctccgcgccaagagaagcggatctggcgtgaagcagaccctgaatttcgacctgctgaagctggctggcgacgtggaatccaacccaggcccttctagaggccatatgaccgagtacaagcccacggtgcgcctcgccacccgcgacgacgtccccagggccgtacgcaccctcgccgccgcgttcgccgactaccccgccacgcgccacaccgtcgatccggaccgccacatcgagcgggtcaccgagctgcaagaactcttcctcacgcgcgtcgggctcgacatcggcaaggtgtgggtcgcggacgacggcgccgcggtggcggtctggaccacgccggagagcgtcgaagcgggggcggtgttcgccgagatcggcccgcgcatggccgagttgagcggttcccggctggccgcgcagcaacagatggaaggcctcctggcgccgcaccggcccaaggagcccgcgtggttcctggccaccgtcggcgtctcgcccgaccaccagggcaagggtctgggcagcgccgtcgtgctccccggagtggaggcggccgagcgcgccggggtgcccgccttcctggagacctccgcgccccgcaacctccccttctacgagcggctcggcttcaccgtcaccgccgacgtcgaggtgcccgaaggaccgcgcacctggtgcatgacccgcaagcccggtgcctga

SEQ ID NO: 4201 - DNA, 1404 bp, Artificial Sequence
  Synthetic Polynucloetide
atggccttaccagtgaccgccttgctcctgccgctggccttgctgctccacgccgccaggccgcagctccagctgcaagagtctggacctggcctggtcaagcctagcgagacactgagcctgacctgtaccgtgtccggcgatagcatcagcagcggcgattactactggggctggatcagacagcctcctggcaaaggactggaatggatcggccacatctactacagcggcgtgacctactacaaccccagcctgaagtccagagtgaccatcagcgtggacaccagccggaaccagttctccctgaagctgtctagcgtgacagccgccgataccgccgtgtactactgcaccagagaggacagcagcaactggcggagtagaggccagggaacactggtcacagttagctctctcgaggacaaaactcacacatgcccaccgtgcccagcacccatcaagaccgatgtgattacaatggaccccaaggacaactgctccaaggacgccaacgataccctgctgctccagctgaccaacaccagcgcctactacatgtacttgttgctgctgctgaagtccgtggtgtacttcgccatcatcacatgctgcctgctgcggagaaccgccttctgctgcaacggcgagaagtctagggccaagcgatctggatctggagcaacaaacttctcactactcaaacaagcaggtgacgtggaggagaatcccgggcctactagtatggactggatttggcgcatccttttccttgtcggcgctgctaccggcgcgcattccgggccccaggttcagctgcaagagtctggcggaggacttgctcaagctggcggaagcctgagactgtcttgtgccgcctctggcagaaccttcagcatgggctggtttagacaggcccctggcaaagagagagagttcgtcgccgccatcacatacagcggcggcagcccttactacgcctcttctgtcagaggccggttcaccatcagccgggacaacgccaagaacaccgtgtacctccagatgaacagcctgaagccagaggacaccgccgtgtactactgtgccgccaatccaacctacggcagcgactggaatgccgagaattggggccagggcacccaagtgacagtgtctagtacgcgtgataaaactcatacctgtccgccatgcccggcagaagtgaaaaccgactccaccgaccacgtgaagcccaaagagacagagaacaccaagcagcccagcaagagctgccacaagcccaaggccatcgtgcacaccgagaaagtgaacatgatgagcctgaccgtgctgggcctgcggatgctgttcgccaaaaccgtggccgtgaacttcctgctgaccgccaagctgttcttcctc

SEQ ID NO: 4202 - DNA, 1377 bp, Artificial Sequence
  Synthetic Polynucloetide
atggccttaccagtgaccgccttgctcctgccgctggccttgctgctccacgccgccaggccgcagctccagctgcaagagtctggacctggcctggtcaagcctagcgagacactgagcctgacctgtaccgtgtccggcgatagcatcagcagcggcgattactactggggctggatcagacagcctcctggcaaaggactggaatggatcggccacatctactacagcggcgtgacctactacaaccccagcctgaagtccagagtgaccatcagcgtggacaccagccggaaccagttctccctgaagctgtctagcgtgacagccgccgataccgccgtgtactactgcaccagagaggacagcagcaactggcggagtagaggccagggaacactggtcacagttagctctctcgagggatctcccatcaagaccgatgtgattacaatggaccccaaggacaactgctccaaggacgccaacgataccctgctgctccagctgaccaacaccagcgcctactacatgtacttgttgctgctgctgaagtccgtggtgtacttcgccatcatcacatgctgcctgctgcggagaaccgccttctgctgcaacggcgagaagtctagggccaagcgatctggatctggagcaacaaacttctcactactcaaacaagcaggtgacgtggaggagaatcccgggcctactagtatggactggatttggcgcatccttttccttgtcggcgctgctaccggcgcgcattccgggccccaggttcagctgcaagagtctggcggaggacttgctcaagctggcggaagcctgagactgtcttgtgccgcctctggcagaaccttcagcatgggctggtttagacaggcccctggcaaagagagagagttcgtcgccgccatcacatacagcggcggcagcccttactacgcctcttctgtcagaggccggttcaccatcagccgggacaacgccaagaacaccgtgtacctccagatgaacagcctgaagccagaggacaccgccgtgtactactgtgccgccaatccaacctacggcagcgactggaatgccgagaattggggccagggcacccaagtgacagtgtctagtacgcgtgataaaactcatacctgtccgccatgcccggcagaagtgaaaaccgactccaccgaccacgtgaagcccaaagagacagagaacaccaagcagcccagcaagagctgccacaagcccaaggccatcgtgcacaccgagaaagtgaacatgatgagcctgaccgtgctgggcctgcggatgctgttcgccaaaaccgtggccgtgaacttcctgctgaccgccaagctgttcttcctc

SEQ ID NO: 4203 - DNA, 2028 bp, Artificial Sequence
  Synthetic Polynucloetide
atggccttaccagtgaccgccttgctcctgccgctggccttgctgctccacgccgccaggccgcagctccagctgcaagagtctggacctggcctggtcaagcctagcgagacactgagcctgacctgtaccgtgtccggcgatagcatcagcagcggcgattactactggggctggatcagacagcctcctggcaaaggactggaatggatcggccacatctactacagcggcgtgacctactacaaccccagcctgaagtccagagtgaccatcagcgtggacaccagccggaaccagttctccctgaagctgtctagcgtgacagccgccgataccgccgtgtactactgcaccagagaggacagcagcaactggcggagtagaggccagggaacactggtcacagttagctctctcgagggatctatggaccccaaggacaactgctccaaggacgccaacgataccctgctgctccagctgaccaacaccagcgcctactacatgtacttgttgctgctgctgaagtccgtggtgtacttcgccatcatcacatgctgcctgctgcggagaaccgccttctgctgcaacggcgagaagtctagggccaagcgatctggatctggagcaacaaacttctcactactcaaacaagcaggtgacgtggaggagaatcccgggcctactagtatggactggatttggcgcatccttttccttgtcggcgctgctaccggcgcgcattccgggccccaggttcagctgcaagagtctggcggaggacttgctcaagctggcggaagcctgagactgtcttgtgccgcctctggcagaaccttcagcatgggctggtttagacaggcccctggcaaagagagagagttcgtcgccgccatcacatacagcggcggcagcccttactacgcctcttctgtcagaggccggttcaccatcagccgggacaacgccaagaacaccgtgtacctccagatgaacagcctgaagccagaggacaccgccgtgtactactgtgccgccaatccaacctacggcagcgactggaatgccgagaattggggccagggcacccaagtgacagtgtctagtacgcgtggcagcgaagtgaaaaccgactccaccgaccacgtgaagcccaaagagacagagaacaccaagcagcccagcaagagctgccacaagcccaaggccatcgtgcacaccgagaaagtgaacatgatgagcctgaccgtgctgggcctgcggatgctgttcgccaaaaccgtggccgtgaacttcctgctgaccgccaagctgttcttcctccgcgccaagagaagcggatctggcgtgaagcagaccctgaatttcgacctgctgaagctggctggcgacgtggaatccaacccaggcccttctagaggccatatgaccgagtacaagcccacggtgcgcctcgccacccgcgacgacgtccccagggccgtacgcaccctcgccgccgcgttcgccgactaccccgccacgcgccacaccgtcgatccggaccgccacatcgagcgggtcaccgagctgcaagaactcttcctcacgcgcgtcgggctcgacatcggcaaggtgtgggtcgcggacgacggcgccgcggtggcggtctggaccacgccggagagcgtcgaagcgggggcggtgttcgccgagatcggcccgcgcatggccgagttgagcggttcccggctggccgcgcagcaacagatggaaggcctcctggcgccgcaccggcccaaggagcccgcgtggttcctggccaccgtcggcgtctcgcccgaccaccagggcaagggtctgggcagcgccgtcgtgctccccggagtggaggcggccgagcgcgccggggtgcccgccttcctggagacctccgcgccccgcaacctccccttctacgagcggctcggcttcaccgtcaccgccgacgtcgaggtgcccgaaggaccgcgcacctggtgcatgacccgcaagcccggtgcctga

SEQ ID NO: 4204 - DNA, 2031 bp, Artificial Sequence
  Synthetic Polynucloetide
atggccttaccagtgaccgccttgctcctgccgctggccttgctgctccacgccgccaggccgcagctccagctgcaagagtctggacctggcctggtcaagcctagcgagacactgagcctgacctgtaccgtgtccggcgatagcatcagcagcggcgattactactggggctggatcagacagcctcctggcaaaggactggaatggatcggccacatctactacagcggcgtgacctactacaaccccagcctgaagtccagagtgaccatcagcgtggacaccagccggaaccagttctccctgaagctgtctagcgtgacagccgccgataccgccgtgtactactgcaccagagaggacagcagcaactggcggagtagaggccagggaacactggtcacagttagctctctcgagggatctcccatcaagaccgatgtgattacaatggaccccaaggacaactgctccaaggacgccaacgataccctgctgctccagctgaccaacaccagcgcctactacatgtacttgttgctgctgctgaagtccgtggtgtacttcgccatcatcacatgctgcctgctgcggagaaccgccttctgctgcaacggcgagaagtctagggccaagcgatctggatctggagcaacaaacttctcactactcaaacaagcaggtgacgtggaggagaatcccgggcctactagtatggactggatttggcgcatccttttccttgtcggcgctgctaccggcgcgcattccgggccccaggttcagctgcaagagtctggcggaggacttgctcaagctggcggaagcctgagactgtcttgtgccgcctctggcagaaccttcagcatgggctggtttagacaggcccctggcaaagagagagagttcgtcgccgccatcacatacagcggcggcagcccttactacgcctcttctgtcagaggccggttcaccatcagccgggacaacgccaagaacaccgtgtacctccagatgaacagcctgaagccagaggacaccgccgtgtactactgtgccgccaatccaacctacggcagcgactggaatgccgagaattggggccagggcacccaagtgacagtgtctagtacgcgtggcagcgaccacgtgaagcccaaagagacagagaacaccaagcagcccagcaagagctgccacaagcccaaggccatcgtgcacaccgagaaagtgaacatgatgagcctgaccgtgctgggcctgcggatgctgttcgccaaaaccgtggccgtgaacttcctgctgaccgccaagctgttcttcctccgcgccaagagaagcggatctggcgtgaagcagaccctgaatttcgacctgctgaagctggctggcgacgtggaatccaacccaggcccttctagaggccatatgaccgagtacaagcccacggtgcgcctcgccacccgcgacgacgtccccagggccgtacgcaccctcgccgccgcgttcgccgactaccccgccacgcgccacaccgtcgatccggaccgccacatcgagcgggtcaccgagctgcaagaactcttcctcacgcgcgtcgggctcgacatcggcaaggtgtgggtcgcggacgacggcgccgcggtggcggtctggaccacgccggagagcgtcgaagcgggggcggtgttcgccgagatcggcccgcgcatggccgagttgagcggttcccggctggccgcgcagcaacagatggaaggcctcctggcgccgcaccggcccaaggagcccgcgtggttcctggccaccgtcggcgtctcgcccgaccaccagggcaagggtctgggcagcgccgtcgtgctccccggagtggaggcggccgagcgcgccggggtgcccgccttcctggagacctccgcgccccgcaacctccccttctacgagcggctcggcttcaccgtcaccgccgacgtcgaggtgcccgaaggaccgcgcacctggtgcatgacccgcaagcccggtgcctga

SEQ ID NO: 4205 - DNA, 2007 bp, Artificial Sequence
  Synthetic Polynucloetide
atggccttaccagtgaccgccttgctcctgccgctggccttgctgctccacgccgccaggccgcagctccagctgcaagagtctggacctggcctggtcaagcctagcgagacactgagcctgacctgtaccgtgtccggcgatagcatcagcagcggcgattactactggggctggatcagacagcctcctggcaaaggactggaatggatcggccacatctactacagcggcgtgacctactacaaccccagcctgaagtccagagtgaccatcagcgtggacaccagccggaaccagttctccctgaagctgtctagcgtgacagccgccgataccgccgtgtactactgcaccagagaggacagcagcaactggcggagtagaggccagggaacactggtcacagttagctctctcgagggatctatggaccccaaggacaactgctccaaggacgccaacgataccctgctgctccagctgaccaacaccagcgcctactacatgtacttgttgctgctgctgaagtccgtggtgtacttcgccatcatcacatgctgcctgctgcggagaaccgccttctgctgcaacggcgagaagtctagggccaagcgatctggatctggagcaacaaacttctcactactcaaacaagcaggtgacgtggaggagaatcccgggcctactagtatggactggatttggcgcatccttttccttgtcggcgctgctaccggcgcgcattccgggccccaggttcagctgcaagagtctggcggaggacttgctcaagctggcggaagcctgagactgtcttgtgccgcctctggcagaaccttcagcatgggctggtttagacaggcccctggcaaagagagagagttcgtcgccgccatcacatacagcggcggcagcccttactacgcctcttctgtcagaggccggttcaccatcagccgggacaacgccaagaacaccgtgtacctccagatgaacagcctgaagccagaggacaccgccgtgtactactgtgccgccaatccaacctacggcagcgactggaatgccgagaattggggccagggcacccaagtgacagtgtctagtacgcgtggcagcgaccacgtgaagcccaaagagacagagaacaccaagcagcccagcaagagctgccacaagcccaaggccatcgtgcacaccgagaaagtgaacatgatgagcctgaccgtgctgggcctgcggatgctgttcgccaaaaccgtggccgtgaacttcctgctgaccgccaagctgttcttcctccgcgccaagagaagcggatctggcgtgaagcagaccctgaatttcgacctgctgaagctggctggcgacgtggaatccaacccaggcccttctagaggccatatgaccgagtacaagcccacggtgcgcctcgccacccgcgacgacgtccccagggccgtacgcaccctcgccgccgcgttcgccgactaccccgccacgcgccacaccgtcgatccggaccgccacatcgagcgggtcaccgagctgcaagaactcttcctcacgcgcgtcgggctcgacatcggcaaggtgtgggtcgcggacgacggcgccgcggtggcggtctggaccacgccggagagcgtcgaagcgggggcggtgttcgccgagatcggcccgcgcatggccgagttgagcggttcccggctggccgcgcagcaacagatggaaggcctcctggcgccgcaccggcccaaggagcccgcgtggttcctggccaccgtcggcgtctcgcccgaccaccagggcaagggtctgggcagcgccgtcgtgctccccggagtggaggcggccgagcgcgccggggtgcccgccttcctggagacctccgcgccccgcaacctccccttctacgagcggctcggcttcaccgtcaccgccgacgtcgaggtgcccgaaggaccgcgcacctggtgcatgacccgcaagcccggtgcctga

SEQ ID NO: 4206 - DNA, 1305 bp, Artificial Sequence
  Synthetic Polynucloetide
atggccttaccagtgaccgccttgctcctgccgctggccttgctgctccacgccgccaggccgcagctccagctgcaagagtctggacctggcctggtcaagcctagcgagacactgagcctgacctgtaccgtgtccggcgatagcatcagcagcggcgattactactggggctggatcagacagcctcctggcaaaggactggaatggatcggccacatctactacagcggcgtgacctactacaaccccagcctgaagtccagagtgaccatcagcgtggacaccagccggaaccagttctccctgaagctgtctagcgtgacagccgccgataccgccgtgtactactgcaccagagaggacagcagcaactggcggagtagaggccagggaacactggtcacagttagctctctcgagggatctatggaccccaaggacaactgctccaaggacgccaacgataccctgctgctccagctgaccaacaccagcgcctactacatgtacttgttgctgctgctgaagtccgtggtgtacttcgccatcatcacatgctgcctgctgcggagaaccgccttctgctgcaacggcgagaagtctagggccaagcgatctggatctggagcaacaaacttctcactactcaaacaagcaggtgacgtggaggagaatcccgggcctactagtatggactggatttggcgcatccttttccttgtcggcgctgctaccggcgcgcattccgggccccaggttcagctgcaagagtctggcggaggacttgctcaagctggcggaagcctgagactgtcttgtgccgcctctggcagaaccttcagcatgggctggtttagacaggcccctggcaaagagagagagttcgtcgccgccatcacatacagcggcggcagcccttactacgcctcttctgtcagaggccggttcaccatcagccgggacaacgccaagaacaccgtgtacctccagatgaacagcctgaagccagaggacaccgccgtgtactactgtgccgccaatccaacctacggcagcgactggaatgccgagaattggggccagggcacccaagtgacagtgtctagtacgcgtggcagcgaccacgtgaagcccaaagagacagagaacaccaagcagcccagcaagagctgccacaagcccaaggccatcgtgcacaccgagaaagtgaacatgatgagcctgaccgtgctgggcctgcggatgctgttcgccaaaaccgtggccgtgaacttcctgctgaccgccaagctgttcttcctc

SEQ ID NO: 4207 - DNA, 2034 bp, Artificial Sequence
  Synthetic Polynucloetide
atggccttaccagtgaccgccttgctcctgccgctggccttgctgctccacgccgccaggccgcagctccagctgcaagagtctggacctggcctggtcaagcctagcgagacactgagcctgacctgtaccgtgtccggcgatagcatcagcagcggcgattactactggggctggatcagacagcctcctggcaaaggactggaatggatcggccacatctactacagcggcgtgacctactacaaccccagcctgaagtccagagtgaccatcagcgtggacaccagccggaaccagttctccctgaagctgtctagcgtgacagccgccgataccgccgtgtactactgcaccagagaggacagcagcaactggcggagtagaggccagggaacactggtcacagttagctctctcgaggacaaaactcacacatgcccaccgtgcccagcaatggaccccaaggacaactgctccaaggacgccaacgataccctgctgctccagctgaccaacaccagcgcctactacatgtacttgttgctgctgctgaagtccgtggtgtacttcgccatcatcacatgctgcctgctgcggagaaccgccttctgctgcaacggcgagaagtctagggccaagcgatctggatctggagcaacaaacttctcactactcaaacaagcaggtgacgtggaggagaatcccgggcctactagtatggactggatttggcgcatccttttccttgtcggcgctgctaccggcgcgcattccgggccccaggttcagctgcaagagtctggcggaggacttgctcaagctggcggaagcctgagactgtcttgtgccgcctctggcagaaccttcagcatgggctggtttagacaggcccctggcaaagagagagagttcgtcgccgccatcacatacagcggcggcagcccttactacgcctcttctgtcagaggccggttcaccatcagccgggacaacgccaagaacaccgtgtacctccagatgaacagcctgaagccagaggacaccgccgtgtactactgtgccgccaatccaacctacggcagcgactggaatgccgagaattggggccagggcacccaagtgacagtgtctagtacgcgtggcagcgaccacgtgaagcccaaagagacagagaacaccaagcagcccagcaagagctgccacaagcccaaggccatcgtgcacaccgagaaagtgaacatgatgagcctgaccgtgctgggcctgcggatgctgttcgccaaaaccgtggccgtgaacttcctgctgaccgccaagctgttcttcctccgcgccaagagaagcggatctggcgtgaagcagaccctgaatttcgacctgctgaagctggctggcgacgtggaatccaacccaggcccttctagaggccatatgaccgagtacaagcccacggtgcgcctcgccacccgcgacgacgtccccagggccgtacgcaccctcgccgccgcgttcgccgactaccccgccacgcgccacaccgtcgatccggaccgccacatcgagcgggtcaccgagctgcaagaactcttcctcacgcgcgtcgggctcgacatcggcaaggtgtgggtcgcggacgacggcgccgcggtggcggtctggaccacgccggagagcgtcgaagcgggggcggtgttcgccgagatcggcccgcgcatggccgagttgagcggttcccggctggccgcgcagcaacagatggaaggcctcctggcgccgcaccggcccaaggagcccgcgtggttcctggccaccgtcggcgtctcgcccgaccaccagggcaagggtctgggcagcgccgtcgtgctccccggagtggaggcggccgagcgcgccggggtgcccgccttcctggagacctccgcgccccgcaacctccccttctacgagcggctcggcttcaccgtcaccgccgacgtcgaggtgcccgaaggaccgcgcacctggtgcatgacccgcaagcccggtgcctga

SEQ ID NO: 4208 - DNA, 2061 bp, Artificial Sequence
  Synthetic Polynucloetide
atggccttaccagtgaccgccttgctcctgccgctggccttgctgctccacgccgccaggccgcagctccagctgcaagagtctggacctggcctggtcaagcctagcgagacactgagcctgacctgtaccgtgtccggcgatagcatcagcagcggcgattactactggggctggatcagacagcctcctggcaaaggactggaatggatcggccacatctactacagcggcgtgacctactacaaccccagcctgaagtccagagtgaccatcagcgtggacaccagccggaaccagttctccctgaagctgtctagcgtgacagccgccgataccgccgtgtactactgcaccagagaggacagcagcaactggcggagtagaggccagggaacactggtcacagttagctctctcgaggacaaaactcacacatgcccaccgtgcccagcaatggaccccaaggacaactgctccaaggacgccaacgataccctgctgctccagctgaccaacaccagcgcctactacatgtacttgttgctgctgctgaagtccgtggtgtacttcgccatcatcacatgctgcctgctgcggagaaccgccttctgctgcaacggcgagaagtctagggccaagcgatctggatctggagcaacaaacttctcactactcaaacaagcaggtgacgtggaggagaatcccgggcctactagtatggactggatttggcgcatccttttccttgtcggcgctgctaccggcgcgcattccgggccccaggttcagctgcaagagtctggcggaggacttgctcaagctggcggaagcctgagactgtcttgtgccgcctctggcagaaccttcagcatgggctggtttagacaggcccctggcaaagagagagagttcgtcgccgccatcacatacagcggcggcagcccttactacgcctcttctgtcagaggccggttcaccatcagccgggacaacgccaagaacaccgtgtacctccagatgaacagcctgaagccagaggacaccgccgtgtactactgtgccgccaatccaacctacggcagcgactggaatgccgagaattggggccagggcacccaagtgacagtgtctagtacgcgtgataaaactcatacctgtccgccatgcccggcagaccacgtgaagcccaaagagacagagaacaccaagcagcccagcaagagctgccacaagcccaaggccatcgtgcacaccgagaaagtgaacatgatgagcctgaccgtgctgggcctgcggatgctgttcgccaaaaccgtggccgtgaacttcctgctgaccgccaagctgttcttcctccgcgccaagagaagcggatctggcgtgaagcagaccctgaatttcgacctgctgaagctggctggcgacgtggaatccaacccaggcccttctagaggccatatgaccgagtacaagcccacggtgcgcctcgccacccgcgacgacgtccccagggccgtacgcaccctcgccgccgcgttcgccgactaccccgccacgcgccacaccgtcgatccggaccgccacatcgagcgggtcaccgagctgcaagaactcttcctcacgcgcgtcgggctcgacatcggcaaggtgtgggtcgcggacgacggcgccgcggtggcggtctggaccacgccggagagcgtcgaagcgggggcggtgttcgccgagatcggcccgcgcatggccgagttgagcggttcccggctggccgcgcagcaacagatggaaggcctcctggcgccgcaccggcccaaggagcccgcgtggttcctggccaccgtcggcgtctcgcccgaccaccagggcaagggtctgggcagcgccgtcgtgctccccggagtggaggcggccgagcgcgccggggtgcccgccttcctggagacctccgcgccccgcaacctccccttctacgagcggctcggcttcaccgtcaccgccgacgtcgaggtgcccgaaggaccgcgcacctggtgcatgacccgcaagcccggtgcctga

SEQ ID NO: 4209 - DNA, 1359 bp, Artificial Sequence
  Synthetic Polynucloetide
atggccttaccagtgaccgccttgctcctgccgctggccttgctgctccacgccgccaggccgcagctccagctgcaagagtctggacctggcctggtcaagcctagcgagacactgagcctgacctgtaccgtgtccggcgatagcatcagcagcggcgattactactggggctggatcagacagcctcctggcaaaggactggaatggatcggccacatctactacagcggcgtgacctactacaaccccagcctgaagtccagagtgaccatcagcgtggacaccagccggaaccagttctccctgaagctgtctagcgtgacagccgccgataccgccgtgtactactgcaccagagaggacagcagcaactggcggagtagaggccagggaacactggtcacagttagctctctcgaggacaaaactcacacatgcccaccgtgcccagcaatggaccccaaggacaactgctccaaggacgccaacgataccctgctgctccagctgaccaacaccagcgcctactacatgtacttgttgctgctgctgaagtccgtggtgtacttcgccatcatcacatgctgcctgctgcggagaaccgccttctgctgcaacggcgagaagtctagggccaagcgatctggatctggagcaacaaacttctcactactcaaacaagcaggtgacgtggaggagaatcccgggcctactagtatggactggatttggcgcatccttttccttgtcggcgctgctaccggcgcgcattccgggccccaggttcagctgcaagagtctggcggaggacttgctcaagctggcggaagcctgagactgtcttgtgccgcctctggcagaaccttcagcatgggctggtttagacaggcccctggcaaagagagagagttcgtcgccgccatcacatacagcggcggcagcccttactacgcctcttctgtcagaggccggttcaccatcagccgggacaacgccaagaacaccgtgtacctccagatgaacagcctgaagccagaggacaccgccgtgtactactgtgccgccaatccaacctacggcagcgactggaatgccgagaattggggccagggcacccaagtgacagtgtctagtacgcgtgataaaactcatacctgtccgccatgcccggcagaccacgtgaagcccaaagagacagagaacaccaagcagcccagcaagagctgccacaagcccaaggccatcgtgcacaccgagaaagtgaacatgatgagcctgaccgtgctgggcctgcggatgctgttcgccaaaaccgtggccgtgaacttcctgctgaccgccaagctgttcttcctc

SEQ ID NO: 4210 - DNA, 900 bp, Artificial Sequence
  Synthetic Polynucloetide
atggccttaccagtgaccgccttgctcctgccgctggccttgctgctccacgccgccaggccgcagctccagctgcaagagtctggacctggcctggtcaagcctagcgagacactgagcctgacctgtaccgtgtccggcgatagcatcagcagcggcgattactactggggctggatcagacagcctcctggcaaaggactggaatggatcggccacatctactacagcggcgtgacctactacaaccccagcctgaagtccagagtgaccatcagcgtggacaccagccggaaccagttctccctgaagctgtctagcgtgacagccgccgataccgccgtgtactactgcaccagagaggacagcagcaactggcggagtagaggccagggaacactggtcacagttagctctctcgagggacagcctaaggccaatcctaccgtgacactgttccctccaagcagcgaagaactccaggccaacaaggccacacttgtgtgcctgatctccgacttctaccctggggctgtgacagtggcttggaaggccgatggatctcctgtgaaagccggcgtggaaaccaccaagccatccaagcagagcaacaacaaatacgccgccagctcctacctgagcctgacacctgagcagtggaagtcccacagatcctacagctgccaagtgacccacgaaggcagcaccgtggaaaagacagtggcccctacagagtgcagcggcagagccgattgcggctttaccagcgagagctaccagcagggcgtgctgagcgccaccatcctgtacgagatcctgctgggcaaggccaccctgtacgccgtgctggtgtctgccctggtgctgatggctatggtcaagcggaaggacagccgggga

SEQ ID NO: 4211 - DNA, 912 bp, Artificial Sequence
  Synthetic Polynucloetide
atggactggatttggcgcatccttttccttgtcggcgctgctaccggcgcgcattccgggccccaggttcagctgcaagagtctggcggaggacttgctcaagctggcggaagcctgagactgtcttgtgccgcctctggcagaaccttcagcatgggctggtttagacaggcccctggcaaagagagagagttcgtcgccgccatcacatacagcggcggcagcccttactacgcctcttctgtcagaggccggttcaccatcagccgggacaacgccaagaacaccgtgtacctccagatgaacagcctgaagccagaggacaccgccgtgtactactgtgccgccaatccaacctacggcagcgactggaatgccgagaattggggccagggcacccaagtgacagtgtctagtacgcgtgcctctacaaagggaccctccgtgtttcctctggctcccagcagcaagtctacaagcggaggaacagccgctctgggctgcctggtcaaggattactttcccgagcctgtgaccgtgtcctggaatagcggagcactgacaagcggcgtgcacacctttccagccgtgctgcaaagcagcggcctgtactctctgagcagcgtggtcacagtgcctagctctagcctgggcacccagacctacatctgcaatgtgaaccacaagcctagcaacaccaaggtggacaagagagtggaacccaagagctgtatccccgaggacacattcttcccaagccccgagagcagctgcgacgtgaagctggtggaaaagagcttcgagacagacaccaacctgaacttccagaacctgagcgtgatcggcttcagaatcctgctgctgaaagtggccggctttaacctgctgatgaccctgcggctgtggtccagc

SEQ ID NO: 4212 - DNA, 942 bp, Artificial Sequence
  Synthetic Polynucloetide
atggccttaccagtgaccgccttgctcctgccgctggccttgctgctccacgccgccaggccgcagctccagctgcaagagtctggacctggcctggtcaagcctagcgagacactgagcctgacctgtaccgtgtccggcgatagcatcagcagcggcgattactactggggctggatcagacagcctcctggcaaaggactggaatggatcggccacatctactacagcggcgtgacctactacaaccccagcctgaagtccagagtgaccatcagcgtggacaccagccggaaccagttctccctgaagctgtctagcgtgacagccgccgataccgccgtgtactactgcaccagagaggacagcagcaactggcggagtagaggccagggaacactggtcacagttagctctctcgagggacagcctaaggccaatcctaccgtgacactgttccctccaagcagcgaagaactccaggccaacaaggccacacttgtgtgcctgatctccgacttctaccctggggctgtgacagtggcttggaaggccgatggatctcctgtgaaagccggcgtggaaaccaccaagccatccaagcagagcaacaacaaatacgccgccagctcctacctgagcctgacacctgagcagtggaagtcccacagatcctacagctgccaagtgacccacgaaggcagcaccgtggaaaagacagtggcccctacagagtgcagccccatcaagaccgatgtgattacaatggaccccaaggacaactgctccaaggacgccaacgataccctgctgctccagctgaccaacaccagcgcctactacatgtacttgttgctgctgctgaagtccgtggtgtacttcgccatcatcacatgctgcctgctgcggagaaccgccttctgctgcaacggcgagaagtct

SEQ ID NO: 4213 - DNA, 936 bp, Artificial Sequence
  Synthetic Polynucloetide
atggactggatttggcgcatccttttccttgtcggcgctgctaccggcgcgcattccgggccccaggttcagctgcaagagtctggcggaggacttgctcaagctggcggaagcctgagactgtcttgtgccgcctctggcagaaccttcagcatgggctggtttagacaggcccctggcaaagagagagagttcgtcgccgccatcacatacagcggcggcagcccttactacgcctcttctgtcagaggccggttcaccatcagccgggacaacgccaagaacaccgtgtacctccagatgaacagcctgaagccagaggacaccgccgtgtactactgtgccgccaatccaacctacggcagcgactggaatgccgagaattggggccagggcacccaagtgacagtgtctagtacgcgtgcctctacaaagggaccctccgtgtttcctctggctcccagcagcaagtctacaagcggaggaacagccgctctgggctgcctggtcaaggattactttcccgagcctgtgaccgtgtcctggaatagcggagcactgacaagcggcgtgcacacctttccagccgtgctgcaaagcagcggcctgtactctctgagcagcgtggtcacagtgcctagctctagcctgggcacccagacctacatctgcaatgtgaaccacaagcctagcaacaccaaggtggacaagagagtggaacccaagagctgtgaagtgaaaaccgactccaccgaccacgtgaagcccaaagagacagagaacaccaagcagcccagcaagagctgccacaagcccaaggccatcgtgcacaccgagaaagtgaacatgatgagcctgaccgtgctgggcctgcggatgctgttcgccaaaaccgtggccgtgaacttcctgctgaccgccaagctgttcttcctc

SEQ ID NO: 4214 - DNA, 2421 bp, Artificial Sequence
  Synthetic Polynucloetide
atggactggatttggcgcatccttttccttgtcggcgctgctaccggcgcccattccctgttcaatcaagaggtgcagatccctctgaccgagagctactgtggcccctgtcctaagaactggatctgctacaagaacaactgctaccagttcttcgacgagagcaagaattggtacgagagccaggccagctgcatgagccagaatgccagcctgctgaaggtgtacagcaaagaggaccaggacctgctgaaactggtcaagagctaccactggatgggccttgtgcacatccccaccaatggctcttggcagtgggaggacggcagcattctgagccctaacctgctgaccatcatcgagatgcagaagggcgactgcgccctgtacgccagcagctttaagggctacatcgagaattgcagcaccccgaacacctacatctgtatgcagagaaccgttggcggaggcggaagtggaggcggaggatctggcggcggaggctctgacctctttaatcaagaagtccagattccactcaccgaatcctactgcggaccttgtccaaaaaattggatttgttataagaacaactgttatcaattctttgatgagtctaaaaattggtatgagtcccaggcttcctgcatgtctcagaacgcttctctgctgaaagtctactctaaagaagatcaggatctcctgaagctcgtcaagtcttatcattggatggggctcgtccacattcctaccaacggaagctggcaatgggaagatggctccatcctgtctccaaatctgctcacgattattgaaatgcagaaaggggattgtgctctctacgccagctccttcaagggatatattgagaactgtagcacgcccaatacttatatctgtatgcaacggaccgtgggatccggcggcggaggatctggcggaggcggatctgggggcggaggctctttcgaacaagttcagcttcaacagcctggcgctgagctggtcaaacctggcgcttctgtgaagatgagctgcaaagccagcggctacgccttcagcagctactggatcaactggatgaagcagaaacccggccagggactcgaatggatcggccaaatctatcccggcgacggcgacaccaactacaacggcaagttcaagggcagagccacactgaccgccgatacctctagcagcacagcctacatgcagctgagcagcctgaccagcgaagatagcgccgtgtacttctgtgcccggtccatcacaacagtcgtgggctgcgctatggactattggggccagggaacaagcgtgaccgtgtctagtggcggaggcggaagtggaggcggaggatctggcggcggaggctctgacatccagatgacacagagccctagcagcctgtctgccagcgtgggagacagagtgaccatcacatgcaaggccagcgaccacatcaacaactggctggcctggtatcagcagaagcctggacaggcccctaagctgctgatctacggcgctaccacactggaaacaggcgtgcccagcagattttctggcagcggctctggcaccgactacaccctgacaatatccagcctccagcctgaggacttcgccacctactactgtcagcagagctggaacaccccttggacattcggccagggcaccaagctggaaatcaagagaacgcgtgagcagaaactgatctcggaagaggatctggcgaagcccaccacgacgccagcgccgcgaccaccaacaccggcgcccaccatcgcgtcgcagcccctgtccctgcgcccagaggcgtgccggccagcggcggggggcgcagtgcacacgagggggctggacttcgcctgtgacatctacatctgggcgcccttggccgggacttgtggggtccttctcctgtcactggttatcaccctttactgcaaacggggcagaaagaaactcctgtatatattcaaacaaccatttatgagaccagtacaaactactcaagaggaagatggctgtagctgccgatttccagaagaagaagaaggaggatgtgaactgagagtgaagttcagcaggagcgcagacgcccccgcgtaccagcagggccagaaccagctctataacgagctgaatctaggacgaagagaggagtacgatgttttggacaagagacgtggccgggaccctgagatggggggaaagccgagaaggaagaaccctcaggaaggcctgtacaatgaactgcagaaagataagatggcggaggcctacagtgagattgggatgaaaggcgagcgccggaggggcaaggggcacgatggcctttaccagggtctcagtacagccaccaaggacacctacgacgcccttcacatgcaggccctgccccctcgctga

SEQ ID NO: 4215 - DNA, 3486 bp, Artificial Sequence
  Synthetic Polynucloetide
atggccttaccagtgaccgccttgctcctgccgctggccttgctgctccacgccgccaggccggacatccagatgacacagagccctagcagcctgtctgccagcgtgggagacagagtgaccatcacatgcaaggccagcgaccacatcaacaactggctggcctggtatcagcagaagcctggacaggcccctaagctgctgatctacggcgctaccacactggaaacaggcgtgcccagcagattttctggcagcggctctggcaccgactacaccctgacaatatccagcctccagcctgaggacttcgccacctactactgtcagcagagctggaacaccccttggacattcggccagggcaccaagctggaaatcaagagactcgagatccagaaccctgatcctgccgtgtaccagctgcgggatagcaagagcagcgacaagagcgtgtgtctgttcaccgacttcgacagccagaccaacgtgtcccagagcaaggactccgacgtgtacatcaccgataagtgcgtgctggacatgcggagcatggacttcaagagcaactccgccgtggcctggtccaacaagtccgatttcgcctgcgccaacgccttcaacaacagcattatccccgaggacacattcttcccaagcagcgacgtgccctgcgacgtgaagctggtggaaaagagcttcgagacagacaccaacctgaacttccagaacctgagcgtgatcggcttcagaatcctgctgctgaaagtggccggctttaacctgctgatgaccctgcggctgtggtccagccgcgccaagagaagcggatctggcgtgaagcagaccctgaatttcgacctgctgaagctggctggcgacgtggaatccaacccaggccctactagtatggactggatttggcgcatccttttccttgtcggcgctgctaccggcgcccattccgggcccctgttcaatcaagaggtgcagatccctctgaccgagagctactgtggcccctgtcctaagaactggatctgctacaagaacaactgctaccagttcttcgacgagagcaagaattggtacgagagccaggccagctgcatgagccagaatgccagcctgctgaaggtgtacagcaaagaggaccaggacctgctgaaactggtcaagagctaccactggatgggccttgtgcacatccccaccaatggctcttggcagtgggaggacggcagcattctgagccctaacctgctgaccatcatcgagatgcagaagggcgactgcgccctgtacgccagcagctttaagggctacatcgagaattgcagcaccccgaacacctacatctgtatgcagagaaccgttggcggaggcggaagtggaggcggaggatctggcggcggaggctctgacctctttaatcaagaagtccagattccactcaccgaatcctactgcggaccttgtccaaaaaattggatttgttataagaacaactgttatcaattctttgatgagtctaaaaattggtatgagtcccaggcttcctgcatgtctcagaacgcttctctgctgaaagtctactctaaagaagatcaggatctcctgaagctcgtcaagtcttatcattggatggggctcgtccacattcctaccaacggaagctggcaatgggaagatggctccatcctgtctccaaatctgctcacgattattgaaatgcagaaaggggattgtgctctctacgccagctccttcaagggatatattgagaactgtagcacgcccaatacttatatctgtatgcaacggaccgtgggatccggcggcggaggatctggcggaggcggatctgggggcggaggctctttcgaacaagttcagcttcaacagcctggcgctgagctggtcaaacctggcgcttctgtgaagatgagctgcaaagccagcggctacgccttcagcagctactggatcaactggatgaagcagaaacccggccagggactcgaatggatcggccaaatctatcccggcgacggcgacaccaactacaacggcaagttcaagggcagagccacactgaccgccgatacctctagcagcacagcctacatgcagctgagcagcctgaccagcgaagatagcgccgtgtacttctgtgcccggtccatcacaacagtcgtgggctgcgctatggactattggggccagggaacaagcgtgaccgtgtctagtacgcgtgaggacctgaagaacgtgttcccacctgaggtggccgtgttcgagcctagcaaggccgagatcgcccacacccagaaagccaccctcgtgtgcctggctaccggcttctaccccgaccatgtggaactgtcttggtgggtcaacggcaaagaggtgcacagcggcgtgtgtaccgacccccagccactgaaagaacagcccgccctgaacgacagccggtactgcctgagcagcagactgagagtgtccgccaccttctggcagaacccccggaaccacttcagatgccaggtgcagttctacggcctgagcgagaacgacgagtggacccaggacagagccaagcccgtgacccagatcgtgtctgccgaagcctggggcagagccgattgcggcatcaccagcgccagctaccaccagggcgtgctgagcgccaccatcctgtacgagatcctgctgggcaaggccaccctgtacgccgtgctggtgtctgccctggtgctgatggctatggtcaagcggaaggacagccggggaagggccaagcgatctggatctggagcaacaaacttctcactactcaaacaagcaggtgacgtggaggagaatcccgggccttctagaggccatatgaccgagtacaagcccacggtgcgcctcgccacccgcgacgacgtccccagggccgtacgcaccctcgccgccgcgttcgccgactaccccgccacgcgccacaccgtcgatccggaccgccacatcgagcgggtcaccgagctgcaagaactcttcctcacgcgcgtcgggctcgacatcggcaaggtgtgggtcgcggacgacggcgccgcggtggcggtctggaccacgccggagagcgtcgaagcgggggcggtgttcgccgagatcggcccgcgcatggccgagttgagcggttcccggctggccgcgcagcaacagatggaaggcctcctggcgccgcaccggcccaaggagcccgcgtggttcctggccaccgtcggcgtctcgcccgaccaccagggcaagggtctgggcagcgccgtcgtgctccccggagtggaggcggccgagcgcgccggggtgcccgccttcctggagacctccgcgccccgcaacctccccttctacgagcggctcggcttcaccgtcaccgccgacgtcgaggtgcccgaaggaccgcgcacctggtgcatgacccgcaagcccggtgcctga

SEQ ID NO: 4216 - DNA, 3483 bp, Artificial Sequence
  Synthetic Polynucloetide
atggccttaccagtgaccgccttgctcctgccgctggccttgctgctccacgccgccaggccggacatccagatgacacagagccctagcagcctgtctgccagcgtgggagacagagtgaccatcacatgcaaggccagcgaccacatcaacaactggctggcctggtatcagcagaagcctggacaggcccctaagctgctgatctacggcgctaccacactggaaacaggcgtgcccagcagattttctggcagcggctctggcaccgactacaccctgacaatatccagcctccagcctgaggacttcgccacctactactgtcagcagagctggaacaccccttggacattcggccagggcaccaagctggaaatcaagagactcgaggacctgaagaacgtgttcccacctgaggtggccgtgttcgagcctagcaaggccgagatcgcccacacccagaaagccaccctcgtgtgcctggctaccggcttctaccccgaccatgtggaactgtcttggtgggtcaacggcaaagaggtgcacagcggcgtgtgtaccgacccccagccactgaaagaacagcccgccctgaacgacagccggtactgcctgagcagcagactgagagtgtccgccaccttctggcagaacccccggaaccacttcagatgccaggtgcagttctacggcctgagcgagaacgacgagtggacccaggacagagccaagcccgtgacccagatcgtgtctgccgaagcctggggcagagccgattgcggcatcaccagcgccagctaccaccagggcgtgctgagcgccaccatcctgtacgagatcctgctgggcaaggccaccctgtacgccgtgctggtgtctgccctggtgctgatggctatggtcaagcggaaggacagccggggaagggccaagcgatctggatctggagcaacaaacttctcactactcaaacaagcaggtgacgtggaggagaatcccgggcctactagtatggactggatttggcgcatccttttccttgtcggcgctgctaccggcgcccattccgggcccctgttcaatcaagaggtgcagatccctctgaccgagagctactgtggcccctgtcctaagaactggatctgctacaagaacaactgctaccagttcttcgacgagagcaagaattggtacgagagccaggccagctgcatgagccagaatgccagcctgctgaaggtgtacagcaaagaggaccaggacctgctgaaactggtcaagagctaccactggatgggccttgtgcacatccccaccaatggctcttggcagtgggaggacggcagcattctgagccctaacctgctgaccatcatcgagatgcagaagggcgactgcgccctgtacgccagcagctttaagggctacatcgagaattgcagcaccccgaacacctacatctgtatgcagagaaccgttggcggaggcggaagtggaggcggaggatctggcggcggaggctctgacctctttaatcaagaagtccagattccactcaccgaatcctactgcggaccttgtccaaaaaattggatttgttataagaacaactgttatcaattctttgatgagtctaaaaattggtatgagtcccaggcttcctgcatgtctcagaacgcttctctgctgaaagtctactctaaagaagatcaggatctcctgaagctcgtcaagtcttatcattggatggggctcgtccacattcctaccaacggaagctggcaatgggaagatggctccatcctgtctccaaatctgctcacgattattgaaatgcagaaaggggattgtgctctctacgccagctccttcaagggatatattgagaactgtagcacgcccaatacttatatctgtatgcaacggaccgtgggatccggcggcggaggatctggcggaggcggatctgggggcggaggctctttcgaacaagttcagcttcaacagcctggcgctgagctggtcaaacctggcgcttctgtgaagatgagctgcaaagccagcggctacgccttcagcagctactggatcaactggatgaagcagaaacccggccagggactcgaatggatcggccaaatctatcccggcgacggcgacaccaactacaacggcaagttcaagggcagagccacactgaccgccgatacctctagcagcacagcctacatgcagctgagcagcctgaccagcgaagatagcgccgtgtacttctgtgcccggtccatcacaacagtcgtgggctgcgctatggactattggggccagggaacaagcgtgaccgtgtctagtacgcgtatccagaaccctgatcctgccgtgtaccagctgcgggatagcaagagcagcgacaagagcgtgtgtctgttcaccgacttcgacagccagaccaacgtgtcccagagcaaggactccgacgtgtacatcaccgataagtgcgtgctggacatgcggagcatggacttcaagagcaactccgccgtggcctggtccaacaagtccgatttcgcctgcgccaacgccttcaacaacagcattatccccgaggacacattcttcccaagcagcgacgtgccctgcgacgtgaagctggtggaaaagagcttcgagacagacaccaacctgaacttccagaacctgagcgtgatcggcttcagaatcctgctgctgaaagtggccggctttaacctgctgatgaccctgcggctgtggtccagccgcgccaagagaagcggatctggcgtgaagcagaccctgaatttcgacctgctgaagctggctggcgacgtggaatccaacccaggcccttctagaggccatatgaccgagtacaagcccacggtgcgcctcgccacccgcgacgacgtccccagggccgtacgcaccctcgccgccgcgttcgccgactaccccgccacgcgccacaccgtcgatccggaccgccacatcgagcgggtcaccgagctgcaagaactcttcctcacgcgcgtcgggctcgacatcggcaaggtgtgggtcgcggacgacggcgccgcggtggcggtctggaccacgccggagagcgtcgaagcgggggcggtgttcgccgagatcggcccgcgcatggccgagttgagcggttcccggctggccgcgcagcaacagatggaaggcctcctggcgccgcaccggcccaaggagcccgcgtggttcctggccaccgtcggcgtctcgcccgaccaccagggcaagggtctgggcagcgccgtcgtgctccccggagtggaggcggccgagcgcgccggggtgcccgccttcctggagacctccgcgccccgcaacctccccttctacgagcggctcggcttcaccgtcaccgccgacgtcgaggtgcccgaaggaccgcgcacctggtgcatgacccgcaagcccggtgcctga

SEQ ID NO: 4217 - DNA, 3477 bp, Artificial Sequence
  Synthetic Polynucloetide
atggccttaccagtgaccgccttgctcctgccgctggccttgctgctccacgccgccaggccggacatccagatgacacagagccctagcagcctgtctgccagcgtgggagacagagtgaccatcacatgcaaggccagcgaccacatcaacaactggctggcctggtatcagcagaagcctggacaggcccctaagctgctgatctacggcgctaccacactggaaacaggcgtgcccagcagattttctggcagcggctctggcaccgactacaccctgacaatatccagcctccagcctgaggacttcgccacctactactgtcagcagagctggaacaccccttggacattcggccagggcaccaagctggaaatcaagagactcgaggacctgaagaacgtgttcccacctgaggtggccgtgttcgagcctagcgaggccgagatcagccacacccagaaagccaccctcgtgtgcctggctaccggcttctaccccgaccatgtggaactgtcttggtgggtcaacggcaaagaggtgcacagcggcgtgtgtaccgacccccagccactgaaagaacagcccgccctgaacgacagccggtactgcctgagcagcagactgagagtgtccgccaccttctggcagaacccccggaaccacttcagatgccaggtgcagttctacggcctgagcgagaacgacgagtggacccaggacagagccaagcccgtgacccagatcgtgtctgccgaagcctggggcagagccgattgcggctttaccagcgagagctaccagcagggcgtgctgagcgccaccatcctgtacgagatcctgctgggcaaggccaccctgtacgccgtgctggtgtctgccctggtgctgatggctatggtcaagcggaaggacagccggggaagggccaagcgatctggatctggagcaacaaacttctcactactcaaacaagcaggtgacgtggaggagaatcccgggcctactagtatggactggatttggcgcatccttttccttgtcggcgctgctaccggcgcccattccctgttcaatcaagaggtgcagatccctctgaccgagagctactgtggcccctgtcctaagaactggatctgctacaagaacaactgctaccagttcttcgacgagagcaagaattggtacgagagccaggccagctgcatgagccagaatgccagcctgctgaaggtgtacagcaaagaggaccaggacctgctgaaactggtcaagagctaccactggatgggccttgtgcacatccccaccaatggctcttggcagtgggaggacggcagcattctgagccctaacctgctgaccatcatcgagatgcagaagggcgactgcgccctgtacgccagcagctttaagggctacatcgagaattgcagcaccccgaacacctacatctgtatgcagagaaccgttggcggaggcggaagtggaggcggaggatctggcggcggaggctctgacctctttaatcaagaagtccagattccactcaccgaatcctactgcggaccttgtccaaaaaattggatttgttataagaacaactgttatcaattctttgatgagtctaaaaattggtatgagtcccaggcttcctgcatgtctcagaacgcttctctgctgaaagtctactctaaagaagatcaggatctcctgaagctcgtcaagtcttatcattggatggggctcgtccacattcctaccaacggaagctggcaatgggaagatggctccatcctgtctccaaatctgctcacgattattgaaatgcagaaaggggattgtgctctctacgccagctccttcaagggatatattgagaactgtagcacgcccaatacttatatctgtatgcaacggaccgtgggatccggcggcggaggatctggcggaggcggatctgggggcggaggctctttcgaacaagttcagcttcaacagcctggcgctgagctggtcaaacctggcgcttctgtgaagatgagctgcaaagccagcggctacgccttcagcagctactggatcaactggatgaagcagaaacccggccagggactcgaatggatcggccaaatctatcccggcgacggcgacaccaactacaacggcaagttcaagggcagagccacactgaccgccgatacctctagcagcacagcctacatgcagctgagcagcctgaccagcgaagatagcgccgtgtacttctgtgcccggtccatcacaacagtcgtgggctgcgctatggactattggggccagggaacaagcgtgaccgtgtctagtacgcgtatccagaaccctgatcctgccgtgtaccagctgcgggatagcaagagcagcgacaagagcgtgtgtctgttcaccgacttcgacagccagaccaacgtgtcccagagcaaggactccgacgtgtacatcaccgataagtgcgtgctggacatgcggagcatggacttcaagagcaactccgccgtggcctggtccaacaagtccgatttcgcctgcgccaacgccttcaacaacagcattatccccgaggacacattcttcccaagccccgagagcagctgcgacgtgaagctggtggaaaagagcttcgagacagacaccaacctgaacttccagaacctgagcgtgatcggcttcagaatcctgctgctgaaagtggccggctttaacctgctgatgaccctgcggctgtggtccagccgcgccaagagaagcggatctggcgtgaagcagaccctgaatttcgacctgctgaagctggctggcgacgtggaatccaacccaggcccttctagaggccatatgaccgagtacaagcccacggtgcgcctcgccacccgcgacgacgtccccagggccgtacgcaccctcgccgccgcgttcgccgactaccccgccacgcgccacaccgtcgatccggaccgccacatcgagcgggtcaccgagctgcaagaactcttcctcacgcgcgtcgggctcgacatcggcaaggtgtgggtcgcggacgacggcgccgcggtggcggtctggaccacgccggagagcgtcgaagcgggggcggtgttcgccgagatcggcccgcgcatggccgagttgagcggttcccggctggccgcgcagcaacagatggaaggcctcctggcgccgcaccggcccaaggagcccgcgtggttcctggccaccgtcggcgtctcgcccgaccaccagggcaagggtctgggcagcgccgtcgtgctccccggagtggaggcggccgagcgcgccggggtgcccgccttcctggagacctccgcgccccgcaacctccccttctacgagcggctcggcttcaccgtcaccgccgacgtcgaggtgcccgaaggaccgcgcacctggtgcatgacccgcaagcccggtgcctga

SEQ ID NO: 4218 - DNA, 2781 bp, Artificial Sequence
  Synthetic Polynucloetide
atggccttaccagtgaccgccttgctcctgccgctggccttgctgctccacgccgccaggccggacatccagatgacacagagccctagcagcctgtctgccagcgtgggagacagagtgaccatcacatgcaaggccagcgaccacatcaacaactggctggcctggtatcagcagaagcctggacaggcccctaagctgctgatctacggcgctaccacactggaaacaggcgtgcccagcagattttctggcagcggctctggcaccgactacaccctgacaatatccagcctccagcctgaggacttcgccacctactactgtcagcagagctggaacaccccttggacattcggccagggcaccaagctggaaatcaagagactcgaggacctgaagaacgtgttcccacctgaggtggccgtgttcgagcctagcgaggccgagatcagccacacccagaaagccaccctcgtgtgcctggctaccggcttctaccccgaccatgtggaactgtcttggtgggtcaacggcaaagaggtgcacagcggcgtgtgtaccgacccccagccactgaaagaacagcccgccctgaacgacagccggtactgcctgagcagcagactgagagtgtccgccaccttctggcagaacccccggaaccacttcagatgccaggtgcagttctacggcctgagcgagaacgacgagtggacccaggacagagccaagcccgtgacccagatcgtgtctgccgaagcctggggcagagccgattgcggctttaccagcgagagctaccagcagggcgtgctgagcgccaccatcctgtacgagatcctgctgggcaaggccaccctgtacgccgtgctggtgtctgccctggtgctgatggctatggtcaagcggaaggacagccggggaagggccaagcgatctggatctggagcaacaaacttctcactactcaaacaagcaggtgacgtggaggagaatcccgggcctactagtatggactggatttggcgcatccttttccttgtcggcgctgctaccggcgcccattccgggcccctgttcaatcaagaggtgcagatccctctgaccgagagctactgtggcccctgtcctaagaactggatctgctacaagaacaactgctaccagttcttcgacgagagcaagaattggtacgagagccaggccagctgcatgagccagaatgccagcctgctgaaggtgtacagcaaagaggaccaggacctgctgaaactggtcaagagctaccactggatgggccttgtgcacatccccaccaatggctcttggcagtgggaggacggcagcattctgagccctaacctgctgaccatcatcgagatgcagaagggcgactgcgccctgtacgccagcagctttaagggctacatcgagaattgcagcaccccgaacacctacatctgtatgcagagaaccgttggcggaggcggaagtggaggcggaggatctggcggcggaggctctgacctctttaatcaagaagtccagattccactcaccgaatcctactgcggaccttgtccaaaaaattggatttgttataagaacaactgttatcaattctttgatgagtctaaaaattggtatgagtcccaggcttcctgcatgtctcagaacgcttctctgctgaaagtctactctaaagaagatcaggatctcctgaagctcgtcaagtcttatcattggatggggctcgtccacattcctaccaacggaagctggcaatgggaagatggctccatcctgtctccaaatctgctcacgattattgaaatgcagaaaggggattgtgctctctacgccagctccttcaagggatatattgagaactgtagcacgcccaatacttatatctgtatgcaacggaccgtgggatccggcggcggaggatctggcggaggcggatctgggggcggaggctctttcgaacaagttcagcttcaacagcctggcgctgagctggtcaaacctggcgcttctgtgaagatgagctgcaaagccagcggctacgccttcagcagctactggatcaactggatgaagcagaaacccggccagggactcgaatggatcggccaaatctatcccggcgacggcgacaccaactacaacggcaagttcaagggcagagccacactgaccgccgatacctctagcagcacagcctacatgcagctgagcagcctgaccagcgaagatagcgccgtgtacttctgtgcccggtccatcacaacagtcgtgggctgcgctatggactattggggccagggaacaagcgtgaccgtgtctagtacgcgtatccagaaccctgatcctgccgtgtaccagctgcgggatagcaagagcagcgacaagagcgtgtgtctgttcaccgacttcgacagccagaccaacgtgtcccagagcaaggactccgacgtgtacatcaccgataagtgcgtgctggacatgcggagcatggacttcaagagcaactccgccgtggcctggtccaacaagtccgatttcgcctgcgccaacgccttcaacaacagcattatccccgaggacacattcttcccaagccccgagagcagctgcgacgtgaagctggtggaaaagagcttcgagacagacaccaacctgaacttccagaacctgagcgtgatcggcttcagaatcctgctgctgaaagtggccggctttaacctgctgatgaccctgcggctgtggtccagc

SEQ ID NO: 4219 - DNA, 3456 bp, Artificial Sequence
  Synthetic Polynucloetide
atggccttaccagtgaccgccttgctcctgccgctggccttgctgctccacgccgccaggccggacatccagatgacacagagccctagcagcctgtctgccagcgtgggagacagagtgaccatcacatgcaaggccagcgaccacatcaacaactggctggcctggtatcagcagaagcctggacaggcccctaagctgctgatctacggcgctaccacactggaaacaggcgtgcccagcagattttctggcagcggctctggcaccgactacaccctgacaatatccagcctccagcctgaggacttcgccacctactactgtcagcagagctggaacaccccttggacattcggccagggcaccaagctggaaatcaagagactcgaggacctgaagaacgtgttcccacctgaggtggccgtgttcgagcctagcgaggccgagatcagccacacccagaaagccaccctcgtgtgcctggctaccggcttctaccccgaccatgtggaactgtcttggtgggtcaacggcaaagaggtgcacagcggcgtgtgtaccgacccccagccactgaaagaacagcccgccctgaacgacagccggtactgcctgagcagcagactgagagtgtccgccaccttctggcagaacccccggaaccacttcagatgccaggtgcagttctacggcctgagcgagaacgacgagtggacccaggacagagccaagcccgtgacccagatcgtgtctgccgaagcctggggcagagccgattgcggctttaccagcgagagctaccagcagggcgtgctgagcgccaccatcctgtacgagatcctgctgggcaaggccaccctgtacgccgtgctggtgtctgccctggtgctgatggctatggtcaagcggaaggacagccggggaagggccaagcgatctggatctggagcaacaaacttctcactactcaaacaagcaggtgacgtggaggagaatcccgggcctactagtatggactggatttggcgcatccttttccttgtcggcgctgctaccggcgcccattccgggcccctgttcaatcaagaggtgcagatccctctgaccgagagctactgtggcccctgtcctaagaactggatctgctacaagaacaactgctaccagttcttcgacgagagcaagaattggtacgagagccaggccagctgcatgagccagaatgccagcctgctgaaggtgtacagcaaagaggaccaggacctgctgaaactggtcaagagctaccactggatgggccttgtgcacatccccaccaatggctcttggcagtgggaggacggcagcattctgagccctaacctgctgaccatcatcgagatgcagaagggcgactgcgccctgtacgccagcagctttaagggctacatcgagaattgcagcaccccgaacacctacatctgtatgcagagaaccgttggcggaggcggaagtggaggcggaggatctggcggcggaggctctgacctctttaatcaagaagtccagattccactcaccgaatcctactgcggaccttgtccaaaaaattggatttgttataagaacaactgttatcaattctttgatgagtctaaaaattggtatgagtcccaggcttcctgcatgtctcagaacgcttctctgctgaaagtctactctaaagaagatcaggatctcctgaagctcgtcaagtcttatcattggatggggctcgtccacattcctaccaacggaagctggcaatgggaagatggctccatcctgtctccaaatctgctcacgattattgaaatgcagaaaggggattgtgctctctacgccagctccttcaagggatatattgagaactgtagcacgcccaatacttatatctgtatgcaacggaccgtgggatccggcggcggaggatctggcggaggcggatctgggggcggaggctctttcgaacaagttcagcttcaacagcctggcgctgagctggtcaaacctggcgcttctgtgaagatgagctgcaaagccagcggctacgccttcagcagctactggatcaactggatgaagcagaaacccggccagggactcgaatggatcggccaaatctatcccggcgacggcgacaccaactacaacggcaagttcaagggcagagccacactgaccgccgatacctctagcagcacagcctacatgcagctgagcagcctgaccagcgaagatagcgccgtgtacttctgtgcccggtccatcacaacagtcgtgggctgcgctatggactattggggccagggaacaagcgtgaccgtgtctagtacgcgtatccagaaccctgatcctgccgtgtaccagctgcgggatagcaagagcagcgacaagagcgtgtgtctgttcaccgacttcgacagccagaccaacgtgtcccagagcaaggactccgacgtgtacatcaccgataagtgcgtgctggacatgcggagcatggacttcaagagcaactccgccgtggcctggtccaacaagtccgatttcgcctgcgccaacgccttcaacaacagcattatccccgaggacacattcttcccaagccccgagagcagctgcgacgtgaagctggtggaaaagagcttcgagacagacaccaacctgaacttccagaacctgagcgtgatcggcttcagaatcctgctgctgaaagtggccggctttaacctgctgatgaccctgcggctgtggtccagccgcgccaagagaagcggatctggcgtgaagcagaccctgaatttcgacctgctgaagctggctggcgacgtggaatccaacccaggcccttctagaggcgggatccacaccatggctacctacgaggtgctgtgcgaggtggcaagaaagctgggcaccgacgacagagaagtggtgctgttcctgctgaacgtgttcatccctcagcctacactggcccagctgatcggtgcactgagagccctgaaagaggaaggccggctgacctttcctctgctggccgaatgcctgttcagagccggaagaagggatctgctgcgggacctgctgcatctggaccccagatttctggaaagacacctggccggcaccatgagctacttcagcccttaccagctgaccgtgctgcacgttgacggcgaactgtgcgccagagatattcggagcctgatcttcctgagcaaggacaccatcggcagccggtctacccctcagacatttctgcactgggtgtactgcatggaaaacctggacctgctcggccccacagatgtggatgccctgatgtccatgctgagaagcctgagcagagtggacctccagagacaggtgcagacactgatgggactgcacctgagcggacctagccacagccagcactacagacacacccct

SEQ ID NO: 4220 - DNA, 2793 bp, Artificial Sequence
  Synthetic Polynucloetide
atggccttaccagtgaccgccttgctcctgccgctggccttgctgctccacgccgccaggccggacatccagatgacacagagccctagcagcctgtctgccagcgtgggagacagagtgaccatcacatgcaaggccagcgaccacatcaacaactggctggcctggtatcagcagaagcctggacaggcccctaagctgctgatctacggcgctaccacactggaaacaggcgtgcccagcagattttctggcagcggctctggcaccgactacaccctgacaatatccagcctccagcctgaggacttcgccacctactactgtcagcagagctggaacaccccttggacattcggccagggcaccaagctggaaatcaagagactcgagatccagaaccctgatcctgccgtgtaccagctgcgggatagcaagagcagcgacaagagcgtgtgtctgttcaccgacttcgacagccagaccaacgtgtcccagagcaaggactccgacgtgtacatcaccgataagtgcgtgctggacatgcggagcatggacttcaagagcaactccgccgtggcctggtccaacaagtccgatttcgcctgcgccaacgccttcaacaacagcattatccccgaggacacattcttcccaagccccgagagcagctgcgacgtgaagctggtggaaaagagcttcgagacagacaccaacctgaacttccagaacctgagcgtgatcggcttcagaatcctgctgctgaaagtggccggctttaacctgctgatgaccctgcggctgtggtccagccgcgccaagagaagcggatctggcgtgaagcagaccctgaatttcgacctgctgaagctggctggcgacgtggaatccaacccaggccctactagtatggactggatttggcgcatccttttccttgtcggcgctgctaccggcgcccattccgggcccctgttcaatcaagaggtgcagatccctctgaccgagagctactgtggcccctgtcctaagaactggatctgctacaagaacaactgctaccagttcttcgacgagagcaagaattggtacgagagccaggccagctgcatgagccagaatgccagcctgctgaaggtgtacagcaaagaggaccaggacctgctgaaactggtcaagagctaccactggatgggccttgtgcacatccccaccaatggctcttggcagtgggaggacggcagcattctgagccctaacctgctgaccatcatcgagatgcagaagggcgactgcgccctgtacgccagcagctttaagggctacatcgagaattgcagcaccccgaacacctacatctgtatgcagagaaccgttggcggaggcggaagtggaggcggaggatctggcggcggaggctctgacctctttaatcaagaagtccagattccactcaccgaatcctactgcggaccttgtccaaaaaattggatttgttataagaacaactgttatcaattctttgatgagtctaaaaattggtatgagtcccaggcttcctgcatgtctcagaacgcttctctgctgaaagtctactctaaagaagatcaggatctcctgaagctcgtcaagtcttatcattggatggggctcgtccacattcctaccaacggaagctggcaatgggaagatggctccatcctgtctccaaatctgctcacgattattgaaatgcagaaaggggattgtgctctctacgccagctccttcaagggatatattgagaactgtagcacgcccaatacttatatctgtatgcaacggaccgtgggatccggcggcggaggatctggcggaggcggatctgggggcggaggctctttcgaacaagttcagcttcaacagcctggcgctgagctggtcaaacctggcgcttctgtgaagatgagctgcaaagccagcggctacgccttcagcagctactggatcaactggatgaagcagaaacccggccagggactcgaatggatcggccaaatctatcccggcgacggcgacaccaactacaacggcaagttcaagggcagagccacactgaccgccgatacctctagcagcacagcctacatgcagctgagcagcctgaccagcgaagatagcgccgtgtacttctgtgcccggtccatcacaacagtcgtgggctgcgctatggactattggggccagggaacaagcgtgaccgtgtctagtacgcgtgaggacctgaagaacgtgttcccacctgaggtggccgtgttcgagcctagcgaggccgagatcagccacacccagaaagccaccctcgtgtgcctggctaccggcttctaccccgaccatgtggaactgtcttggtgggtcaacggcaaagaggtgcacagcggcgtgtgtaccgacccccagccactgaaagaacagcccgccctgaacgacagccggtactgcctgagcagcagactgagagtgtccgccaccttctggcagaacccccggaaccacttcagatgccaggtgcagttctacggcctgagcgagaacgacgagtggacccaggacagagccaagcccgtgacccagatcgtgtctgccgaagcctggggcagagccgattgcggctttaccagcgagagctaccagcagggcgtgctgagcgccaccatcctgtacgagatcctgctgggcaaggccaccctgtacgccgtgctggtgtctgccctggtgctgatggctatggtcaagcggaaggacagccgggga

SEQ ID NO: 4221 - DNA, 3459 bp, Artificial Sequence
  Synthetic Polynucloetide
atggccttaccagtgaccgccttgctcctgccgctggccttgctgctccacgccgccaggccggacatccagatgacacagagccctagcagcctgtctgccagcgtgggagacagagtgaccatcacatgcaaggccagcgaccacatcaacaactggctggcctggtatcagcagaagcctggacaggcccctaagctgctgatctacggcgctaccacactggaaacaggcgtgcccagcagattttctggcagcggctctggcaccgactacaccctgacaatatccagcctccagcctgaggacttcgccacctactactgtcagcagagctggaacaccccttggacattcggccagggcaccaagctggaaatcaagagactcgagatccagaaccctgatcctgccgtgtaccagctgcgggatagcaagagcagcgacaagagcgtgtgtctgttcaccgacttcgacagccagaccaacgtgtcccagagcaaggactccgacgtgtacatcaccgataagtgcgtgctggacatgcggagcatggacttcaagagcaactccgccgtggcctggtccaacaagtccgatttcgcctgcgccaacgccttcaacaacagcattatccccgaggacacattcttcccaagccccgagagcagctgcgacgtgaagctggtggaaaagagcttcgagacagacaccaacctgaacttccagaacctgagcgtgatcggcttcagaatcctgctgctgaaagtggccggctttaacctgctgatgaccctgcggctgtggtccagccgcgccaagagaagcggatctggcgtgaagcagaccctgaatttcgacctgctgaagctggctggcgacgtggaatccaacccaggccctactagtatggactggatttggcgcatccttttccttgtcggcgctgctaccggcgcccattccgggcccctgttcaatcaagaggtgcagatccctctgaccgagagctactgtggcccctgtcctaagaactggatctgctacaagaacaactgctaccagttcttcgacgagagcaagaattggtacgagagccaggccagctgcatgagccagaatgccagcctgctgaaggtgtacagcaaagaggaccaggacctgctgaaactggtcaagagctaccactggatgggccttgtgcacatccccaccaatggctcttggcagtgggaggacggcagcattctgagccctaacctgctgaccatcatcgagatgcagaagggcgactgcgccctgtacgccagcagctttaagggctacatcgagaattgcagcaccccgaacacctacatctgtatgcagagaaccgttggcggaggcggaagtggaggcggaggatctggcggcggaggctctgacctctttaatcaagaagtccagattccactcaccgaatcctactgcggaccttgtccaaaaaattggatttgttataagaacaactgttatcaattctttgatgagtctaaaaattggtatgagtcccaggcttcctgcatgtctcagaacgcttctctgctgaaagtctactctaaagaagatcaggatctcctgaagctcgtcaagtcttatcattggatggggctcgtccacattcctaccaacggaagctggcaatgggaagatggctccatcctgtctccaaatctgctcacgattattgaaatgcagaaaggggattgtgctctctacgccagctccttcaagggatatattgagaactgtagcacgcccaatacttatatctgtatgcaacggaccgtgggatccggcggcggaggatctggcggaggcggatctgggggcggaggctctttcgaacaagttcagcttcaacagcctggcgctgagctggtcaaacctggcgcttctgtgaagatgagctgcaaagccagcggctacgccttcagcagctactggatcaactggatgaagcagaaacccggccagggactcgaatggatcggccaaatctatcccggcgacggcgacaccaactacaacggcaagttcaagggcagagccacactgaccgccgatacctctagcagcacagcctacatgcagctgagcagcctgaccagcgaagatagcgccgtgtacttctgtgcccggtccatcacaacagtcgtgggctgcgctatggactattggggccagggaacaagcgtgaccgtgtctagtacgcgtgaggacctgaagaacgtgttcccacctgaggtggccgtgttcgagcctagcgaggccgagatcagccacacccagaaagccaccctcgtgtgcctggctaccggcttctaccccgaccatgtggaactgtcttggtgggtcaacggcaaagaggtgcacagcggcgtgtgtaccgacccccagccactgaaagaacagcccgccctgaacgacagccggtactgcctgagcagcagactgagagtgtccgccaccttctggcagaacccccggaaccacttcagatgccaggtgcagttctacggcctgagcgagaacgacgagtggacccaggacagagccaagcccgtgacccagatcgtgtctgccgaagcctggggcagagccgattgcggctttaccagcgagagctaccagcagggcgtgctgagcgccaccatcctgtacgagatcctgctgggcaaggccaccctgtacgccgtgctggtgtctgccctggtgctgatggctatggtcaagcggaaggacagccggggaagggccaagcgatctggatctggagcaacaaacttctcactactcaaacaagcaggtgacgtggaggagaatcccgggccttctagaggcgggatccacaccatggctacctacgaggtgctgtgcgaggtggcaagaaagctgggcaccgacgacagagaagtggtgctgttcctgctgaacgtgttcatccctcagcctacactggcccagctgatcggtgcactgagagccctgaaagaggaaggccggctgacctttcctctgctggccgaatgcctgttcagagccggaagaagggatctgctgcgggacctgctgcatctggaccccagatttctggaaagacacctggccggcaccatgagctacttcagcccttaccagctgaccgtgctgcacgttgacggcgaactgtgcgccagagatattcggagcctgatcttcctgagcaaggacaccatcggcagccggtctacccctcagacatttctgcactgggtgtactgcatggaaaacctggacctgctcggccccacagatgtggatgccctgatgtccatgctgagaagcctgagcagagtggacctccagagacaggtgcagacactgatgggactgcacctgagcggacctagccacagccagcactacagacacacccct

SEQ ID NO: 4222 - DNA, 3483 bp, Artificial Sequence
  Synthetic Polynucloetide
atggccttaccagtgaccgccttgctcctgccgctggccttgctgctccacgccgccaggccggacatccagatgacacagagccctagcagcctgtctgccagcgtgggagacagagtgaccatcacatgcaaggccagcgaccacatcaacaactggctggcctggtatcagcagaagcctggacaggcccctaagctgctgatctacggcgctaccacactggaaacaggcgtgcccagcagattttctggcagcggctctggcaccgactacaccctgacaatatccagcctccagcctgaggacttcgccacctactactgtcagcagagctggaacaccccttggacattcggccagggcaccaagctggaaatcaagagactcgaggacctgaagaacgtgttcccacctgaggtggccgtgttcgagcctagcgaggccgagatcagccacacccagaaagccaccctcgtgtgcctggctaccggcttctaccccgaccatgtggaactgtcttggtgggtcaacggcaaagaggtgcacagcggcgtgtctaccgacccccagccactgaaagaacagcccgccctgaacgacagccggtactgcctgagcagcagactgagagtgtccgccaccttctggcagaacccccggaaccacttcagatgccaggtgcagttctacggcctgagcgagaacgacgagtggacccaggacagagccaagcccgtgacccagatcgtgtctgccgaagcctggggcagagccgattgcggctttaccagcgagagctaccagcagggcgtgctgagcgccaccatcctgtacgagatcctgctgggcaaggccaccctgtacgccgtgctggtgtctgccctggtgctgatggctatggtcaagcggaaggacagccggggaagggccaagcgatctggatctggagcaacaaacttctcactactcaaacaagcaggtgacgtggaggagaatcccgggcctactagtatggactggatttggcgcatccttttccttgtcggcgctgctaccggcgcccattccgggcccctgttcaatcaagaggtgcagatccctctgaccgagagctactgtggcccctgtcctaagaactggatctgctacaagaacaactgctaccagttcttcgacgagagcaagaattggtacgagagccaggccagctgcatgagccagaatgccagcctgctgaaggtgtacagcaaagaggaccaggacctgctgaaactggtcaagagctaccactggatgggccttgtgcacatccccaccaatggctcttggcagtgggaggacggcagcattctgagccctaacctgctgaccatcatcgagatgcagaagggcgactgcgccctgtacgccagcagctttaagggctacatcgagaattgcagcaccccgaacacctacatctgtatgcagagaaccgttggcggaggcggaagtggaggcggaggatctggcggcggaggctctgacctctttaatcaagaagtccagattccactcaccgaatcctactgcggaccttgtccaaaaaattggatttgttataagaacaactgttatcaattctttgatgagtctaaaaattggtatgagtcccaggcttcctgcatgtctcagaacgcttctctgctgaaagtctactctaaagaagatcaggatctcctgaagctcgtcaagtcttatcattggatggggctcgtccacattcctaccaacggaagctggcaatgggaagatggctccatcctgtctccaaatctgctcacgattattgaaatgcagaaaggggattgtgctctctacgccagctccttcaagggatatattgagaactgtagcacgcccaatacttatatctgtatgcaacggaccgtgggatccggcggcggaggatctggcggaggcggatctgggggcggaggctctttcgaacaagttcagcttcaacagcctggcgctgagctggtcaaacctggcgcttctgtgaagatgagctgcaaagccagcggctacgccttcagcagctactggatcaactggatgaagcagaaacccggccagggactcgaatggatcggccaaatctatcccggcgacggcgacaccaactacaacggcaagttcaagggcagagccacactgaccgccgatacctctagcagcacagcctacatgcagctgagcagcctgaccagcgaagatagcgccgtgtacttctgtgcccggtccatcacaacagtcgtgggctgcgctatggactattggggccagggaacaagcgtgaccgtgtctagtacgcgtatccagaaccctgatcctgccgtgtaccagctgcgggatagcaagagcagcgacaagagcgtgtgtctgttcaccgacttcgacagccagaccaacgtgtcccagagcaaggactccgacgtgtacatcaccgataagaccgtgctggacatgcggagcatggacttcaagagcaactccgccgtggcctggtccaacaagtccgatttcgcctgcgccaacgccttcaacaacagcattatccccgaggacacattcttcccaagccccgagagcagctgcgacgtgaagctggtggaaaagagcttcgagacagacaccaacctgaacttccagaacctgagcgtgatcggcttcagaatcctgctgctgaaagtggccggctttaacctgctgatgaccctgcggctgtggtccagccgcgccaagagaagcggatctggcgtgaagcagaccctgaatttcgacctgctgaagctggctggcgacgtggaatccaacccaggcccttctagaggccatatgaccgagtacaagcccacggtgcgcctcgccacccgcgacgacgtccccagggccgtacgcaccctcgccgccgcgttcgccgactaccccgccacgcgccacaccgtcgatccggaccgccacatcgagcgggtcaccgagctgcaagaactcttcctcacgcgcgtcgggctcgacatcggcaaggtgtgggtcgcggacgacggcgccgcggtggcggtctggaccacgccggagagcgtcgaagcgggggcggtgttcgccgagatcggcccgcgcatggccgagttgagcggttcccggctggccgcgcagcaacagatggaaggcctcctggcgccgcaccggcccaaggagcccgcgtggttcctggccaccgtcggcgtctcgcccgaccaccagggcaagggtctgggcagcgccgtcgtgctccccggagtggaggcggccgagcgcgccggggtgcccgccttcctggagacctccgcgccccgcaacctccccttctacgagcggctcggcttcaccgtcaccgccgacgtcgaggtgcccgaaggaccgcgcacctggtgcatgacccgcaagcccggtgcctga

SEQ ID NO: 4223 - DNA, 3729 bp, Artificial Sequence
  Synthetic Polynucloetide
atggccttaccagtgaccgccttgctcctgccgctggccttgctgctccacgccgccaggccggacatccagatgacacagagccctagcagcctgtctgccagcgtgggagacagagtgaccatcacatgcaaggccagcgaccacatcaacaactggctggcctggtatcagcagaagcctggacaggcccctaagctgctgatctacggcgctaccacactggaaacaggcgtgcccagcagattttctggcagcggctctggcaccgactacaccctgacaatatccagcctccagcctgaggacttcgccacctactactgtcagcagagctggaacaccccttggacattcggccagggcaccaagctggaaatcaagagactcgaggacctgaagaacgtgttcccacctgaggtggccgtgttcgagcctagcgaggccgagatcagccacacccagaaagccaccctcgtgtgcctggctaccggcttctaccccgaccatgtggaactgtcttggtgggtcaacggcaaagaggtgcacagcggcgtgtctaccgacccccagccactgaaagaacagcccgccctgaacgacagccggtactgcctgagcagcagactgagagtgtccgccaccttctggcagaacccccggaaccacttcagatgccaggtgcagttctacggcctgagcgagaacgacgagtggacccaggacagagccaagcccgtgacccagatcgtgtctgccgaagcctggggcagagccgattgcggctttaccagcgagagctaccagcagggcgtgctgagcgccaccatcctgtacgagatcctgctgggcaaggccaccctgtacgccgtgctggtgtctgccctggtgctgatggctatggtcaagcggaaggacagccggggaagggccaagcgatctggatctggagcaacaaacttctcactactcaaacaagcaggtgacgtggaggagaatcccgggcctactagtatggactggatttggcgcatccttttccttgtcggcgctgctaccggcgcccattccgggcccctgttcaatcaagaggtgcagatccctctgaccgagagctactgtggcccctgtcctaagaactggatctgctacaagaacaactgctaccagttcttcgacgagagcaagaattggtacgagagccaggccagctgcatgagccagaatgccagcctgctgaaggtgtacagcaaagaggaccaggacctgctgaaactggtcaagagctaccactggatgggccttgtgcacatccccaccaatggctcttggcagtgggaggacggcagcattctgagccctaacctgctgaccatcatcgagatgcagaagggcgactgcgccctgtacgccagcagctttaagggctacatcgagaattgcagcaccccgaacacctacatctgtatgcagagaaccgttggcggaggcggaagtggaggcggaggatctggcggcggaggctctgacctctttaatcaagaagtccagattccactcaccgaatcctactgcggaccttgtccaaaaaattggatttgttataagaacaactgttatcaattctttgatgagtctaaaaattggtatgagtcccaggcttcctgcatgtctcagaacgcttctctgctgaaagtctactctaaagaagatcaggatctcctgaagctcgtcaagtcttatcattggatggggctcgtccacattcctaccaacggaagctggcaatgggaagatggctccatcctgtctccaaatctgctcacgattattgaaatgcagaaaggggattgtgctctctacgccagctccttcaagggatatattgagaactgtagcacgcccaatacttatatctgtatgcaacggaccgtgggatccggcggcggaggatctggcggaggcggatctgggggcggaggctctttcgaacaagttcagcttcaacagcctggcgctgagctggtcaaacctggcgcttctgtgaagatgagctgcaaagccagcggctacgccttcagcagctactggatcaactggatgaagcagaaacccggccagggactcgaatggatcggccaaatctatcccggcgacggcgacaccaactacaacggcaagttcaagggcagagccacactgaccgccgatacctctagcagcacagcctacatgcagctgagcagcctgaccagcgaagatagcgccgtgtacttctgtgcccggtccatcacaacagtcgtgggctgcgctatggactattggggccagggaacaagcgtgaccgtgtctagtacgcgtgagcagaaactgatctcggaagaggatgggagcggcaccccattcccttctctggcccctcccatcatgctgctggtggacggcaagcagcagatggtggtcgtgtgcctggtgctggatgtggccccacctggactggacagccccatctggtttagcgccggcaatggctctgccctggacgcctttacctacggcccaagccctgccaccgatggcacctggacaaatctggcccacctgagcctgcccagcgaggaactggcttcttgggagcctctcgtgtgccacacaggacctggcgctgagggacacagcagatccacccagcctatgcacctgtctggcgaggccagcaccgccagaacctgtcctcaggaacctctgagaggcacccctggcggagcactgtggctgggagtgctgagactgctgctgttcaagctgctgctgtttgacctgctgctgacctgctcctgtctgtgcgatcctgccggccctctgccttctcctgccaccaccacaagactgagagccctgggcagccacagactgcaccctgccacagagacaggcggcagagaggccacaagcagccctagaccccagcccagagacagaagatggggcgataccccccctggcagaaagcctggatctccagtccgcgccaagagaagcggatctggcgtgaagcagaccctgaatttcgacctgctgaagctggctggcgacgtggaatccaacccaggcccttctagaggccatatgaccgagtacaagcccacggtgcgcctcgccacccgcgacgacgtccccagggccgtacgcaccctcgccgccgcgttcgccgactaccccgccacgcgccacaccgtcgatccggaccgccacatcgagcgggtcaccgagctgcaagaactcttcctcacgcgcgtcgggctcgacatcggcaaggtgtgggtcgcggacgacggcgccgcggtggcggtctggaccacgccggagagcgtcgaagcgggggcggtgttcgccgagatcggcccgcgcatggccgagttgagcggttcccggctggccgcgcagcaacagatggaaggcctcctggcgccgcaccggcccaaggagcccgcgtggttcctggccaccgtcggcgtctcgcccgaccaccagggcaagggtctgggcagcgccgtcgtgctccccggagtggaggcggccgagcgcgccggggtgcccgccttcctggagacctccgcgccccgcaacctccccttctacgagcggctcggcttcaccgtcaccgccgacgtcgaggtgcccgaaggaccgcgcacctggtgcatgacccgcaagcccggtgcctga

SEQ ID NO: 4224 - DNA, 3594 bp, Artificial Sequence
  Synthetic Polynucloetide
atggccttaccagtgaccgccttgctcctgccgctggccttgctgctccacgccgccaggccggacatccagatgacacagagccctagcagcctgtctgccagcgtgggagacagagtgaccatcacatgcaaggccagcgaccacatcaacaactggctggcctggtatcagcagaagcctggacaggcccctaagctgctgatctacggcgctaccacactggaaacaggcgtgcccagcagattttctggcagcggctctggcaccgactacaccctgacaatatccagcctccagcctgaggacttcgccacctactactgtcagcagagctggaacaccccttggacattcggccagggcaccaagctggaaatcaagagactcgaggggaaaccaattcccaaccctcttctgggactggattcaaccggcagcggcgacaagcagctggacgccgacgtgtcccccaagcctaccatcttcctgccctctatcgccgagacaaagctccagaaggccggcacctacctgtgcctgctggaaaagttcttcccagatgtgattaagatccactggcaggaaaagaagtccaacaccatcctgggcagccaggaaggcaacaccatgaagaccaacgacacctacatgaagttcagctggctgaccgtgcccgagaagtccctggacaaagaacacagatgcatcgtgcggcacgaaaacaacaagaacggcgtggaccaggaaatcatcttcccacccatcaagaccgatgtgattacaatggaccccaaggacaactgctccaaggacgccaacgataccctgctgctccagctgaccaacaccagcgcctactacatgtacttgttgctgctgctgaagtccgtggtgtacttcgccatcatcacatgctgcctgctgcggagaaccgccttctgctgcaacggcgagaagtctagggccaagcgatctggatctggagcaacaaacttctcactactcaaacaagcaggtgacgtggaggagaatcccgggcctactagtatggactggatttggcgcatccttttccttgtcggcgctgctaccggcgcccattccgggcccctgttcaatcaagaggtgcagatccctctgaccgagagctactgtggcccctgtcctaagaactggatctgctacaagaacaactgctaccagttcttcgacgagagcaagaattggtacgagagccaggccagctgcatgagccagaatgccagcctgctgaaggtgtacagcaaagaggaccaggacctgctgaaactggtcaagagctaccactggatgggccttgtgcacatccccaccaatggctcttggcagtgggaggacggcagcattctgagccctaacctgctgaccatcatcgagatgcagaagggcgactgcgccctgtacgccagcagctttaagggctacatcgagaattgcagcaccccgaacacctacatctgtatgcagagaaccgttggcggaggcggaagtggaggcggaggatctggcggcggaggctctgacctctttaatcaagaagtccagattccactcaccgaatcctactgcggaccttgtccaaaaaattggatttgttataagaacaactgttatcaattctttgatgagtctaaaaattggtatgagtcccaggcttcctgcatgtctcagaacgcttctctgctgaaagtctactctaaagaagatcaggatctcctgaagctcgtcaagtcttatcattggatggggctcgtccacattcctaccaacggaagctggcaatgggaagatggctccatcctgtctccaaatctgctcacgattattgaaatgcagaaaggggattgtgctctctacgccagctccttcaagggatatattgagaactgtagcacgcccaatacttatatctgtatgcaacggaccgtgggatccggcggcggaggatctggcggaggcggatctgggggcggaggctctttcgaacaagttcagcttcaacagcctggcgctgagctggtcaaacctggcgcttctgtgaagatgagctgcaaagccagcggctacgccttcagcagctactggatcaactggatgaagcagaaacccggccagggactcgaatggatcggccaaatctatcccggcgacggcgacaccaactacaacggcaagttcaagggcagagccacactgaccgccgatacctctagcagcacagcctacatgcagctgagcagcctgaccagcgaagatagcgccgtgtacttctgtgcccggtccatcacaacagtcgtgggctgcgctatggactattggggccagggaacaagcgtgaccgtgtctagtacgcgtgagcagaaactgatctcggaagaggatgggagcggcagccagcctcacaccaagcccagcgtgttcgtgatgaagaacggcaccaacgtggcctgcctcgtgaaagagttctaccccaaggacatcaggatcaacctggtgtccagcaagaagatcaccgagttcgaccccgccatcgtgatctcccccagcggcaagtacaacgccgtgaagctggggaagtacgaggacagcaacagcgtgacctgctccgtgcagcacgacaacaagaccgtgcacagcaccgactttgaagtgaaaaccgactccaccgaccacgtgaagcccaaagagacagagaacaccaagcagcccagcaagagctgccacaagcccaaggccatcgtgcacaccgagaaagtgaacatgatgagcctgaccgtgctgggcctgcggatgctgttcgccaaaaccgtggccgtgaacttcctgctgaccgccaagctgttcttcctccgcgccaagagaagcggatctggcgtgaagcagaccctgaatttcgacctgctgaagctggctggcgacgtggaatccaacccaggcccttctagaggccatatgaccgagtacaagcccacggtgcgcctcgccacccgcgacgacgtccccagggccgtacgcaccctcgccgccgcgttcgccgactaccccgccacgcgccacaccgtcgatccggaccgccacatcgagcgggtcaccgagctgcaagaactcttcctcacgcgcgtcgggctcgacatcggcaaggtgtgggtcgcggacgacggcgccgcggtggcggtctggaccacgccggagagcgtcgaagcgggggcggtgttcgccgagatcggcccgcgcatggccgagttgagcggttcccggctggccgcgcagcaacagatggaaggcctcctggcgccgcaccggcccaaggagcccgcgtggttcctggccaccgtcggcgtctcgcccgaccaccagggcaagggtctgggcagcgccgtcgtgctccccggagtggaggcggccgagcgcgccggggtgcccgccttcctggagacctccgcgccccgcaacctccccttctacgagcggctcggcttcaccgtcaccgccgacgtcgaggtgcccgaaggaccgcgcacctggtgcatgacccgcaagcccggtgcctga

SEQ ID NO: 4225 - DNA, 2805 bp, Artificial Sequence
  Synthetic Polynucloetide
atggccttaccagtgaccgccttgctcctgccgctggccttgctgctccacgccgccaggccggacatccagatgacacagagccctagcagcctgtctgccagcgtgggagacagagtgaccatcacatgcaaggccagcgaccacatcaacaactggctggcctggtatcagcagaagcctggacaggcccctaagctgctgatctacggcgctaccacactggaaacaggcgtgcccagcagattttctggcagcggctctggcaccgactacaccctgacaatatccagcctccagcctgaggacttcgccacctactactgtcagcagagctggaacaccccttggacattcggccagggcaccaagctggaaatcaagagactcgagagccagcctcacaccaagcccagcgtgttcgtgatgaagaacggcaccaacgtggcctgcctcgtgaaagagttctaccccaaggacatcaggatcaacctggtgtccagcaagaagatcaccgagttcgaccccgccatcgtgatctcccccagcggcaagtacaacgccgtgaagctggggaagtacgaggacagcaacagcgtgacctgctccgtgcagcacgacaacaagaccgtgcacagcaccgactttgaagtgaaaaccgactccaccgaccacgtgaagcccaaagagacagagaacaccaagcagcccagcaagagctgccacaagcccaaggccatcgtgcacaccgagaaagtgaacatgatgagcctgaccgtgctgggcctgcggatgctgttcgccaaaaccgtggccgtgaacttcctgctgaccgccaagctgttcttcctcagggccaagcgatctggatctggagcaacaaacttctcactactcaaacaagcaggtgacgtggaggagaatcccgggcctactagtatggactggatttggcgcatccttttccttgtcggcgctgctaccggcgcccattccgggcccctgttcaatcaagaggtgcagatccctctgaccgagagctactgtggcccctgtcctaagaactggatctgctacaagaacaactgctaccagttcttcgacgagagcaagaattggtacgagagccaggccagctgcatgagccagaatgccagcctgctgaaggtgtacagcaaagaggaccaggacctgctgaaactggtcaagagctaccactggatgggccttgtgcacatccccaccaatggctcttggcagtgggaggacggcagcattctgagccctaacctgctgaccatcatcgagatgcagaagggcgactgcgccctgtacgccagcagctttaagggctacatcgagaattgcagcaccccgaacacctacatctgtatgcagagaaccgttggcggaggcggaagtggaggcggaggatctggcggcggaggctctgacctctttaatcaagaagtccagattccactcaccgaatcctactgcggaccttgtccaaaaaattggatttgttataagaacaactgttatcaattctttgatgagtctaaaaattggtatgagtcccaggcttcctgcatgtctcagaacgcttctctgctgaaagtctactctaaagaagatcaggatctcctgaagctcgtcaagtcttatcattggatggggctcgtccacattcctaccaacggaagctggcaatgggaagatggctccatcctgtctccaaatctgctcacgattattgaaatgcagaaaggggattgtgctctctacgccagctccttcaagggatatattgagaactgtagcacgcccaatacttatatctgtatgcaacggaccgtgggatccggcggcggaggatctggcggaggcggatctgggggcggaggctctttcgaacaagttcagcttcaacagcctggcgctgagctggtcaaacctggcgcttctgtgaagatgagctgcaaagccagcggctacgccttcagcagctactggatcaactggatgaagcagaaacccggccagggactcgaatggatcggccaaatctatcccggcgacggcgacaccaactacaacggcaagttcaagggcagagccacactgaccgccgatacctctagcagcacagcctacatgcagctgagcagcctgaccagcgaagatagcgccgtgtacttctgtgcccggtccatcacaacagtcgtgggctgcgctatggactattggggccagggaacaagcgtgaccgtgtctagtacgcgtgacaagcagctggacgccgacgtgtcccccaagcctaccatcttcctgccctctatcgccgagacaaagctccagaaggccggcacctacctgtgcctgctggaaaagttcttcccagatgtgattaagatccactggcaggaaaagaagtccaacaccatcctgggcagccaggaaggcaacaccatgaagaccaacgacacctacatgaagttcagctggctgaccgtgcccgagaagtccctggacaaagaacacagatgcatcgtgcggcacgaaaacaacaagaacggcgtggaccaggaaatcatcttcccacccatcaagaccgatgtgattacaatggaccccaaggacaactgctccaaggacgccaacgataccctgctgctccagctgaccaacaccagcgcctactacatgtacttgttgctgctgctgaagtccgtggtgtacttcgccatcatcacatgctgcctgctgcggagaaccgccttctgctgcaacggcgagaagtct

SEQ ID NO: 4226 - DNA, 4014 bp, Artificial Sequence
  Synthetic Polynucloetide
atggccttaccagtgaccgccttgctcctgccgctggccttgctgctccacgccgccaggccggacatccagatgacacagagccctagcagcctgtctgccagcgtgggagacagagtgaccatcacatgcaaggccagcgaccacatcaacaactggctggcctggtatcagcagaagcctggacaggcccctaagctgctgatctacggcgctaccacactggaaacaggcgtgcccagcagattttctggcagcggctctggcaccgactacaccctgacaatatccagcctccagcctgaggacttcgccacctactactgtcagcagagctggaacaccccttggacattcggccagggcaccaagctggaaatcaagagaggacagcctaaggccaatcctaccgtgacactgttccctccaagcagcgaagaactccaggccaacaaggccacacttgtgtgcctgatctccgacttctaccctggggctgtgacagtggcttggaaggccgatggatctcctgtgaaagccggcgtggaaaccaccaagccatccaagcagagcaacaacaaatacgccgccagctcctacctgagcctgacacctgagcagtggaagtcccacagatcctacagctgccaagtgacccacgaaggcagcaccgtggaaaagacagtggcccctacagagtgcagcggatcccagagcttcggcctgctggaccccaagctgtgctacctgctggatggcatcctgttcatctacggcgtgatcctgaccgccctgttcctgagagtgaagttcagcagaagcgccgacgcccctgcctaccagcagggacagaaccaactgtacaacgagctgaacctgggcagacgggaagagtacgacgtgctggacaagcggagaggcagggaccctgagatgggcggaaagccccagcggagaaagaacccccaggaaggactgtataacgaactccagaaagacaagatggccgaagcctacagcgagatcggcatgaagggcgagcggagaagaggcaagggccacgatggcctgtaccagggcctgagcaccgccaccaaggacacctatgacgccctgcacatgcaggccctgcctccaagaagggccaagcgatctggatctggagcaacaaacttctcactactcaaacaagcaggtgacgtggaggagaatcccgggcctactagtatggactggatttggcgcatccttttccttgtcggcgctgctaccggcgcccattccgggcccctgttcaatcaagaggtgcagatccctctgaccgagagctactgtggcccctgtcctaagaactggatctgctacaagaacaactgctaccagttcttcgacgagagcaagaattggtacgagagccaggccagctgcatgagccagaatgccagcctgctgaaggtgtacagcaaagaggaccaggacctgctgaaactggtcaagagctaccactggatgggccttgtgcacatccccaccaatggctcttggcagtgggaggacggcagcattctgagccctaacctgctgaccatcatcgagatgcagaagggcgactgcgccctgtacgccagcagctttaagggctacatcgagaattgcagcaccccgaacacctacatctgtatgcagagaaccgttggcggaggcggaagtggaggcggaggatctggcggcggaggctctgacctctttaatcaagaagtccagattccactcaccgaatcctactgcggaccttgtccaaaaaattggatttgttataagaacaactgttatcaattctttgatgagtctaaaaattggtatgagtcccaggcttcctgcatgtctcagaacgcttctctgctgaaagtctactctaaagaagatcaggatctcctgaagctcgtcaagtcttatcattggatggggctcgtccacattcctaccaacggaagctggcaatgggaagatggctccatcctgtctccaaatctgctcacgattattgaaatgcagaaaggggattgtgctctctacgccagctccttcaagggatatattgagaactgtagcacgcccaatacttatatctgtatgcaacggaccgtgggatccggcggcggaggatctggcggaggcggatctgggggcggaggctctttcgaacaagttcagcttcaacagcctggcgctgagctggtcaaacctggcgcttctgtgaagatgagctgcaaagccagcggctacgccttcagcagctactggatcaactggatgaagcagaaacccggccagggactcgaatggatcggccaaatctatcccggcgacggcgacaccaactacaacggcaagttcaagggcagagccacactgaccgccgatacctctagcagcacagcctacatgcagctgagcagcctgaccagcgaagatagcgccgtgtacttctgtgcccggtccatcacaacagtcgtgggctgcgctatggactattggggccagggaacaagcgtgaccgtgtctagtgcctctacaaagggaccctccgtgtttcctctggctcccagcagcaagtctacaagcggaggaacagccgctctgggctgcctggtcaaggattactttcccgagcctgtgaccgtgtcctggaatagcggagcactgacaagcggcgtgcacacctttccagccgtgctgcaaagcagcggcctgtactctctgagcagcgtggtcacagtgcctagctctagcctgggcacccagacctacatctgcaatgtgaaccacaagcctagcaacaccaaggtggacaagagagtggaacccaagagctgtggtacccagagttttgggttgttggaccctaaattgtgctatctgttggacggaatcctgttcatttacggagtgatcctgaccgcattgttcctgcgggttaagttttccagatccgcagacgcacccgcttaccaacaagggcagaaccaactctacaatgaacttaatttggggcggagggaagagtacgacgttctggacaaaaggaggggacgagatcccgagatgggcggaaagcctcagcgaaggaagaatccgcaagaggggctttataacgaactccagaaagataaaatggcagaagcctatagtgagattgggatgaagggagaaaggaggaggggtaaaggtcacgatgggttgtaccaaggattgagcacagccactaaagatacctatgatgcgctccacatgcaggccctgccgccaagacgcgccaagagaagcggatctggcgtgaagcagaccctgaatttcgacctgctgaagctggctggcgacgtggaatccaacccaggcccttctagaggccatatgaccgagtacaagcccacggtgcgcctcgccacccgcgacgacgtccccagggccgtacgcaccctcgccgccgcgttcgccgactaccccgccacgcgccacaccgtcgatccggaccgccacatcgagcgggtcaccgagctgcaagaactcttcctcacgcgcgtcgggctcgacatcggcaaggtgtgggtcgcggacgacggcgccgcggtggcggtctggaccacgccggagagcgtcgaagcgggggcggtgttcgccgagatcggcccgcgcatggccgagttgagcggttcccggctggccgcgcagcaacagatggaaggcctcctggcgccgcaccggcccaaggagcccgcgtggttcctggccaccgtcggcgtctcgcccgaccaccagggcaagggtctgggcagcgccgtcgtgctccccggagtggaggcggccgagcgcgccggggtgcccgccttcctggagacctccgcgccccgcaacctccccttctacgagcggctcggcttcaccgtcaccgccgacgtcgaggtgcccgaaggaccgcgcacctggtgcatgacccgcaagcccggtgcctga

SEQ ID NO: 4227 - DNA, 3369 bp, Artificial Sequence
  Synthetic Polynucloetide
atggccttaccagtgaccgccttgctcctgccgctggccttgctgctccacgccgccaggccggacatccagatgacacagagccctagcagcctgtctgccagcgtgggagacagagtgaccatcacatgcaaggccagcgaccacatcaacaactggctggcctggtatcagcagaagcctggacaggcccctaagctgctgatctacggcgctaccacactggaaacaggcgtgcccagcagattttctggcagcggctctggcaccgactacaccctgacaatatccagcctccagcctgaggacttcgccacctactactgtcagcagagctggaacaccccttggacattcggccagggcaccaagctggaaatcaagagactcgaggacctgaagaacgtgttcccacctgaggtggccgtgttcgagcctagcgaggccgagatcagccacacccagaaagccaccctcgtgtgcctggctaccggcttctaccccgaccatgtggaactgtcttggtgggtcaacggcaaagaggtgcacagcggcgtgtctaccgacccccagccactgaaagaacagcccgccctgaacgacagccggtactgcctgagcagcagactgagagtgtccgccaccttctggcagaacccccggaaccacttcagatgccaggtgcagttctacggcctgagcgagaacgacgagtggacccaggacagagccaagcccgtgacccagatcgtgtctgccgaagcctggggcagagccgattgcggatcccagagcttcggcctgctggaccccaagctgtgctacctgctggatggcatcctgttcatctacggcgtgatcctgaccgccctgttcctgagagtgaagttcagcagaagcgccgacgcccctgcctaccagcagggacagaaccaactgtacaacgagctgaacctgggcagacgggaagagtacgacgtgctggacaagcggagaggcagggaccctgagatgggcggaaagccccagcggagaaagaacccccaggaaggactgtataacgaactccagaaagacaagatggccgaagcctacagcgagatcggcatgaagggcgagcggagaagaggcaagggccacgatggcctgtaccagggcctgagcaccgccaccaaggacacctatgacgccctgcacatgcaggccctgcctccaagaagggccaagcgatctggatctggagcaacaaacttctcactactcaaacaagcaggtgacgtggaggagaatcccgggcctactagtatggactggatttggcgcatccttttccttgtcggcgctgctaccggcgcccattccgggcccctgttcaatcaagaggtgcagatccctctgaccgagagctactgtggcccctgtcctaagaactggatctgctacaagaacaactgctaccagttcttcgacgagagcaagaattggtacgagagccaggccagctgcatgagccagaatgccagcctgctgaaggtgtacagcaaagaggaccaggacctgctgaaactggtcaagagctaccactggatgggccttgtgcacatccccaccaatggctcttggcagtgggaggacggcagcattctgagccctaacctgctgaccatcatcgagatgcagaagggcgactgcgccctgtacgccagcagctttaagggctacatcgagaattgcagcaccccgaacacctacatctgtatgcagagaaccgttggcggaggcggaagtggaggcggaggatctggcggcggaggctctgacctctttaatcaagaagtccagattccactcaccgaatcctactgcggaccttgtccaaaaaattggatttgttataagaacaactgttatcaattctttgatgagtctaaaaattggtatgagtcccaggcttcctgcatgtctcagaacgcttctctgctgaaagtctactctaaagaagatcaggatctcctgaagctcgtcaagtcttatcattggatggggctcgtccacattcctaccaacggaagctggcaatgggaagatggctccatcctgtctccaaatctgctcacgattattgaaatgcagaaaggggattgtgctctctacgccagctccttcaagggatatattgagaactgtagcacgcccaatacttatatctgtatgcaacggaccgtgggatccggcggcggaggatctggcggaggcggatctgggggcggaggctctttcgaacaagttcagcttcaacagcctggcgctgagctggtcaaacctggcgcttctgtgaagatgagctgcaaagccagcggctacgccttcagcagctactggatcaactggatgaagcagaaacccggccagggactcgaatggatcggccaaatctatcccggcgacggcgacaccaactacaacggcaagttcaagggcagagccacactgaccgccgatacctctagcagcacagcctacatgcagctgagcagcctgaccagcgaagatagcgccgtgtacttctgtgcccggtccatcacaacagtcgtgggctgcgctatggactattggggccagggaacaagcgtgaccgtgtctagtacgcgtatccagaaccctgatcctgccgtgtaccagctgcgggatagcaagagcagcgacaagagcgtgtgtctgttcaccgacttcgacagccagaccaacgtgtcccagagcaaggactccgacgtgtacatcaccgataagaccgtgctggacatgcggagcatggacttcaagagcaactccgccgtggcctggtccaacaagtccgatttcgcctgcgccaacgccttcaacaacagcattatccccgaggacacattcttcccaagccccgagagcagctgcggtacccagagttttgggttgttggaccctaaattgtgctatctgttggacggaatcctgttcatttacggagtgatcctgaccgcattgttcctgcgggttaagttttccagatccgcagacgcacccgcttaccaacaagggcagaaccaactctacaatgaacttaatttggggcggagggaagagtacgacgttctggacaaaaggaggggacgagatcccgagatgggcggaaagcctcagcgaaggaagaatccgcaagaggggctttataacgaactccagaaagataaaatggcagaagcctatagtgagattgggatgaagggagaaaggaggaggggtaaaggtcacgatgggttgtaccaaggattgagcacagccactaaagatacctatgatgcgctccacatgcaggccctgccgccaaga

SEQ ID NO: 4228 - DNA, 3369 bp, Artificial Sequence
  Synthetic Polynucloetide
atggccttaccagtgaccgccttgctcctgccgctggccttgctgctccacgccgccaggccggacatccagatgacacagagccctagcagcctgtctgccagcgtgggagacagagtgaccatcacatgcaaggccagcgaccacatcaacaactggctggcctggtatcagcagaagcctggacaggcccctaagctgctgatctacggcgctaccacactggaaacaggcgtgcccagcagattttctggcagcggctctggcaccgactacaccctgacaatatccagcctccagcctgaggacttcgccacctactactgtcagcagagctggaacaccccttggacattcggccagggcaccaagctggaaatcaagagactcgaggacctgaagaacgtgttcccacctgaggtggccgtgttcgagcctagcaaggccgagatcgcccacacccagaaagccaccctcgtgtgcctggctaccggcttctaccccgaccatgtggaactgtcttggtgggtcaacggcaaagaggtgcacagcggcgtgtgtaccgacccccagccactgaaagaacagcccgccctgaacgacagccggtactgcctgagcagcagactgagagtgtccgccaccttctggcagaacccccggaaccacttcagatgccaggtgcagttctacggcctgagcgagaacgacgagtggacccaggacagagccaagcccgtgacccagatcgtgtctgccgaagcctggggcagagccgattgcggatcccagagcttcggcctgctggaccccaagctgtgctacctgctggatggcatcctgttcatctacggcgtgatcctgaccgccctgttcctgagagtgaagttcagcagaagcgccgacgcccctgcctaccagcagggacagaaccaactgtacaacgagctgaacctgggcagacgggaagagtacgacgtgctggacaagcggagaggcagggaccctgagatgggcggaaagccccagcggagaaagaacccccaggaaggactgtataacgaactccagaaagacaagatggccgaagcctacagcgagatcggcatgaagggcgagcggagaagaggcaagggccacgatggcctgtaccagggcctgagcaccgccaccaaggacacctatgacgccctgcacatgcaggccctgcctccaagaagggccaagcgatctggatctggagcaacaaacttctcactactcaaacaagcaggtgacgtggaggagaatcccgggcctactagtatggactggatttggcgcatccttttccttgtcggcgctgctaccggcgcccattccgggcccctgttcaatcaagaggtgcagatccctctgaccgagagctactgtggcccctgtcctaagaactggatctgctacaagaacaactgctaccagttcttcgacgagagcaagaattggtacgagagccaggccagctgcatgagccagaatgccagcctgctgaaggtgtacagcaaagaggaccaggacctgctgaaactggtcaagagctaccactggatgggccttgtgcacatccccaccaatggctcttggcagtgggaggacggcagcattctgagccctaacctgctgaccatcatcgagatgcagaagggcgactgcgccctgtacgccagcagctttaagggctacatcgagaattgcagcaccccgaacacctacatctgtatgcagagaaccgttggcggaggcggaagtggaggcggaggatctggcggcggaggctctgacctctttaatcaagaagtccagattccactcaccgaatcctactgcggaccttgtccaaaaaattggatttgttataagaacaactgttatcaattctttgatgagtctaaaaattggtatgagtcccaggcttcctgcatgtctcagaacgcttctctgctgaaagtctactctaaagaagatcaggatctcctgaagctcgtcaagtcttatcattggatggggctcgtccacattcctaccaacggaagctggcaatgggaagatggctccatcctgtctccaaatctgctcacgattattgaaatgcagaaaggggattgtgctctctacgccagctccttcaagggatatattgagaactgtagcacgcccaatacttatatctgtatgcaacggaccgtgggatccggcggcggaggatctggcggaggcggatctgggggcggaggctctttcgaacaagttcagcttcaacagcctggcgctgagctggtcaaacctggcgcttctgtgaagatgagctgcaaagccagcggctacgccttcagcagctactggatcaactggatgaagcagaaacccggccagggactcgaatggatcggccaaatctatcccggcgacggcgacaccaactacaacggcaagttcaagggcagagccacactgaccgccgatacctctagcagcacagcctacatgcagctgagcagcctgaccagcgaagatagcgccgtgtacttctgtgcccggtccatcacaacagtcgtgggctgcgctatggactattggggccagggaacaagcgtgaccgtgtctagtacgcgtatccagaaccctgatcctgccgtgtaccagctgcgggatagcaagagcagcgacaagagcgtgtgtctgttcaccgacttcgacagccagaccaacgtgtcccagagcaaggactccgacgtgtacatcaccgataagtgcgtgctggacatgcggagcatggacttcaagagcaactccgccgtggcctggtccaacaagtccgatttcgcctgcgccaacgccttcaacaacagcattatccccgaggacacattcttcccaagcagcgacgtgccctgcggtacccagagttttgggttgttggaccctaaattgtgctatctgttggacggaatcctgttcatttacggagtgatcctgaccgcattgttcctgcgggttaagttttccagatccgcagacgcacccgcttaccaacaagggcagaaccaactctacaatgaacttaatttggggcggagggaagagtacgacgttctggacaaaaggaggggacgagatcccgagatgggcggaaagcctcagcgaaggaagaatccgcaagaggggctttataacgaactccagaaagataaaatggcagaagcctatagtgagattgggatgaagggagaaaggaggaggggtaaaggtcacgatgggttgtaccaaggattgagcacagccactaaagatacctatgatgcgctccacatgcaggccctgccgccaaga

SEQ ID NO: 4229 - DNA, 3582 bp, Artificial Sequence
  Synthetic Polynucloetide
atggccttaccagtgaccgccttgctcctgccgctggccttgctgctccacgccgccaggccggacatccagatgacacagagccctagcagcctgtctgccagcgtgggagacagagtgaccatcacatgcaaggccagcgaccacatcaacaactggctggcctggtatcagcagaagcctggacaggcccctaagctgctgatctacggcgctaccacactggaaacaggcgtgcccagcagattttctggcagcggctctggcaccgactacaccctgacaatatccagcctccagcctgaggacttcgccacctactactgtcagcagagctggaacaccccttggacattcggccagggcaccaagctggaaatcaagagactcgaggggaaaccaattcccaaccctcttctgggactggattcaaccggcagcggcgaggacctgaagaacgtgttcccacctgaggtggccgtgttcgagcctagcgaggccgagatcagccacacccagaaagccaccctcgtgtgcctggctaccggcttctaccccgaccatgtggaactgtcttggtgggtcaacggcaaagaggtgcacagcggcgtgtctaccgacccccagccactgaaagaacagcccgccctgaacgacagccggtactgcctgagcagcagactgagagtgtccgccaccttctggcagaacccccggaaccacttcagatgccaggtgcagttctacggcctgagcgagaacgacgagtggacccaggacagagccaagcccgtgacccagatcgtgtctgccgaagcctggggcagagccgattgcggatcccagagcttcggcctgctggaccccaagctgtgctacctgctggatggcatcctgttcatctacggcgtgatcctgaccgccctgttcctgagagtgaagttcagcagaagcgccgacgcccctgcctaccagcagggacagaaccaactgtacaacgagctgaacctgggcagacgggaagagtacgacgtgctggacaagcggagaggcagggaccctgagatgggcggaaagccccagcggagaaagaacccccaggaaggactgtataacgaactccagaaagacaagatggccgaagcctacagcgagatcggcatgaagggcgagcggagaagaggcaagggccacgatggcctgtaccagggcctgagcaccgccaccaaggacacctatgacgccctgcacatgcaggccctgcctccaagaagggccaagcgatctggatctggagcaacaaacttctcactactcaaacaagcaggtgacgtggaggagaatcccgggcctactagtatggactggatttggcgcatccttttccttgtcggcgctgctaccggcgcccattccgggcccctgttcaatcaagaggtgcagatccctctgaccgagagctactgtggcccctgtcctaagaactggatctgctacaagaacaactgctaccagttcttcgacgagagcaagaattggtacgagagccaggccagctgcatgagccagaatgccagcctgctgaaggtgtacagcaaagaggaccaggacctgctgaaactggtcaagagctaccactggatgggccttgtgcacatccccaccaatggctcttggcagtgggaggacggcagcattctgagccctaacctgctgaccatcatcgagatgcagaagggcgactgcgccctgtacgccagcagctttaagggctacatcgagaattgcagcaccccgaacacctacatctgtatgcagagaaccgttggcggaggcggaagtggaggcggaggatctggcggcggaggctctgacctctttaatcaagaagtccagattccactcaccgaatcctactgcggaccttgtccaaaaaattggatttgttataagaacaactgttatcaattctttgatgagtctaaaaattggtatgagtcccaggcttcctgcatgtctcagaacgcttctctgctgaaagtctactctaaagaagatcaggatctcctgaagctcgtcaagtcttatcattggatggggctcgtccacattcctaccaacggaagctggcaatgggaagatggctccatcctgtctccaaatctgctcacgattattgaaatgcagaaaggggattgtgctctctacgccagctccttcaagggatatattgagaactgtagcacgcccaatacttatatctgtatgcaacggaccgtgggatccggcggcggaggatctggcggaggcggatctgggggcggaggctctttcgaacaagttcagcttcaacagcctggcgctgagctggtcaaacctggcgcttctgtgaagatgagctgcaaagccagcggctacgccttcagcagctactggatcaactggatgaagcagaaacccggccagggactcgaatggatcggccaaatctatcccggcgacggcgacaccaactacaacggcaagttcaagggcagagccacactgaccgccgatacctctagcagcacagcctacatgcagctgagcagcctgaccagcgaagatagcgccgtgtacttctgtgcccggtccatcacaacagtcgtgggctgcgctatggactattggggccagggaacaagcgtgaccgtgtctagtacgcgtgagcagaaactgatctcggaagaggatgggagcggcatccagaaccctgatcctgccgtgtaccagctgcgggatagcaagagcagcgacaagagcgtgtgtctgttcaccgacttcgacagccagaccaacgtgtcccagagcaaggactccgacgtgtacatcaccgataagaccgtgctggacatgcggagcatggacttcaagagcaactccgccgtggcctggtccaacaagtccgatttcgcctgcgccaacgccttcaacaacagcattatccccgaggacacattcttcccaagccccgagagcagctgcggtacccagagttttgggttgttggaccctaaattgtgctatctgttggacggaatcctgttcatttacggagtgatcctgaccgcattgttcctgaggagcaagcggtcacggctgctccacagcgattacatgaatatgacaccacgaagaccgggtcctactcgcaaacactaccaaccctacgcacctccccgcgactttgcagcgtaccgatctcgggttaagttttccagatccgcagacgcacccgcttaccaacaagggcagaaccaactctacaatgaacttaatttggggcggagggaagagtacgacgttctggacaaaaggaggggacgagatcccgagatgggcggaaagcctcagcgaaggaagaatccgcaagaggggctttataacgaactccagaaagataaaatggcagaagcctatagtgagattgggatgaagggagaaaggaggaggggtaaaggtcacgatgggttgtaccaaggattgagcacagccactaaagatacctatgatgcgctccacatgcaggccctgccgccaaga

SEQ ID NO: 4230 - DNA, 3705 bp, Artificial Sequence
  Synthetic Polynucloetide
atggccttaccagtgaccgccttgctcctgccgctggccttgctgctccacgccgccaggccggacatccagatgacacagagccctagcagcctgtctgccagcgtgggagacagagtgaccatcacatgcaaggccagcgaccacatcaacaactggctggcctggtatcagcagaagcctggacaggcccctaagctgctgatctacggcgctaccacactggaaacaggcgtgcccagcagattttctggcagcggctctggcaccgactacaccctgacaatatccagcctccagcctgaggacttcgccacctactactgtcagcagagctggaacaccccttggacattcggccagggcaccaagctggaaatcaagagactcgaggggaaaccaattcccaaccctcttctgggactggattcaaccggcagcggcgaggacctgaagaacgtgttcccacctgaggtggccgtgttcgagcctagcgaggccgagatcagccacacccagaaagccaccctcgtgtgcctggctaccggcttctaccccgaccatgtggaactgtcttggtgggtcaacggcaaagaggtgcacagcggcgtgtctaccgacccccagccactgaaagaacagcccgccctgaacgacagccggtactgcctgagcagcagactgagagtgtccgccaccttctggcagaacccccggaaccacttcagatgccaggtgcagttctacggcctgagcgagaacgacgagtggacccaggacagagccaagcccgtgacccagatcgtgtctgccgaagcctggggcagagccgattgcggatcccagagcttcggcctgctggaccccaagctgtgctacctgctggatggcatcctgttcatctacggcgtgatcctgaccgccctgttcctgaggagtaagaggagcaggctcctgcacagtgactacatgaacatgactccacgccgccccggacccacccgcaagcattaccagccctatgccccaccacgcgacttcgcagcctatcgctccagagtgaagttcagcagaagcgccgacgcccctgcctaccagcagggacagaaccaactgtacaacgagctgaacctgggcagacgggaagagtacgacgtgctggacaagcggagaggcagggaccctgagatgggcggaaagccccagcggagaaagaacccccaggaaggactgtataacgaactccagaaagacaagatggccgaagcctacagcgagatcggcatgaagggcgagcggagaagaggcaagggccacgatggcctgtaccagggcctgagcaccgccaccaaggacacctatgacgccctgcacatgcaggccctgcctccaagaagggccaagcgatctggatctggagcaacaaacttctcactactcaaacaagcaggtgacgtggaggagaatcccgggcctactagtatggactggatttggcgcatccttttccttgtcggcgctgctaccggcgcccattccgggcccctgttcaatcaagaggtgcagatccctctgaccgagagctactgtggcccctgtcctaagaactggatctgctacaagaacaactgctaccagttcttcgacgagagcaagaattggtacgagagccaggccagctgcatgagccagaatgccagcctgctgaaggtgtacagcaaagaggaccaggacctgctgaaactggtcaagagctaccactggatgggccttgtgcacatccccaccaatggctcttggcagtgggaggacggcagcattctgagccctaacctgctgaccatcatcgagatgcagaagggcgactgcgccctgtacgccagcagctttaagggctacatcgagaattgcagcaccccgaacacctacatctgtatgcagagaaccgttggcggaggcggaagtggaggcggaggatctggcggcggaggctctgacctctttaatcaagaagtccagattccactcaccgaatcctactgcggaccttgtccaaaaaattggatttgttataagaacaactgttatcaattctttgatgagtctaaaaattggtatgagtcccaggcttcctgcatgtctcagaacgcttctctgctgaaagtctactctaaagaagatcaggatctcctgaagctcgtcaagtcttatcattggatggggctcgtccacattcctaccaacggaagctggcaatgggaagatggctccatcctgtctccaaatctgctcacgattattgaaatgcagaaaggggattgtgctctctacgccagctccttcaagggatatattgagaactgtagcacgcccaatacttatatctgtatgcaacggaccgtgggatccggcggcggaggatctggcggaggcggatctgggggcggaggctctttcgaacaagttcagcttcaacagcctggcgctgagctggtcaaacctggcgcttctgtgaagatgagctgcaaagccagcggctacgccttcagcagctactggatcaactggatgaagcagaaacccggccagggactcgaatggatcggccaaatctatcccggcgacggcgacaccaactacaacggcaagttcaagggcagagccacactgaccgccgatacctctagcagcacagcctacatgcagctgagcagcctgaccagcgaagatagcgccgtgtacttctgtgcccggtccatcacaacagtcgtgggctgcgctatggactattggggccagggaacaagcgtgaccgtgtctagtacgcgtgagcagaaactgatctcggaagaggatgggagcggcatccagaaccctgatcctgccgtgtaccagctgcgggatagcaagagcagcgacaagagcgtgtgtctgttcaccgacttcgacagccagaccaacgtgtcccagagcaaggactccgacgtgtacatcaccgataagaccgtgctggacatgcggagcatggacttcaagagcaactccgccgtggcctggtccaacaagtccgatttcgcctgcgccaacgccttcaacaacagcattatccccgaggacacattcttcccaagccccgagagcagctgcggtacccagagttttgggttgttggaccctaaattgtgctatctgttggacggaatcctgttcatttacggagtgatcctgaccgcattgttcctgaggagcaagcggtcacggctgctccacagcgattacatgaatatgacaccacgaagaccgggtcctactcgcaaacactaccaaccctacgcacctccccgcgactttgcagcgtaccgatctcgggttaagttttccagatccgcagacgcacccgcttaccaacaagggcagaaccaactctacaatgaacttaatttggggcggagggaagagtacgacgttctggacaaaaggaggggacgagatcccgagatgggcggaaagcctcagcgaaggaagaatccgcaagaggggctttataacgaactccagaaagataaaatggcagaagcctatagtgagattgggatgaagggagaaaggaggaggggtaaaggtcacgatgggttgtaccaaggattgagcacagccactaaagatacctatgatgcgctccacatgcaggccctgccgccaaga

SEQ ID NO: 4231 - DNA, 3588 bp, Artificial Sequence
  Synthetic Polynucloetide
atggccttaccagtgaccgccttgctcctgccgctggccttgctgctccacgccgccaggccggacatccagatgacacagagccctagcagcctgtctgccagcgtgggagacagagtgaccatcacatgcaaggccagcgaccacatcaacaactggctggcctggtatcagcagaagcctggacaggcccctaagctgctgatctacggcgctaccacactggaaacaggcgtgcccagcagattttctggcagcggctctggcaccgactacaccctgacaatatccagcctccagcctgaggacttcgccacctactactgtcagcagagctggaacaccccttggacattcggccagggcaccaagctggaaatcaagagactcgaggggaaaccaattcccaaccctcttctgggactggattcaaccggcagcggcgaggacctgaagaacgtgttcccacctgaggtggccgtgttcgagcctagcgaggccgagatcagccacacccagaaagccaccctcgtgtgcctggctaccggcttctaccccgaccatgtggaactgtcttggtgggtcaacggcaaagaggtgcacagcggcgtgtctaccgacccccagccactgaaagaacagcccgccctgaacgacagccggtactgcctgagcagcagactgagagtgtccgccaccttctggcagaacccccggaaccacttcagatgccaggtgcagttctacggcctgagcgagaacgacgagtggacccaggacagagccaagcccgtgacccagatcgtgtctgccgaagcctggggcagagccgattgcggatcccagagcttcggcctgctggaccccaagctgtgctacctgctggatggcatcctgttcatctacggcgtgatcctgaccgccctgttcctgagagtgaagttcagcagaagcgccgacgcccctgcctaccagcagggacagaaccaactgtacaacgagctgaacctgggcagacgggaagagtacgacgtgctggacaagcggagaggcagggaccctgagatgggcggaaagccccagcggagaaagaacccccaggaaggactgtataacgaactccagaaagacaagatggccgaagcctacagcgagatcggcatgaagggcgagcggagaagaggcaagggccacgatggcctgtaccagggcctgagcaccgccaccaaggacacctatgacgccctgcacatgcaggccctgcctccaagaagggccaagcgatctggatctggagcaacaaacttctcactactcaaacaagcaggtgacgtggaggagaatcccgggcctactagtatggactggatttggcgcatccttttccttgtcggcgctgctaccggcgcccattccgggcccctgttcaatcaagaggtgcagatccctctgaccgagagctactgtggcccctgtcctaagaactggatctgctacaagaacaactgctaccagttcttcgacgagagcaagaattggtacgagagccaggccagctgcatgagccagaatgccagcctgctgaaggtgtacagcaaagaggaccaggacctgctgaaactggtcaagagctaccactggatgggccttgtgcacatccccaccaatggctcttggcagtgggaggacggcagcattctgagccctaacctgctgaccatcatcgagatgcagaagggcgactgcgccctgtacgccagcagctttaagggctacatcgagaattgcagcaccccgaacacctacatctgtatgcagagaaccgttggcggaggcggaagtggaggcggaggatctggcggcggaggctctgacctctttaatcaagaagtccagattccactcaccgaatcctactgcggaccttgtccaaaaaattggatttgttataagaacaactgttatcaattctttgatgagtctaaaaattggtatgagtcccaggcttcctgcatgtctcagaacgcttctctgctgaaagtctactctaaagaagatcaggatctcctgaagctcgtcaagtcttatcattggatggggctcgtccacattcctaccaacggaagctggcaatgggaagatggctccatcctgtctccaaatctgctcacgattattgaaatgcagaaaggggattgtgctctctacgccagctccttcaagggatatattgagaactgtagcacgcccaatacttatatctgtatgcaacggaccgtgggatccggcggcggaggatctggcggaggcggatctgggggcggaggctctttcgaacaagttcagcttcaacagcctggcgctgagctggtcaaacctggcgcttctgtgaagatgagctgcaaagccagcggctacgccttcagcagctactggatcaactggatgaagcagaaacccggccagggactcgaatggatcggccaaatctatcccggcgacggcgacaccaactacaacggcaagttcaagggcagagccacactgaccgccgatacctctagcagcacagcctacatgcagctgagcagcctgaccagcgaagatagcgccgtgtacttctgtgcccggtccatcacaacagtcgtgggctgcgctatggactattggggccagggaacaagcgtgaccgtgtctagtacgcgtgagcagaaactgatctcggaagaggatctggggagcggcatccagaaccctgatcctgccgtgtaccagctgcgggatagcaagagcagcgacaagagcgtgtgtctgttcaccgacttcgacagccagaccaacgtgtcccagagcaaggactccgacgtgtacatcaccgataagaccgtgctggacatgcggagcatggacttcaagagcaactccgccgtggcctggtccaacaagtccgatttcgcctgcgccaacgccttcaacaacagcattatccccgaggacacattcttcccaagccccgagagcagctgcggtacccagagttttgggttgttggaccctaaattgtgctatctgttggacggaatcctgttcatttacggagtgatcctgaccgcattgttcctgaagagaggccggaagaagctgctgtacatcttcaagcagcctttcatgcggcccgtgcagaccacccaggaagaggacggctgctcctgccggttccccgaggaagaagaaggcggctgcgagctgcgggttaagttttccagatccgcagacgcacccgcttaccaacaagggcagaaccaactctacaatgaacttaatttggggcggagggaagagtacgacgttctggacaaaaggaggggacgagatcccgagatgggcggaaagcctcagcgaaggaagaatccgcaagaggggctttataacgaactccagaaagataaaatggcagaagcctatagtgagattgggatgaagggagaaaggaggaggggtaaaggtcacgatgggttgtaccaaggattgagcacagccactaaagatacctatgatgcgctccacatgcaggccctgccgccaaga

SEQ ID NO: 4232 - DNA, 3714 bp, Artificial Sequence
  Synthetic Polynucloetide
atggccttaccagtgaccgccttgctcctgccgctggccttgctgctccacgccgccaggccggacatccagatgacacagagccctagcagcctgtctgccagcgtgggagacagagtgaccatcacatgcaaggccagcgaccacatcaacaactggctggcctggtatcagcagaagcctggacaggcccctaagctgctgatctacggcgctaccacactggaaacaggcgtgcccagcagattttctggcagcggctctggcaccgactacaccctgacaatatccagcctccagcctgaggacttcgccacctactactgtcagcagagctggaacaccccttggacattcggccagggcaccaagctggaaatcaagagactcgaggggaaaccaattcccaaccctcttctgggactggattcaaccggcagcggcgaggacctgaagaacgtgttcccacctgaggtggccgtgttcgagcctagcgaggccgagatcagccacacccagaaagccaccctcgtgtgcctggctaccggcttctaccccgaccatgtggaactgtcttggtgggtcaacggcaaagaggtgcacagcggcgtgtctaccgacccccagccactgaaagaacagcccgccctgaacgacagccggtactgcctgagcagcagactgagagtgtccgccaccttctggcagaacccccggaaccacttcagatgccaggtgcagttctacggcctgagcgagaacgacgagtggacccaggacagagccaagcccgtgacccagatcgtgtctgccgaagcctggggcagagccgattgcggatcccagagcttcggcctgctggaccccaagctgtgctacctgctggatggcatcctgttcatctacggcgtgatcctgaccgccctgttcctgaaacggggcagaaagaaactcctgtatatattcaaacaaccatttatgagaccagtacaaactactcaagaggaagatggctgtagctgccgatttccagaagaagaagaaggaggatgtgaactgagagtgaagttcagcagaagcgccgacgcccctgcctaccagcagggacagaaccaactgtacaacgagctgaacctgggcagacgggaagagtacgacgtgctggacaagcggagaggcagggaccctgagatgggcggaaagccccagcggagaaagaacccccaggaaggactgtataacgaactccagaaagacaagatggccgaagcctacagcgagatcggcatgaagggcgagcggagaagaggcaagggccacgatggcctgtaccagggcctgagcaccgccaccaaggacacctatgacgccctgcacatgcaggccctgcctccaagaagggccaagcgatctggatctggagcaacaaacttctcactactcaaacaagcaggtgacgtggaggagaatcccgggcctactagtatggactggatttggcgcatccttttccttgtcggcgctgctaccggcgcccattccgggcccctgttcaatcaagaggtgcagatccctctgaccgagagctactgtggcccctgtcctaagaactggatctgctacaagaacaactgctaccagttcttcgacgagagcaagaattggtacgagagccaggccagctgcatgagccagaatgccagcctgctgaaggtgtacagcaaagaggaccaggacctgctgaaactggtcaagagctaccactggatgggccttgtgcacatccccaccaatggctcttggcagtgggaggacggcagcattctgagccctaacctgctgaccatcatcgagatgcagaagggcgactgcgccctgtacgccagcagctttaagggctacatcgagaattgcagcaccccgaacacctacatctgtatgcagagaaccgttggcggaggcggaagtggaggcggaggatctggcggcggaggctctgacctctttaatcaagaagtccagattccactcaccgaatcctactgcggaccttgtccaaaaaattggatttgttataagaacaactgttatcaattctttgatgagtctaaaaattggtatgagtcccaggcttcctgcatgtctcagaacgcttctctgctgaaagtctactctaaagaagatcaggatctcctgaagctcgtcaagtcttatcattggatggggctcgtccacattcctaccaacggaagctggcaatgggaagatggctccatcctgtctccaaatctgctcacgattattgaaatgcagaaaggggattgtgctctctacgccagctccttcaagggatatattgagaactgtagcacgcccaatacttatatctgtatgcaacggaccgtgggatccggcggcggaggatctggcggaggcggatctgggggcggaggctctttcgaacaagttcagcttcaacagcctggcgctgagctggtcaaacctggcgcttctgtgaagatgagctgcaaagccagcggctacgccttcagcagctactggatcaactggatgaagcagaaacccggccagggactcgaatggatcggccaaatctatcccggcgacggcgacaccaactacaacggcaagttcaagggcagagccacactgaccgccgatacctctagcagcacagcctacatgcagctgagcagcctgaccagcgaagatagcgccgtgtacttctgtgcccggtccatcacaacagtcgtgggctgcgctatggactattggggccagggaacaagcgtgaccgtgtctagtacgcgtgagcagaaactgatctcggaagaggatctggggagcggcatccagaaccctgatcctgccgtgtaccagctgcgggatagcaagagcagcgacaagagcgtgtgtctgttcaccgacttcgacagccagaccaacgtgtcccagagcaaggactccgacgtgtacatcaccgataagaccgtgctggacatgcggagcatggacttcaagagcaactccgccgtggcctggtccaacaagtccgatttcgcctgcgccaacgccttcaacaacagcattatccccgaggacacattcttcccaagccccgagagcagctgcggtacccagagttttgggttgttggaccctaaattgtgctatctgttggacggaatcctgttcatttacggagtgatcctgaccgcattgttcctgaagagaggccggaagaagctgctgtacatcttcaagcagcctttcatgcggcccgtgcagaccacccaggaagaggacggctgctcctgccggttccccgaggaagaagaaggcggctgcgagctgcgggttaagttttccagatccgcagacgcacccgcttaccaacaagggcagaaccaactctacaatgaacttaatttggggcggagggaagagtacgacgttctggacaaaaggaggggacgagatcccgagatgggcggaaagcctcagcgaaggaagaatccgcaagaggggctttataacgaactccagaaagataaaatggcagaagcctatagtgagattgggatgaagggagaaaggaggaggggtaaaggtcacgatgggttgtaccaaggattgagcacagccactaaagatacctatgatgcgctccacatgcaggccctgccgccaaga

SEQ ID NO: 4233 - DNA, 3387 bp, Artificial Sequence
  Synthetic Polynucloetide
atggccttaccagtgaccgccttgctcctgccgctggccttgctgctccacgccgccaggccggacatccagatgacacagagccctagcagcctgtctgccagcgtgggagacagagtgaccatcacatgcaaggccagcgaccacatcaacaactggctggcctggtatcagcagaagcctggacaggcccctaagctgctgatctacggcgctaccacactggaaacaggcgtgcccagcagattttctggcagcggctctggcaccgactacaccctgacaatatccagcctccagcctgaggacttcgccacctactactgtcagcagagctggaacaccccttggacattcggccagggcaccaagctggaaatcaagagactcgagcagagcttcggcctgctggaccccaagctgtgctacctgctggatggcatcctgttcatctacggcgtgatcctgaccgccctgttcctgagagtgaagttcagcagaagcgccgacgcccctgcctaccagcagggacagaaccaactgtacaacgagctgaacctgggcagacgggaagagtacgacgtgctggacaagcggagaggcagggaccctgagatgggcggaaagccccagcggagaaagaacccccaggaaggactgtataacgaactccagaaagacaagatggccgaagcctacagcgagatcggcatgaagggcgagcggagaagaggcaagggccacgatggcctgtaccagggcctgagcaccgccaccaaggacacctatgacgccctgcacatgcaggccctgcctccaagaagggccaagcgatctggatctggagcaacaaacttctcactactcaaacaagcaggtgacgtggaggagaatcccgggcctactagtatggactggatttggcgcatccttttccttgtcggcgctgctaccggcgcccattccgggcccctgttcaatcaagaggtgcagatccctctgaccgagagctactgtggcccctgtcctaagaactggatctgctacaagaacaactgctaccagttcttcgacgagagcaagaattggtacgagagccaggccagctgcatgagccagaatgccagcctgctgaaggtgtacagcaaagaggaccaggacctgctgaaactggtcaagagctaccactggatgggccttgtgcacatccccaccaatggctcttggcagtgggaggacggcagcattctgagccctaacctgctgaccatcatcgagatgcagaagggcgactgcgccctgtacgccagcagctttaagggctacatcgagaattgcagcaccccgaacacctacatctgtatgcagagaaccgttggcggaggcggaagtggaggcggaggatctggcggcggaggctctgacctctttaatcaagaagtccagattccactcaccgaatcctactgcggaccttgtccaaaaaattggatttgttataagaacaactgttatcaattctttgatgagtctaaaaattggtatgagtcccaggcttcctgcatgtctcagaacgcttctctgctgaaagtctactctaaagaagatcaggatctcctgaagctcgtcaagtcttatcattggatggggctcgtccacattcctaccaacggaagctggcaatgggaagatggctccatcctgtctccaaatctgctcacgattattgaaatgcagaaaggggattgtgctctctacgccagctccttcaagggatatattgagaactgtagcacgcccaatacttatatctgtatgcaacggaccgtgggatccggcggcggaggatctggcggaggcggatctgggggcggaggctctttcgaacaagttcagcttcaacagcctggcgctgagctggtcaaacctggcgcttctgtgaagatgagctgcaaagccagcggctacgccttcagcagctactggatcaactggatgaagcagaaacccggccagggactcgaatggatcggccaaatctatcccggcgacggcgacaccaactacaacggcaagttcaagggcagagccacactgaccgccgatacctctagcagcacagcctacatgcagctgagcagcctgaccagcgaagatagcgccgtgtacttctgtgcccggtccatcacaacagtcgtgggctgcgctatggactattggggccagggaacaagcgtgaccgtgtctagtacgcgtcagagttttgggttgttggaccctaaattgtgctatctgttggacggaatcctgttcatttacggagtgatcctgaccgcattgttcctgcgggttaagttttccagatccgcagacgcacccgcttaccaacaagggcagaaccaactctacaatgaacttaatttggggcggagggaagagtacgacgttctggacaaaaggaggggacgagatcccgagatgggcggaaagcctcagcgaaggaagaatccgcaagaggggctttataacgaactccagaaagataaaatggcagaagcctatagtgagattgggatgaagggagaaaggaggaggggtaaaggtcacgatgggttgtaccaaggattgagcacagccactaaagatacctatgatgcgctccacatgcaggccctgccgccaagacgcgccaagagaagcggatctggcgtgaagcagaccctgaatttcgacctgctgaagctggctggcgacgtggaatccaacccaggcccttctagaggccatatgaccgagtacaagcccacggtgcgcctcgccacccgcgacgacgtccccagggccgtacgcaccctcgccgccgcgttcgccgactaccccgccacgcgccacaccgtcgatccggaccgccacatcgagcgggtcaccgagctgcaagaactcttcctcacgcgcgtcgggctcgacatcggcaaggtgtgggtcgcggacgacggcgccgcggtggcggtctggaccacgccggagagcgtcgaagcgggggcggtgttcgccgagatcggcccgcgcatggccgagttgagcggttcccggctggccgcgcagcaacagatggaaggcctcctggcgccgcaccggcccaaggagcccgcgtggttcctggccaccgtcggcgtctcgcccgaccaccagggcaagggtctgggcagcgccgtcgtgctccccggagtggaggcggccgagcgcgccggggtgcccgccttcctggagacctccgcgccccgcaacctccccttctacgagcggctcggcttcaccgtcaccgccgacgtcgaggtgcccgaaggaccgcgcacctggtgcatgacccgcaagcccggtgcctga

SEQ ID NO: 4234 - DNA, 2859 bp, Artificial Sequence
  Synthetic Polynucloetide
atggccttaccagtgaccgccttgctcctgccgctggccttgctgctccacgccgccaggccggacatccagatgacacagagccctagcagcctgtctgccagcgtgggagacagagtgaccatcacatgcaaggccagcgaccacatcaacaactggctggcctggtatcagcagaagcctggacaggcccctaagctgctgatctacggcgctaccacactggaaacaggcgtgcccagcagattttctggcagcggctctggcaccgactacaccctgacaatatccagcctccagcctgaggacttcgccacctactactgtcagcagagctggaacaccccttggacattcggccagggcaccaagctggaaatcaagagactcgagggacagcctaaggccaatcctaccgtgacactgttccctccaagcagcgaagaactccaggccaacaaggccacacttgtgtgcctgatctccgacttctaccctggggctgtgacagtggcttggaaggccgatggatctcctgtgaaagccggcgtggaaaccaccaagccatccaagcagagcaacaacaaatacgccgccagctcctacctgagcctgacacctgagcagtggaagtcccacagatcctacagctgccaagtgacccacgaaggcagcaccgtggaaaagacagtggcccctacagagtgcagccccatcaagaccgatgtgattacaatggaccccaaggacaactgctccaaggacgccaacgataccctgctgctccagctgaccaacaccagcgcctactacatgtacttgttgctgctgctgaagtccgtggtgtacttcgccatcatcacatgctgcctgctgcggagaaccgccttctgctgcaacggcgagaagtctagggccaagcgatctggatctggagcaacaaacttctcactactcaaacaagcaggtgacgtggaggagaatcccgggcctactagtatggactggatttggcgcatccttttccttgtcggcgctgctaccggcgcccattccgggcccctgttcaatcaagaggtgcagatccctctgaccgagagctactgtggcccctgtcctaagaactggatctgctacaagaacaactgctaccagttcttcgacgagagcaagaattggtacgagagccaggccagctgcatgagccagaatgccagcctgctgaaggtgtacagcaaagaggaccaggacctgctgaaactggtcaagagctaccactggatgggccttgtgcacatccccaccaatggctcttggcagtgggaggacggcagcattctgagccctaacctgctgaccatcatcgagatgcagaagggcgactgcgccctgtacgccagcagctttaagggctacatcgagaattgcagcaccccgaacacctacatctgtatgcagagaaccgttggcggaggcggaagtggaggcggaggatctggcggcggaggctctgacctctttaatcaagaagtccagattccactcaccgaatcctactgcggaccttgtccaaaaaattggatttgttataagaacaactgttatcaattctttgatgagtctaaaaattggtatgagtcccaggcttcctgcatgtctcagaacgcttctctgctgaaagtctactctaaagaagatcaggatctcctgaagctcgtcaagtcttatcattggatggggctcgtccacattcctaccaacggaagctggcaatgggaagatggctccatcctgtctccaaatctgctcacgattattgaaatgcagaaaggggattgtgctctctacgccagctccttcaagggatatattgagaactgtagcacgcccaatacttatatctgtatgcaacggaccgtgggatccggcggcggaggatctggcggaggcggatctgggggcggaggctctttcgaacaagttcagcttcaacagcctggcgctgagctggtcaaacctggcgcttctgtgaagatgagctgcaaagccagcggctacgccttcagcagctactggatcaactggatgaagcagaaacccggccagggactcgaatggatcggccaaatctatcccggcgacggcgacaccaactacaacggcaagttcaagggcagagccacactgaccgccgatacctctagcagcacagcctacatgcagctgagcagcctgaccagcgaagatagcgccgtgtacttctgtgcccggtccatcacaacagtcgtgggctgcgctatggactattggggccagggaacaagcgtgaccgtgtctagtacgcgtgcctctacaaagggaccctccgtgtttcctctggctcccagcagcaagtctacaagcggaggaacagccgctctgggctgcctggtcaaggattactttcccgagcctgtgaccgtgtcctggaatagcggagcactgacaagcggcgtgcacacctttccagccgtgctgcaaagcagcggcctgtactctctgagcagcgtggtcacagtgcctagctctagcctgggcacccagacctacatctgcaatgtgaaccacaagcctagcaacaccaaggtggacaagagagtggaacccaagagctgtgaagtgaaaaccgactccaccgaccacgtgaagcccaaagagacagagaacaccaagcagcccagcaagagctgccacaagcccaaggccatcgtgcacaccgagaaagtgaacatgatgagcctgaccgtgctgggcctgcggatgctgttcgccaaaaccgtggccgtgaacttcctgctgaccgccaagctgttcttcctc

SEQ ID NO: 4235 - DNA, 2793 bp, Artificial Sequence
  Synthetic Polynucloetide
atggccttaccagtgaccgccttgctcctgccgctggccttgctgctccacgccgccaggccggacatccagatgacacagagccctagcagcctgtctgccagcgtgggagacagagtgaccatcacatgcaaggccagcgaccacatcaacaactggctggcctggtatcagcagaagcctggacaggcccctaagctgctgatctacggcgctaccacactggaaacaggcgtgcccagcagattttctggcagcggctctggcaccgactacaccctgacaatatccagcctccagcctgaggacttcgccacctactactgtcagcagagctggaacaccccttggacattcggccagggcaccaagctggaaatcaagagactcgagggacagcctaaggccaatcctaccgtgacactgttccctccaagcagcgaagaactccaggccaacaaggccacacttgtgtgcctgatctccgacttctaccctggggctgtgacagtggcttggaaggccgatggatctcctgtgaaagccggcgtggaaaccaccaagccatccaagcagagcaacaacaaatacgccgccagctcctacctgagcctgacacctgagcagtggaagtcccacagatcctacagctgccaagtgacccacgaaggcagcaccgtggaaaagacagtggcccctacagagtgcagcggcagagccgattgcggcatcaccagcgccagctaccaccagggcgtgctgagcgccaccatcctgtacgagatcctgctgggcaaggccaccctgtacgccgtgctggtgtctgccctggtgctgatggctatggtcaagcggaaggacagccggggaagggccaagcgatctggatctggagcaacaaacttctcactactcaaacaagcaggtgacgtggaggagaatcccgggcctactagtatggactggatttggcgcatccttttccttgtcggcgctgctaccggcgcccattccgggcccctgttcaatcaagaggtgcagatccctctgaccgagagctactgtggcccctgtcctaagaactggatctgctacaagaacaactgctaccagttcttcgacgagagcaagaattggtacgagagccaggccagctgcatgagccagaatgccagcctgctgaaggtgtacagcaaagaggaccaggacctgctgaaactggtcaagagctaccactggatgggccttgtgcacatccccaccaatggctcttggcagtgggaggacggcagcattctgagccctaacctgctgaccatcatcgagatgcagaagggcgactgcgccctgtacgccagcagctttaagggctacatcgagaattgcagcaccccgaacacctacatctgtatgcagagaaccgttggcggaggcggaagtggaggcggaggatctggcggcggaggctctgacctctttaatcaagaagtccagattccactcaccgaatcctactgcggaccttgtccaaaaaattggatttgttataagaacaactgttatcaattctttgatgagtctaaaaattggtatgagtcccaggcttcctgcatgtctcagaacgcttctctgctgaaagtctactctaaagaagatcaggatctcctgaagctcgtcaagtcttatcattggatggggctcgtccacattcctaccaacggaagctggcaatgggaagatggctccatcctgtctccaaatctgctcacgattattgaaatgcagaaaggggattgtgctctctacgccagctccttcaagggatatattgagaactgtagcacgcccaatacttatatctgtatgcaacggaccgtgggatccggcggcggaggatctggcggaggcggatctgggggcggaggctctttcgaacaagttcagcttcaacagcctggcgctgagctggtcaaacctggcgcttctgtgaagatgagctgcaaagccagcggctacgccttcagcagctactggatcaactggatgaagcagaaacccggccagggactcgaatggatcggccaaatctatcccggcgacggcgacaccaactacaacggcaagttcaagggcagagccacactgaccgccgatacctctagcagcacagcctacatgcagctgagcagcctgaccagcgaagatagcgccgtgtacttctgtgcccggtccatcacaacagtcgtgggctgcgctatggactattggggccagggaacaagcgtgaccgtgtctagtacgcgtgcctctacaaagggaccctccgtgtttcctctggctcccagcagcaagtctacaagcggaggaacagccgctctgggctgcctggtcaaggattactttcccgagcctgtgaccgtgtcctggaatagcggagcactgacaagcggcgtgcacacctttccagccgtgctgcaaagcagcggcctgtactctctgagcagcgtggtcacagtgcctagctctagcctgggcacccagacctacatctgcaatgtgaaccacaagcctagcaacaccaaggtggacaagagagtggaacccaagagctgtatccccgaggacacattcttcccaagcagcgacgtgccctgcgacgtgaagctggtggaaaagagcttcgagacagacaccaacctgaacttccagaacctgagcgtgatcggcttcagaatcctgctgctgaaagtggccggctttaacctgctgatgaccctgcggctgtggtccagc

SEQ ID NO: 4236 - DNA, 2793 bp, Artificial Sequence
  Synthetic Polynucloetide
atggccttaccagtgaccgccttgctcctgccgctggccttgctgctccacgccgccaggccggacatccagatgacacagagccctagcagcctgtctgccagcgtgggagacagagtgaccatcacatgcaaggccagcgaccacatcaacaactggctggcctggtatcagcagaagcctggacaggcccctaagctgctgatctacggcgctaccacactggaaacaggcgtgcccagcagattttctggcagcggctctggcaccgactacaccctgacaatatccagcctccagcctgaggacttcgccacctactactgtcagcagagctggaacaccccttggacattcggccagggcaccaagctggaaatcaagagactcgagggacagcctaaggccaatcctaccgtgacactgttccctccaagcagcgaagaactccaggccaacaaggccacacttgtgtgcctgatctccgacttctaccctggggctgtgacagtggcttggaaggccgatggatctcctgtgaaagccggcgtggaaaccaccaagccatccaagcagagcaacaacaaatacgccgccagctcctacctgagcctgacacctgagcagtggaagtcccacagatcctacagctgccaagtgacccacgaaggcagcaccgtggaaaagacagtggcccctacagagtgcagcggcagagccgattgcggctttaccagcgagagctaccagcagggcgtgctgagcgccaccatcctgtacgagatcctgctgggcaaggccaccctgtacgccgtgctggtgtctgccctggtgctgatggctatggtcaagcggaaggacagccggggaagggccaagcgatctggatctggagcaacaaacttctcactactcaaacaagcaggtgacgtggaggagaatcccgggcctactagtatggactggatttggcgcatccttttccttgtcggcgctgctaccggcgcccattccgggcccctgttcaatcaagaggtgcagatccctctgaccgagagctactgtggcccctgtcctaagaactggatctgctacaagaacaactgctaccagttcttcgacgagagcaagaattggtacgagagccaggccagctgcatgagccagaatgccagcctgctgaaggtgtacagcaaagaggaccaggacctgctgaaactggtcaagagctaccactggatgggccttgtgcacatccccaccaatggctcttggcagtgggaggacggcagcattctgagccctaacctgctgaccatcatcgagatgcagaagggcgactgcgccctgtacgccagcagctttaagggctacatcgagaattgcagcaccccgaacacctacatctgtatgcagagaaccgttggcggaggcggaagtggaggcggaggatctggcggcggaggctctgacctctttaatcaagaagtccagattccactcaccgaatcctactgcggaccttgtccaaaaaattggatttgttataagaacaactgttatcaattctttgatgagtctaaaaattggtatgagtcccaggcttcctgcatgtctcagaacgcttctctgctgaaagtctactctaaagaagatcaggatctcctgaagctcgtcaagtcttatcattggatggggctcgtccacattcctaccaacggaagctggcaatgggaagatggctccatcctgtctccaaatctgctcacgattattgaaatgcagaaaggggattgtgctctctacgccagctccttcaagggatatattgagaactgtagcacgcccaatacttatatctgtatgcaacggaccgtgggatccggcggcggaggatctggcggaggcggatctgggggcggaggctctttcgaacaagttcagcttcaacagcctggcgctgagctggtcaaacctggcgcttctgtgaagatgagctgcaaagccagcggctacgccttcagcagctactggatcaactggatgaagcagaaacccggccagggactcgaatggatcggccaaatctatcccggcgacggcgacaccaactacaacggcaagttcaagggcagagccacactgaccgccgatacctctagcagcacagcctacatgcagctgagcagcctgaccagcgaagatagcgccgtgtacttctgtgcccggtccatcacaacagtcgtgggctgcgctatggactattggggccagggaacaagcgtgaccgtgtctagtacgcgtgcctctacaaagggaccctccgtgtttcctctggctcccagcagcaagtctacaagcggaggaacagccgctctgggctgcctggtcaaggattactttcccgagcctgtgaccgtgtcctggaatagcggagcactgacaagcggcgtgcacacctttccagccgtgctgcaaagcagcggcctgtactctctgagcagcgtggtcacagtgcctagctctagcctgggcacccagacctacatctgcaatgtgaaccacaagcctagcaacaccaaggtggacaagagagtggaacccaagagctgtatccccgaggacacattcttcccaagccccgagagcagctgcgacgtgaagctggtggaaaagagcttcgagacagacaccaacctgaacttccagaacctgagcgtgatcggcttcagaatcctgctgctgaaagtggccggctttaacctgctgatgaccctgcggctgtggtccagc

SEQ ID NO: 4237 - DNA, 2277 bp, Artificial Sequence
  Synthetic Polynucloetide
atggactggatttggcgcatccttttccttgtcggcgctgctaccggcgcccattccctgttcaatcaagaggtgcagatccctctgaccgagagctactgtggcccctgtcctaagaactggatctgctacaagaacaactgctaccagttcttcgacgagagcaagaattggtacgagagccaggccagctgcatgagccagaatgccagcctgctgaaggtgtacagcaaagaggaccaggacctgctgaaactggtcaagagctaccactggatgggccttgtgcacatccccaccaatggctcttggcagtgggaggacggcagcattctgagccctaacctgctgaccatcatcgagatgcagaagggcgactgcgccctgtacgccagcagctttaagggctacatcgagaattgcagcaccccgaacacctacatctgtatgcagagaaccgttggcggaggcggaagtggaggcggaggatctggcggcggaggctctgacctctttaatcaagaagtccagattccactcaccgaatcctactgcggaccttgtccaaaaaattggatttgttataagaacaactgttatcaattctttgatgagtctaaaaattggtatgagtcccaggcttcctgcatgtctcagaacgcttctctgctgaaagtctactctaaagaagatcaggatctcctgaagctcgtcaagtcttatcattggatggggctcgtccacattcctaccaacggaagctggcaatgggaagatggctccatcctgtctccaaatctgctcacgattattgaaatgcagaaaggggattgtgctctctacgccagctccttcaagggatatattgagaactgtagcacgcccaatacttatatctgtatgcaacggaccgtgggatccggcggcggaggatctggcggaggcggatctgggggcggaggctctttcgaacaagttcagcttcaacagcctggcgctgagctggtcaaacctggcgcttctgtgaagatgagctgcaaagccagcggctacgccttcagcagctactggatcaactggatgaagcagaaacccggccagggactcgaatggatcggccaaatctatcccggcgacggcgacaccaactacaacggcaagttcaagggcagagccacactgaccgccgatacctctagcagcacagcctacatgcagctgagcagcctgaccagcgaagatagcgccgtgtacttctgtgcccggtccatcacaacagtcgtgggctgcgctatggactattggggccagggaacaagcgtgaccgtgtctagtggcggaggcggaagtggaggcggaggatctggcggcggaggctctgacatccagatgacacagagccctagcagcctgtctgccagcgtgggagacagagtgaccatcacatgcaaggccagcgaccacatcaacaactggctggcctggtatcagcagaagcctggacaggcccctaagctgctgatctacggcgctaccacactggaaacaggcgtgcccagcagattttctggcagcggctctggcaccgactacaccctgacaatatccagcctccagcctgaggacttcgccacctactactgtcagcagagctggaacaccccttggacattcggccagggcaccaagctggaaatcaagagaacgcgtggcggaggcagcgacggtaacgaggagatgggaggaatcactcaaaccccttacaaagtctcaatttcaggaacaactgttatccttacatgtccccagtatcctggcagcgagatcctttggcagcataacgacaagaatatagggggagatgaagacgataagaatatcggatctgacgaggatcacttgagcctgaaagagttctccgagcttgaacaaagcggatattatgtgtgctatccgcgcgggtcaaagccggaagacgctaacttttacctttatctccgagccagagtgtgcgaaaattgcatggaaatggacgttatgtccgttgctacaatagttatcgtagatatatgcatcacgggtggactgcttctgctggtttattattggtccaagaatagaaaggccaaagctaaacccgtgaccagaggcgctggcgcaggcggaaggcaaaggggacaaaacaaagaacggccaccaccagtgccaaatccagattatgagcctattcggaaaggacagagggacctgtactctggcctgaatcagagaagaatc

SEQ ID NO: 4238 - DNA, 2172 bp, Artificial Sequence
  Synthetic Polynucloetide
atggactggatttggcgcatccttttccttgtcggcgctgctaccggcgcccattccctgttcaatcaagaggtgcagatccctctgaccgagagctactgtggcccctgtcctaagaactggatctgctacaagaacaactgctaccagttcttcgacgagagcaagaattggtacgagagccaggccagctgcatgagccagaatgccagcctgctgaaggtgtacagcaaagaggaccaggacctgctgaaactggtcaagagctaccactggatgggccttgtgcacatccccaccaatggctcttggcagtgggaggacggcagcattctgagccctaacctgctgaccatcatcgagatgcagaagggcgactgcgccctgtacgccagcagctttaagggctacatcgagaattgcagcaccccgaacacctacatctgtatgcagagaaccgttggcggaggcggaagtggaggcggaggatctggcggcggaggctctgacctctttaatcaagaagtccagattccactcaccgaatcctactgcggaccttgtccaaaaaattggatttgttataagaacaactgttatcaattctttgatgagtctaaaaattggtatgagtcccaggcttcctgcatgtctcagaacgcttctctgctgaaagtctactctaaagaagatcaggatctcctgaagctcgtcaagtcttatcattggatggggctcgtccacattcctaccaacggaagctggcaatgggaagatggctccatcctgtctccaaatctgctcacgattattgaaatgcagaaaggggattgtgctctctacgccagctccttcaagggatatattgagaactgtagcacgcccaatacttatatctgtatgcaacggaccgtgggatccggcggcggaggatctggcggaggcggatctgggggcggaggctctttcgaacaagttcagcttcaacagcctggcgctgagctggtcaaacctggcgcttctgtgaagatgagctgcaaagccagcggctacgccttcagcagctactggatcaactggatgaagcagaaacccggccagggactcgaatggatcggccaaatctatcccggcgacggcgacaccaactacaacggcaagttcaagggcagagccacactgaccgccgatacctctagcagcacagcctacatgcagctgagcagcctgaccagcgaagatagcgccgtgtacttctgtgcccggtccatcacaacagtcgtgggctgcgctatggactattggggccagggaacaagcgtgaccgtgtctagtggcggaggcggaagtggaggcggaggatctggcggcggaggctctgacatccagatgacacagagccctagcagcctgtctgccagcgtgggagacagagtgaccatcacatgcaaggccagcgaccacatcaacaactggctggcctggtatcagcagaagcctggacaggcccctaagctgctgatctacggcgctaccacactggaaacaggcgtgcccagcagattttctggcagcggctctggcaccgactacaccctgacaatatccagcctccagcctgaggacttcgccacctactactgtcagcagagctggaacaccccttggacattcggccagggcaccaagctggaaatcaagagaacgcgtggcggaggcagcttcaagatccccatcgaggaactggaagatcgggtgttcgtgaactgcaacacctctatcacctgggtggaaggcaccgtgggaacactgctgagcgacatcaccagactggacctcggcaagcggattctggaccctcggggcatctacagatgcaacggcaccgacatctacaaggacaaagaaagcaccgtgcaggtccactacagaatgtgccagtcctgcgtggaactggaccctgctacagtggccggcatcatcgtgaccgatgtgatcgctactctgctgctggctctgggagtgttctgcttcgccggacacgaaacaggcagactgtctggcgctgccgatacacaggccctgctgagaaacgaccaagtgtatcagcccctgcgcgacagagatgatgcccagtattctcacctcggcggcaactgggctagaaacaag

SEQ ID NO: 4239 - DNA, 2202 bp, Artificial Sequence
  Synthetic Polynucloetide
atggactggatttggcgcatccttttccttgtcggcgctgctaccggcgcccattccctgttcaatcaagaggtgcagatccctctgaccgagagctactgtggcccctgtcctaagaactggatctgctacaagaacaactgctaccagttcttcgacgagagcaagaattggtacgagagccaggccagctgcatgagccagaatgccagcctgctgaaggtgtacagcaaagaggaccaggacctgctgaaactggtcaagagctaccactggatgggccttgtgcacatccccaccaatggctcttggcagtgggaggacggcagcattctgagccctaacctgctgaccatcatcgagatgcagaagggcgactgcgccctgtacgccagcagctttaagggctacatcgagaattgcagcaccccgaacacctacatctgtatgcagagaaccgttggcggaggcggaagtggaggcggaggatctggcggcggaggctctgacctctttaatcaagaagtccagattccactcaccgaatcctactgcggaccttgtccaaaaaattggatttgttataagaacaactgttatcaattctttgatgagtctaaaaattggtatgagtcccaggcttcctgcatgtctcagaacgcttctctgctgaaagtctactctaaagaagatcaggatctcctgaagctcgtcaagtcttatcattggatggggctcgtccacattcctaccaacggaagctggcaatgggaagatggctccatcctgtctccaaatctgctcacgattattgaaatgcagaaaggggattgtgctctctacgccagctccttcaagggatatattgagaactgtagcacgcccaatacttatatctgtatgcaacggaccgtgggatccggcggcggaggatctggcggaggcggatctgggggcggaggctctttcgaacaagttcagcttcaacagcctggcgctgagctggtcaaacctggcgcttctgtgaagatgagctgcaaagccagcggctacgccttcagcagctactggatcaactggatgaagcagaaacccggccagggactcgaatggatcggccaaatctatcccggcgacggcgacaccaactacaacggcaagttcaagggcagagccacactgaccgccgatacctctagcagcacagcctacatgcagctgagcagcctgaccagcgaagatagcgccgtgtacttctgtgcccggtccatcacaacagtcgtgggctgcgctatggactattggggccagggaacaagcgtgaccgtgtctagtggcggaggcggaagtggaggcggaggatctggcggcggaggctctgacatccagatgacacagagccctagcagcctgtctgccagcgtgggagacagagtgaccatcacatgcaaggccagcgaccacatcaacaactggctggcctggtatcagcagaagcctggacaggcccctaagctgctgatctacggcgctaccacactggaaacaggcgtgcccagcagattttctggcagcggctctggcaccgactacaccctgacaatatccagcctccagcctgaggacttcgccacctactactgtcagcagagctggaacaccccttggacattcggccagggcaccaagctggaaatcaagagaacgcgtggcggaggcagccagagcatcaagggcaaccacctggtcaaggtgtacgactaccaagaggacggcagcgtgctgctgacatgtgatgccgaggccaagaacatcacctggtttaaggacggcaagatgatcggcttcctgaccgaggacaagaagaagtggaacctgggcagcaacgctaaggaccccagaggcatgtatcagtgcaagggcagccagaacaagagcaagcccctccaggtgtactaccggatgtgccagaactgcatcgagctgaacgccgctaccatcagcggctttctgttcgccgagatcgtgtccatcttcgtgctggccgtgggcgtgtactttatcgctggacaggatggcgtgcggcagagcagagcttccgataagcaaaccctgctgcctaacgaccagctgtaccagcctctgaaggacagagaggacgaccagtacagccacctccagggcaatcagctgagaagaaac

SEQ ID NO: 4240 - DNA, 2151 bp, Artificial Sequence
  Synthetic Polynucloetide
atggactggatttggcgcatccttttccttgtcggcgctgctaccggcgcccattccctgttcaatcaagaggtgcagatccctctgaccgagagctactgtggcccctgtcctaagaactggatctgctacaagaacaactgctaccagttcttcgacgagagcaagaattggtacgagagccaggccagctgcatgagccagaatgccagcctgctgaaggtgtacagcaaagaggaccaggacctgctgaaactggtcaagagctaccactggatgggccttgtgcacatccccaccaatggctcttggcagtgggaggacggcagcattctgagccctaacctgctgaccatcatcgagatgcagaagggcgactgcgccctgtacgccagcagctttaagggctacatcgagaattgcagcaccccgaacacctacatctgtatgcagagaaccgttggcggaggcggaagtggaggcggaggatctggcggcggaggctctgacctctttaatcaagaagtccagattccactcaccgaatcctactgcggaccttgtccaaaaaattggatttgttataagaacaactgttatcaattctttgatgagtctaaaaattggtatgagtcccaggcttcctgcatgtctcagaacgcttctctgctgaaagtctactctaaagaagatcaggatctcctgaagctcgtcaagtcttatcattggatggggctcgtccacattcctaccaacggaagctggcaatgggaagatggctccatcctgtctccaaatctgctcacgattattgaaatgcagaaaggggattgtgctctctacgccagctccttcaagggatatattgagaactgtagcacgcccaatacttatatctgtatgcaacggaccgtgggatccggcggcggaggatctggcggaggcggatctgggggcggaggctctttcgaacaagttcagcttcaacagcctggcgctgagctggtcaaacctggcgcttctgtgaagatgagctgcaaagccagcggctacgccttcagcagctactggatcaactggatgaagcagaaacccggccagggactcgaatggatcggccaaatctatcccggcgacggcgacaccaactacaacggcaagttcaagggcagagccacactgaccgccgatacctctagcagcacagcctacatgcagctgagcagcctgaccagcgaagatagcgccgtgtacttctgtgcccggtccatcacaacagtcgtgggctgcgctatggactattggggccagggaacaagcgtgaccgtgtctagtggcggaggcggaagtggaggcggaggatctggcggcggaggctctgacatccagatgacacagagccctagcagcctgtctgccagcgtgggagacagagtgaccatcacatgcaaggccagcgaccacatcaacaactggctggcctggtatcagcagaagcctggacaggcccctaagctgctgatctacggcgctaccacactggaaacaggcgtgcccagcagattttctggcagcggctctggcaccgactacaccctgacaatatccagcctccagcctgaggacttcgccacctactactgtcagcagagctggaacaccccttggacattcggccagggcaccaagctggaaatcaagagaacgcgtggcggaggcagccagagttttgggttgttggaccctaaattgtgctatctgttggacggaatcctgttcatttacggagtgatcctgaccgcattgttcctgcgggttaagttttccagatccgcagacgcacccgcttaccaacaagggcagaaccaactctacaatgaacttaatttggggcggagggaagagtacgacgttctggacaaaaggaggggacgagatcccgagatgggcggaaagcctcagcgaaggaagaatccgcaagaggggctttataacgaactccagaaagataaaatggcagaagcctatagtgagattgggatgaagggagaaaggaggaggggtaaaggtcacgatgggttgtaccaaggattgagcacagccactaaagatacctatgatgcgctccacatgcaggccctgccgccaaga

SEQ ID NO: 4241 - DNA, 2268 bp, Artificial Sequence
  Synthetic Polynucloetide
atggactggatttggcgcatccttttccttgtcggcgctgctaccggcgcccattccgggcccctgttcaatcaagaggtgcagatccctctgaccgagagctactgtggcccctgtcctaagaactggatctgctacaagaacaactgctaccagttcttcgacgagagcaagaattggtacgagagccaggccagctgcatgagccagaatgccagcctgctgaaggtgtacagcaaagaggaccaggacctgctgaaactggtcaagagctaccactggatgggccttgtgcacatccccaccaatggctcttggcagtgggaggacggcagcattctgagccctaacctgctgaccatcatcgagatgcagaagggcgactgcgccctgtacgccagcagctttaagggctacatcgagaattgcagcaccccgaacacctacatctgtatgcagagaaccgttggcggaggcggaagtggaggcggaggatctggcggcggaggctctgacctctttaatcaagaagtccagattccactcaccgaatcctactgcggaccttgtccaaaaaattggatttgttataagaacaactgttatcaattctttgatgagtctaaaaattggtatgagtcccaggcttcctgcatgtctcagaacgcttctctgctgaaagtctactctaaagaagatcaggatctcctgaagctcgtcaagtcttatcattggatggggctcgtccacattcctaccaacggaagctggcaatgggaagatggctccatcctgtctccaaatctgctcacgattattgaaatgcagaaaggggattgtgctctctacgccagctccttcaagggatatattgagaactgtagcacgcccaatacttatatctgtatgcaacggaccgtgggatccggcggcggaggatctggcggaggcggatctgggggcggaggctctttcgaacaagttcagcttcaacagcctggcgctgagctggtcaaacctggcgcttctgtgaagatgagctgcaaagccagcggctacgccttcagcagctactggatcaactggatgaagcagaaacccggccagggactcgaatggatcggccaaatctatcccggcgacggcgacaccaactacaacggcaagttcaagggcagagccacactgaccgccgatacctctagcagcacagcctacatgcagctgagcagcctgaccagcgaagatagcgccgtgtacttctgtgcccggtccatcacaacagtcgtgggctgcgctatggactattggggccagggaacaagcgtgaccgtgtctagtacgcgtatccagaaccctgatcctgccgtgtaccagctgcgggatagcaagagcagcgacaagagcgtgtgtctgttcaccgacttcgacagccagaccaacgtgtcccagagcaaggactccgacgtgtacatcaccgataagaccgtgctggacatgcggagcatggacttcaagagcaactccgccgtggcctggtccaacaagtccgatttcgcctgcgccaacgccttcaacaacagcattatccccgaggacacattcttcccaagccccgagagcagctgcgacgtgaagctggtggaaaagagcttcgagacagacaccaacctgaacttccagaacctgagcgtgatcggcttcagaatcctgctgctgaaagtggccggctttaacctgctgatgaccctgcggctgtggtccagccgcgccaagagaagcggatctggcgtgaagcagaccctgaatttcgacctgctgaagctggctggcgacgtggaatccaacccaggcccttctagaggccatatggccaagcctttgtctcaagaagaatccaccctcattgaaagagcaacggctacaatcaacagcatccccatctctgaagactacagcgtcgccagcgcagctctctctagcgacggccgcatcttcactggtgtcaatgtatatcattttactgggggaccttgtgcagaactcgtggtgctgggcactgctgctgctgcggcagctggcaacctgacttgtatcgtcgcgatcggaaatgagaacaggggcatcttgagcccctgcggacggtgccgacaggtgcttctcgatctgcatcctgggatcaaagccatagtgaaggacagtgatggacagccgacggcagttgggattcgtgaattgctgccctctggttatgtgtgggagggctga

SEQ ID NO: 4242 - DNA, 1767 bp, Artificial Sequence
  Synthetic Polynucloetide
atggactggatttggcgcatccttttccttgtcggcgctgctaccggcgcccattccgggcccctgttcaatcaagaggtgcagatccctctgaccgagagctactgtggcccctgtcctaagaactggatctgctacaagaacaactgctaccagttcttcgacgagagcaagaattggtacgagagccaggccagctgcatgagccagaatgccagcctgctgaaggtgtacagcaaagaggaccaggacctgctgaaactggtcaagagctaccactggatgggccttgtgcacatccccaccaatggctcttggcagtgggaggacggcagcattctgagccctaacctgctgaccatcatcgagatgcagaagggcgactgcgccctgtacgccagcagctttaagggctacatcgagaattgcagcaccccgaacacctacatctgtatgcagagaaccgttggcggaggcggaagtggaggcggaggatctggcggcggaggctctgacctctttaatcaagaagtccagattccactcaccgaatcctactgcggaccttgtccaaaaaattggatttgttataagaacaactgttatcaattctttgatgagtctaaaaattggtatgagtcccaggcttcctgcatgtctcagaacgcttctctgctgaaagtctactctaaagaagatcaggatctcctgaagctcgtcaagtcttatcattggatggggctcgtccacattcctaccaacggaagctggcaatgggaagatggctccatcctgtctccaaatctgctcacgattattgaaatgcagaaaggggattgtgctctctacgccagctccttcaagggatatattgagaactgtagcacgcccaatacttatatctgtatgcaacggaccgtgggatccggcggcggaggatctggcggaggcggatctgggggcggaggctctttcgaacaagttcagcttcaacagcctggcgctgagctggtcaaacctggcgcttctgtgaagatgagctgcaaagccagcggctacgccttcagcagctactggatcaactggatgaagcagaaacccggccagggactcgaatggatcggccaaatctatcccggcgacggcgacaccaactacaacggcaagttcaagggcagagccacactgaccgccgatacctctagcagcacagcctacatgcagctgagcagcctgaccagcgaagatagcgccgtgtacttctgtgcccggtccatcacaacagtcgtgggctgcgctatggactattggggccagggaacaagcgtgaccgtgtctagtacgcgtatccagaaccctgatcctgccgtgtaccagctgcgggatagcaagagcagcgacaagagcgtgtgtctgttcaccgacttcgacagccagaccaacgtgtcccagagcaaggactccgacgtgtacatcaccgataagaccgtgctggacatgcggagcatggacttcaagagcaactccgccgtggcctggtccaacaagtccgatttcgcctgcgccaacgccttcaacaacagcattatccccgaggacacattcttcccaagccccgagagcagctgcgacgtgaagctggtggaaaagagcttcgagacagacaccaacctgaacttccagaacctgagcgtgatcggcttcagaatcctgctgctgaaagtggccggctttaacctgctgatgaccctgcggctgtggtccagc

SEQ ID NO: 4243 - DNA, 2304 bp, Artificial Sequence
  Synthetic Polynucloetide
atggactggatttggcgcatccttttccttgtcggcgctgctaccggcgcccattccgggcccctgttcaatcaagaggtgcagatccctctgaccgagagctactgtggcccctgtcctaagaactggatctgctacaagaacaactgctaccagttcttcgacgagagcaagaattggtacgagagccaggccagctgcatgagccagaatgccagcctgctgaaggtgtacagcaaagaggaccaggacctgctgaaactggtcaagagctaccactggatgggccttgtgcacatccccaccaatggctcttggcagtgggaggacggcagcattctgagccctaacctgctgaccatcatcgagatgcagaagggcgactgcgccctgtacgccagcagctttaagggctacatcgagaattgcagcaccccgaacacctacatctgtatgcagagaaccgttggcggaggcggaagtggaggcggaggatctggcggcggaggctctgacctctttaatcaagaagtccagattccactcaccgaatcctactgcggaccttgtccaaaaaattggatttgttataagaacaactgttatcaattctttgatgagtctaaaaattggtatgagtcccaggcttcctgcatgtctcagaacgcttctctgctgaaagtctactctaaagaagatcaggatctcctgaagctcgtcaagtcttatcattggatggggctcgtccacattcctaccaacggaagctggcaatgggaagatggctccatcctgtctccaaatctgctcacgattattgaaatgcagaaaggggattgtgctctctacgccagctccttcaagggatatattgagaactgtagcacgcccaatacttatatctgtatgcaacggaccgtgggatccggcggcggaggatctggcggaggcggatctgggggcggaggctctttcgaacaagttcagcttcaacagcctggcgctgagctggtcaaacctggcgcttctgtgaagatgagctgcaaagccagcggctacgccttcagcagctactggatcaactggatgaagcagaaacccggccagggactcgaatggatcggccaaatctatcccggcgacggcgacaccaactacaacggcaagttcaagggcagagccacactgaccgccgatacctctagcagcacagcctacatgcagctgagcagcctgaccagcgaagatagcgccgtgtacttctgtgcccggtccatcacaacagtcgtgggctgcgctatggactattggggccagggaacaagcgtgaccgtgtctagtacgcgtgagcagaaactgatctcggaagaggatgggagcggcatccagaaccctgatcctgccgtgtaccagctgcgggatagcaagagcagcgacaagagcgtgtgtctgttcaccgacttcgacagccagaccaacgtgtcccagagcaaggactccgacgtgtacatcaccgataagtgcgtgctggacatgcggagcatggacttcaagagcaactccgccgtggcctggtccaacaagtccgatttcgcctgcgccaacgccttcaacaacagcattatccccgaggacacattcttcccaagccccgagagcagctgcgacgtgaagctggtggaaaagagcttcgagacagacaccaacctgaacttccagaacctgagcgtgatcggcttcagaatcctgctgctgaaagtggccggctttaacctgctgatgaccctgcggctgtggtccagccgcgccaagagaagcggatctggcgtgaagcagaccctgaatttcgacctgctgaagctggctggcgacgtggaatccaacccaggcccttctagaggccatatggccaagcctttgtctcaagaagaatccaccctcattgaaagagcaacggctacaatcaacagcatccccatctctgaagactacagcgtcgccagcgcagctctctctagcgacggccgcatcttcactggtgtcaatgtatatcattttactgggggaccttgtgcagaactcgtggtgctgggcactgctgctgctgcggcagctggcaacctgacttgtatcgtcgcgatcggaaatgagaacaggggcatcttgagcccctgcggacggtgccgacaggtgcttctcgatctgcatcctgggatcaaagccatagtgaaggacagtgatggacagccgacggcagttgggattcgtgaattgctgccctctggttatgtgtgggagggctga

SEQ ID NO: 4244 - DNA, 1806 bp, Artificial Sequence
  Synthetic Polynucloetide
atggactggatttggcgcatccttttccttgtcggcgctgctaccggcgcccattccgggcccctgttcaatcaagaggtgcagatccctctgaccgagagctactgtggcccctgtcctaagaactggatctgctacaagaacaactgctaccagttcttcgacgagagcaagaattggtacgagagccaggccagctgcatgagccagaatgccagcctgctgaaggtgtacagcaaagaggaccaggacctgctgaaactggtcaagagctaccactggatgggccttgtgcacatccccaccaatggctcttggcagtgggaggacggcagcattctgagccctaacctgctgaccatcatcgagatgcagaagggcgactgcgccctgtacgccagcagctttaagggctacatcgagaattgcagcaccccgaacacctacatctgtatgcagagaaccgttggcggaggcggaagtggaggcggaggatctggcggcggaggctctgacctctttaatcaagaagtccagattccactcaccgaatcctactgcggaccttgtccaaaaaattggatttgttataagaacaactgttatcaattctttgatgagtctaaaaattggtatgagtcccaggcttcctgcatgtctcagaacgcttctctgctgaaagtctactctaaagaagatcaggatctcctgaagctcgtcaagtcttatcattggatggggctcgtccacattcctaccaacggaagctggcaatgggaagatggctccatcctgtctccaaatctgctcacgattattgaaatgcagaaaggggattgtgctctctacgccagctccttcaagggatatattgagaactgtagcacgcccaatacttatatctgtatgcaacggaccgtgggatccggcggcggaggatctggcggaggcggatctgggggcggaggctctttcgaacaagttcagcttcaacagcctggcgctgagctggtcaaacctggcgcttctgtgaagatgagctgcaaagccagcggctacgccttcagcagctactggatcaactggatgaagcagaaacccggccagggactcgaatggatcggccaaatctatcccggcgacggcgacaccaactacaacggcaagttcaagggcagagccacactgaccgccgatacctctagcagcacagcctacatgcagctgagcagcctgaccagcgaagatagcgccgtgtacttctgtgcccggtccatcacaacagtcgtgggctgcgctatggactattggggccagggaacaagcgtgaccgtgtctagtacgcgtgagcagaaactgatctcggaagaggatgggagcggcatccagaaccctgatcctgccgtgtaccagctgcgggatagcaagagcagcgacaagagcgtgtgtctgttcaccgacttcgacagccagaccaacgtgtcccagagcaaggactccgacgtgtacatcaccgataagtgcgtgctggacatgcggagcatggacttcaagagcaactccgccgtggcctggtccaacaagtccgatttcgcctgcgccaacgccttcaacaacagcattatccccgaggacacattcttcccaagccccgagagcagctgcgacgtgaagctggtggaaaagagcttcgagacagacaccaacctgaacttccagaacctgagcgtgatcggcttcagaatcctgctgctgaaagtggccggctttaacctgctgatgaccctgcggctgtggtccagctga

SEQ ID NO: 4245 - DNA, 1923 bp, Artificial Sequence
  Synthetic Polynucloetide
atggccttaccagtgaccgccttgctcctgccgctggccttgctgctccacgccgccaggccggcatgccaggtccagctcgtcgagtccggcggcggcctcgtccaggccggcgactccgtcaccctctcctgcaccgcctccggccgcaccttctcctcctacgccctcgcctggttccgccagcgccccggcaaggagcgcgagttcgtcgccggcctccgctggggcggccccaccaactacgccgactccgtcaaggaccgcttcaccatctccggcgactccgccaagcacaccatgtacctccagatgaactccctcaagcccgaggacaccgccgtctactactgcggctacaaccccggcggctgggccgtcccctcccagtacgagtacgactcctggggccagggcacccaggtcaccgtctcctccggtaccggcggaggcggatctggcggcggaggtagcggtggcggaggatctgaattcgacatccagatgacacagagccctagcagcctgtctgccagcgtgggagacagagtgaccatcacatgcaaggccagcgaccacatcaacaactggctggcctggtatcagcagaagcctggacaggcccctaagctgctgatctacggcgctaccacactggaaacaggcgtgcccagcagattttctggcagcggctctggcaccgactacaccctgacaatatccagcctccagcctgaggacttcgccacctactactgtcagcagagctggaacaccccttggacattcggccagggcaccaagctggaaatcaagagaggcggaggcggaagtggaggcggaggatctggcggcggaggctctcaagttcagcttcaacagcctggcgctgagctggtcaaacctggcgcttctgtgaagatgagctgcaaagccagcggctacgccttcagcagctactggatcaactggatgaagcagaaacccggccagggactcgaatggatcggccaaatctatcccggcgacggcgacaccaactacaacggcaagttcaagggcagagccacactgaccgccgatacctctagcagcacagcctacatgcagctgagcagcctgaccagcgaagatagcgccgtgtacttctgtgcccggtccatcacaacagtcgtgggctgcgctatggactattggggccagggaacaagcgtgaccgtgtctagtacgcgtgagcagaaactgatctcggaagaggatctgaaaattgaagttatgtatcctcctccttacctagacaatgagaagagcaatggaaccattatccatgtgaaagggaaacacctttgtccaagtcccctatttcccggaccttctaagcccttttgggtgctggtggtggttgggggagtcctggcttgctatagcttgctagtaacagtggcctttattattttctgggtgaggagtaagaggagcaggctcctgcacagtgactacatgaacatgactccacgccgccccggacccacccgcaagcattaccagccctatgccccaccacgcgacttcgcagcctatcgctccagagtgaagttcagcaggagcgcagacgcccccgcgtaccagcagggccagaaccagctctataacgagctcaatctaggacgaagagaggagtacgatgttttggacaagagacgtggccgggaccctgagatggggggaaagccgagaaggaagaaccctcaggaaggcctgtacaatgaactgcagaaagataagatggcggaggcctacagtgagattgggatgaaaggcgagcgccggaggggcaaggggcacgatggcctttaccagggtctcagtacagccaccaaggacacctacgacgcccttcacatgcaggccctgccccctcgc

SEQ ID NO: 4246 - DNA, 1944 bp, Artificial Sequence
  Synthetic Polynucloetide
atggccttaccagtgaccgccttgctcctgccgctggccttgctgctccacgccgccaggccggcatgccaggtccagctcgtcgagtccggcggcggcctcgtccaggccggcgactccgtcaccctctcctgcaccgcctccggccgcaccttctcctcctacgccctcgcctggttccgccagcgccccggcaaggagcgcgagttcgtcgccggcctccgctggggcggccccaccaactacgccgactccgtcaaggaccgcttcaccatctccggcgactccgccaagcacaccatgtacctccagatgaactccctcaagcccgaggacaccgccgtctactactgcggctacaaccccggcggctgggccgtcccctcccagtacgagtacgactcctggggccagggcacccaggtcaccgtctcctccggtaccggcggaggcggatctggcggcggaggtagcggtggcggaggatctgaattcgacatccagatgacacagagccctagcagcctgtctgccagcgtgggagacagagtgaccatcacatgcaaggccagcgaccacatcaacaactggctggcctggtatcagcagaagcctggacaggcccctaagctgctgatctacggcgctaccacactggaaacaggcgtgcccagcagattttctggcagcggctctggcaccgactacaccctgacaatatccagcctccagcctgaggacttcgccacctactactgtcagcagagctggaacaccccttggacattcggccagggcaccaagctggaaatcaagagaggcggaggcggaagtggaggcggaggatctggcggcggaggctctcaagttcagcttcaacagcctggcgctgagctggtcaaacctggcgcttctgtgaagatgagctgcaaagccagcggctacgccttcagcagctactggatcaactggatgaagcagaaacccggccagggactcgaatggatcggccaaatctatcccggcgacggcgacaccaactacaacggcaagttcaagggcagagccacactgaccgccgatacctctagcagcacagcctacatgcagctgagcagcctgaccagcgaagatagcgccgtgtacttctgtgcccggtccatcacaacagtcgtgggctgcgctatggactattggggccagggaacaagcgtgaccgtgtctagtacgcgtgagcagaaactgatctcggaagaggatctggcgaagcccaccacgacgccagcgccgcgaccaccaacaccggcgcccaccatcgcgtcgcagcccctgtccctgcgcccagaggcgtgccggccagcggcggggggcgcagtgcacacgagggggctggacttcgcctgtgacatctacatctgggcgcccttggccgggacttgtggggtccttctcctgtcactggttatcaccctttactgcaaacggggcagaaagaaactcctgtatatattcaaacaaccatttatgagaccagtacaaactactcaagaggaagatggctgtagctgccgatttccagaagaagaagaaggaggatgtgaactgagagtgaagttcagcaggagcgcagacgcccccgcgtaccagcagggccagaaccagctctataacgagctgaatctaggacgaagagaggagtacgatgttttggacaagagacgtggccgggaccctgagatggggggaaagccgagaaggaagaaccctcaggaaggcctgtacaatgaactgcagaaagataagatggcggaggcctacagtgagattgggatgaaaggcgagcgccggaggggcaaggggcacgatggcctttaccagggtctcagtacagccaccaaggacacctacgacgcccttcacatgcaggccctgccccctcgctga

SEQ ID NO: 4247 - DNA, 3183 bp, Artificial Sequence
  Synthetic Polynucloetide
atggccttaccagtgaccgccttgctcctgccgctggccttgctgctccacgccgccaggccggcatgccaggtccagctcgtcgagtccggcggcggcctcgtccaggccggcgactccgtcaccctctcctgcaccgcctccggccgcaccttctcctcctacgccctcgcctggttccgccagcgccccggcaaggagcgcgagttcgtcgccggcctccgctggggcggccccaccaactacgccgactccgtcaaggaccgcttcaccatctccggcgactccgccaagcacaccatgtacctccagatgaactccctcaagcccgaggacaccgccgtctactactgcggctacaaccccggcggctgggccgtcccctcccagtacgagtacgactcctggggccagggcacccaggtcaccgtctcctccggtaccggcggaggcggatctggcggcggaggtagcggtggcggaggatctgaattcgacatccagatgacacagagccctagcagcctgtctgccagcgtgggagacagagtgaccatcacatgcaaggccagcgaccacatcaacaactggctggcctggtatcagcagaagcctggacaggcccctaagctgctgatctacggcgctaccacactggaaacaggcgtgcccagcagattttctggcagcggctctggcaccgactacaccctgacaatatccagcctccagcctgaggacttcgccacctactactgtcagcagagctggaacaccccttggacattcggccagggcaccaagctggaaatcaagagaggcggaggcggaagtggaggcggaggatctggcggcggaggctctcaagttcagcttcaacagcctggcgctgagctggtcaaacctggcgcttctgtgaagatgagctgcaaagccagcggctacgccttcagcagctactggatcaactggatgaagcagaaacccggccagggactcgaatggatcggccaaatctatcccggcgacggcgacaccaactacaacggcaagttcaagggcagagccacactgaccgccgatacctctagcagcacagcctacatgcagctgagcagcctgaccagcgaagatagcgccgtgtacttctgtgcccggtccatcacaacagtcgtgggctgcgctatggactattggggccagggaacaagcgtgaccgtgtctagtacgcgtgagcagaaactgatctcggaagaggatctggcgaagcccaccacgacgccagcgccgcgaccaccaacaccggcgcccaccatcgcgtcgcagcccctgtccctgcgcccagaggcgtgccggccagcggcggggggcgcagtgcacacgagggggctggacttcgcctgtgacatctacatctgggcgcccttggccgggacttgtggggtccttctcctgtcactggttatcaccctttactgcgggcgcgccagagtgaagttcagcaggagcgcagacgcccccgcgtaccagcagggccagaaccagctctataacgagctgaatctaggacgaagagaggagtacgatgttttggacaagagacgtggccgggaccctgagatggggggaaagccgagaaggaagaaccctcaggaaggcctgtacaatgaactgcagaaagataagatggcggaggcctacagtgagattgggatgaaaggcgagcgccggaggggcaaggggcacgatggcctttaccagggtctcagtacagccaccaaggacacctacgacgcccttcacatgcaggccctgccccctcgctctagaggatctggagcaacaaacttctcactactcaaacaagcaggtgacgtggaggagaatcccgggcctgggatccacatggccacttacgaggttctctgtgaggtggcgcggaaactgggcacggatgacagggaagtggtattgttcctcctaaacgtgttcatacctcaacccacactggcccaattaattggagctcttagagctttaaaggaggagggcaggttaacgtttcccctgttagcggaatgtctgtttcgtgcaggtcgcagagacctcttgcgcgacctgcttcacttagacccgcgttttttagagcgccacctagcgggcacaatgagttatttcagcccttatcagctcactgttctccacgtagacggggagctgtgtgcgagggatattaggtctttgatatttttaagcaaggacactatagggtctcgcagcacaccacagacattcttacactgggtgtactgtatggaaaacttagacctactgggtcccactgacgtggatgccctaatgtcaatgcttagatctttgtcaagagtagacctacagcgccaagtgcaaaccctaatgggccttcacctttccggcccatcacactcccaacactatcgccatacaccactcgagaccgatttctacgactacaaggacgacgatgacaagactagtggctccggcgagggcagaggaagtctactaacctgcggagatgtggaagaaaatcctggcccacatatgaccgagtacaagcccacggtgcgcctcgccacccgcgacgacgtccccagggccgtacgcaccctcgccgccgcgttcgccgactaccccgccacgcgccacaccgtcgatccggaccgccacatcgagcgggtcaccgagctgcaagaactcttcctcacgcgcgtcgggctcgacatcggcaaggtgtgggtcgcggacgacggcgccgcggtggcggtctggaccacgccggagagcgtcgaagcgggggcggtgttcgccgagatcggcccgcgcatggccgagttgagcggttcccggctggccgcgcagcaacagatggaaggcctcctggcgccgcaccggcccaaggagcccgcgtggttcctggccaccgtcggcgtctcgcccgaccaccagggcaagggtctgggcagcgccgtcgtgctccccggagtggaggcggccgagcgcgccggggtgcccgccttcctggagacctccgcgccccgcaacctccccttctacgagcggctcggcttcaccgtcaccgccgacgtcgaggtgcccgaaggaccgcgcacctggtgcatgacccgcaagcccggtgcctga

SEQ ID NO: 4248 - DNA, 3003 bp, Artificial Sequence
  Synthetic Polynucloetide
atggccttaccagtgaccgccttgctcctgccgctggccttgctgctccacgccgccaggccggcatgccaggtccagctcgtcgagtccggcggcggcctcgtccaggccggcgactccgtcaccctctcctgcaccgcctccggccgcaccttctcctcctacgccctcgcctggttccgccagcgccccggcaaggagcgcgagttcgtcgccggcctccgctggggcggccccaccaactacgccgactccgtcaaggaccgcttcaccatctccggcgactccgccaagcacaccatgtacctccagatgaactccctcaagcccgaggacaccgccgtctactactgcggctacaaccccggcggctgggccgtcccctcccagtacgagtacgactcctggggccagggcacccaggtcaccgtctcctccggtaccggcggaggcggatctggcggcggaggtagcggtggcggaggatctgaattcgacatccagatgacacagagccctagcagcctgtctgccagcgtgggagacagagtgaccatcacatgcaaggccagcgaccacatcaacaactggctggcctggtatcagcagaagcctggacaggcccctaagctgctgatctacggcgctaccacactggaaacaggcgtgcccagcagattttctggcagcggctctggcaccgactacaccctgacaatatccagcctccagcctgaggacttcgccacctactactgtcagcagagctggaacaccccttggacattcggccagggcaccaagctggaaatcaagagactcgagatccagaaccctgatcctgccgtgtaccagctgcgggatagcaagagcagcgacaagagcgtgtgtctgttcaccgacttcgacagccagaccaacgtgtcccagagcaaggactccgacgtgtacatcaccgataagtgcgtgctggacatgcggagcatggacttcaagagcaactccgccgtggcctggtccaacaagtccgatttcgcctgcgccaacgccttcaacaacagcattatccccgaggacacattcttcccaagcagcgacgtgccctgcgacgtgaagctggtggaaaagagcttcgagacagacaccaacctgaacttccagaacctgagcgtgatcggcttcagaatcctgctgctgaaagtggccggctttaacctgctgatgaccctgcggctgtggtccagccgcgccaagagaagcggatctggcgtgaagcagaccctgaatttcgacctgctgaagctggctggcgacgtggaatccaacccaggccctactagtatggactggatttggcgcatccttttccttgtcggcgctgctaccggcgcgcattccttcgaacaagttcagcttcaacagcctggcgctgagctggtcaaacctggcgcttctgtgaagatgagctgcaaagccagcggctacgccttcagcagctactggatcaactggatgaagcagaaacccggccagggactcgaatggatcggccaaatctatcccggcgacggcgacaccaactacaacggcaagttcaagggcagagccacactgaccgccgatacctctagcagcacagcctacatgcagctgagcagcctgaccagcgaagatagcgccgtgtacttctgtgcccggtccatcacaacagtcgtgggctgcgctatggactattggggccagggaacaagcgtgaccgtgtctagtacgcgtgaggacctgaagaacgtgttcccacctgaggtggccgtgttcgagcctagcaaggccgagatcgcccacacccagaaagccaccctcgtgtgcctggctaccggcttctaccccgaccatgtggaactgtcttggtgggtcaacggcaaagaggtgcacagcggcgtgtgtaccgacccccagccactgaaagaacagcccgccctgaacgacagccggtactgcctgagcagcagactgagagtgtccgccaccttctggcagaacccccggaaccacttcagatgccaggtgcagttctacggcctgagcgagaacgacgagtggacccaggacagagccaagcccgtgacccagatcgtgtctgccgaagcctggggcagagccgattgcggcatcaccagcgccagctaccaccagggcgtgctgagcgccaccatcctgtacgagatcctgctgggcaaggccaccctgtacgccgtgctggtgtctgccctggtgctgatggctatggtcaagcggaaggacagccggggaagggccaagcgatctggatctggagcaacaaacttctcactactcaaacaagcaggtgacgtggaggagaatcccgggccttctagaggccatatgaccgagtacaagcccacggtgcgcctcgccacccgcgacgacgtccccagggccgtacgcaccctcgccgccgcgttcgccgactaccccgccacgcgccacaccgtcgatccggaccgccacatcgagcgggtcaccgagctgcaagaactcttcctcacgcgcgtcgggctcgacatcggcaaggtgtgggtcgcggacgacggcgccgcggtggcggtctggaccacgccggagagcgtcgaagcgggggcggtgttcgccgagatcggcccgcgcatggccgagttgagcggttcccggctggccgcgcagcaacagatggaaggcctcctggcgccgcaccggcccaaggagcccgcgtggttcctggccaccgtcggcgtctcgcccgaccaccagggcaagggtctgggcagcgccgtcgtgctccccggagtggaggcggccgagcgcgccggggtgcccgccttcctggagacctccgcgccccgcaacctccccttctacgagcggctcggcttcaccgtcaccgccgacgtcgaggtgcccgaaggaccgcgcacctggtgcatgacccgcaagcccggtgcctga

SEQ ID NO: 4249 - DNA, 3000 bp, Artificial Sequence
  Synthetic Polynucloetide
atggccttaccagtgaccgccttgctcctgccgctggccttgctgctccacgccgccaggccggcatgccaggtccagctcgtcgagtccggcggcggcctcgtccaggccggcgactccgtcaccctctcctgcaccgcctccggccgcaccttctcctcctacgccctcgcctggttccgccagcgccccggcaaggagcgcgagttcgtcgccggcctccgctggggcggccccaccaactacgccgactccgtcaaggaccgcttcaccatctccggcgactccgccaagcacaccatgtacctccagatgaactccctcaagcccgaggacaccgccgtctactactgcggctacaaccccggcggctgggccgtcccctcccagtacgagtacgactcctggggccagggcacccaggtcaccgtctcctccggtaccggcggaggcggatctggcggcggaggtagcggtggcggaggatctgaattcgacatccagatgacacagagccctagcagcctgtctgccagcgtgggagacagagtgaccatcacatgcaaggccagcgaccacatcaacaactggctggcctggtatcagcagaagcctggacaggcccctaagctgctgatctacggcgctaccacactggaaacaggcgtgcccagcagattttctggcagcggctctggcaccgactacaccctgacaatatccagcctccagcctgaggacttcgccacctactactgtcagcagagctggaacaccccttggacattcggccagggcaccaagctggaaatcaagagactcgaggacctgaagaacgtgttcccacctgaggtggccgtgttcgagcctagcaaggccgagatcgcccacacccagaaagccaccctcgtgtgcctggctaccggcttctaccccgaccatgtggaactgtcttggtgggtcaacggcaaagaggtgcacagcggcgtgtgtaccgacccccagccactgaaagaacagcccgccctgaacgacagccggtactgcctgagcagcagactgagagtgtccgccaccttctggcagaacccccggaaccacttcagatgccaggtgcagttctacggcctgagcgagaacgacgagtggacccaggacagagccaagcccgtgacccagatcgtgtctgccgaagcctggggcagagccgattgcggcatcaccagcgccagctaccaccagggcgtgctgagcgccaccatcctgtacgagatcctgctgggcaaggccaccctgtacgccgtgctggtgtctgccctggtgctgatggctatggtcaagcggaaggacagccggggaagggccaagcgatctggatctggagcaacaaacttctcactactcaaacaagcaggtgacgtggaggagaatcccgggcctactagtatggactggatttggcgcatccttttccttgtcggcgctgctaccggcgcgcattccttcgaacaagttcagcttcaacagcctggcgctgagctggtcaaacctggcgcttctgtgaagatgagctgcaaagccagcggctacgccttcagcagctactggatcaactggatgaagcagaaacccggccagggactcgaatggatcggccaaatctatcccggcgacggcgacaccaactacaacggcaagttcaagggcagagccacactgaccgccgatacctctagcagcacagcctacatgcagctgagcagcctgaccagcgaagatagcgccgtgtacttctgtgcccggtccatcacaacagtcgtgggctgcgctatggactattggggccagggaacaagcgtgaccgtgtctagtacgcgtatccagaaccctgatcctgccgtgtaccagctgcgggatagcaagagcagcgacaagagcgtgtgtctgttcaccgacttcgacagccagaccaacgtgtcccagagcaaggactccgacgtgtacatcaccgataagtgcgtgctggacatgcggagcatggacttcaagagcaactccgccgtggcctggtccaacaagtccgatttcgcctgcgccaacgccttcaacaacagcattatccccgaggacacattcttcccaagcagcgacgtgccctgcgacgtgaagctggtggaaaagagcttcgagacagacaccaacctgaacttccagaacctgagcgtgatcggcttcagaatcctgctgctgaaagtggccggctttaacctgctgatgaccctgcggctgtggtccagccgcgccaagagaagcggatctggcgtgaagcagaccctgaatttcgacctgctgaagctggctggcgacgtggaatccaacccaggcccttctagaggccatatgaccgagtacaagcccacggtgcgcctcgccacccgcgacgacgtccccagggccgtacgcaccctcgccgccgcgttcgccgactaccccgccacgcgccacaccgtcgatccggaccgccacatcgagcgggtcaccgagctgcaagaactcttcctcacgcgcgtcgggctcgacatcggcaaggtgtgggtcgcggacgacggcgccgcggtggcggtctggaccacgccggagagcgtcgaagcgggggcggtgttcgccgagatcggcccgcgcatggccgagttgagcggttcccggctggccgcgcagcaacagatggaaggcctcctggcgccgcaccggcccaaggagcccgcgtggttcctggccaccgtcggcgtctcgcccgaccaccagggcaagggtctgggcagcgccgtcgtgctccccggagtggaggcggccgagcgcgccggggtgcccgccttcctggagacctccgcgccccgcaacctccccttctacgagcggctcggcttcaccgtcaccgccgacgtcgaggtgcccgaaggaccgcgcacctggtgcatgacccgcaagcccggtgcctga

SEQ ID NO: 4250 - DNA, 2298 bp, Artificial Sequence
  Synthetic Polynucloetide
atggccttaccagtgaccgccttgctcctgccgctggccttgctgctccacgccgccaggccggcatgccaggtccagctcgtcgagtccggcggcggcctcgtccaggccggcgactccgtcaccctctcctgcaccgcctccggccgcaccttctcctcctacgccctcgcctggttccgccagcgccccggcaaggagcgcgagttcgtcgccggcctccgctggggcggccccaccaactacgccgactccgtcaaggaccgcttcaccatctccggcgactccgccaagcacaccatgtacctccagatgaactccctcaagcccgaggacaccgccgtctactactgcggctacaaccccggcggctgggccgtcccctcccagtacgagtacgactcctggggccagggcacccaggtcaccgtctcctccggtaccggcggaggcggatctggcggcggaggtagcggtggcggaggatctgaattcgacatccagatgacacagagccctagcagcctgtctgccagcgtgggagacagagtgaccatcacatgcaaggccagcgaccacatcaacaactggctggcctggtatcagcagaagcctggacaggcccctaagctgctgatctacggcgctaccacactggaaacaggcgtgcccagcagattttctggcagcggctctggcaccgactacaccctgacaatatccagcctccagcctgaggacttcgccacctactactgtcagcagagctggaacaccccttggacattcggccagggcaccaagctggaaatcaagagactcgaggacctgaagaacgtgttcccacctgaggtggccgtgttcgagcctagcgaggccgagatcagccacacccagaaagccaccctcgtgtgcctggctaccggcttctaccccgaccatgtggaactgtcttggtgggtcaacggcaaagaggtgcacagcggcgtgtgtaccgacccccagccactgaaagaacagcccgccctgaacgacagccggtactgcctgagcagcagactgagagtgtccgccaccttctggcagaacccccggaaccacttcagatgccaggtgcagttctacggcctgagcgagaacgacgagtggacccaggacagagccaagcccgtgacccagatcgtgtctgccgaagcctggggcagagccgattgcggctttaccagcgagagctaccagcagggcgtgctgagcgccaccatcctgtacgagatcctgctgggcaaggccaccctgtacgccgtgctggtgtctgccctggtgctgatggctatggtcaagcggaaggacagccggggaagggccaagcgatctggatctggagcaacaaacttctcactactcaaacaagcaggtgacgtggaggagaatcccgggcctactagtatggactggatttggcgcatccttttccttgtcggcgctgctaccggcgcgcattccttcgaacaagttcagcttcaacagcctggcgctgagctggtcaaacctggcgcttctgtgaagatgagctgcaaagccagcggctacgccttcagcagctactggatcaactggatgaagcagaaacccggccagggactcgaatggatcggccaaatctatcccggcgacggcgacaccaactacaacggcaagttcaagggcagagccacactgaccgccgatacctctagcagcacagcctacatgcagctgagcagcctgaccagcgaagatagcgccgtgtacttctgtgcccggtccatcacaacagtcgtgggctgcgctatggactattggggccagggaacaagcgtgaccgtgtctagtacgcgtatccagaaccctgatcctgccgtgtaccagctgcgggatagcaagagcagcgacaagagcgtgtgtctgttcaccgacttcgacagccagaccaacgtgtcccagagcaaggactccgacgtgtacatcaccgataagtgcgtgctggacatgcggagcatggacttcaagagcaactccgccgtggcctggtccaacaagtccgatttcgcctgcgccaacgccttcaacaacagcattatccccgaggacacattcttcccaagccccgagagcagctgcgacgtgaagctggtggaaaagagcttcgagacagacaccaacctgaacttccagaacctgagcgtgatcggcttcagaatcctgctgctgaaagtggccggctttaacctgctgatgaccctgcggctgtggtccagc

SEQ ID NO: 4251 - DNA, 2973 bp, Artificial Sequence
  Synthetic Polynucloetide
atggccttaccagtgaccgccttgctcctgccgctggccttgctgctccacgccgccaggccggcatgccaggtccagctcgtcgagtccggcggcggcctcgtccaggccggcgactccgtcaccctctcctgcaccgcctccggccgcaccttctcctcctacgccctcgcctggttccgccagcgccccggcaaggagcgcgagttcgtcgccggcctccgctggggcggccccaccaactacgccgactccgtcaaggaccgcttcaccatctccggcgactccgccaagcacaccatgtacctccagatgaactccctcaagcccgaggacaccgccgtctactactgcggctacaaccccggcggctgggccgtcccctcccagtacgagtacgactcctggggccagggcacccaggtcaccgtctcctccggtaccggcggaggcggatctggcggcggaggtagcggtggcggaggatctgaattcgacatccagatgacacagagccctagcagcctgtctgccagcgtgggagacagagtgaccatcacatgcaaggccagcgaccacatcaacaactggctggcctggtatcagcagaagcctggacaggcccctaagctgctgatctacggcgctaccacactggaaacaggcgtgcccagcagattttctggcagcggctctggcaccgactacaccctgacaatatccagcctccagcctgaggacttcgccacctactactgtcagcagagctggaacaccccttggacattcggccagggcaccaagctggaaatcaagagactcgaggacctgaagaacgtgttcccacctgaggtggccgtgttcgagcctagcgaggccgagatcagccacacccagaaagccaccctcgtgtgcctggctaccggcttctaccccgaccatgtggaactgtcttggtgggtcaacggcaaagaggtgcacagcggcgtgtgtaccgacccccagccactgaaagaacagcccgccctgaacgacagccggtactgcctgagcagcagactgagagtgtccgccaccttctggcagaacccccggaaccacttcagatgccaggtgcagttctacggcctgagcgagaacgacgagtggacccaggacagagccaagcccgtgacccagatcgtgtctgccgaagcctggggcagagccgattgcggctttaccagcgagagctaccagcagggcgtgctgagcgccaccatcctgtacgagatcctgctgggcaaggccaccctgtacgccgtgctggtgtctgccctggtgctgatggctatggtcaagcggaaggacagccggggaagggccaagcgatctggatctggagcaacaaacttctcactactcaaacaagcaggtgacgtggaggagaatcccgggcctactagtatggactggatttggcgcatccttttccttgtcggcgctgctaccggcgcgcattccttcgaacaagttcagcttcaacagcctggcgctgagctggtcaaacctggcgcttctgtgaagatgagctgcaaagccagcggctacgccttcagcagctactggatcaactggatgaagcagaaacccggccagggactcgaatggatcggccaaatctatcccggcgacggcgacaccaactacaacggcaagttcaagggcagagccacactgaccgccgatacctctagcagcacagcctacatgcagctgagcagcctgaccagcgaagatagcgccgtgtacttctgtgcccggtccatcacaacagtcgtgggctgcgctatggactattggggccagggaacaagcgtgaccgtgtctagtacgcgtatccagaaccctgatcctgccgtgtaccagctgcgggatagcaagagcagcgacaagagcgtgtgtctgttcaccgacttcgacagccagaccaacgtgtcccagagcaaggactccgacgtgtacatcaccgataagtgcgtgctggacatgcggagcatggacttcaagagcaactccgccgtggcctggtccaacaagtccgatttcgcctgcgccaacgccttcaacaacagcattatccccgaggacacattcttcccaagccccgagagcagctgcgacgtgaagctggtggaaaagagcttcgagacagacaccaacctgaacttccagaacctgagcgtgatcggcttcagaatcctgctgctgaaagtggccggctttaacctgctgatgaccctgcggctgtggtccagccgcgccaagagaagcggatctggcgtgaagcagaccctgaatttcgacctgctgaagctggctggcgacgtggaatccaacccaggcccttctagaggcgggatccacaccatggctacctacgaggtgctgtgcgaggtggcaagaaagctgggcaccgacgacagagaagtggtgctgttcctgctgaacgtgttcatccctcagcctacactggcccagctgatcggtgcactgagagccctgaaagaggaaggccggctgacctttcctctgctggccgaatgcctgttcagagccggaagaagggatctgctgcgggacctgctgcatctggaccccagatttctggaaagacacctggccggcaccatgagctacttcagcccttaccagctgaccgtgctgcacgttgacggcgaactgtgcgccagagatattcggagcctgatcttcctgagcaaggacaccatcggcagccggtctacccctcagacatttctgcactgggtgtactgcatggaaaacctggacctgctcggccccacagatgtggatgccctgatgtccatgctgagaagcctgagcagagtggacctccagagacaggtgcagacactgatgggactgcacctgagcggacctagccacagccagcactacagacacacccct

SEQ ID NO: 4252 - DNA, 2310 bp, Artificial Sequence
  Synthetic Polynucloetide
atggccttaccagtgaccgccttgctcctgccgctggccttgctgctccacgccgccaggccggcatgccaggtccagctcgtcgagtccggcggcggcctcgtccaggccggcgactccgtcaccctctcctgcaccgcctccggccgcaccttctcctcctacgccctcgcctggttccgccagcgccccggcaaggagcgcgagttcgtcgccggcctccgctggggcggccccaccaactacgccgactccgtcaaggaccgcttcaccatctccggcgactccgccaagcacaccatgtacctccagatgaactccctcaagcccgaggacaccgccgtctactactgcggctacaaccccggcggctgggccgtcccctcccagtacgagtacgactcctggggccagggcacccaggtcaccgtctcctccggtaccggcggaggcggatctggcggcggaggtagcggtggcggaggatctgaattcgacatccagatgacacagagccctagcagcctgtctgccagcgtgggagacagagtgaccatcacatgcaaggccagcgaccacatcaacaactggctggcctggtatcagcagaagcctggacaggcccctaagctgctgatctacggcgctaccacactggaaacaggcgtgcccagcagattttctggcagcggctctggcaccgactacaccctgacaatatccagcctccagcctgaggacttcgccacctactactgtcagcagagctggaacaccccttggacattcggccagggcaccaagctggaaatcaagagactcgagatccagaaccctgatcctgccgtgtaccagctgcgggatagcaagagcagcgacaagagcgtgtgtctgttcaccgacttcgacagccagaccaacgtgtcccagagcaaggactccgacgtgtacatcaccgataagtgcgtgctggacatgcggagcatggacttcaagagcaactccgccgtggcctggtccaacaagtccgatttcgcctgcgccaacgccttcaacaacagcattatccccgaggacacattcttcccaagccccgagagcagctgcgacgtgaagctggtggaaaagagcttcgagacagacaccaacctgaacttccagaacctgagcgtgatcggcttcagaatcctgctgctgaaagtggccggctttaacctgctgatgaccctgcggctgtggtccagccgcgccaagagaagcggatctggcgtgaagcagaccctgaatttcgacctgctgaagctggctggcgacgtggaatccaacccaggccctactagtatggactggatttggcgcatccttttccttgtcggcgctgctaccggcgcgcattccttcgaacaagttcagcttcaacagcctggcgctgagctggtcaaacctggcgcttctgtgaagatgagctgcaaagccagcggctacgccttcagcagctactggatcaactggatgaagcagaaacccggccagggactcgaatggatcggccaaatctatcccggcgacggcgacaccaactacaacggcaagttcaagggcagagccacactgaccgccgatacctctagcagcacagcctacatgcagctgagcagcctgaccagcgaagatagcgccgtgtacttctgtgcccggtccatcacaacagtcgtgggctgcgctatggactattggggccagggaacaagcgtgaccgtgtctagtacgcgtgaggacctgaagaacgtgttcccacctgaggtggccgtgttcgagcctagcgaggccgagatcagccacacccagaaagccaccctcgtgtgcctggctaccggcttctaccccgaccatgtggaactgtcttggtgggtcaacggcaaagaggtgcacagcggcgtgtgtaccgacccccagccactgaaagaacagcccgccctgaacgacagccggtactgcctgagcagcagactgagagtgtccgccaccttctggcagaacccccggaaccacttcagatgccaggtgcagttctacggcctgagcgagaacgacgagtggacccaggacagagccaagcccgtgacccagatcgtgtctgccgaagcctggggcagagccgattgcggctttaccagcgagagctaccagcagggcgtgctgagcgccaccatcctgtacgagatcctgctgggcaaggccaccctgtacgccgtgctggtgtctgccctggtgctgatggctatggtcaagcggaaggacagccgggga

SEQ ID NO: 4253 - DNA, 2976 bp, Artificial Sequence
  Synthetic Polynucloetide
atggccttaccagtgaccgccttgctcctgccgctggccttgctgctccacgccgccaggccggcatgccaggtccagctcgtcgagtccggcggcggcctcgtccaggccggcgactccgtcaccctctcctgcaccgcctccggccgcaccttctcctcctacgccctcgcctggttccgccagcgccccggcaaggagcgcgagttcgtcgccggcctccgctggggcggccccaccaactacgccgactccgtcaaggaccgcttcaccatctccggcgactccgccaagcacaccatgtacctccagatgaactccctcaagcccgaggacaccgccgtctactactgcggctacaaccccggcggctgggccgtcccctcccagtacgagtacgactcctggggccagggcacccaggtcaccgtctcctccggtaccggcggaggcggatctggcggcggaggtagcggtggcggaggatctgaattcgacatccagatgacacagagccctagcagcctgtctgccagcgtgggagacagagtgaccatcacatgcaaggccagcgaccacatcaacaactggctggcctggtatcagcagaagcctggacaggcccctaagctgctgatctacggcgctaccacactggaaacaggcgtgcccagcagattttctggcagcggctctggcaccgactacaccctgacaatatccagcctccagcctgaggacttcgccacctactactgtcagcagagctggaacaccccttggacattcggccagggcaccaagctggaaatcaagagactcgagatccagaaccctgatcctgccgtgtaccagctgcgggatagcaagagcagcgacaagagcgtgtgtctgttcaccgacttcgacagccagaccaacgtgtcccagagcaaggactccgacgtgtacatcaccgataagtgcgtgctggacatgcggagcatggacttcaagagcaactccgccgtggcctggtccaacaagtccgatttcgcctgcgccaacgccttcaacaacagcattatccccgaggacacattcttcccaagccccgagagcagctgcgacgtgaagctggtggaaaagagcttcgagacagacaccaacctgaacttccagaacctgagcgtgatcggcttcagaatcctgctgctgaaagtggccggctttaacctgctgatgaccctgcggctgtggtccagccgcgccaagagaagcggatctggcgtgaagcagaccctgaatttcgacctgctgaagctggctggcgacgtggaatccaacccaggccctactagtatggactggatttggcgcatccttttccttgtcggcgctgctaccggcgcgcattccttcgaacaagttcagcttcaacagcctggcgctgagctggtcaaacctggcgcttctgtgaagatgagctgcaaagccagcggctacgccttcagcagctactggatcaactggatgaagcagaaacccggccagggactcgaatggatcggccaaatctatcccggcgacggcgacaccaactacaacggcaagttcaagggcagagccacactgaccgccgatacctctagcagcacagcctacatgcagctgagcagcctgaccagcgaagatagcgccgtgtacttctgtgcccggtccatcacaacagtcgtgggctgcgctatggactattggggccagggaacaagcgtgaccgtgtctagtacgcgtgaggacctgaagaacgtgttcccacctgaggtggccgtgttcgagcctagcgaggccgagatcagccacacccagaaagccaccctcgtgtgcctggctaccggcttctaccccgaccatgtggaactgtcttggtgggtcaacggcaaagaggtgcacagcggcgtgtgtaccgacccccagccactgaaagaacagcccgccctgaacgacagccggtactgcctgagcagcagactgagagtgtccgccaccttctggcagaacccccggaaccacttcagatgccaggtgcagttctacggcctgagcgagaacgacgagtggacccaggacagagccaagcccgtgacccagatcgtgtctgccgaagcctggggcagagccgattgcggctttaccagcgagagctaccagcagggcgtgctgagcgccaccatcctgtacgagatcctgctgggcaaggccaccctgtacgccgtgctggtgtctgccctggtgctgatggctatggtcaagcggaaggacagccggggaagggccaagcgatctggatctggagcaacaaacttctcactactcaaacaagcaggtgacgtggaggagaatcccgggccttctagaggcgggatccacaccatggctacctacgaggtgctgtgcgaggtggcaagaaagctgggcaccgacgacagagaagtggtgctgttcctgctgaacgtgttcatccctcagcctacactggcccagctgatcggtgcactgagagccctgaaagaggaaggccggctgacctttcctctgctggccgaatgcctgttcagagccggaagaagggatctgctgcgggacctgctgcatctggaccccagatttctggaaagacacctggccggcaccatgagctacttcagcccttaccagctgaccgtgctgcacgttgacggcgaactgtgcgccagagatattcggagcctgatcttcctgagcaaggacaccatcggcagccggtctacccctcagacatttctgcactgggtgtactgcatggaaaacctggacctgctcggccccacagatgtggatgccctgatgtccatgctgagaagcctgagcagagtggacctccagagacaggtgcagacactgatgggactgcacctgagcggacctagccacagccagcactacagacacacccct

SEQ ID NO: 4254 - DNA, 3135 bp, Artificial Sequence
  Synthetic Polynucloetide
atggccttaccagtgaccgccttgctcctgccgctggccttgctgctccacgccgccaggccgctcgaggggaaaccaattcccaaccctcttctgggactggattcaaccggcagcggcgaggacctgaagaacgtgttcccacctgaggtggccgtgttcgagcctagcaaggccgagatcgcccacacccagaaagccaccctcgtgtgcctggctaccggcttctaccccgaccatgtggaactgtcttggtgggtcaacggcaaagaggtgcacagcggcgtgtgtaccgacccccagccactgaaagaacagcccgccctgaacgacagccggtactgcctgagcagcagactgagagtgtccgccaccttctggcagaacccccggaaccacttcagatgccaggtgcagttctacggcctgagcgagaacgacgagtggacccaggacagagccaagcccgtgacccagatcgtgtctgccgaagcctggggcagagccgattgcggcatcaccagcgccagctaccaccagggcgtgctgagcgccaccatcctgtacgagatcctgctgggcaaggccaccctgtacgccgtgctggtgtctgccctggtgctgatggctatggtcaagcggaaggacagccggggaagggccaagcgatctggatctggagcaacaaacttctcactactcaaacaagcaggtgacgtggaggagaatcccgggcctactagcatggccttaccagtgaccgccttgctcctgccgctggccttgctgctccacgccgccaggccggcatgccaggtccagctcgtcgagtccggcggcggcctcgtccaggccggcgactccgtcaccctctcctgcaccgcctccggccgcaccttctcctcctacgccctcgcctggttccgccagcgccccggcaaggagcgcgagttcgtcgccggcctccgctggggcggccccaccaactacgccgactccgtcaaggaccgcttcaccatctccggcgactccgccaagcacaccatgtacctccagatgaactccctcaagcccgaggacaccgccgtctactactgcggctacaaccccggcggctgggccgtcccctcccagtacgagtacgactcctggggccagggcacccaggtcaccgtctcctccggtaccggcggaggcggatctggcggcggaggtagcggtggcggaggatctgaattcgacatccagatgacacagagccctagcagcctgtctgccagcgtgggagacagagtgaccatcacatgcaaggccagcgaccacatcaacaactggctggcctggtatcagcagaagcctggacaggcccctaagctgctgatctacggcgctaccacactggaaacaggcgtgcccagcagattttctggcagcggctctggcaccgactacaccctgacaatatccagcctccagcctgaggacttcgccacctactactgtcagcagagctggaacaccccttggacattcggccagggcaccaagctggaaatcaagagaggcggaggcggaagtggaggcggaggatctggcggcggaggctctcaagttcagcttcaacagcctggcgctgagctggtcaaacctggcgcttctgtgaagatgagctgcaaagccagcggctacgccttcagcagctactggatcaactggatgaagcagaaacccggccagggactcgaatggatcggccaaatctatcccggcgacggcgacaccaactacaacggcaagttcaagggcagagccacactgaccgccgatacctctagcagcacagcctacatgcagctgagcagcctgaccagcgaagatagcgccgtgtacttctgtgcccggtccatcacaacagtcgtgggctgcgctatggactattggggccagggaacaagcgtgaccgtgtctagtacgcgtgagcagaaactgatctcggaagaggatgggagcggcatccagaaccctgatcctgccgtgtaccagctgcgggatagcaagagcagcgacaagagcgtgtgtctgttcaccgacttcgacagccagaccaacgtgtcccagagcaaggactccgacgtgtacatcaccgataagtgcgtgctggacatgcggagcatggacttcaagagcaactccgccgtggcctggtccaacaagtccgatttcgcctgcgccaacgccttcaacaacagcattatccccgaggacacattcttcccaagcagcgacgtgccctgcgacgtgaagctggtggaaaagagcttcgagacagacaccaacctgaacttccagaacctgagcgtgatcggcttcagaatcctgctgctgaaagtggccggctttaacctgctgatgaccctgcggctgtggtccagccgcgccaagagaagcggatctggcgtgaagcagaccctgaatttcgacctgctgaagctggctggcgacgtggaatccaacccaggcccttctagaggccatatgaccgagtacaagcccacggtgcgcctcgccacccgcgacgacgtccccagggccgtacgcaccctcgccgccgcgttcgccgactaccccgccacgcgccacaccgtcgatccggaccgccacatcgagcgggtcaccgagctgcaagaactcttcctcacgcgcgtcgggctcgacatcggcaaggtgtgggtcgcggacgacggcgccgcggtggcggtctggaccacgccggagagcgtcgaagcgggggcggtgttcgccgagatcggcccgcgcatggccgagttgagcggttcccggctggccgcgcagcaacagatggaaggcctcctggcgccgcaccggcccaaggagcccgcgtggttcctggccaccgtcggcgtctcgcccgaccaccagggcaagggtctgggcagcgccgtcgtgctccccggagtggaggcggccgagcgcgccggggtgcccgccttcctggagacctccgcgccccgcaacctccccttctacgagcggctcggcttcaccgtcaccgccgacgtcgaggtgcccgaaggaccgcgcacctggtgcatgacccgcaagcccggtgcctga

SEQ ID NO: 4255 - DNA, 3138 bp, Artificial Sequence
  Synthetic Polynucloetide
atggccttaccagtgaccgccttgctcctgccgctggccttgctgctccacgccgccaggccgctcgagcagaaactgatctcggaagaggatctgggctccggcgatcgccctgatcctgccgtgtaccagctgcgggatagcaagagcagcgacaagagcgtgtgtctgttcaccgacttcgacagccagaccaacgtgtcccagagcaaggactccgacgtgtacatcaccgataagtgcgtgctggacatgcggagcatggacttcaagagcaactccgccgtggcctggtccaacaagtccgatttcgcctgcgccaacgccttcaacaacagcattatccccgaggacacattcttcccaagccccgagagcagctgcgacgtgaagctggtggaaaagagcttcgagacagacaccaacctgaacttccagaacctgagcgtgatcggcttcagaatcctgctgctgaaagtggccggctttaacctgctgatgaccctgcggctgtggtccagctctagtcgcgccaagagaagcggatctggcgtgaagcagaccctgaatttcgacctgctgaagctggctggcgacgtggaatccaacccaggccccactagcatggccttaccagtgaccgccttgctcctgccgctggccttgctgctccacgccgccaggccggcatgccaggtccagctcgtcgagtccggcggcggcctcgtccaggccggcgactccgtcaccctctcctgcaccgcctccggccgcaccttctcctcctacgccctcgcctggttccgccagcgccccggcaaggagcgcgagttcgtcgccggcctccgctggggcggccccaccaactacgccgactccgtcaaggaccgcttcaccatctccggcgactccgccaagcacaccatgtacctccagatgaactccctcaagcccgaggacaccgccgtctactactgcggctacaaccccggcggctgggccgtcccctcccagtacgagtacgactcctggggccagggcacccaggtcaccgtctcctccggtaccggcggaggcggatctggcggcggaggtagcggtggcggaggatctgaattcgacatccagatgacacagagccctagcagcctgtctgccagcgtgggagacagagtgaccatcacatgcaaggccagcgaccacatcaacaactggctggcctggtatcagcagaagcctggacaggcccctaagctgctgatctacggcgctaccacactggaaacaggcgtgcccagcagattttctggcagcggctctggcaccgactacaccctgacaatatccagcctccagcctgaggacttcgccacctactactgtcagcagagctggaacaccccttggacattcggccagggcaccaagctggaaatcaagagaggcggaggcggaagtggaggcggaggatctggcggcggaggctctcaagttcagcttcaacagcctggcgctgagctggtcaaacctggcgcttctgtgaagatgagctgcaaagccagcggctacgccttcagcagctactggatcaactggatgaagcagaaacccggccagggactcgaatggatcggccaaatctatcccggcgacggcgacaccaactacaacggcaagttcaagggcagagccacactgaccgccgatacctctagcagcacagcctacatgcagctgagcagcctgaccagcgaagatagcgccgtgtacttctgtgcccggtccatcacaacagtcgtgggctgcgctatggactattggggccagggaacaagcgtgaccgtgtctagtacgcgtgggaaaccaattcccaaccctcttctgggactggattcaaccggcagcggcgaggacctgaagaacgtgttcccacctgaggtggccgtgttcgagcctagcgaggccgagatcagccacacccagaaagccaccctcgtgtgcctggctaccggcttctaccccgaccatgtggaactgtcttggtgggtcaacggcaaagaggtgcacagcggcgtgtgtaccgacccccagccactgaaagaacagcccgccctgaacgacagccggtactgcctgagcagcagactgagagtgtccgccaccttctggcagaacccccggaaccacttcagatgccaggtgcagttctacggcctgagcgagaacgacgagtggacccaggacagagccaagcccgtgacccagatcgtgtctgccgaagcctggggcagagccgattgcggctttaccagcgagagctaccagcagggcgtgctgagcgccaccatcctgtacgagatcctgctgggcaaggccaccctgtacgccgtgctggtgtctgccctggtgctgatggctatggtcaagcggaaggacagccggggaagggccaagcgatctggatctggagcaacaaacttctcactactcaaacaagcaggtgacgtggaggagaatcccgggccttctagaggccatatgaccgagtacaagcccacggtgcgcctcgccacccgcgacgacgtccccagggccgtacgcaccctcgccgccgcgttcgccgactaccccgccacgcgccacaccgtcgatccggaccgccacatcgagcgggtcaccgagctgcaagaactcttcctcacgcgcgtcgggctcgacatcggcaaggtgtgggtcgcggacgacggcgccgcggtggcggtctggaccacgccggagagcgtcgaagcgggggcggtgttcgccgagatcggcccgcgcatggccgagttgagcggttcccggctggccgcgcagcaacagatggaaggcctcctggcgccgcaccggcccaaggagcccgcgtggttcctggccaccgtcggcgtctcgcccgaccaccagggcaagggtctgggcagcgccgtcgtgctccccggagtggaggcggccgagcgcgccggggtgcccgccttcctggagacctccgcgccccgcaacctccccttctacgagcggctcggcttcaccgtcaccgccgacgtcgaggtgcccgaaggaccgcgcacctggtgcatgacccgcaagcccggtgcctga

SEQ ID NO: 4256 - DNA, 3000 bp, Artificial Sequence
  Synthetic Polynucloetide
atggccttaccagtgaccgccttgctcctgccgctggccttgctgctccacgccgccaggccggcatgccaggtccagctcgtcgagtccggcggcggcctcgtccaggccggcgactccgtcaccctctcctgcaccgcctccggccgcaccttctcctcctacgccctcgcctggttccgccagcgccccggcaaggagcgcgagttcgtcgccggcctccgctggggcggccccaccaactacgccgactccgtcaaggaccgcttcaccatctccggcgactccgccaagcacaccatgtacctccagatgaactccctcaagcccgaggacaccgccgtctactactgcggctacaaccccggcggctgggccgtcccctcccagtacgagtacgactcctggggccagggcacccaggtcaccgtctcctccggtaccggcggaggcggatctggcggcggaggtagcggtggcggaggatctgaattcgacatccagatgacacagagccctagcagcctgtctgccagcgtgggagacagagtgaccatcacatgcaaggccagcgaccacatcaacaactggctggcctggtatcagcagaagcctggacaggcccctaagctgctgatctacggcgctaccacactggaaacaggcgtgcccagcagattttctggcagcggctctggcaccgactacaccctgacaatatccagcctccagcctgaggacttcgccacctactactgtcagcagagctggaacaccccttggacattcggccagggcaccaagctggaaatcaagagactcgaggacctgaagaacgtgttcccacctgaggtggccgtgttcgagcctagcgaggccgagatcagccacacccagaaagccaccctcgtgtgcctggctaccggcttctaccccgaccatgtggaactgtcttggtgggtcaacggcaaagaggtgcacagcggcgtgtctaccgacccccagccactgaaagaacagcccgccctgaacgacagccggtactgcctgagcagcagactgagagtgtccgccaccttctggcagaacccccggaaccacttcagatgccaggtgcagttctacggcctgagcgagaacgacgagtggacccaggacagagccaagcccgtgacccagatcgtgtctgccgaagcctggggcagagccgattgcggctttaccagcgagagctaccagcagggcgtgctgagcgccaccatcctgtacgagatcctgctgggcaaggccaccctgtacgccgtgctggtgtctgccctggtgctgatggctatggtcaagcggaaggacagccggggaagggccaagcgatctggatctggagcaacaaacttctcactactcaaacaagcaggtgacgtggaggagaatcccgggcctactagtatggactggatttggcgcatccttttccttgtcggcgctgctaccggcgcgcattccttcgaacaagttcagcttcaacagcctggcgctgagctggtcaaacctggcgcttctgtgaagatgagctgcaaagccagcggctacgccttcagcagctactggatcaactggatgaagcagaaacccggccagggactcgaatggatcggccaaatctatcccggcgacggcgacaccaactacaacggcaagttcaagggcagagccacactgaccgccgatacctctagcagcacagcctacatgcagctgagcagcctgaccagcgaagatagcgccgtgtacttctgtgcccggtccatcacaacagtcgtgggctgcgctatggactattggggccagggaacaagcgtgaccgtgtctagtacgcgtatccagaaccctgatcctgccgtgtaccagctgcgggatagcaagagcagcgacaagagcgtgtgtctgttcaccgacttcgacagccagaccaacgtgtcccagagcaaggactccgacgtgtacatcaccgataagaccgtgctggacatgcggagcatggacttcaagagcaactccgccgtggcctggtccaacaagtccgatttcgcctgcgccaacgccttcaacaacagcattatccccgaggacacattcttcccaagccccgagagcagctgcgacgtgaagctggtggaaaagagcttcgagacagacaccaacctgaacttccagaacctgagcgtgatcggcttcagaatcctgctgctgaaagtggccggctttaacctgctgatgaccctgcggctgtggtccagccgcgccaagagaagcggatctggcgtgaagcagaccctgaatttcgacctgctgaagctggctggcgacgtggaatccaacccaggcccttctagaggccatatgaccgagtacaagcccacggtgcgcctcgccacccgcgacgacgtccccagggccgtacgcaccctcgccgccgcgttcgccgactaccccgccacgcgccacaccgtcgatccggaccgccacatcgagcgggtcaccgagctgcaagaactcttcctcacgcgcgtcgggctcgacatcggcaaggtgtgggtcgcggacgacggcgccgcggtggcggtctggaccacgccggagagcgtcgaagcgggggcggtgttcgccgagatcggcccgcgcatggccgagttgagcggttcccggctggccgcgcagcaacagatggaaggcctcctggcgccgcaccggcccaaggagcccgcgtggttcctggccaccgtcggcgtctcgcccgaccaccagggcaagggtctgggcagcgccgtcgtgctccccggagtggaggcggccgagcgcgccggggtgcccgccttcctggagacctccgcgccccgcaacctccccttctacgagcggctcggcttcaccgtcaccgccgacgtcgaggtgcccgaaggaccgcgcacctggtgcatgacccgcaagcccggtgcctga

SEQ ID NO: 4257 - DNA, 3246 bp, Artificial Sequence
  Synthetic Polynucloetide
atggccttaccagtgaccgccttgctcctgccgctggccttgctgctccacgccgccaggccggcatgccaggtccagctcgtcgagtccggcggcggcctcgtccaggccggcgactccgtcaccctctcctgcaccgcctccggccgcaccttctcctcctacgccctcgcctggttccgccagcgccccggcaaggagcgcgagttcgtcgccggcctccgctggggcggccccaccaactacgccgactccgtcaaggaccgcttcaccatctccggcgactccgccaagcacaccatgtacctccagatgaactccctcaagcccgaggacaccgccgtctactactgcggctacaaccccggcggctgggccgtcccctcccagtacgagtacgactcctggggccagggcacccaggtcaccgtctcctccggtaccggcggaggcggatctggcggcggaggtagcggtggcggaggatctgaattcgacatccagatgacacagagccctagcagcctgtctgccagcgtgggagacagagtgaccatcacatgcaaggccagcgaccacatcaacaactggctggcctggtatcagcagaagcctggacaggcccctaagctgctgatctacggcgctaccacactggaaacaggcgtgcccagcagattttctggcagcggctctggcaccgactacaccctgacaatatccagcctccagcctgaggacttcgccacctactactgtcagcagagctggaacaccccttggacattcggccagggcaccaagctggaaatcaagagactcgaggacctgaagaacgtgttcccacctgaggtggccgtgttcgagcctagcgaggccgagatcagccacacccagaaagccaccctcgtgtgcctggctaccggcttctaccccgaccatgtggaactgtcttggtgggtcaacggcaaagaggtgcacagcggcgtgtctaccgacccccagccactgaaagaacagcccgccctgaacgacagccggtactgcctgagcagcagactgagagtgtccgccaccttctggcagaacccccggaaccacttcagatgccaggtgcagttctacggcctgagcgagaacgacgagtggacccaggacagagccaagcccgtgacccagatcgtgtctgccgaagcctggggcagagccgattgcggctttaccagcgagagctaccagcagggcgtgctgagcgccaccatcctgtacgagatcctgctgggcaaggccaccctgtacgccgtgctggtgtctgccctggtgctgatggctatggtcaagcggaaggacagccggggaagggccaagcgatctggatctggagcaacaaacttctcactactcaaacaagcaggtgacgtggaggagaatcccgggcctactagtatggactggatttggcgcatccttttccttgtcggcgctgctaccggcgcgcattccttcgaacaagttcagcttcaacagcctggcgctgagctggtcaaacctggcgcttctgtgaagatgagctgcaaagccagcggctacgccttcagcagctactggatcaactggatgaagcagaaacccggccagggactcgaatggatcggccaaatctatcccggcgacggcgacaccaactacaacggcaagttcaagggcagagccacactgaccgccgatacctctagcagcacagcctacatgcagctgagcagcctgaccagcgaagatagcgccgtgtacttctgtgcccggtccatcacaacagtcgtgggctgcgctatggactattggggccagggaacaagcgtgaccgtgtctagtacgcgtgagcagaaactgatctcggaagaggatgggagcggcaccccattcccttctctggcccctcccatcatgctgctggtggacggcaagcagcagatggtggtcgtgtgcctggtgctggatgtggccccacctggactggacagccccatctggtttagcgccggcaatggctctgccctggacgcctttacctacggcccaagccctgccaccgatggcacctggacaaatctggcccacctgagcctgcccagcgaggaactggcttcttgggagcctctcgtgtgccacacaggacctggcgctgagggacacagcagatccacccagcctatgcacctgtctggcgaggccagcaccgccagaacctgtcctcaggaacctctgagaggcacccctggcggagcactgtggctgggagtgctgagactgctgctgttcaagctgctgctgtttgacctgctgctgacctgctcctgtctgtgcgatcctgccggccctctgccttctcctgccaccaccacaagactgagagccctgggcagccacagactgcaccctgccacagagacaggcggcagagaggccacaagcagccctagaccccagcccagagacagaagatggggcgataccccccctggcagaaagcctggatctccagtccgcgccaagagaagcggatctggcgtgaagcagaccctgaatttcgacctgctgaagctggctggcgacgtggaatccaacccaggcccttctagaggccatatgaccgagtacaagcccacggtgcgcctcgccacccgcgacgacgtccccagggccgtacgcaccctcgccgccgcgttcgccgactaccccgccacgcgccacaccgtcgatccggaccgccacatcgagcgggtcaccgagctgcaagaactcttcctcacgcgcgtcgggctcgacatcggcaaggtgtgggtcgcggacgacggcgccgcggtggcggtctggaccacgccggagagcgtcgaagcgggggcggtgttcgccgagatcggcccgcgcatggccgagttgagcggttcccggctggccgcgcagcaacagatggaaggcctcctggcgccgcaccggcccaaggagcccgcgtggttcctggccaccgtcggcgtctcgcccgaccaccagggcaagggtctgggcagcgccgtcgtgctccccggagtggaggcggccgagcgcgccggggtgcccgccttcctggagacctccgcgccccgcaacctccccttctacgagcggctcggcttcaccgtcaccgccgacgtcgaggtgcccgaaggaccgcgcacctggtgcatgacccgcaagcccggtgcctga

SEQ ID NO: 4258 - DNA, 3300 bp, Artificial Sequence
  Synthetic Polynucloetide
atggccttaccagtgaccgccttgctcctgccgctggccttgctgctccacgccgccaggccgctcgaggacctgaagaacgtgttcccacctgaggtggccgtgttcgagcctagcgaggccgagatcagccacacccagaaagccaccctcgtgtgcctggctaccggcttctaccccgaccatgtggaactgtcttggtgggtcaacggcaaagaggtgcacagcggcgtgtctaccgacccccagccactgaaagaacagcccgccctgaacgacagccggtactgcctgagcagcagactgagagtgtccgccaccttctggcagaacccccggaaccacttcagatgccaggtgcagttctacggcctgagcgagaacgacgagtggacccaggacagagccaagcccgtgacccagatcgtgtctgccgaagcctggggcagagccgattgcggctttaccagcgagagctaccagcagggcgtgctgagcgccaccatcctgtacgagatcctgctgggcaaggccaccctgtacgccgtgctggtgtctgccctggtgctgatggctatggtcaagcggaaggacagccggggaagggccaagcgatctggatctggagcaacaaacttctcactactcaaacaagcaggtgacgtggaggagaatcccgggcctactagcatggccttaccagtgaccgccttgctcctgccgctggccttgctgctccacgccgccaggccggcatgccaggtccagctcgtcgagtccggcggcggcctcgtccaggccggcgactccgtcaccctctcctgcaccgcctccggccgcaccttctcctcctacgccctcgcctggttccgccagcgccccggcaaggagcgcgagttcgtcgccggcctccgctggggcggccccaccaactacgccgactccgtcaaggaccgcttcaccatctccggcgactccgccaagcacaccatgtacctccagatgaactccctcaagcccgaggacaccgccgtctactactgcggctacaaccccggcggctgggccgtcccctcccagtacgagtacgactcctggggccagggcacccaggtcaccgtctcctccggtaccggcggaggcggatctggcggcggaggtagcggtggcggaggatctgaattcgacatccagatgacacagagccctagcagcctgtctgccagcgtgggagacagagtgaccatcacatgcaaggccagcgaccacatcaacaactggctggcctggtatcagcagaagcctggacaggcccctaagctgctgatctacggcgctaccacactggaaacaggcgtgcccagcagattttctggcagcggctctggcaccgactacaccctgacaatatccagcctccagcctgaggacttcgccacctactactgtcagcagagctggaacaccccttggacattcggccagggcaccaagctggaaatcaagagaggcggaggcggaagtggaggcggaggatctggcggcggaggctctcaagttcagcttcaacagcctggcgctgagctggtcaaacctggcgcttctgtgaagatgagctgcaaagccagcggctacgccttcagcagctactggatcaactggatgaagcagaaacccggccagggactcgaatggatcggccaaatctatcccggcgacggcgacaccaactacaacggcaagttcaagggcagagccacactgaccgccgatacctctagcagcacagcctacatgcagctgagcagcctgaccagcgaagatagcgccgtgtacttctgtgcccggtccatcacaacagtcgtgggctgcgctatggactattggggccagggaacaagcgtgaccgtgtctagtacgcgtgagcagaaactgatctcggaagaggatctggggagcggcaccccattcccttctctggcccctcccatcatgctgctggtggacggcaagcagcagatggtggtcgtgtgcctggtgctggatgtggccccacctggactggacagccccatctggtttagcgccggcaatggctctgccctggacgcctttacctacggcccaagccctgccaccgatggcacctggacaaatctggcccacctgagcctgcccagcgaggaactggcttcttgggagcctctcgtgtgccacacaggacctggcgctgagggacacagcagatccacccagcctatgcacctgtctggcgaggccagcaccgccagaacctgtcctcaggaacctctgagaggcacccctggcggagcactgtggctgggagtgctgagactgctgctgttcaagctgctgctgtttgacctgctgctgacctgctcctgtctgtgcgatcctgccggccctctgccttctcctgccaccaccacaagactgagagccctgggcagccacagactgcaccctgccacagagacaggcggcagagaggccacaagcagccctagaccccagcccagagacagaagatggggcgataccccccctggcagaaagcctggatctccagtccgcgccaagagaagcggatctggcgtgaagcagaccctgaatttcgacctgctgaagctggctggcgacgtggaatccaacccaggcccttctagatctagaggccatatgaccgagtacaagcccacggtgcgcctcgccacccgcgacgacgtccccagggccgtacgcaccctcgccgccgcgttcgccgactaccccgccacgcgccacaccgtcgatccggaccgccacatcgagcgggtcaccgagctgcaagaactcttcctcacgcgcgtcgggctcgacatcggcaaggtgtgggtcgcggacgacggcgccgcggtggcggtctggaccacgccggagagcgtcgaagcgggggcggtgttcgccgagatcggcccgcgcatggccgagttgagcggttcccggctggccgcgcagcaacagatggaaggcctcctggcgccgcaccggcccaaggagcccgcgtggttcctggccaccgtcggcgtctcgcccgaccaccagggcaagggtctgggcagcgccgtcgtgctccccggagtggaggcggccgagcgcgccggggtgcccgccttcctggagacctccgcgccccgcaacctccccttctacgagcggctcggcttcaccgtcaccgccgacgtcgaggtgcccgaaggaccgcgcacctggtgcatgacccgcaagcccggtgcctga

SEQ ID NO: 4259 - DNA, 3111 bp, Artificial Sequence
  Synthetic Polynucloetide
atggccttaccagtgaccgccttgctcctgccgctggccttgctgctccacgccgccaggccggcatgccaggtccagctcgtcgagtccggcggcggcctcgtccaggccggcgactccgtcaccctctcctgcaccgcctccggccgcaccttctcctcctacgccctcgcctggttccgccagcgccccggcaaggagcgcgagttcgtcgccggcctccgctggggcggccccaccaactacgccgactccgtcaaggaccgcttcaccatctccggcgactccgccaagcacaccatgtacctccagatgaactccctcaagcccgaggacaccgccgtctactactgcggctacaaccccggcggctgggccgtcccctcccagtacgagtacgactcctggggccagggcacccaggtcaccgtctcctccggtaccggcggaggcggatctggcggcggaggtagcggtggcggaggatctgaattcgacatccagatgacacagagccctagcagcctgtctgccagcgtgggagacagagtgaccatcacatgcaaggccagcgaccacatcaacaactggctggcctggtatcagcagaagcctggacaggcccctaagctgctgatctacggcgctaccacactggaaacaggcgtgcccagcagattttctggcagcggctctggcaccgactacaccctgacaatatccagcctccagcctgaggacttcgccacctactactgtcagcagagctggaacaccccttggacattcggccagggcaccaagctggaaatcaagagactcgaggggaaaccaattcccaaccctcttctgggactggattcaaccggcagcggcgacaagcagctggacgccgacgtgtcccccaagcctaccatcttcctgccctctatcgccgagacaaagctccagaaggccggcacctacctgtgcctgctggaaaagttcttcccagatgtgattaagatccactggcaggaaaagaagtccaacaccatcctgggcagccaggaaggcaacaccatgaagaccaacgacacctacatgaagttcagctggctgaccgtgcccgagaagtccctggacaaagaacacagatgcatcgtgcggcacgaaaacaacaagaacggcgtggaccaggaaatcatcttcccacccatcaagaccgatgtgattacaatggaccccaaggacaactgctccaaggacgccaacgataccctgctgctccagctgaccaacaccagcgcctactacatgtacttgttgctgctgctgaagtccgtggtgtacttcgccatcatcacatgctgcctgctgcggagaaccgccttctgctgcaacggcgagaagtctagggccaagcgatctggatctggagcaacaaacttctcactactcaaacaagcaggtgacgtggaggagaatcccgggcctactagtatggactggatttggcgcatccttttccttgtcggcgctgctaccggcgcgcattccttcgaacaagttcagcttcaacagcctggcgctgagctggtcaaacctggcgcttctgtgaagatgagctgcaaagccagcggctacgccttcagcagctactggatcaactggatgaagcagaaacccggccagggactcgaatggatcggccaaatctatcccggcgacggcgacaccaactacaacggcaagttcaagggcagagccacactgaccgccgatacctctagcagcacagcctacatgcagctgagcagcctgaccagcgaagatagcgccgtgtacttctgtgcccggtccatcacaacagtcgtgggctgcgctatggactattggggccagggaacaagcgtgaccgtgtctagtacgcgtgagcagaaactgatctcggaagaggatgggagcggcagccagcctcacaccaagcccagcgtgttcgtgatgaagaacggcaccaacgtggcctgcctcgtgaaagagttctaccccaaggacatcaggatcaacctggtgtccagcaagaagatcaccgagttcgaccccgccatcgtgatctcccccagcggcaagtacaacgccgtgaagctggggaagtacgaggacagcaacagcgtgacctgctccgtgcagcacgacaacaagaccgtgcacagcaccgactttgaagtgaaaaccgactccaccgaccacgtgaagcccaaagagacagagaacaccaagcagcccagcaagagctgccacaagcccaaggccatcgtgcacaccgagaaagtgaacatgatgagcctgaccgtgctgggcctgcggatgctgttcgccaaaaccgtggccgtgaacttcctgctgaccgccaagctgttcttcctccgcgccaagagaagcggatctggcgtgaagcagaccctgaatttcgacctgctgaagctggctggcgacgtggaatccaacccaggcccttctagaggccatatgaccgagtacaagcccacggtgcgcctcgccacccgcgacgacgtccccagggccgtacgcaccctcgccgccgcgttcgccgactaccccgccacgcgccacaccgtcgatccggaccgccacatcgagcgggtcaccgagctgcaagaactcttcctcacgcgcgtcgggctcgacatcggcaaggtgtgggtcgcggacgacggcgccgcggtggcggtctggaccacgccggagagcgtcgaagcgggggcggtgttcgccgagatcggcccgcgcatggccgagttgagcggttcccggctggccgcgcagcaacagatggaaggcctcctggcgccgcaccggcccaaggagcccgcgtggttcctggccaccgtcggcgtctcgcccgaccaccagggcaagggtctgggcagcgccgtcgtgctccccggagtggaggcggccgagcgcgccggggtgcccgccttcctggagacctccgcgccccgcaacctccccttctacgagcggctcggcttcaccgtcaccgccgacgtcgaggtgcccgaaggaccgcgcacctggtgcatgacccgcaagcccggtgcctga

SEQ ID NO: 4260 - DNA, 2322 bp, Artificial Sequence
  Synthetic Polynucloetide
atggccttaccagtgaccgccttgctcctgccgctggccttgctgctccacgccgccaggccggcatgccaggtccagctcgtcgagtccggcggcggcctcgtccaggccggcgactccgtcaccctctcctgcaccgcctccggccgcaccttctcctcctacgccctcgcctggttccgccagcgccccggcaaggagcgcgagttcgtcgccggcctccgctggggcggccccaccaactacgccgactccgtcaaggaccgcttcaccatctccggcgactccgccaagcacaccatgtacctccagatgaactccctcaagcccgaggacaccgccgtctactactgcggctacaaccccggcggctgggccgtcccctcccagtacgagtacgactcctggggccagggcacccaggtcaccgtctcctccggtaccggcggaggcggatctggcggcggaggtagcggtggcggaggatctgaattcgacatccagatgacacagagccctagcagcctgtctgccagcgtgggagacagagtgaccatcacatgcaaggccagcgaccacatcaacaactggctggcctggtatcagcagaagcctggacaggcccctaagctgctgatctacggcgctaccacactggaaacaggcgtgcccagcagattttctggcagcggctctggcaccgactacaccctgacaatatccagcctccagcctgaggacttcgccacctactactgtcagcagagctggaacaccccttggacattcggccagggcaccaagctggaaatcaagagactcgagagccagcctcacaccaagcccagcgtgttcgtgatgaagaacggcaccaacgtggcctgcctcgtgaaagagttctaccccaaggacatcaggatcaacctggtgtccagcaagaagatcaccgagttcgaccccgccatcgtgatctcccccagcggcaagtacaacgccgtgaagctggggaagtacgaggacagcaacagcgtgacctgctccgtgcagcacgacaacaagaccgtgcacagcaccgactttgaagtgaaaaccgactccaccgaccacgtgaagcccaaagagacagagaacaccaagcagcccagcaagagctgccacaagcccaaggccatcgtgcacaccgagaaagtgaacatgatgagcctgaccgtgctgggcctgcggatgctgttcgccaaaaccgtggccgtgaacttcctgctgaccgccaagctgttcttcctcagggccaagcgatctggatctggagcaacaaacttctcactactcaaacaagcaggtgacgtggaggagaatcccgggcctactagtatggactggatttggcgcatccttttccttgtcggcgctgctaccggcgcgcattccttcgaacaagttcagcttcaacagcctggcgctgagctggtcaaacctggcgcttctgtgaagatgagctgcaaagccagcggctacgccttcagcagctactggatcaactggatgaagcagaaacccggccagggactcgaatggatcggccaaatctatcccggcgacggcgacaccaactacaacggcaagttcaagggcagagccacactgaccgccgatacctctagcagcacagcctacatgcagctgagcagcctgaccagcgaagatagcgccgtgtacttctgtgcccggtccatcacaacagtcgtgggctgcgctatggactattggggccagggaacaagcgtgaccgtgtctagtacgcgtgacaagcagctggacgccgacgtgtcccccaagcctaccatcttcctgccctctatcgccgagacaaagctccagaaggccggcacctacctgtgcctgctggaaaagttcttcccagatgtgattaagatccactggcaggaaaagaagtccaacaccatcctgggcagccaggaaggcaacaccatgaagaccaacgacacctacatgaagttcagctggctgaccgtgcccgagaagtccctggacaaagaacacagatgcatcgtgcggcacgaaaacaacaagaacggcgtggaccaggaaatcatcttcccacccatcaagaccgatgtgattacaatggaccccaaggacaactgctccaaggacgccaacgataccctgctgctccagctgaccaacaccagcgcctactacatgtacttgttgctgctgctgaagtccgtggtgtacttcgccatcatcacatgctgcctgctgcggagaaccgccttctgctgcaacggcgagaagtct

SEQ ID NO: 4261 - DNA, 3156 bp, Artificial Sequence
  Synthetic Polynucloetide
atggccttaccagtgaccgccttgctcctgccgctggccttgctgctccacgccgccaggccgctcgaggggaaaccaattcccaaccctcttctgggactggattcaaccggcagcggcgacaagcagctggacgccgacgtgtcccccaagcctaccatcttcctgccctctatcgccgagacaaagctccagaaggccggcacctacctgtgcctgctggaaaagttcttcccagatgtgattaagatccactggcaggaaaagaagtccaacaccatcctgggcagccaggaaggcaacaccatgaagaccaacgacacctacatgaagttcagctggctgaccgtgcccgagaagtccctggacaaagaacacagatgcatcgtgcggcacgaaaacaacaagaacggcgtggaccaggaaatcatcttcccacccatcaagaccgatgtgattacaatggaccccaaggacaactgctccaaggacgccaacgataccctgctgctccagctgaccaacaccagcgcctactacatgtacttgttgctgctgctgaagtccgtggtgtacttcgccatcatcacatgctgcctgctgcggagaaccgccttctgctgcaacggcgagaagtctagggccaagcgatctggatctggagcaacaaacttctcactactcaaacaagcaggtgacgtggaggagaatcccgggcctactagcatggccttaccagtgaccgccttgctcctgccgctggccttgctgctccacgccgccaggccggcatgccaggtccagctcgtcgagtccggcggcggcctcgtccaggccggcgactccgtcaccctctcctgcaccgcctccggccgcaccttctcctcctacgccctcgcctggttccgccagcgccccggcaaggagcgcgagttcgtcgccggcctccgctggggcggccccaccaactacgccgactccgtcaaggaccgcttcaccatctccggcgactccgccaagcacaccatgtacctccagatgaactccctcaagcccgaggacaccgccgtctactactgcggctacaaccccggcggctgggccgtcccctcccagtacgagtacgactcctggggccagggcacccaggtcaccgtctcctccggtaccggcggaggcggatctggcggcggaggtagcggtggcggaggatctgaattcgacatccagatgacacagagccctagcagcctgtctgccagcgtgggagacagagtgaccatcacatgcaaggccagcgaccacatcaacaactggctggcctggtatcagcagaagcctggacaggcccctaagctgctgatctacggcgctaccacactggaaacaggcgtgcccagcagattttctggcagcggctctggcaccgactacaccctgacaatatccagcctccagcctgaggacttcgccacctactactgtcagcagagctggaacaccccttggacattcggccagggcaccaagctggaaatcaagagaggcggaggcggaagtggaggcggaggatctggcggcggaggctctcaagttcagcttcaacagcctggcgctgagctggtcaaacctggcgcttctgtgaagatgagctgcaaagccagcggctacgccttcagcagctactggatcaactggatgaagcagaaacccggccagggactcgaatggatcggccaaatctatcccggcgacggcgacaccaactacaacggcaagttcaagggcagagccacactgaccgccgatacctctagcagcacagcctacatgcagctgagcagcctgaccagcgaagatagcgccgtgtacttctgtgcccggtccatcacaacagtcgtgggctgcgctatggactattggggccagggaacaagcgtgaccgtgtctagtacgcgtgagcagaaactgatctcggaagaggatgggagcggcagccagcctcacaccaagcccagcgtgttcgtgatgaagaacggcaccaacgtggcctgcctcgtgaaagagttctaccccaaggacatcaggatcaacctggtgtccagcaagaagatcaccgagttcgaccccgccatcgtgatctcccccagcggcaagtacaacgccgtgaagctggggaagtacgaggacagcaacagcgtgacctgctccgtgcagcacgacaacaagaccgtgcacagcaccgactttgaagtgaaaaccgactccaccgaccacgtgaagcccaaagagacagagaacaccaagcagcccagcaagagctgccacaagcccaaggccatcgtgcacaccgagaaagtgaacatgatgagcctgaccgtgctgggcctgcggatgctgttcgccaaaaccgtggccgtgaacttcctgctgaccgccaagctgttcttcctccgcgccaagagaagcggatctggcgtgaagcagaccctgaatttcgacctgctgaagctggctggcgacgtggaatccaacccaggcccttctagaggccatatgaccgagtacaagcccacggtgcgcctcgccacccgcgacgacgtccccagggccgtacgcaccctcgccgccgcgttcgccgactaccccgccacgcgccacaccgtcgatccggaccgccacatcgagcgggtcaccgagctgcaagaactcttcctcacgcgcgtcgggctcgacatcggcaaggtgtgggtcgcggacgacggcgccgcggtggcggtctggaccacgccggagagcgtcgaagcgggggcggtgttcgccgagatcggcccgcgcatggccgagttgagcggttcccggctggccgcgcagcaacagatggaaggcctcctggcgccgcaccggcccaaggagcccgcgtggttcctggccaccgtcggcgtctcgcccgaccaccagggcaagggtctgggcagcgccgtcgtgctccccggagtggaggcggccgagcgcgccggggtgcccgccttcctggagacctccgcgccccgcaacctccccttctacgagcggctcggcttcaccgtcaccgccgacgtcgaggtgcccgaaggaccgcgcacctggtgcatgacccgcaagcccggtgcctga

SEQ ID NO: 4262 - DNA, 3531 bp, Artificial Sequence
  Synthetic Polynucloetide
atggccttaccagtgaccgccttgctcctgccgctggccttgctgctccacgccgccaggccggcatgccaggtccagctcgtcgagtccggcggcggcctcgtccaggccggcgactccgtcaccctctcctgcaccgcctccggccgcaccttctcctcctacgccctcgcctggttccgccagcgccccggcaaggagcgcgagttcgtcgccggcctccgctggggcggccccaccaactacgccgactccgtcaaggaccgcttcaccatctccggcgactccgccaagcacaccatgtacctccagatgaactccctcaagcccgaggacaccgccgtctactactgcggctacaaccccggcggctgggccgtcccctcccagtacgagtacgactcctggggccagggcacccaggtcaccgtctcctccggtaccggcggaggcggatctggcggcggaggtagcggtggcggaggatctgaattcgacatccagatgacacagagccctagcagcctgtctgccagcgtgggagacagagtgaccatcacatgcaaggccagcgaccacatcaacaactggctggcctggtatcagcagaagcctggacaggcccctaagctgctgatctacggcgctaccacactggaaacaggcgtgcccagcagattttctggcagcggctctggcaccgactacaccctgacaatatccagcctccagcctgaggacttcgccacctactactgtcagcagagctggaacaccccttggacattcggccagggcaccaagctggaaatcaagagaggacagcctaaggccaatcctaccgtgacactgttccctccaagcagcgaagaactccaggccaacaaggccacacttgtgtgcctgatctccgacttctaccctggggctgtgacagtggcttggaaggccgatggatctcctgtgaaagccggcgtggaaaccaccaagccatccaagcagagcaacaacaaatacgccgccagctcctacctgagcctgacacctgagcagtggaagtcccacagatcctacagctgccaagtgacccacgaaggcagcaccgtggaaaagacagtggcccctacagagtgcagcggatcccagagcttcggcctgctggaccccaagctgtgctacctgctggatggcatcctgttcatctacggcgtgatcctgaccgccctgttcctgagagtgaagttcagcagaagcgccgacgcccctgcctaccagcagggacagaaccaactgtacaacgagctgaacctgggcagacgggaagagtacgacgtgctggacaagcggagaggcagggaccctgagatgggcggaaagccccagcggagaaagaacccccaggaaggactgtataacgaactccagaaagacaagatggccgaagcctacagcgagatcggcatgaagggcgagcggagaagaggcaagggccacgatggcctgtaccagggcctgagcaccgccaccaaggacacctatgacgccctgcacatgcaggccctgcctccaagaagggccaagcgatctggatctggagcaacaaacttctcactactcaaacaagcaggtgacgtggaggagaatcccgggcctactagtatggactggatttggcgcatccttttccttgtcggcgctgctaccggcgcgcattccttcgaacaagttcagcttcaacagcctggcgctgagctggtcaaacctggcgcttctgtgaagatgagctgcaaagccagcggctacgccttcagcagctactggatcaactggatgaagcagaaacccggccagggactcgaatggatcggccaaatctatcccggcgacggcgacaccaactacaacggcaagttcaagggcagagccacactgaccgccgatacctctagcagcacagcctacatgcagctgagcagcctgaccagcgaagatagcgccgtgtacttctgtgcccggtccatcacaacagtcgtgggctgcgctatggactattggggccagggaacaagcgtgaccgtgtctagtgcctctacaaagggaccctccgtgtttcctctggctcccagcagcaagtctacaagcggaggaacagccgctctgggctgcctggtcaaggattactttcccgagcctgtgaccgtgtcctggaatagcggagcactgacaagcggcgtgcacacctttccagccgtgctgcaaagcagcggcctgtactctctgagcagcgtggtcacagtgcctagctctagcctgggcacccagacctacatctgcaatgtgaaccacaagcctagcaacaccaaggtggacaagagagtggaacccaagagctgtggtacccagagttttgggttgttggaccctaaattgtgctatctgttggacggaatcctgttcatttacggagtgatcctgaccgcattgttcctgcgggttaagttttccagatccgcagacgcacccgcttaccaacaagggcagaaccaactctacaatgaacttaatttggggcggagggaagagtacgacgttctggacaaaaggaggggacgagatcccgagatgggcggaaagcctcagcgaaggaagaatccgcaagaggggctttataacgaactccagaaagataaaatggcagaagcctatagtgagattgggatgaagggagaaaggaggaggggtaaaggtcacgatgggttgtaccaaggattgagcacagccactaaagatacctatgatgcgctccacatgcaggccctgccgccaagacgcgccaagagaagcggatctggcgtgaagcagaccctgaatttcgacctgctgaagctggctggcgacgtggaatccaacccaggcccttctagaggccatatgaccgagtacaagcccacggtgcgcctcgccacccgcgacgacgtccccagggccgtacgcaccctcgccgccgcgttcgccgactaccccgccacgcgccacaccgtcgatccggaccgccacatcgagcgggtcaccgagctgcaagaactcttcctcacgcgcgtcgggctcgacatcggcaaggtgtgggtcgcggacgacggcgccgcggtggcggtctggaccacgccggagagcgtcgaagcgggggcggtgttcgccgagatcggcccgcgcatggccgagttgagcggttcccggctggccgcgcagcaacagatggaaggcctcctggcgccgcaccggcccaaggagcccgcgtggttcctggccaccgtcggcgtctcgcccgaccaccagggcaagggtctgggcagcgccgtcgtgctccccggagtggaggcggccgagcgcgccggggtgcccgccttcctggagacctccgcgccccgcaacctccccttctacgagcggctcggcttcaccgtcaccgccgacgtcgaggtgcccgaaggaccgcgcacctggtgcatgacccgcaagcccggtgcctga

SEQ ID NO: 4263 - DNA, 2886 bp, Artificial Sequence
  Synthetic Polynucloetide
atggccttaccagtgaccgccttgctcctgccgctggccttgctgctccacgccgccaggccggcatgccaggtccagctcgtcgagtccggcggcggcctcgtccaggccggcgactccgtcaccctctcctgcaccgcctccggccgcaccttctcctcctacgccctcgcctggttccgccagcgccccggcaaggagcgcgagttcgtcgccggcctccgctggggcggccccaccaactacgccgactccgtcaaggaccgcttcaccatctccggcgactccgccaagcacaccatgtacctccagatgaactccctcaagcccgaggacaccgccgtctactactgcggctacaaccccggcggctgggccgtcccctcccagtacgagtacgactcctggggccagggcacccaggtcaccgtctcctccggtaccggcggaggcggatctggcggcggaggtagcggtggcggaggatctgaattcgacatccagatgacacagagccctagcagcctgtctgccagcgtgggagacagagtgaccatcacatgcaaggccagcgaccacatcaacaactggctggcctggtatcagcagaagcctggacaggcccctaagctgctgatctacggcgctaccacactggaaacaggcgtgcccagcagattttctggcagcggctctggcaccgactacaccctgacaatatccagcctccagcctgaggacttcgccacctactactgtcagcagagctggaacaccccttggacattcggccagggcaccaagctggaaatcaagagactcgaggacctgaagaacgtgttcccacctgaggtggccgtgttcgagcctagcgaggccgagatcagccacacccagaaagccaccctcgtgtgcctggctaccggcttctaccccgaccatgtggaactgtcttggtgggtcaacggcaaagaggtgcacagcggcgtgtctaccgacccccagccactgaaagaacagcccgccctgaacgacagccggtactgcctgagcagcagactgagagtgtccgccaccttctggcagaacccccggaaccacttcagatgccaggtgcagttctacggcctgagcgagaacgacgagtggacccaggacagagccaagcccgtgacccagatcgtgtctgccgaagcctggggcagagccgattgcggatcccagagcttcggcctgctggaccccaagctgtgctacctgctggatggcatcctgttcatctacggcgtgatcctgaccgccctgttcctgagagtgaagttcagcagaagcgccgacgcccctgcctaccagcagggacagaaccaactgtacaacgagctgaacctgggcagacgggaagagtacgacgtgctggacaagcggagaggcagggaccctgagatgggcggaaagccccagcggagaaagaacccccaggaaggactgtataacgaactccagaaagacaagatggccgaagcctacagcgagatcggcatgaagggcgagcggagaagaggcaagggccacgatggcctgtaccagggcctgagcaccgccaccaaggacacctatgacgccctgcacatgcaggccctgcctccaagaagggccaagcgatctggatctggagcaacaaacttctcactactcaaacaagcaggtgacgtggaggagaatcccgggcctactagtatggactggatttggcgcatccttttccttgtcggcgctgctaccggcgcgcattccttcgaacaagttcagcttcaacagcctggcgctgagctggtcaaacctggcgcttctgtgaagatgagctgcaaagccagcggctacgccttcagcagctactggatcaactggatgaagcagaaacccggccagggactcgaatggatcggccaaatctatcccggcgacggcgacaccaactacaacggcaagttcaagggcagagccacactgaccgccgatacctctagcagcacagcctacatgcagctgagcagcctgaccagcgaagatagcgccgtgtacttctgtgcccggtccatcacaacagtcgtgggctgcgctatggactattggggccagggaacaagcgtgaccgtgtctagtacgcgtatccagaaccctgatcctgccgtgtaccagctgcgggatagcaagagcagcgacaagagcgtgtgtctgttcaccgacttcgacagccagaccaacgtgtcccagagcaaggactccgacgtgtacatcaccgataagaccgtgctggacatgcggagcatggacttcaagagcaactccgccgtggcctggtccaacaagtccgatttcgcctgcgccaacgccttcaacaacagcattatccccgaggacacattcttcccaagccccgagagcagctgcggtacccagagttttgggttgttggaccctaaattgtgctatctgttggacggaatcctgttcatttacggagtgatcctgaccgcattgttcctgcgggttaagttttccagatccgcagacgcacccgcttaccaacaagggcagaaccaactctacaatgaacttaatttggggcggagggaagagtacgacgttctggacaaaaggaggggacgagatcccgagatgggcggaaagcctcagcgaaggaagaatccgcaagaggggctttataacgaactccagaaagataaaatggcagaagcctatagtgagattgggatgaagggagaaaggaggaggggtaaaggtcacgatgggttgtaccaaggattgagcacagccactaaagatacctatgatgcgctccacatgcaggccctgccgccaaga

SEQ ID NO: 4264 - DNA, 2886 bp, Artificial Sequence
  Synthetic Polynucloetide
atggccttaccagtgaccgccttgctcctgccgctggccttgctgctccacgccgccaggccggcatgccaggtccagctcgtcgagtccggcggcggcctcgtccaggccggcgactccgtcaccctctcctgcaccgcctccggccgcaccttctcctcctacgccctcgcctggttccgccagcgccccggcaaggagcgcgagttcgtcgccggcctccgctggggcggccccaccaactacgccgactccgtcaaggaccgcttcaccatctccggcgactccgccaagcacaccatgtacctccagatgaactccctcaagcccgaggacaccgccgtctactactgcggctacaaccccggcggctgggccgtcccctcccagtacgagtacgactcctggggccagggcacccaggtcaccgtctcctccggtaccggcggaggcggatctggcggcggaggtagcggtggcggaggatctgaattcgacatccagatgacacagagccctagcagcctgtctgccagcgtgggagacagagtgaccatcacatgcaaggccagcgaccacatcaacaactggctggcctggtatcagcagaagcctggacaggcccctaagctgctgatctacggcgctaccacactggaaacaggcgtgcccagcagattttctggcagcggctctggcaccgactacaccctgacaatatccagcctccagcctgaggacttcgccacctactactgtcagcagagctggaacaccccttggacattcggccagggcaccaagctggaaatcaagagactcgaggacctgaagaacgtgttcccacctgaggtggccgtgttcgagcctagcaaggccgagatcgcccacacccagaaagccaccctcgtgtgcctggctaccggcttctaccccgaccatgtggaactgtcttggtgggtcaacggcaaagaggtgcacagcggcgtgtgtaccgacccccagccactgaaagaacagcccgccctgaacgacagccggtactgcctgagcagcagactgagagtgtccgccaccttctggcagaacccccggaaccacttcagatgccaggtgcagttctacggcctgagcgagaacgacgagtggacccaggacagagccaagcccgtgacccagatcgtgtctgccgaagcctggggcagagccgattgcggatcccagagcttcggcctgctggaccccaagctgtgctacctgctggatggcatcctgttcatctacggcgtgatcctgaccgccctgttcctgagagtgaagttcagcagaagcgccgacgcccctgcctaccagcagggacagaaccaactgtacaacgagctgaacctgggcagacgggaagagtacgacgtgctggacaagcggagaggcagggaccctgagatgggcggaaagccccagcggagaaagaacccccaggaaggactgtataacgaactccagaaagacaagatggccgaagcctacagcgagatcggcatgaagggcgagcggagaagaggcaagggccacgatggcctgtaccagggcctgagcaccgccaccaaggacacctatgacgccctgcacatgcaggccctgcctccaagaagggccaagcgatctggatctggagcaacaaacttctcactactcaaacaagcaggtgacgtggaggagaatcccgggcctactagtatggactggatttggcgcatccttttccttgtcggcgctgctaccggcgcgcattccttcgaacaagttcagcttcaacagcctggcgctgagctggtcaaacctggcgcttctgtgaagatgagctgcaaagccagcggctacgccttcagcagctactggatcaactggatgaagcagaaacccggccagggactcgaatggatcggccaaatctatcccggcgacggcgacaccaactacaacggcaagttcaagggcagagccacactgaccgccgatacctctagcagcacagcctacatgcagctgagcagcctgaccagcgaagatagcgccgtgtacttctgtgcccggtccatcacaacagtcgtgggctgcgctatggactattggggccagggaacaagcgtgaccgtgtctagtacgcgtatccagaaccctgatcctgccgtgtaccagctgcgggatagcaagagcagcgacaagagcgtgtgtctgttcaccgacttcgacagccagaccaacgtgtcccagagcaaggactccgacgtgtacatcaccgataagtgcgtgctggacatgcggagcatggacttcaagagcaactccgccgtggcctggtccaacaagtccgatttcgcctgcgccaacgccttcaacaacagcattatccccgaggacacattcttcccaagcagcgacgtgccctgcggtacccagagttttgggttgttggaccctaaattgtgctatctgttggacggaatcctgttcatttacggagtgatcctgaccgcattgttcctgcgggttaagttttccagatccgcagacgcacccgcttaccaacaagggcagaaccaactctacaatgaacttaatttggggcggagggaagagtacgacgttctggacaaaaggaggggacgagatcccgagatgggcggaaagcctcagcgaaggaagaatccgcaagaggggctttataacgaactccagaaagataaaatggcagaagcctatagtgagattgggatgaagggagaaaggaggaggggtaaaggtcacgatgggttgtaccaaggattgagcacagccactaaagatacctatgatgcgctccacatgcaggccctgccgccaaga

SEQ ID NO: 4265 - DNA, 3099 bp, Artificial Sequence
  Synthetic Polynucloetide
atggccttaccagtgaccgccttgctcctgccgctggccttgctgctccacgccgccaggccggcatgccaggtccagctcgtcgagtccggcggcggcctcgtccaggccggcgactccgtcaccctctcctgcaccgcctccggccgcaccttctcctcctacgccctcgcctggttccgccagcgccccggcaaggagcgcgagttcgtcgccggcctccgctggggcggccccaccaactacgccgactccgtcaaggaccgcttcaccatctccggcgactccgccaagcacaccatgtacctccagatgaactccctcaagcccgaggacaccgccgtctactactgcggctacaaccccggcggctgggccgtcccctcccagtacgagtacgactcctggggccagggcacccaggtcaccgtctcctccggtaccggcggaggcggatctggcggcggaggtagcggtggcggaggatctgaattcgacatccagatgacacagagccctagcagcctgtctgccagcgtgggagacagagtgaccatcacatgcaaggccagcgaccacatcaacaactggctggcctggtatcagcagaagcctggacaggcccctaagctgctgatctacggcgctaccacactggaaacaggcgtgcccagcagattttctggcagcggctctggcaccgactacaccctgacaatatccagcctccagcctgaggacttcgccacctactactgtcagcagagctggaacaccccttggacattcggccagggcaccaagctggaaatcaagagactcgaggggaaaccaattcccaaccctcttctgggactggattcaaccggcagcggcgaggacctgaagaacgtgttcccacctgaggtggccgtgttcgagcctagcgaggccgagatcagccacacccagaaagccaccctcgtgtgcctggctaccggcttctaccccgaccatgtggaactgtcttggtgggtcaacggcaaagaggtgcacagcggcgtgtctaccgacccccagccactgaaagaacagcccgccctgaacgacagccggtactgcctgagcagcagactgagagtgtccgccaccttctggcagaacccccggaaccacttcagatgccaggtgcagttctacggcctgagcgagaacgacgagtggacccaggacagagccaagcccgtgacccagatcgtgtctgccgaagcctggggcagagccgattgcggatcccagagcttcggcctgctggaccccaagctgtgctacctgctggatggcatcctgttcatctacggcgtgatcctgaccgccctgttcctgagagtgaagttcagcagaagcgccgacgcccctgcctaccagcagggacagaaccaactgtacaacgagctgaacctgggcagacgggaagagtacgacgtgctggacaagcggagaggcagggaccctgagatgggcggaaagccccagcggagaaagaacccccaggaaggactgtataacgaactccagaaagacaagatggccgaagcctacagcgagatcggcatgaagggcgagcggagaagaggcaagggccacgatggcctgtaccagggcctgagcaccgccaccaaggacacctatgacgccctgcacatgcaggccctgcctccaagaagggccaagcgatctggatctggagcaacaaacttctcactactcaaacaagcaggtgacgtggaggagaatcccgggcctactagtatggactggatttggcgcatccttttccttgtcggcgctgctaccggcgcgcattccttcgaacaagttcagcttcaacagcctggcgctgagctggtcaaacctggcgcttctgtgaagatgagctgcaaagccagcggctacgccttcagcagctactggatcaactggatgaagcagaaacccggccagggactcgaatggatcggccaaatctatcccggcgacggcgacaccaactacaacggcaagttcaagggcagagccacactgaccgccgatacctctagcagcacagcctacatgcagctgagcagcctgaccagcgaagatagcgccgtgtacttctgtgcccggtccatcacaacagtcgtgggctgcgctatggactattggggccagggaacaagcgtgaccgtgtctagtacgcgtgagcagaaactgatctcggaagaggatgggagcggcatccagaaccctgatcctgccgtgtaccagctgcgggatagcaagagcagcgacaagagcgtgtgtctgttcaccgacttcgacagccagaccaacgtgtcccagagcaaggactccgacgtgtacatcaccgataagaccgtgctggacatgcggagcatggacttcaagagcaactccgccgtggcctggtccaacaagtccgatttcgcctgcgccaacgccttcaacaacagcattatccccgaggacacattcttcccaagccccgagagcagctgcggtacccagagttttgggttgttggaccctaaattgtgctatctgttggacggaatcctgttcatttacggagtgatcctgaccgcattgttcctgaggagcaagcggtcacggctgctccacagcgattacatgaatatgacaccacgaagaccgggtcctactcgcaaacactaccaaccctacgcacctccccgcgactttgcagcgtaccgatctcgggttaagttttccagatccgcagacgcacccgcttaccaacaagggcagaaccaactctacaatgaacttaatttggggcggagggaagagtacgacgttctggacaaaaggaggggacgagatcccgagatgggcggaaagcctcagcgaaggaagaatccgcaagaggggctttataacgaactccagaaagataaaatggcagaagcctatagtgagattgggatgaagggagaaaggaggaggggtaaaggtcacgatgggttgtaccaaggattgagcacagccactaaagatacctatgatgcgctccacatgcaggccctgccgccaaga

SEQ ID NO: 4266 - DNA, 3222 bp, Artificial Sequence
  Synthetic Polynucloetide
atggccttaccagtgaccgccttgctcctgccgctggccttgctgctccacgccgccaggccggcatgccaggtccagctcgtcgagtccggcggcggcctcgtccaggccggcgactccgtcaccctctcctgcaccgcctccggccgcaccttctcctcctacgccctcgcctggttccgccagcgccccggcaaggagcgcgagttcgtcgccggcctccgctggggcggccccaccaactacgccgactccgtcaaggaccgcttcaccatctccggcgactccgccaagcacaccatgtacctccagatgaactccctcaagcccgaggacaccgccgtctactactgcggctacaaccccggcggctgggccgtcccctcccagtacgagtacgactcctggggccagggcacccaggtcaccgtctcctccggtaccggcggaggcggatctggcggcggaggtagcggtggcggaggatctgaattcgacatccagatgacacagagccctagcagcctgtctgccagcgtgggagacagagtgaccatcacatgcaaggccagcgaccacatcaacaactggctggcctggtatcagcagaagcctggacaggcccctaagctgctgatctacggcgctaccacactggaaacaggcgtgcccagcagattttctggcagcggctctggcaccgactacaccctgacaatatccagcctccagcctgaggacttcgccacctactactgtcagcagagctggaacaccccttggacattcggccagggcaccaagctggaaatcaagagactcgaggggaaaccaattcccaaccctcttctgggactggattcaaccggcagcggcgaggacctgaagaacgtgttcccacctgaggtggccgtgttcgagcctagcgaggccgagatcagccacacccagaaagccaccctcgtgtgcctggctaccggcttctaccccgaccatgtggaactgtcttggtgggtcaacggcaaagaggtgcacagcggcgtgtctaccgacccccagccactgaaagaacagcccgccctgaacgacagccggtactgcctgagcagcagactgagagtgtccgccaccttctggcagaacccccggaaccacttcagatgccaggtgcagttctacggcctgagcgagaacgacgagtggacccaggacagagccaagcccgtgacccagatcgtgtctgccgaagcctggggcagagccgattgcggatcccagagcttcggcctgctggaccccaagctgtgctacctgctggatggcatcctgttcatctacggcgtgatcctgaccgccctgttcctgaggagtaagaggagcaggctcctgcacagtgactacatgaacatgactccacgccgccccggacccacccgcaagcattaccagccctatgccccaccacgcgacttcgcagcctatcgctccagagtgaagttcagcagaagcgccgacgcccctgcctaccagcagggacagaaccaactgtacaacgagctgaacctgggcagacgggaagagtacgacgtgctggacaagcggagaggcagggaccctgagatgggcggaaagccccagcggagaaagaacccccaggaaggactgtataacgaactccagaaagacaagatggccgaagcctacagcgagatcggcatgaagggcgagcggagaagaggcaagggccacgatggcctgtaccagggcctgagcaccgccaccaaggacacctatgacgccctgcacatgcaggccctgcctccaagaagggccaagcgatctggatctggagcaacaaacttctcactactcaaacaagcaggtgacgtggaggagaatcccgggcctactagtatggactggatttggcgcatccttttccttgtcggcgctgctaccggcgcgcattccttcgaacaagttcagcttcaacagcctggcgctgagctggtcaaacctggcgcttctgtgaagatgagctgcaaagccagcggctacgccttcagcagctactggatcaactggatgaagcagaaacccggccagggactcgaatggatcggccaaatctatcccggcgacggcgacaccaactacaacggcaagttcaagggcagagccacactgaccgccgatacctctagcagcacagcctacatgcagctgagcagcctgaccagcgaagatagcgccgtgtacttctgtgcccggtccatcacaacagtcgtgggctgcgctatggactattggggccagggaacaagcgtgaccgtgtctagtacgcgtgagcagaaactgatctcggaagaggatgggagcggcatccagaaccctgatcctgccgtgtaccagctgcgggatagcaagagcagcgacaagagcgtgtgtctgttcaccgacttcgacagccagaccaacgtgtcccagagcaaggactccgacgtgtacatcaccgataagaccgtgctggacatgcggagcatggacttcaagagcaactccgccgtggcctggtccaacaagtccgatttcgcctgcgccaacgccttcaacaacagcattatccccgaggacacattcttcccaagccccgagagcagctgcggtacccagagttttgggttgttggaccctaaattgtgctatctgttggacggaatcctgttcatttacggagtgatcctgaccgcattgttcctgaggagcaagcggtcacggctgctccacagcgattacatgaatatgacaccacgaagaccgggtcctactcgcaaacactaccaaccctacgcacctccccgcgactttgcagcgtaccgatctcgggttaagttttccagatccgcagacgcacccgcttaccaacaagggcagaaccaactctacaatgaacttaatttggggcggagggaagagtacgacgttctggacaaaaggaggggacgagatcccgagatgggcggaaagcctcagcgaaggaagaatccgcaagaggggctttataacgaactccagaaagataaaatggcagaagcctatagtgagattgggatgaagggagaaaggaggaggggtaaaggtcacgatgggttgtaccaaggattgagcacagccactaaagatacctatgatgcgctccacatgcaggccctgccgccaaga

SEQ ID NO: 4267 - DNA, 3105 bp, Artificial Sequence
  Synthetic Polynucloetide
atggccttaccagtgaccgccttgctcctgccgctggccttgctgctccacgccgccaggccggcatgccaggtccagctcgtcgagtccggcggcggcctcgtccaggccggcgactccgtcaccctctcctgcaccgcctccggccgcaccttctcctcctacgccctcgcctggttccgccagcgccccggcaaggagcgcgagttcgtcgccggcctccgctggggcggccccaccaactacgccgactccgtcaaggaccgcttcaccatctccggcgactccgccaagcacaccatgtacctccagatgaactccctcaagcccgaggacaccgccgtctactactgcggctacaaccccggcggctgggccgtcccctcccagtacgagtacgactcctggggccagggcacccaggtcaccgtctcctccggtaccggcggaggcggatctggcggcggaggtagcggtggcggaggatctgaattcgacatccagatgacacagagccctagcagcctgtctgccagcgtgggagacagagtgaccatcacatgcaaggccagcgaccacatcaacaactggctggcctggtatcagcagaagcctggacaggcccctaagctgctgatctacggcgctaccacactggaaacaggcgtgcccagcagattttctggcagcggctctggcaccgactacaccctgacaatatccagcctccagcctgaggacttcgccacctactactgtcagcagagctggaacaccccttggacattcggccagggcaccaagctggaaatcaagagactcgaggggaaaccaattcccaaccctcttctgggactggattcaaccggcagcggcgaggacctgaagaacgtgttcccacctgaggtggccgtgttcgagcctagcgaggccgagatcagccacacccagaaagccaccctcgtgtgcctggctaccggcttctaccccgaccatgtggaactgtcttggtgggtcaacggcaaagaggtgcacagcggcgtgtctaccgacccccagccactgaaagaacagcccgccctgaacgacagccggtactgcctgagcagcagactgagagtgtccgccaccttctggcagaacccccggaaccacttcagatgccaggtgcagttctacggcctgagcgagaacgacgagtggacccaggacagagccaagcccgtgacccagatcgtgtctgccgaagcctggggcagagccgattgcggatcccagagcttcggcctgctggaccccaagctgtgctacctgctggatggcatcctgttcatctacggcgtgatcctgaccgccctgttcctgagagtgaagttcagcagaagcgccgacgcccctgcctaccagcagggacagaaccaactgtacaacgagctgaacctgggcagacgggaagagtacgacgtgctggacaagcggagaggcagggaccctgagatgggcggaaagccccagcggagaaagaacccccaggaaggactgtataacgaactccagaaagacaagatggccgaagcctacagcgagatcggcatgaagggcgagcggagaagaggcaagggccacgatggcctgtaccagggcctgagcaccgccaccaaggacacctatgacgccctgcacatgcaggccctgcctccaagaagggccaagcgatctggatctggagcaacaaacttctcactactcaaacaagcaggtgacgtggaggagaatcccgggcctactagtatggactggatttggcgcatccttttccttgtcggcgctgctaccggcgcgcattccttcgaacaagttcagcttcaacagcctggcgctgagctggtcaaacctggcgcttctgtgaagatgagctgcaaagccagcggctacgccttcagcagctactggatcaactggatgaagcagaaacccggccagggactcgaatggatcggccaaatctatcccggcgacggcgacaccaactacaacggcaagttcaagggcagagccacactgaccgccgatacctctagcagcacagcctacatgcagctgagcagcctgaccagcgaagatagcgccgtgtacttctgtgcccggtccatcacaacagtcgtgggctgcgctatggactattggggccagggaacaagcgtgaccgtgtctagtacgcgtgagcagaaactgatctcggaagaggatctggggagcggcatccagaaccctgatcctgccgtgtaccagctgcgggatagcaagagcagcgacaagagcgtgtgtctgttcaccgacttcgacagccagaccaacgtgtcccagagcaaggactccgacgtgtacatcaccgataagaccgtgctggacatgcggagcatggacttcaagagcaactccgccgtggcctggtccaacaagtccgatttcgcctgcgccaacgccttcaacaacagcattatccccgaggacacattcttcccaagccccgagagcagctgcggtacccagagttttgggttgttggaccctaaattgtgctatctgttggacggaatcctgttcatttacggagtgatcctgaccgcattgttcctgaagagaggccggaagaagctgctgtacatcttcaagcagcctttcatgcggcccgtgcagaccacccaggaagaggacggctgctcctgccggttccccgaggaagaagaaggcggctgcgagctgcgggttaagttttccagatccgcagacgcacccgcttaccaacaagggcagaaccaactctacaatgaacttaatttggggcggagggaagagtacgacgttctggacaaaaggaggggacgagatcccgagatgggcggaaagcctcagcgaaggaagaatccgcaagaggggctttataacgaactccagaaagataaaatggcagaagcctatagtgagattgggatgaagggagaaaggaggaggggtaaaggtcacgatgggttgtaccaaggattgagcacagccactaaagatacctatgatgcgctccacatgcaggccctgccgccaaga

SEQ ID NO: 4268 - DNA, 3231 bp, Artificial Sequence
  Synthetic Polynucloetide
atggccttaccagtgaccgccttgctcctgccgctggccttgctgctccacgccgccaggccggcatgccaggtccagctcgtcgagtccggcggcggcctcgtccaggccggcgactccgtcaccctctcctgcaccgcctccggccgcaccttctcctcctacgccctcgcctggttccgccagcgccccggcaaggagcgcgagttcgtcgccggcctccgctggggcggccccaccaactacgccgactccgtcaaggaccgcttcaccatctccggcgactccgccaagcacaccatgtacctccagatgaactccctcaagcccgaggacaccgccgtctactactgcggctacaaccccggcggctgggccgtcccctcccagtacgagtacgactcctggggccagggcacccaggtcaccgtctcctccggtaccggcggaggcggatctggcggcggaggtagcggtggcggaggatctgaattcgacatccagatgacacagagccctagcagcctgtctgccagcgtgggagacagagtgaccatcacatgcaaggccagcgaccacatcaacaactggctggcctggtatcagcagaagcctggacaggcccctaagctgctgatctacggcgctaccacactggaaacaggcgtgcccagcagattttctggcagcggctctggcaccgactacaccctgacaatatccagcctccagcctgaggacttcgccacctactactgtcagcagagctggaacaccccttggacattcggccagggcaccaagctggaaatcaagagactcgaggggaaaccaattcccaaccctcttctgggactggattcaaccggcagcggcgaggacctgaagaacgtgttcccacctgaggtggccgtgttcgagcctagcgaggccgagatcagccacacccagaaagccaccctcgtgtgcctggctaccggcttctaccccgaccatgtggaactgtcttggtgggtcaacggcaaagaggtgcacagcggcgtgtctaccgacccccagccactgaaagaacagcccgccctgaacgacagccggtactgcctgagcagcagactgagagtgtccgccaccttctggcagaacccccggaaccacttcagatgccaggtgcagttctacggcctgagcgagaacgacgagtggacccaggacagagccaagcccgtgacccagatcgtgtctgccgaagcctggggcagagccgattgcggatcccagagcttcggcctgctggaccccaagctgtgctacctgctggatggcatcctgttcatctacggcgtgatcctgaccgccctgttcctgaaacggggcagaaagaaactcctgtatatattcaaacaaccatttatgagaccagtacaaactactcaagaggaagatggctgtagctgccgatttccagaagaagaagaaggaggatgtgaactgagagtgaagttcagcagaagcgccgacgcccctgcctaccagcagggacagaaccaactgtacaacgagctgaacctgggcagacgggaagagtacgacgtgctggacaagcggagaggcagggaccctgagatgggcggaaagccccagcggagaaagaacccccaggaaggactgtataacgaactccagaaagacaagatggccgaagcctacagcgagatcggcatgaagggcgagcggagaagaggcaagggccacgatggcctgtaccagggcctgagcaccgccaccaaggacacctatgacgccctgcacatgcaggccctgcctccaagaagggccaagcgatctggatctggagcaacaaacttctcactactcaaacaagcaggtgacgtggaggagaatcccgggcctactagtatggactggatttggcgcatccttttccttgtcggcgctgctaccggcgcgcattccttcgaacaagttcagcttcaacagcctggcgctgagctggtcaaacctggcgcttctgtgaagatgagctgcaaagccagcggctacgccttcagcagctactggatcaactggatgaagcagaaacccggccagggactcgaatggatcggccaaatctatcccggcgacggcgacaccaactacaacggcaagttcaagggcagagccacactgaccgccgatacctctagcagcacagcctacatgcagctgagcagcctgaccagcgaagatagcgccgtgtacttctgtgcccggtccatcacaacagtcgtgggctgcgctatggactattggggccagggaacaagcgtgaccgtgtctagtacgcgtgagcagaaactgatctcggaagaggatctggggagcggcatccagaaccctgatcctgccgtgtaccagctgcgggatagcaagagcagcgacaagagcgtgtgtctgttcaccgacttcgacagccagaccaacgtgtcccagagcaaggactccgacgtgtacatcaccgataagaccgtgctggacatgcggagcatggacttcaagagcaactccgccgtggcctggtccaacaagtccgatttcgcctgcgccaacgccttcaacaacagcattatccccgaggacacattcttcccaagccccgagagcagctgcggtacccagagttttgggttgttggaccctaaattgtgctatctgttggacggaatcctgttcatttacggagtgatcctgaccgcattgttcctgaagagaggccggaagaagctgctgtacatcttcaagcagcctttcatgcggcccgtgcagaccacccaggaagaggacggctgctcctgccggttccccgaggaagaagaaggcggctgcgagctgcgggttaagttttccagatccgcagacgcacccgcttaccaacaagggcagaaccaactctacaatgaacttaatttggggcggagggaagagtacgacgttctggacaaaaggaggggacgagatcccgagatgggcggaaagcctcagcgaaggaagaatccgcaagaggggctttataacgaactccagaaagataaaatggcagaagcctatagtgagattgggatgaagggagaaaggaggaggggtaaaggtcacgatgggttgtaccaaggattgagcacagccactaaagatacctatgatgcgctccacatgcaggccctgccgccaaga

SEQ ID NO: 4269 - DNA, 2904 bp, Artificial Sequence
  Synthetic Polynucloetide
atggccttaccagtgaccgccttgctcctgccgctggccttgctgctccacgccgccaggccggcatgccaggtccagctcgtcgagtccggcggcggcctcgtccaggccggcgactccgtcaccctctcctgcaccgcctccggccgcaccttctcctcctacgccctcgcctggttccgccagcgccccggcaaggagcgcgagttcgtcgccggcctccgctggggcggccccaccaactacgccgactccgtcaaggaccgcttcaccatctccggcgactccgccaagcacaccatgtacctccagatgaactccctcaagcccgaggacaccgccgtctactactgcggctacaaccccggcggctgggccgtcccctcccagtacgagtacgactcctggggccagggcacccaggtcaccgtctcctccggtaccggcggaggcggatctggcggcggaggtagcggtggcggaggatctgaattcgacatccagatgacacagagccctagcagcctgtctgccagcgtgggagacagagtgaccatcacatgcaaggccagcgaccacatcaacaactggctggcctggtatcagcagaagcctggacaggcccctaagctgctgatctacggcgctaccacactggaaacaggcgtgcccagcagattttctggcagcggctctggcaccgactacaccctgacaatatccagcctccagcctgaggacttcgccacctactactgtcagcagagctggaacaccccttggacattcggccagggcaccaagctggaaatcaagagactcgagcagagcttcggcctgctggaccccaagctgtgctacctgctggatggcatcctgttcatctacggcgtgatcctgaccgccctgttcctgagagtgaagttcagcagaagcgccgacgcccctgcctaccagcagggacagaaccaactgtacaacgagctgaacctgggcagacgggaagagtacgacgtgctggacaagcggagaggcagggaccctgagatgggcggaaagccccagcggagaaagaacccccaggaaggactgtataacgaactccagaaagacaagatggccgaagcctacagcgagatcggcatgaagggcgagcggagaagaggcaagggccacgatggcctgtaccagggcctgagcaccgccaccaaggacacctatgacgccctgcacatgcaggccctgcctccaagaagggccaagcgatctggatctggagcaacaaacttctcactactcaaacaagcaggtgacgtggaggagaatcccgggcctactagtatggactggatttggcgcatccttttccttgtcggcgctgctaccggcgcgcattccttcgaacaagttcagcttcaacagcctggcgctgagctggtcaaacctggcgcttctgtgaagatgagctgcaaagccagcggctacgccttcagcagctactggatcaactggatgaagcagaaacccggccagggactcgaatggatcggccaaatctatcccggcgacggcgacaccaactacaacggcaagttcaagggcagagccacactgaccgccgatacctctagcagcacagcctacatgcagctgagcagcctgaccagcgaagatagcgccgtgtacttctgtgcccggtccatcacaacagtcgtgggctgcgctatggactattggggccagggaacaagcgtgaccgtgtctagtacgcgtcagagttttgggttgttggaccctaaattgtgctatctgttggacggaatcctgttcatttacggagtgatcctgaccgcattgttcctgcgggttaagttttccagatccgcagacgcacccgcttaccaacaagggcagaaccaactctacaatgaacttaatttggggcggagggaagagtacgacgttctggacaaaaggaggggacgagatcccgagatgggcggaaagcctcagcgaaggaagaatccgcaagaggggctttataacgaactccagaaagataaaatggcagaagcctatagtgagattgggatgaagggagaaaggaggaggggtaaaggtcacgatgggttgtaccaaggattgagcacagccactaaagatacctatgatgcgctccacatgcaggccctgccgccaagacgcgccaagagaagcggatctggcgtgaagcagaccctgaatttcgacctgctgaagctggctggcgacgtggaatccaacccaggcccttctagaggccatatgaccgagtacaagcccacggtgcgcctcgccacccgcgacgacgtccccagggccgtacgcaccctcgccgccgcgttcgccgactaccccgccacgcgccacaccgtcgatccggaccgccacatcgagcgggtcaccgagctgcaagaactcttcctcacgcgcgtcgggctcgacatcggcaaggtgtgggtcgcggacgacggcgccgcggtggcggtctggaccacgccggagagcgtcgaagcgggggcggtgttcgccgagatcggcccgcgcatggccgagttgagcggttcccggctggccgcgcagcaacagatggaaggcctcctggcgccgcaccggcccaaggagcccgcgtggttcctggccaccgtcggcgtctcgcccgaccaccagggcaagggtctgggcagcgccgtcgtgctccccggagtggaggcggccgagcgcgccggggtgcccgccttcctggagacctccgcgccccgcaacctccccttctacgagcggctcggcttcaccgtcaccgccgacgtcgaggtgcccgaaggaccgcgcacctggtgcatgacccgcaagcccggtgcctga

SEQ ID NO: 4270 - DNA, 2376 bp, Artificial Sequence
  Synthetic Polynucloetide
atggccttaccagtgaccgccttgctcctgccgctggccttgctgctccacgccgccaggccggcatgccaggtccagctcgtcgagtccggcggcggcctcgtccaggccggcgactccgtcaccctctcctgcaccgcctccggccgcaccttctcctcctacgccctcgcctggttccgccagcgccccggcaaggagcgcgagttcgtcgccggcctccgctggggcggccccaccaactacgccgactccgtcaaggaccgcttcaccatctccggcgactccgccaagcacaccatgtacctccagatgaactccctcaagcccgaggacaccgccgtctactactgcggctacaaccccggcggctgggccgtcccctcccagtacgagtacgactcctggggccagggcacccaggtcaccgtctcctccggtaccggcggaggcggatctggcggcggaggtagcggtggcggaggatctgaattcgacatccagatgacacagagccctagcagcctgtctgccagcgtgggagacagagtgaccatcacatgcaaggccagcgaccacatcaacaactggctggcctggtatcagcagaagcctggacaggcccctaagctgctgatctacggcgctaccacactggaaacaggcgtgcccagcagattttctggcagcggctctggcaccgactacaccctgacaatatccagcctccagcctgaggacttcgccacctactactgtcagcagagctggaacaccccttggacattcggccagggcaccaagctggaaatcaagagactcgagggacagcctaaggccaatcctaccgtgacactgttccctccaagcagcgaagaactccaggccaacaaggccacacttgtgtgcctgatctccgacttctaccctggggctgtgacagtggcttggaaggccgatggatctcctgtgaaagccggcgtggaaaccaccaagccatccaagcagagcaacaacaaatacgccgccagctcctacctgagcctgacacctgagcagtggaagtcccacagatcctacagctgccaagtgacccacgaaggcagcaccgtggaaaagacagtggcccctacagagtgcagccccatcaagaccgatgtgattacaatggaccccaaggacaactgctccaaggacgccaacgataccctgctgctccagctgaccaacaccagcgcctactacatgtacttgttgctgctgctgaagtccgtggtgtacttcgccatcatcacatgctgcctgctgcggagaaccgccttctgctgcaacggcgagaagtctagggccaagcgatctggatctggagcaacaaacttctcactactcaaacaagcaggtgacgtggaggagaatcccgggcctactagtatggactggatttggcgcatccttttccttgtcggcgctgctaccggcgcgcattccttcgaacaagttcagcttcaacagcctggcgctgagctggtcaaacctggcgcttctgtgaagatgagctgcaaagccagcggctacgccttcagcagctactggatcaactggatgaagcagaaacccggccagggactcgaatggatcggccaaatctatcccggcgacggcgacaccaactacaacggcaagttcaagggcagagccacactgaccgccgatacctctagcagcacagcctacatgcagctgagcagcctgaccagcgaagatagcgccgtgtacttctgtgcccggtccatcacaacagtcgtgggctgcgctatggactattggggccagggaacaagcgtgaccgtgtctagtacgcgtgcctctacaaagggaccctccgtgtttcctctggctcccagcagcaagtctacaagcggaggaacagccgctctgggctgcctggtcaaggattactttcccgagcctgtgaccgtgtcctggaatagcggagcactgacaagcggcgtgcacacctttccagccgtgctgcaaagcagcggcctgtactctctgagcagcgtggtcacagtgcctagctctagcctgggcacccagacctacatctgcaatgtgaaccacaagcctagcaacaccaaggtggacaagagagtggaacccaagagctgtgaagtgaaaaccgactccaccgaccacgtgaagcccaaagagacagagaacaccaagcagcccagcaagagctgccacaagcccaaggccatcgtgcacaccgagaaagtgaacatgatgagcctgaccgtgctgggcctgcggatgctgttcgccaaaaccgtggccgtgaacttcctgctgaccgccaagctgttcttcctc

SEQ ID NO: 4271 - DNA, 2310 bp, Artificial Sequence
  Synthetic Polynucloetide
atggccttaccagtgaccgccttgctcctgccgctggccttgctgctccacgccgccaggccggcatgccaggtccagctcgtcgagtccggcggcggcctcgtccaggccggcgactccgtcaccctctcctgcaccgcctccggccgcaccttctcctcctacgccctcgcctggttccgccagcgccccggcaaggagcgcgagttcgtcgccggcctccgctggggcggccccaccaactacgccgactccgtcaaggaccgcttcaccatctccggcgactccgccaagcacaccatgtacctccagatgaactccctcaagcccgaggacaccgccgtctactactgcggctacaaccccggcggctgggccgtcccctcccagtacgagtacgactcctggggccagggcacccaggtcaccgtctcctccggtaccggcggaggcggatctggcggcggaggtagcggtggcggaggatctgaattcgacatccagatgacacagagccctagcagcctgtctgccagcgtgggagacagagtgaccatcacatgcaaggccagcgaccacatcaacaactggctggcctggtatcagcagaagcctggacaggcccctaagctgctgatctacggcgctaccacactggaaacaggcgtgcccagcagattttctggcagcggctctggcaccgactacaccctgacaatatccagcctccagcctgaggacttcgccacctactactgtcagcagagctggaacaccccttggacattcggccagggcaccaagctggaaatcaagagactcgagggacagcctaaggccaatcctaccgtgacactgttccctccaagcagcgaagaactccaggccaacaaggccacacttgtgtgcctgatctccgacttctaccctggggctgtgacagtggcttggaaggccgatggatctcctgtgaaagccggcgtggaaaccaccaagccatccaagcagagcaacaacaaatacgccgccagctcctacctgagcctgacacctgagcagtggaagtcccacagatcctacagctgccaagtgacccacgaaggcagcaccgtggaaaagacagtggcccctacagagtgcagcggcagagccgattgcggcatcaccagcgccagctaccaccagggcgtgctgagcgccaccatcctgtacgagatcctgctgggcaaggccaccctgtacgccgtgctggtgtctgccctggtgctgatggctatggtcaagcggaaggacagccggggaagggccaagcgatctggatctggagcaacaaacttctcactactcaaacaagcaggtgacgtggaggagaatcccgggcctactagtatggactggatttggcgcatccttttccttgtcggcgctgctaccggcgcgcattccttcgaacaagttcagcttcaacagcctggcgctgagctggtcaaacctggcgcttctgtgaagatgagctgcaaagccagcggctacgccttcagcagctactggatcaactggatgaagcagaaacccggccagggactcgaatggatcggccaaatctatcccggcgacggcgacaccaactacaacggcaagttcaagggcagagccacactgaccgccgatacctctagcagcacagcctacatgcagctgagcagcctgaccagcgaagatagcgccgtgtacttctgtgcccggtccatcacaacagtcgtgggctgcgctatggactattggggccagggaacaagcgtgaccgtgtctagtacgcgtgcctctacaaagggaccctccgtgtttcctctggctcccagcagcaagtctacaagcggaggaacagccgctctgggctgcctggtcaaggattactttcccgagcctgtgaccgtgtcctggaatagcggagcactgacaagcggcgtgcacacctttccagccgtgctgcaaagcagcggcctgtactctctgagcagcgtggtcacagtgcctagctctagcctgggcacccagacctacatctgcaatgtgaaccacaagcctagcaacaccaaggtggacaagagagtggaacccaagagctgtatccccgaggacacattcttcccaagcagcgacgtgccctgcgacgtgaagctggtggaaaagagcttcgagacagacaccaacctgaacttccagaacctgagcgtgatcggcttcagaatcctgctgctgaaagtggccggctttaacctgctgatgaccctgcggctgtggtccagc

SEQ ID NO: 4272 - DNA, 2310 bp, Artificial Sequence
  Synthetic Polynucloetide
atggccttaccagtgaccgccttgctcctgccgctggccttgctgctccacgccgccaggccggcatgccaggtccagctcgtcgagtccggcggcggcctcgtccaggccggcgactccgtcaccctctcctgcaccgcctccggccgcaccttctcctcctacgccctcgcctggttccgccagcgccccggcaaggagcgcgagttcgtcgccggcctccgctggggcggccccaccaactacgccgactccgtcaaggaccgcttcaccatctccggcgactccgccaagcacaccatgtacctccagatgaactccctcaagcccgaggacaccgccgtctactactgcggctacaaccccggcggctgggccgtcccctcccagtacgagtacgactcctggggccagggcacccaggtcaccgtctcctccggtaccggcggaggcggatctggcggcggaggtagcggtggcggaggatctgaattcgacatccagatgacacagagccctagcagcctgtctgccagcgtgggagacagagtgaccatcacatgcaaggccagcgaccacatcaacaactggctggcctggtatcagcagaagcctggacaggcccctaagctgctgatctacggcgctaccacactggaaacaggcgtgcccagcagattttctggcagcggctctggcaccgactacaccctgacaatatccagcctccagcctgaggacttcgccacctactactgtcagcagagctggaacaccccttggacattcggccagggcaccaagctggaaatcaagagactcgagggacagcctaaggccaatcctaccgtgacactgttccctccaagcagcgaagaactccaggccaacaaggccacacttgtgtgcctgatctccgacttctaccctggggctgtgacagtggcttggaaggccgatggatctcctgtgaaagccggcgtggaaaccaccaagccatccaagcagagcaacaacaaatacgccgccagctcctacctgagcctgacacctgagcagtggaagtcccacagatcctacagctgccaagtgacccacgaaggcagcaccgtggaaaagacagtggcccctacagagtgcagcggcagagccgattgcggctttaccagcgagagctaccagcagggcgtgctgagcgccaccatcctgtacgagatcctgctgggcaaggccaccctgtacgccgtgctggtgtctgccctggtgctgatggctatggtcaagcggaaggacagccggggaagggccaagcgatctggatctggagcaacaaacttctcactactcaaacaagcaggtgacgtggaggagaatcccgggcctactagtatggactggatttggcgcatccttttccttgtcggcgctgctaccggcgcgcattccttcgaacaagttcagcttcaacagcctggcgctgagctggtcaaacctggcgcttctgtgaagatgagctgcaaagccagcggctacgccttcagcagctactggatcaactggatgaagcagaaacccggccagggactcgaatggatcggccaaatctatcccggcgacggcgacaccaactacaacggcaagttcaagggcagagccacactgaccgccgatacctctagcagcacagcctacatgcagctgagcagcctgaccagcgaagatagcgccgtgtacttctgtgcccggtccatcacaacagtcgtgggctgcgctatggactattggggccagggaacaagcgtgaccgtgtctagtacgcgtgcctctacaaagggaccctccgtgtttcctctggctcccagcagcaagtctacaagcggaggaacagccgctctgggctgcctggtcaaggattactttcccgagcctgtgaccgtgtcctggaatagcggagcactgacaagcggcgtgcacacctttccagccgtgctgcaaagcagcggcctgtactctctgagcagcgtggtcacagtgcctagctctagcctgggcacccagacctacatctgcaatgtgaaccacaagcctagcaacaccaaggtggacaagagagtggaacccaagagctgtatccccgaggacacattcttcccaagccccgagagcagctgcgacgtgaagctggtggaaaagagcttcgagacagacaccaacctgaacttccagaacctgagcgtgatcggcttcagaatcctgctgctgaaagtggccggctttaacctgctgatgaccctgcggctgtggtccagc

SEQ ID NO: 4273 - DNA, 1788 bp, Artificial Sequence
  Synthetic Polynucloetide
atggccttaccagtgaccgccttgctcctgccgctggccttgctgctccacgccgccaggccggcatgccaggtccagctcgtcgagtccggcggcggcctcgtccaggccggcgactccgtcaccctctcctgcaccgcctccggccgcaccttctcctcctacgccctcgcctggttccgccagcgccccggcaaggagcgcgagttcgtcgccggcctccgctggggcggccccaccaactacgccgactccgtcaaggaccgcttcaccatctccggcgactccgccaagcacaccatgtacctccagatgaactccctcaagcccgaggacaccgccgtctactactgcggctacaaccccggcggctgggccgtcccctcccagtacgagtacgactcctggggccagggcacccaggtcaccgtctcctccggtaccggcggaggcggatctggcggcggaggtagcggtggcggaggatctgaattcgacatccagatgacacagagccctagcagcctgtctgccagcgtgggagacagagtgaccatcacatgcaaggccagcgaccacatcaacaactggctggcctggtatcagcagaagcctggacaggcccctaagctgctgatctacggcgctaccacactggaaacaggcgtgcccagcagattttctggcagcggctctggcaccgactacaccctgacaatatccagcctccagcctgaggacttcgccacctactactgtcagcagagctggaacaccccttggacattcggccagggcaccaagctggaaatcaagagaggcggaggcggaagtggaggcggaggatctggcggcggaggctctcaagttcagcttcaacagcctggcgctgagctggtcaaacctggcgcttctgtgaagatgagctgcaaagccagcggctacgccttcagcagctactggatcaactggatgaagcagaaacccggccagggactcgaatggatcggccaaatctatcccggcgacggcgacaccaactacaacggcaagttcaagggcagagccacactgaccgccgatacctctagcagcacagcctacatgcagctgagcagcctgaccagcgaagatagcgccgtgtacttctgtgcccggtccatcacaacagtcgtgggctgcgctatggactattggggccagggaacaagcgtgaccgtgtctagtacgcgtgacggtaacgaggagatgggaggaatcactcaaaccccttacaaagtctcaatttcaggaacaactgttatccttacatgtccccagtatcctggcagcgagatcctttggcagcataacgacaagaatatagggggagatgaagacgataagaatatcggatctgacgaggatcacttgagcctgaaagagttctccgagcttgaacaaagcggatattatgtgtgctatccgcgcgggtcaaagccggaagacgctaacttttacctttatctccgagccagagtgtgcgaaaattgcatggaaatggacgttatgtccgttgctacaatagttatcgtagatatatgcatcacgggtggactgcttctgctggtttattattggtccaagaatagaaaggccaaagctaaacccgtgaccagaggcgctggcgcaggcggaaggcaaaggggacaaaacaaagaacggccaccaccagtgccaaatccagattatgagcctattcggaaaggacagagggacctgtactctggcctgaatcagagaagaatc

SEQ ID NO: 4274 - DNA, 1683 bp, Artificial Sequence
  Synthetic Polynucloetide
atggccttaccagtgaccgccttgctcctgccgctggccttgctgctccacgccgccaggccggcatgccaggtccagctcgtcgagtccggcggcggcctcgtccaggccggcgactccgtcaccctctcctgcaccgcctccggccgcaccttctcctcctacgccctcgcctggttccgccagcgccccggcaaggagcgcgagttcgtcgccggcctccgctggggcggccccaccaactacgccgactccgtcaaggaccgcttcaccatctccggcgactccgccaagcacaccatgtacctccagatgaactccctcaagcccgaggacaccgccgtctactactgcggctacaaccccggcggctgggccgtcccctcccagtacgagtacgactcctggggccagggcacccaggtcaccgtctcctccggtaccggcggaggcggatctggcggcggaggtagcggtggcggaggatctgaattcgacatccagatgacacagagccctagcagcctgtctgccagcgtgggagacagagtgaccatcacatgcaaggccagcgaccacatcaacaactggctggcctggtatcagcagaagcctggacaggcccctaagctgctgatctacggcgctaccacactggaaacaggcgtgcccagcagattttctggcagcggctctggcaccgactacaccctgacaatatccagcctccagcctgaggacttcgccacctactactgtcagcagagctggaacaccccttggacattcggccagggcaccaagctggaaatcaagagaggcggaggcggaagtggaggcggaggatctggcggcggaggctctcaagttcagcttcaacagcctggcgctgagctggtcaaacctggcgcttctgtgaagatgagctgcaaagccagcggctacgccttcagcagctactggatcaactggatgaagcagaaacccggccagggactcgaatggatcggccaaatctatcccggcgacggcgacaccaactacaacggcaagttcaagggcagagccacactgaccgccgatacctctagcagcacagcctacatgcagctgagcagcctgaccagcgaagatagcgccgtgtacttctgtgcccggtccatcacaacagtcgtgggctgcgctatggactattggggccagggaacaagcgtgaccgtgtctagtacgcgtttcaagatccccatcgaggaactggaagatcgggtgttcgtgaactgcaacacctctatcacctgggtggaaggcaccgtgggaacactgctgagcgacatcaccagactggacctcggcaagcggattctggaccctcggggcatctacagatgcaacggcaccgacatctacaaggacaaagaaagcaccgtgcaggtccactacagaatgtgccagtcctgcgtggaactggaccctgctacagtggccggcatcatcgtgaccgatgtgatcgctactctgctgctggctctgggagtgttctgcttcgccggacacgaaacaggcagactgtctggcgctgccgatacacaggccctgctgagaaacgaccaagtgtatcagcccctgcgcgacagagatgatgcccagtattctcacctcggcggcaactgggctagaaacaag

SEQ ID NO: 4275 - DNA, 1713 bp, Artificial Sequence
  Synthetic Polynucloetide
atggccttaccagtgaccgccttgctcctgccgctggccttgctgctccacgccgccaggccggcatgccaggtccagctcgtcgagtccggcggcggcctcgtccaggccggcgactccgtcaccctctcctgcaccgcctccggccgcaccttctcctcctacgccctcgcctggttccgccagcgccccggcaaggagcgcgagttcgtcgccggcctccgctggggcggccccaccaactacgccgactccgtcaaggaccgcttcaccatctccggcgactccgccaagcacaccatgtacctccagatgaactccctcaagcccgaggacaccgccgtctactactgcggctacaaccccggcggctgggccgtcccctcccagtacgagtacgactcctggggccagggcacccaggtcaccgtctcctccggtaccggcggaggcggatctggcggcggaggtagcggtggcggaggatctgaattcgacatccagatgacacagagccctagcagcctgtctgccagcgtgggagacagagtgaccatcacatgcaaggccagcgaccacatcaacaactggctggcctggtatcagcagaagcctggacaggcccctaagctgctgatctacggcgctaccacactggaaacaggcgtgcccagcagattttctggcagcggctctggcaccgactacaccctgacaatatccagcctccagcctgaggacttcgccacctactactgtcagcagagctggaacaccccttggacattcggccagggcaccaagctggaaatcaagagaggcggaggcggaagtggaggcggaggatctggcggcggaggctctcaagttcagcttcaacagcctggcgctgagctggtcaaacctggcgcttctgtgaagatgagctgcaaagccagcggctacgccttcagcagctactggatcaactggatgaagcagaaacccggccagggactcgaatggatcggccaaatctatcccggcgacggcgacaccaactacaacggcaagttcaagggcagagccacactgaccgccgatacctctagcagcacagcctacatgcagctgagcagcctgaccagcgaagatagcgccgtgtacttctgtgcccggtccatcacaacagtcgtgggctgcgctatggactattggggccagggaacaagcgtgaccgtgtctagtacgcgtcagagcatcaagggcaaccacctggtcaaggtgtacgactaccaagaggacggcagcgtgctgctgacatgtgatgccgaggccaagaacatcacctggtttaaggacggcaagatgatcggcttcctgaccgaggacaagaagaagtggaacctgggcagcaacgctaaggaccccagaggcatgtatcagtgcaagggcagccagaacaagagcaagcccctccaggtgtactaccggatgtgccagaactgcatcgagctgaacgccgctaccatcagcggctttctgttcgccgagatcgtgtccatcttcgtgctggccgtgggcgtgtactttatcgctggacaggatggcgtgcggcagagcagagcttccgataagcaaaccctgctgcctaacgaccagctgtaccagcctctgaaggacagagaggacgaccagtacagccacctccagggcaatcagctgagaagaaac

SEQ ID NO: 4276 - DNA, 1662 bp, Artificial Sequence
  Synthetic Polynucloetide
atggccttaccagtgaccgccttgctcctgccgctggccttgctgctccacgccgccaggccggcatgccaggtccagctcgtcgagtccggcggcggcctcgtccaggccggcgactccgtcaccctctcctgcaccgcctccggccgcaccttctcctcctacgccctcgcctggttccgccagcgccccggcaaggagcgcgagttcgtcgccggcctccgctggggcggccccaccaactacgccgactccgtcaaggaccgcttcaccatctccggcgactccgccaagcacaccatgtacctccagatgaactccctcaagcccgaggacaccgccgtctactactgcggctacaaccccggcggctgggccgtcccctcccagtacgagtacgactcctggggccagggcacccaggtcaccgtctcctccggtaccggcggaggcggatctggcggcggaggtagcggtggcggaggatctgaattcgacatccagatgacacagagccctagcagcctgtctgccagcgtgggagacagagtgaccatcacatgcaaggccagcgaccacatcaacaactggctggcctggtatcagcagaagcctggacaggcccctaagctgctgatctacggcgctaccacactggaaacaggcgtgcccagcagattttctggcagcggctctggcaccgactacaccctgacaatatccagcctccagcctgaggacttcgccacctactactgtcagcagagctggaacaccccttggacattcggccagggcaccaagctggaaatcaagagaggcggaggcggaagtggaggcggaggatctggcggcggaggctctcaagttcagcttcaacagcctggcgctgagctggtcaaacctggcgcttctgtgaagatgagctgcaaagccagcggctacgccttcagcagctactggatcaactggatgaagcagaaacccggccagggactcgaatggatcggccaaatctatcccggcgacggcgacaccaactacaacggcaagttcaagggcagagccacactgaccgccgatacctctagcagcacagcctacatgcagctgagcagcctgaccagcgaagatagcgccgtgtacttctgtgcccggtccatcacaacagtcgtgggctgcgctatggactattggggccagggaacaagcgtgaccgtgtctagtacgcgtcagagttttgggttgttggaccctaaattgtgctatctgttggacggaatcctgttcatttacggagtgatcctgaccgcattgttcctgcgggttaagttttccagatccgcagacgcacccgcttaccaacaagggcagaaccaactctacaatgaacttaatttggggcggagggaagagtacgacgttctggacaaaaggaggggacgagatcccgagatgggcggaaagcctcagcgaaggaagaatccgcaagaggggctttataacgaactccagaaagataaaatggcagaagcctatagtgagattgggatgaagggagaaaggaggaggggtaaaggtcacgatgggttgtaccaaggattgagcacagccactaaagatacctatgatgcgctccacatgcaggccctgccgccaaga

SEQ ID NO: 4277 - DNA, 2364 bp, Artificial Sequence
  Synthetic Polynucloetide
atggccttaccagtgaccgccttgctcctgccgctggccttgctgctccacgccgccaggccggcatgccaggtccagctcgtcgagtccggcggcggcctcgtccaggccggcgactccgtcaccctctcctgcaccgcctccggccgcaccttctcctcctacgccctcgcctggttccgccagcgccccggcaaggagcgcgagttcgtcgccggcctccgctggggcggccccaccaactacgccgactccgtcaaggaccgcttcaccatctccggcgactccgccaagcacaccatgtacctccagatgaactccctcaagcccgaggacaccgccgtctactactgcggctacaaccccggcggctgggccgtcccctcccagtacgagtacgactcctggggccagggcacccaggtcaccgtctcctccggtaccggcggaggcggatctggcggcggaggtagcggtggcggaggatctgaattcgacatccagatgacacagagccctagcagcctgtctgccagcgtgggagacagagtgaccatcacatgcaaggccagcgaccacatcaacaactggctggcctggtatcagcagaagcctggacaggcccctaagctgctgatctacggcgctaccacactggaaacaggcgtgcccagcagattttctggcagcggctctggcaccgactacaccctgacaatatccagcctccagcctgaggacttcgccacctactactgtcagcagagctggaacaccccttggacattcggccagggcaccaagctggaaatcaagagaggcggaggcggaagtggaggcggaggatctggcggcggaggctctcaagttcagcttcaacagcctggcgctgagctggtcaaacctggcgcttctgtgaagatgagctgcaaagccagcggctacgccttcagcagctactggatcaactggatgaagcagaaacccggccagggactcgaatggatcggccaaatctatcccggcgacggcgacaccaactacaacggcaagttcaagggcagagccacactgaccgccgatacctctagcagcacagcctacatgcagctgagcagcctgaccagcgaagatagcgccgtgtacttctgtgcccggtccatcacaacagtcgtgggctgcgctatggactattggggccagggaacaagcgtgaccgtgtctagtacgcgtgggagcggcatccagaaccctgatcctgccgtgtaccagctgcgggatagcaagagcagcgacaagagcgtgtgtctgttcaccgacttcgacagccagaccaacgtgtcccagagcaaggactccgacgtgtacatcaccgataagaccgtgctggacatgcggagcatggacttcaagagcaactccgccgtggcctggtccaacaagtccgatttcgcctgcgccaacgccttcaacaacagcattatccccgaggacacattcttcccaagccccgagagcagctgcgacgtgaagctggtggaaaagagcttcgagacagacaccaacctgaacttccagaacctgagcgtgatcggcttcagaatcctgctgctgaaagtggccggctttaacctgctgatgaccctgcggctgtggtccagccgcgccaagagaagcggatctggcgtgaagcagaccctgaatttcgacctgctgaagctggctggcgacgtggaatccaacccaggcccttctagaggccatatgaccgagtacaagcccacggtgcgcctcgccacccgcgacgacgtccccagggccgtacgcaccctcgccgccgcgttcgccgactaccccgccacgcgccacaccgtcgatccggaccgccacatcgagcgggtcaccgagctgcaagaactcttcctcacgcgcgtcgggctcgacatcggcaaggtgtgggtcgcggacgacggcgccgcggtggcggtctggaccacgccggagagcgtcgaagcgggggcggtgttcgccgagatcggcccgcgcatggccgagttgagcggttcccggctggccgcgcagcaacagatggaaggcctcctggcgccgcaccggcccaaggagcccgcgtggttcctggccaccgtcggcgtctcgcccgaccaccagggcaagggtctgggcagcgccgtcgtgctccccggagtggaggcggccgagcgcgccggggtgcccgccttcctggagacctccgcgccccgcaacctccccttctacgagcggctcggcttcaccgtcaccgccgacgtcgaggtgcccgaaggaccgcgcacctggtgcatgacccgcaagcccggtgcctga

SEQ ID NO: 4278 - DNA, 2460 bp, Artificial Sequence
  Synthetic Polynucloetide
atggccttaccagtgaccgccttgctcctgccgctggccttgctgctccacgccgccaggccggcatgccaggtccagctcgtcgagtccggcggcggcctcgtccaggccggcgactccgtcaccctctcctgcaccgcctccggccgcaccttctcctcctacgccctcgcctggttccgccagcgccccggcaaggagcgcgagttcgtcgccggcctccgctggggcggccccaccaactacgccgactccgtcaaggaccgcttcaccatctccggcgactccgccaagcacaccatgtacctccagatgaactccctcaagcccgaggacaccgccgtctactactgcggctacaaccccggcggctgggccgtcccctcccagtacgagtacgactcctggggccagggcacccaggtcaccgtctcctccggtaccggcggaggcggatctggcggcggaggtagcggtggcggaggatctgaattcgacatccagatgacacagagccctagcagcctgtctgccagcgtgggagacagagtgaccatcacatgcaaggccagcgaccacatcaacaactggctggcctggtatcagcagaagcctggacaggcccctaagctgctgatctacggcgctaccacactggaaacaggcgtgcccagcagattttctggcagcggctctggcaccgactacaccctgacaatatccagcctccagcctgaggacttcgccacctactactgtcagcagagctggaacaccccttggacattcggccagggcaccaagctggaaatcaagagaggcggaggcggaagtggaggcggaggatctggcggcggaggctctcaagttcagcttcaacagcctggcgctgagctggtcaaacctggcgcttctgtgaagatgagctgcaaagccagcggctacgccttcagcagctactggatcaactggatgaagcagaaacccggccagggactcgaatggatcggccaaatctatcccggcgacggcgacaccaactacaacggcaagttcaagggcagagccacactgaccgccgatacctctagcagcacagcctacatgcagctgagcagcctgaccagcgaagatagcgccgtgtacttctgtgcccggtccatcacaacagtcgtgggctgcgctatggactattggggccagggaacaagcgtgaccgtgtctagtctcgaggacctgaagaacgtgttcccacctgaggtggccgtgttcgagcctagcgaggccgagatcagccacacccagaaagccaccctcgtgtgcctggctaccggcttctaccccgaccatgtggaactgtcttggtgggtcaacggcaaagaggtgcacagcggcgtgtctaccgacccccagccactgaaagaacagcccgccctgaacgacagccggtactgcctgagcagcagactgagagtgtccgccaccttctggcagaacccccggaaccacttcagatgccaggtgcagttctacggcctgagcgagaacgacgagtggacccaggacagagccaagcccgtgacccagatcgtgtctgccgaagcctggggcagagccgattgcggctttaccagcgagagctaccagcagggcgtgctgagcgccaccatcctgtacgagatcctgctgggcaaggccaccctgtacgccgtgctggtgtctgccctggtgctgatggctatggtcaagcggaaggacagccggggaagggccaagcgatctggatctggagcaacaaacttctcactactcaaacaagcaggtgacgtggaggagaatcccgggcctactagaggccatatgaccgagtacaagcccacggtgcgcctcgccacccgcgacgacgtccccagggccgtacgcaccctcgccgccgcgttcgccgactaccccgccacgcgccacaccgtcgatccggaccgccacatcgagcgggtcaccgagctgcaagaactcttcctcacgcgcgtcgggctcgacatcggcaaggtgtgggtcgcggacgacggcgccgcggtggcggtctggaccacgccggagagcgtcgaagcgggggcggtgttcgccgagatcggcccgcgcatggccgagttgagcggttcccggctggccgcgcagcaacagatggaaggcctcctggcgccgcaccggcccaaggagcccgcgtggttcctggccaccgtcggcgtctcgcccgaccaccagggcaagggtctgggcagcgccgtcgtgctccccggagtggaggcggccgagcgcgccggggtgcccgccttcctggagacctccgcgccccgcaacctccccttctacgagcggctcggcttcaccgtcaccgccgacgtcgaggtgcccgaaggaccgcgcacctggtgcatgacccgcaagcccggtgcctga

SEQ ID NO: 4279 - DNA, 2610 bp, Artificial Sequence
  Synthetic Polynucloetide
atggccttaccagtgaccgccttgctcctgccgctggccttgctgctccacgccgccaggccggcatgccaggtccagctcgtcgagtccggcggcggcctcgtccaggccggcgactccgtcaccctctcctgcaccgcctccggccgcaccttctcctcctacgccctcgcctggttccgccagcgccccggcaaggagcgcgagttcgtcgccggcctccgctggggcggccccaccaactacgccgactccgtcaaggaccgcttcaccatctccggcgactccgccaagcacaccatgtacctccagatgaactccctcaagcccgaggacaccgccgtctactactgcggctacaaccccggcggctgggccgtcccctcccagtacgagtacgactcctggggccagggcacccaggtcaccgtctcctccggtaccggcggaggcggatctggcggcggaggtagcggtggcggaggatctgaattcgacatccagatgacacagagccctagcagcctgtctgccagcgtgggagacagagtgaccatcacatgcaaggccagcgaccacatcaacaactggctggcctggtatcagcagaagcctggacaggcccctaagctgctgatctacggcgctaccacactggaaacaggcgtgcccagcagattttctggcagcggctctggcaccgactacaccctgacaatatccagcctccagcctgaggacttcgccacctactactgtcagcagagctggaacaccccttggacattcggccagggcaccaagctggaaatcaagagaggcggaggcggaagtggaggcggaggatctggcggcggaggctctcaagttcagcttcaacagcctggcgctgagctggtcaaacctggcgcttctgtgaagatgagctgcaaagccagcggctacgccttcagcagctactggatcaactggatgaagcagaaacccggccagggactcgaatggatcggccaaatctatcccggcgacggcgacaccaactacaacggcaagttcaagggcagagccacactgaccgccgatacctctagcagcacagcctacatgcagctgagcagcctgaccagcgaagatagcgccgtgtacttctgtgcccggtccatcacaacagtcgtgggctgcgctatggactattggggccagggaacaagcgtgaccgtgtctagtacgcgtgagcagaaactgatctcggaagaggatctggggagcggcaccccattcccttctctggcccctcccatcatgctgctggtggacggcaagcagcagatggtggtcgtgtgcctggtgctggatgtggccccacctggactggacagccccatctggtttagcgccggcaatggctctgccctggacgcctttacctacggcccaagccctgccaccgatggcacctggacaaatctggcccacctgagcctgcccagcgaggaactggcttcttgggagcctctcgtgtgccacacaggacctggcgctgagggacacagcagatccacccagcctatgcacctgtctggcgaggccagcaccgccagaacctgtcctcaggaacctctgagaggcacccctggcggagcactgtggctgggagtgctgagactgctgctgttcaagctgctgctgtttgacctgctgctgacctgctcctgtctgtgcgatcctgccggccctctgccttctcctgccaccaccacaagactgagagccctgggcagccacagactgcaccctgccacagagacaggcggcagagaggccacaagcagccctagaccccagcccagagacagaagatggggcgataccccccctggcagaaagcctggatctccagtccgcgccaagagaagcggatctggcgtgaagcagaccctgaatttcgacctgctgaagctggctggcgacgtggaatccaacccaggcccttctagatctagaggccatatgaccgagtacaagcccacggtgcgcctcgccacccgcgacgacgtccccagggccgtacgcaccctcgccgccgcgttcgccgactaccccgccacgcgccacaccgtcgatccggaccgccacatcgagcgggtcaccgagctgcaagaactcttcctcacgcgcgtcgggctcgacatcggcaaggtgtgggtcgcggacgacggcgccgcggtggcggtctggaccacgccggagagcgtcgaagcgggggcggtgttcgccgagatcggcccgcgcatggccgagttgagcggttcccggctggccgcgcagcaacagatggaaggcctcctggcgccgcaccggcccaaggagcccgcgtggttcctggccaccgtcggcgtctcgcccgaccaccagggcaagggtctgggcagcgccgtcgtgctccccggagtggaggcggccgagcgcgccggggtgcccgccttcctggagacctccgcgccccgcaacctccccttctacgagcggctcggcttcaccgtcaccgccgacgtcgaggtgcccgaaggaccgcgcacctggtgcatgacccgcaagcccggtgcctga

SEQ ID NO: 4280 - DNA, 2052 bp, Artificial Sequence
  Synthetic Polynucloetide
atggccttaccagtgaccgccttgctcctgccgctggccttgctgctccacgccgccaggccggcatgccaggtccagctcgtcgagtccggcggcggcctcgtccaggccggcgactccgtcaccctctcctgcaccgcctccggccgcaccttctcctcctacgccctcgcctggttccgccagcgccccggcaaggagcgcgagttcgtcgccggcctccgctggggcggccccaccaactacgccgactccgtcaaggaccgcttcaccatctccggcgactccgccaagcacaccatgtacctccagatgaactccctcaagcccgaggacaccgccgtctactactgcggctacaaccccggcggctgggccgtcccctcccagtacgagtacgactcctggggccagggcacccaggtcaccgtctcctccggtaccggcggaggcggatctggcggcggaggtagcggtggcggaggatctgaattcgacatccagatgacacagagccctagcagcctgtctgccagcgtgggagacagagtgaccatcacatgcaaggccagcgaccacatcaacaactggctggcctggtatcagcagaagcctggacaggcccctaagctgctgatctacggcgctaccacactggaaacaggcgtgcccagcagattttctggcagcggctctggcaccgactacaccctgacaatatccagcctccagcctgaggacttcgccacctactactgtcagcagagctggaacaccccttggacattcggccagggcaccaagctggaaatcaagagactcgaggacctgaagaacgtgttcccacctgaggtggccgtgttcgagcctagcgaggccgagatcagccacacccagaaagccaccctcgtgtgcctggctaccggcttctaccccgaccatgtggaactgtcttggtgggtcaacggcaaagaggtgcacagcggcgtgtctaccgacccccagccactgaaagaacagcccgccctgaacgacagccggtactgcctgagcagcagactgagagtgtccgccaccttctggcagaacccccggaaccacttcagatgccaggtgcagttctacggcctgagcgagaacgacgagtggacccaggacagagccaagcccgtgacccagatcgtgtctgccgaagcctggggcagagccgattgcggctttaccagcgagagctaccagcagggcgtgctgagcgccaccatcctgtacgagatcctgctgggcaaggccaccctgtacgccgtgctggtgtctgccctggtgctgatggctatggtcaagcggaaggacagccggggaagggccaagcgatctggatctggagcaacaaacttctcactactcaaacaagcaggtgacgtggaggagaatcccgggcctactagaggccatatgaccgagtacaagcccacggtgcgcctcgccacccgcgacgacgtccccagggccgtacgcaccctcgccgccgcgttcgccgactaccccgccacgcgccacaccgtcgatccggaccgccacatcgagcgggtcaccgagctgcaagaactcttcctcacgcgcgtcgggctcgacatcggcaaggtgtgggtcgcggacgacggcgccgcggtggcggtctggaccacgccggagagcgtcgaagcgggggcggtgttcgccgagatcggcccgcgcatggccgagttgagcggttcccggctggccgcgcagcaacagatggaaggcctcctggcgccgcaccggcccaaggagcccgcgtggttcctggccaccgtcggcgtctcgcccgaccaccagggcaagggtctgggcagcgccgtcgtgctccccggagtggaggcggccgagcgcgccggggtgcccgccttcctggagacctccgcgccccgcaacctccccttctacgagcggctcggcttcaccgtcaccgccgacgtcgaggtgcccgaaggaccgcgcacctggtgcatgacccgcaagcccggtgcctga

SEQ ID NO: 4281 - DNA, 1359 bp, Artificial Sequence
  Synthetic Polynucloetide
atggccttaccagtgaccgccttgctcctgccgctggccttgctgctccacgccgccaggccggcatgccaggtccagctcgtcgagtccggcggcggcctcgtccaggccggcgactccgtcaccctctcctgcaccgcctccggccgcaccttctcctcctacgccctcgcctggttccgccagcgccccggcaaggagcgcgagttcgtcgccggcctccgctggggcggccccaccaactacgccgactccgtcaaggaccgcttcaccatctccggcgactccgccaagcacaccatgtacctccagatgaactccctcaagcccgaggacaccgccgtctactactgcggctacaaccccggcggctgggccgtcccctcccagtacgagtacgactcctggggccagggcacccaggtcaccgtctcctccggtaccggcggaggcggatctggcggcggaggtagcggtggcggaggatctgaattcgacatccagatgacacagagccctagcagcctgtctgccagcgtgggagacagagtgaccatcacatgcaaggccagcgaccacatcaacaactggctggcctggtatcagcagaagcctggacaggcccctaagctgctgatctacggcgctaccacactggaaacaggcgtgcccagcagattttctggcagcggctctggcaccgactacaccctgacaatatccagcctccagcctgaggacttcgccacctactactgtcagcagagctggaacaccccttggacattcggccagggcaccaagctggaaatcaagagactcgaggacctgaagaacgtgttcccacctgaggtggccgtgttcgagcctagcgaggccgagatcagccacacccagaaagccaccctcgtgtgcctggctaccggcttctaccccgaccatgtggaactgtcttggtgggtcaacggcaaagaggtgcacagcggcgtgtctaccgacccccagccactgaaagaacagcccgccctgaacgacagccggtactgcctgagcagcagactgagagtgtccgccaccttctggcagaacccccggaaccacttcagatgccaggtgcagttctacggcctgagcgagaacgacgagtggacccaggacagagccaagcccgtgacccagatcgtgtctgccgaagcctggggcagagccgattgcggctttaccagcgagagctaccagcagggcgtgctgagcgccaccatcctgtacgagatcctgctgggcaaggccaccctgtacgccgtgctggtgtctgccctggtgctgatggctatggtcaagcggaaggacagccgggga

SEQ ID NO: 4282 - DNA, 1353 bp, Artificial Sequence; identical to SEQ ID NO: 4155
  Synthetic Polynucloetide

SEQ ID NO: 4283 - DNA, 852 bp, Artificial Sequence; identical to SEQ ID NO: 4156
  Synthetic Polynucloetide

SEQ ID NO: 4284 - DNA, 2106 bp, Artificial Sequence
  Synthetic Polynucloetide
atggccttaccagtgaccgccttgctcctgccgctggccttgctgctccacgccgccaggccggcatgccaggtccagctcgtcgagtccggcggcggcctcgtccaggccggcgactccgtcaccctctcctgcaccgcctccggccgcaccttctcctcctacgccctcgcctggttccgccagcgccccggcaaggagcgcgagttcgtcgccggcctccgctggggcggccccaccaactacgccgactccgtcaaggaccgcttcaccatctccggcgactccgccaagcacaccatgtacctccagatgaactccctcaagcccgaggacaccgccgtctactactgcggctacaaccccggcggctgggccgtcccctcccagtacgagtacgactcctggggccagggcacccaggtcaccgtctcctccggtaccggcggaggcggatctggcggcggaggtagcggtggcggaggatctgaattcgacatccagatgacacagagccctagcagcctgtctgccagcgtgggagacagagtgaccatcacatgcaaggccagcgaccacatcaacaactggctggcctggtatcagcagaagcctggacaggcccctaagctgctgatctacggcgctaccacactggaaacaggcgtgcccagcagattttctggcagcggctctggcaccgactacaccctgacaatatccagcctccagcctgaggacttcgccacctactactgtcagcagagctggaacaccccttggacattcggccagggcaccaagctggaaatcaagagactcgaggggaaaccaattcccaaccctcttctgggactggattcaaccggcagcggcgaggacctgaagaacgtgttcccacctgaggtggccgtgttcgagcctagcgaggccgagatcagccacacccagaaagccaccctcgtgtgcctggctaccggcttctaccccgaccatgtggaactgtcttggtgggtcaacggcaaagaggtgcacagcggcgtgtgtaccgacccccagccactgaaagaacagcccgccctgaacgacagccggtactgcctgagcagcagactgagagtgtccgccaccttctggcagaacccccggaaccacttcagatgccaggtgcagttctacggcctgagcgagaacgacgagtggacccaggacagagccaagcccgtgacccagatcgtgtctgccgaagcctggggcagagccgattgcggctttaccagcgagagctaccagcagggcgtgctgagcgccaccatcctgtacgagatcctgctgggcaaggccaccctgtacgccgtgctggtgtctgccctggtgctgatggctatggtcaagcggaaggacagccggggaagggccaagcgatctggatctggagcaacaaacttctcactactcaaacaagcaggtgacgtggaggagaatcccgggcctactagaggccatatgaccgagtacaagcccacggtgcgcctcgccacccgcgacgacgtccccagggccgtacgcaccctcgccgccgcgttcgccgactaccccgccacgcgccacaccgtcgatccggaccgccacatcgagcgggtcaccgagctgcaagaactcttcctcacgcgcgtcgggctcgacatcggcaaggtgtgggtcgcggacgacggcgccgcggtggcggtctggaccacgccggagagcgtcgaagcgggggcggtgttcgccgagatcggcccgcgcatggccgagttgagcggttcccggctggccgcgcagcaacagatggaaggcctcctggcgccgcaccggcccaaggagcccgcgtggttcctggccaccgtcggcgtctcgcccgaccaccagggcaagggtctgggcagcgccgtcgtgctccccggagtggaggcggccgagcgcgccggggtgcccgccttcctggagacctccgcgccccgcaacctccccttctacgagcggctcggcttcaccgtcaccgccgacgtcgaggtgcccgaaggaccgcgcacctggtgcatgacccgcaagcccggtgcctga

SEQ ID NO: 4285 - DNA, 1416 bp, Artificial Sequence
  Synthetic Polynucloetide
atggccttaccagtgaccgccttgctcctgccgctggccttgctgctccacgccgccaggccggcatgccaggtccagctcgtcgagtccggcggcggcctcgtccaggccggcgactccgtcaccctctcctgcaccgcctccggccgcaccttctcctcctacgccctcgcctggttccgccagcgccccggcaaggagcgcgagttcgtcgccggcctccgctggggcggccccaccaactacgccgactccgtcaaggaccgcttcaccatctccggcgactccgccaagcacaccatgtacctccagatgaactccctcaagcccgaggacaccgccgtctactactgcggctacaaccccggcggctgggccgtcccctcccagtacgagtacgactcctggggccagggcacccaggtcaccgtctcctccggtaccggcggaggcggatctggcggcggaggtagcggtggcggaggatctgaattcgacatccagatgacacagagccctagcagcctgtctgccagcgtgggagacagagtgaccatcacatgcaaggccagcgaccacatcaacaactggctggcctggtatcagcagaagcctggacaggcccctaagctgctgatctacggcgctaccacactggaaacaggcgtgcccagcagattttctggcagcggctctggcaccgactacaccctgacaatatccagcctccagcctgaggacttcgccacctactactgtcagcagagctggaacaccccttggacattcggccagggcaccaagctggaaatcaagagactcgaggggaaaccaattcccaaccctcttctgggactggattcaaccggcagcggcgaggacctgaagaacgtgttcccacctgaggtggccgtgttcgagcctagcgaggccgagatcagccacacccagaaagccaccctcgtgtgcctggctaccggcttctaccccgaccatgtggaactgtcttggtgggtcaacggcaaagaggtgcacagcggcgtgtgtaccgacccccagccactgaaagaacagcccgccctgaacgacagccggtactgcctgagcagcagactgagagtgtccgccaccttctggcagaacccccggaaccacttcagatgccaggtgcagttctacggcctgagcgagaacgacgagtggacccaggacagagccaagcccgtgacccagatcgtgtctgccgaagcctggggcagagccgattgcggctttaccagcgagagctaccagcagggcgtgctgagcgccaccatcctgtacgagatcctgctgggcaaggccaccctgtacgccgtgctggtgtctgccctggtgctgatggctatggtcaagcggaaggacagccggggatga

SEQ ID NO: 4286 - DNA, 1389 bp, Artificial Sequence; identical to SEQ ID NO: 4159
  Synthetic Polynucloetide

SEQ ID NO: 4287 - DNA, 891 bp, Artificial Sequence; identical to SEQ ID NO: 4160
  Synthetic Polynucloetide

SEQ ID NO: 4288 - DNA, 2364 bp, Artificial Sequence
  Synthetic Polynucloetide
atggccttaccagtgaccgccttgctcctgccgctggccttgctgctccacgccgccaggccggcatgccaggtccagctcgtcgagtccggcggcggcctcgtccaggccggcgactccgtcaccctctcctgcaccgcctccggccgcaccttctcctcctacgccctcgcctggttccgccagcgccccggcaaggagcgcgagttcgtcgccggcctccgctggggcggccccaccaactacgccgactccgtcaaggaccgcttcaccatctccggcgactccgccaagcacaccatgtacctccagatgaactccctcaagcccgaggacaccgccgtctactactgcggctacaaccccggcggctgggccgtcccctcccagtacgagtacgactcctggggccagggcacccaggtcaccgtctcctccggtaccggcggaggcggatctggcggcggaggtagcggtggcggaggatctgaattcgacatccagatgacacagagccctagcagcctgtctgccagcgtgggagacagagtgaccatcacatgcaaggccagcgaccacatcaacaactggctggcctggtatcagcagaagcctggacaggcccctaagctgctgatctacggcgctaccacactggaaacaggcgtgcccagcagattttctggcagcggctctggcaccgactacaccctgacaatatccagcctccagcctgaggacttcgccacctactactgtcagcagagctggaacaccccttggacattcggccagggcaccaagctggaaatcaagagaggcggaggcggaagtggaggcggaggatctggcggcggaggctctcaagttcagcttcaacagcctggcgctgagctggtcaaacctggcgcttctgtgaagatgagctgcaaagccagcggctacgccttcagcagctactggatcaactggatgaagcagaaacccggccagggactcgaatggatcggccaaatctatcccggcgacggcgacaccaactacaacggcaagttcaagggcagagccacactgaccgccgatacctctagcagcacagcctacatgcagctgagcagcctgaccagcgaagatagcgccgtgtacttctgtgcccggtccatcacaacagtcgtgggctgcgctatggactattggggccagggaacaagcgtgaccgtgtctagtacgcgtgggagcggcatccagaaccctgatcctgccgtgtaccagctgcgggatagcaagagcagcgacaagagcgtgtgtctgttcaccgacttcgacagccagaccaacgtgtcccagagcaaggactccgacgtgtacatcaccgataagaccgtgctggacatgcggagcatggacttcaagagcaactccgccgtggcctggtccaacaagtccgatttcgcctgcgccaacgccttcaacaacagcattatccccgaggacacattcttcccaagcagcgacgtgccctgcgacgtgaagctggtggaaaagagcttcgagacagacaccaacctgaacttccagaacctgagcgtgatcggcttcagaatcctgctgctgaaagtggccggctttaacctgctgatgaccctgcggctgtggtccagccgcgccaagagaagcggatctggcgtgaagcagaccctgaatttcgacctgctgaagctggctggcgacgtggaatccaacccaggcccttctagaggccatatgaccgagtacaagcccacggtgcgcctcgccacccgcgacgacgtccccagggccgtacgcaccctcgccgccgcgttcgccgactaccccgccacgcgccacaccgtcgatccggaccgccacatcgagcgggtcaccgagctgcaagaactcttcctcacgcgcgtcgggctcgacatcggcaaggtgtgggtcgcggacgacggcgccgcggtggcggtctggaccacgccggagagcgtcgaagcgggggcggtgttcgccgagatcggcccgcgcatggccgagttgagcggttcccggctggccgcgcagcaacagatggaaggcctcctggcgccgcaccggcccaaggagcccgcgtggttcctggccaccgtcggcgtctcgcccgaccaccagggcaagggtctgggcagcgccgtcgtgctccccggagtggaggcggccgagcgcgccggggtgcccgccttcctggagacctccgcgccccgcaacctccccttctacgagcggctcggcttcaccgtcaccgccgacgtcgaggtgcccgaaggaccgcgcacctggtgcatgacccgcaagcccggtgcctga

SEQ ID NO: 4289 - DNA, 2460 bp, Artificial Sequence
  Synthetic Polynucloetide
atggccttaccagtgaccgccttgctcctgccgctggccttgctgctccacgccgccaggccggcatgccaggtccagctcgtcgagtccggcggcggcctcgtccaggccggcgactccgtcaccctctcctgcaccgcctccggccgcaccttctcctcctacgccctcgcctggttccgccagcgccccggcaaggagcgcgagttcgtcgccggcctccgctggggcggccccaccaactacgccgactccgtcaaggaccgcttcaccatctccggcgactccgccaagcacaccatgtacctccagatgaactccctcaagcccgaggacaccgccgtctactactgcggctacaaccccggcggctgggccgtcccctcccagtacgagtacgactcctggggccagggcacccaggtcaccgtctcctccggtaccggcggaggcggatctggcggcggaggtagcggtggcggaggatctgaattcgacatccagatgacacagagccctagcagcctgtctgccagcgtgggagacagagtgaccatcacatgcaaggccagcgaccacatcaacaactggctggcctggtatcagcagaagcctggacaggcccctaagctgctgatctacggcgctaccacactggaaacaggcgtgcccagcagattttctggcagcggctctggcaccgactacaccctgacaatatccagcctccagcctgaggacttcgccacctactactgtcagcagagctggaacaccccttggacattcggccagggcaccaagctggaaatcaagagaggcggaggcggaagtggaggcggaggatctggcggcggaggctctcaagttcagcttcaacagcctggcgctgagctggtcaaacctggcgcttctgtgaagatgagctgcaaagccagcggctacgccttcagcagctactggatcaactggatgaagcagaaacccggccagggactcgaatggatcggccaaatctatcccggcgacggcgacaccaactacaacggcaagttcaagggcagagccacactgaccgccgatacctctagcagcacagcctacatgcagctgagcagcctgaccagcgaagatagcgccgtgtacttctgtgcccggtccatcacaacagtcgtgggctgcgctatggactattggggccagggaacaagcgtgaccgtgtctagtctcgaggacctgaagaacgtgttcccacctgaggtggccgtgttcgagcctagcaaggccgagatcgcccacacccagaaagccaccctcgtgtgcctggctaccggcttctaccccgaccatgtggaactgtcttggtgggtcaacggcaaagaggtgcacagcggcgtgtctaccgacccccagccactgaaagaacagcccgccctgaacgacagccggtactgcctgagcagcagactgagagtgtccgccaccttctggcagaacccccggaaccacttcagatgccaggtgcagttctacggcctgagcgagaacgacgagtggacccaggacagagccaagcccgtgacccagatcgtgtctgccgaagcctggggcagagccgattgcggcatcaccagcgccagctaccaccagggcgtgctgagcgccaccatcctgtacgagatcctgctgggcaaggccaccctgtacgccgtgctggtgtctgccctggtgctgatggctatggtcaagcggaaggacagccggggaagggccaagcgatctggatctggagcaacaaacttctcactactcaaacaagcaggtgacgtggaggagaatcccgggcctactagaggccatatgaccgagtacaagcccacggtgcgcctcgccacccgcgacgacgtccccagggccgtacgcaccctcgccgccgcgttcgccgactaccccgccacgcgccacaccgtcgatccggaccgccacatcgagcgggtcaccgagctgcaagaactcttcctcacgcgcgtcgggctcgacatcggcaaggtgtgggtcgcggacgacggcgccgcggtggcggtctggaccacgccggagagcgtcgaagcgggggcggtgttcgccgagatcggcccgcgcatggccgagttgagcggttcccggctggccgcgcagcaacagatggaaggcctcctggcgccgcaccggcccaaggagcccgcgtggttcctggccaccgtcggcgtctcgcccgaccaccagggcaagggtctgggcagcgccgtcgtgctccccggagtggaggcggccgagcgcgccggggtgcccgccttcctggagacctccgcgccccgcaacctccccttctacgagcggctcggcttcaccgtcaccgccgacgtcgaggtgcccgaaggaccgcgcacctggtgcatgacccgcaagcccggtgcctga

SEQ ID NO: 4290 - DNA, 3918 bp, Artificial Sequence
  Synthetic Polynucloetide
atggccttaccagtgaccgccttgctcctgccgctggccttgctgctccacgccgccaggccggcatgccaggtccagctcgtcgagtccggcggcggcctcgtccaggccggcgactccgtcaccctctcctgcaccgcctccggccgcaccttctcctcctacgccctcgcctggttccgccagcgccccggcaaggagcgcgagttcgtcgccggcctccgctggggcggccccaccaactacgccgactccgtcaaggaccgcttcaccatctccggcgactccgccaagcacaccatgtacctccagatgaactccctcaagcccgaggacaccgccgtctactactgcggctacaaccccggcggctgggccgtcccctcccagtacgagtacgactcctggggccagggcacccaggtcaccgtctcctccggtaccggcggaggcggatctggcggcggaggtagcggtggcggaggatctgaattcgacatccagatgacacagagccctagcagcctgtctgccagcgtgggagacagagtgaccatcacatgcaaggccagcgaccacatcaacaactggctggcctggtatcagcagaagcctggacaggcccctaagctgctgatctacggcgctaccacactggaaacaggcgtgcccagcagattttctggcagcggctctggcaccgactacaccctgacaatatccagcctccagcctgaggacttcgccacctactactgtcagcagagctggaacaccccttggacattcggccagggcaccaagctggaaatcaagagactcgagatccagaaccctgatcctgccgtgtaccagctgcgggatagcaagagcagcgacaagagcgtgtgtctgttcaccgacttcgacagccagaccaacgtgtcccagagcaaggactccgacgtgtacatcaccgataagtgcgtgctggacatgcggagcatggacttcaagagcaactccgccgtggcctggtccaacaagtccgatttcgcctgcgccaacgccttcaacaacagcattatccccgaggacacattcttcccaagcagcgacgtgccctgcgacgtgaagctggtggaaaagagcttcgagacagacaccaacctgaacttccagaacctgagcgtgatcggcttcagaatcctgctgctgaaagtggccggctttaacctgctgatgaccctgcggctgtggtccagccgcgccaagagaagcggatctggcgtgaagcagaccctgaatttcgacctgctgaagctggctggcgacgtggaatccaacccaggccctactagtatggactggatttggcgcatccttttccttgtcggcgctgctaccggcgcccattccgggcccctgttcaatcaagaggtgcagatccctctgaccgagagctactgtggcccctgtcctaagaactggatctgctacaagaacaactgctaccagttcttcgacgagagcaagaattggtacgagagccaggccagctgcatgagccagaatgccagcctgctgaaggtgtacagcaaagaggaccaggacctgctgaaactggtcaagagctaccactggatgggccttgtgcacatccccaccaatggctcttggcagtgggaggacggcagcattctgagccctaacctgctgaccatcatcgagatgcagaagggcgactgcgccctgtacgccagcagctttaagggctacatcgagaattgcagcaccccgaacacctacatctgtatgcagagaaccgttggcggaggcggaagtggaggcggaggatctggcggcggaggctctgacctctttaatcaagaagtccagattccactcaccgaatcctactgcggaccttgtccaaaaaattggatttgttataagaacaactgttatcaattctttgatgagtctaaaaattggtatgagtcccaggcttcctgcatgtctcagaacgcttctctgctgaaagtctactctaaagaagatcaggatctcctgaagctcgtcaagtcttatcattggatggggctcgtccacattcctaccaacggaagctggcaatgggaagatggctccatcctgtctccaaatctgctcacgattattgaaatgcagaaaggggattgtgctctctacgccagctccttcaagggatatattgagaactgtagcacgcccaatacttatatctgtatgcaacggaccgtgggatccggcggcggaggatctggcggaggcggatctgggggcggaggctctttcgaacaagttcagcttcaacagcctggcgctgagctggtcaaacctggcgcttctgtgaagatgagctgcaaagccagcggctacgccttcagcagctactggatcaactggatgaagcagaaacccggccagggactcgaatggatcggccaaatctatcccggcgacggcgacaccaactacaacggcaagttcaagggcagagccacactgaccgccgatacctctagcagcacagcctacatgcagctgagcagcctgaccagcgaagatagcgccgtgtacttctgtgcccggtccatcacaacagtcgtgggctgcgctatggactattggggccagggaacaagcgtgaccgtgtctagtacgcgtgaggacctgaagaacgtgttcccacctgaggtggccgtgttcgagcctagcaaggccgagatcgcccacacccagaaagccaccctcgtgtgcctggctaccggcttctaccccgaccatgtggaactgtcttggtgggtcaacggcaaagaggtgcacagcggcgtgtgtaccgacccccagccactgaaagaacagcccgccctgaacgacagccggtactgcctgagcagcagactgagagtgtccgccaccttctggcagaacccccggaaccacttcagatgccaggtgcagttctacggcctgagcgagaacgacgagtggacccaggacagagccaagcccgtgacccagatcgtgtctgccgaagcctggggcagagccgattgcggcatcaccagcgccagctaccaccagggcgtgctgagcgccaccatcctgtacgagatcctgctgggcaaggccaccctgtacgccgtgctggtgtctgccctggtgctgatggctatggtcaagcggaaggacagccggggaagggccaagcgatctggatctggagcaacaaacttctcactactcaaacaagcaggtgacgtggaggagaatcccgggccttctagaggccatatgaccgagtacaagcccacggtgcgcctcgccacccgcgacgacgtccccagggccgtacgcaccctcgccgccgcgttcgccgactaccccgccacgcgccacaccgtcgatccggaccgccacatcgagcgggtcaccgagctgcaagaactcttcctcacgcgcgtcgggctcgacatcggcaaggtgtgggtcgcggacgacggcgccgcggtggcggtctggaccacgccggagagcgtcgaagcgggggcggtgttcgccgagatcggcccgcgcatggccgagttgagcggttcccggctggccgcgcagcaacagatggaaggcctcctggcgccgcaccggcccaaggagcccgcgtggttcctggccaccgtcggcgtctcgcccgaccaccagggcaagggtctgggcagcgccgtcgtgctccccggagtggaggcggccgagcgcgccggggtgcccgccttcctggagacctccgcgccccgcaacctccccttctacgagcggctcggcttcaccgtcaccgccgacgtcgaggtgcccgaaggaccgcgcacctggtgcatgacccgcaagcccggtgcctga

SEQ ID NO: 4291 - DNA, 3915 bp, Artificial Sequence
  Synthetic Polynucloetide
atggccttaccagtgaccgccttgctcctgccgctggccttgctgctccacgccgccaggccggcatgccaggtccagctcgtcgagtccggcggcggcctcgtccaggccggcgactccgtcaccctctcctgcaccgcctccggccgcaccttctcctcctacgccctcgcctggttccgccagcgccccggcaaggagcgcgagttcgtcgccggcctccgctggggcggccccaccaactacgccgactccgtcaaggaccgcttcaccatctccggcgactccgccaagcacaccatgtacctccagatgaactccctcaagcccgaggacaccgccgtctactactgcggctacaaccccggcggctgggccgtcccctcccagtacgagtacgactcctggggccagggcacccaggtcaccgtctcctccggtaccggcggaggcggatctggcggcggaggtagcggtggcggaggatctgaattcgacatccagatgacacagagccctagcagcctgtctgccagcgtgggagacagagtgaccatcacatgcaaggccagcgaccacatcaacaactggctggcctggtatcagcagaagcctggacaggcccctaagctgctgatctacggcgctaccacactggaaacaggcgtgcccagcagattttctggcagcggctctggcaccgactacaccctgacaatatccagcctccagcctgaggacttcgccacctactactgtcagcagagctggaacaccccttggacattcggccagggcaccaagctggaaatcaagagactcgaggacctgaagaacgtgttcccacctgaggtggccgtgttcgagcctagcaaggccgagatcgcccacacccagaaagccaccctcgtgtgcctggctaccggcttctaccccgaccatgtggaactgtcttggtgggtcaacggcaaagaggtgcacagcggcgtgtgtaccgacccccagccactgaaagaacagcccgccctgaacgacagccggtactgcctgagcagcagactgagagtgtccgccaccttctggcagaacccccggaaccacttcagatgccaggtgcagttctacggcctgagcgagaacgacgagtggacccaggacagagccaagcccgtgacccagatcgtgtctgccgaagcctggggcagagccgattgcggcatcaccagcgccagctaccaccagggcgtgctgagcgccaccatcctgtacgagatcctgctgggcaaggccaccctgtacgccgtgctggtgtctgccctggtgctgatggctatggtcaagcggaaggacagccggggaagggccaagcgatctggatctggagcaacaaacttctcactactcaaacaagcaggtgacgtggaggagaatcccgggcctactagtatggactggatttggcgcatccttttccttgtcggcgctgctaccggcgcccattccgggcccctgttcaatcaagaggtgcagatccctctgaccgagagctactgtggcccctgtcctaagaactggatctgctacaagaacaactgctaccagttcttcgacgagagcaagaattggtacgagagccaggccagctgcatgagccagaatgccagcctgctgaaggtgtacagcaaagaggaccaggacctgctgaaactggtcaagagctaccactggatgggccttgtgcacatccccaccaatggctcttggcagtgggaggacggcagcattctgagccctaacctgctgaccatcatcgagatgcagaagggcgactgcgccctgtacgccagcagctttaagggctacatcgagaattgcagcaccccgaacacctacatctgtatgcagagaaccgttggcggaggcggaagtggaggcggaggatctggcggcggaggctctgacctctttaatcaagaagtccagattccactcaccgaatcctactgcggaccttgtccaaaaaattggatttgttataagaacaactgttatcaattctttgatgagtctaaaaattggtatgagtcccaggcttcctgcatgtctcagaacgcttctctgctgaaagtctactctaaagaagatcaggatctcctgaagctcgtcaagtcttatcattggatggggctcgtccacattcctaccaacggaagctggcaatgggaagatggctccatcctgtctccaaatctgctcacgattattgaaatgcagaaaggggattgtgctctctacgccagctccttcaagggatatattgagaactgtagcacgcccaatacttatatctgtatgcaacggaccgtgggatccggcggcggaggatctggcggaggcggatctgggggcggaggctctttcgaacaagttcagcttcaacagcctggcgctgagctggtcaaacctggcgcttctgtgaagatgagctgcaaagccagcggctacgccttcagcagctactggatcaactggatgaagcagaaacccggccagggactcgaatggatcggccaaatctatcccggcgacggcgacaccaactacaacggcaagttcaagggcagagccacactgaccgccgatacctctagcagcacagcctacatgcagctgagcagcctgaccagcgaagatagcgccgtgtacttctgtgcccggtccatcacaacagtcgtgggctgcgctatggactattggggccagggaacaagcgtgaccgtgtctagtacgcgtatccagaaccctgatcctgccgtgtaccagctgcgggatagcaagagcagcgacaagagcgtgtgtctgttcaccgacttcgacagccagaccaacgtgtcccagagcaaggactccgacgtgtacatcaccgataagtgcgtgctggacatgcggagcatggacttcaagagcaactccgccgtggcctggtccaacaagtccgatttcgcctgcgccaacgccttcaacaacagcattatccccgaggacacattcttcccaagcagcgacgtgccctgcgacgtgaagctggtggaaaagagcttcgagacagacaccaacctgaacttccagaacctgagcgtgatcggcttcagaatcctgctgctgaaagtggccggctttaacctgctgatgaccctgcggctgtggtccagccgcgccaagagaagcggatctggcgtgaagcagaccctgaatttcgacctgctgaagctggctggcgacgtggaatccaacccaggcccttctagaggccatatgaccgagtacaagcccacggtgcgcctcgccacccgcgacgacgtccccagggccgtacgcaccctcgccgccgcgttcgccgactaccccgccacgcgccacaccgtcgatccggaccgccacatcgagcgggtcaccgagctgcaagaactcttcctcacgcgcgtcgggctcgacatcggcaaggtgtgggtcgcggacgacggcgccgcggtggcggtctggaccacgccggagagcgtcgaagcgggggcggtgttcgccgagatcggcccgcgcatggccgagttgagcggttcccggctggccgcgcagcaacagatggaaggcctcctggcgccgcaccggcccaaggagcccgcgtggttcctggccaccgtcggcgtctcgcccgaccaccagggcaagggtctgggcagcgccgtcgtgctccccggagtggaggcggccgagcgcgccggggtgcccgccttcctggagacctccgcgccccgcaacctccccttctacgagcggctcggcttcaccgtcaccgccgacgtcgaggtgcccgaaggaccgcgcacctggtgcatgacccgcaagcccggtgcctga

SEQ ID NO: 4292 - DNA, 3909 bp, Artificial Sequence
  Synthetic Polynucloetide
atggccttaccagtgaccgccttgctcctgccgctggccttgctgctccacgccgccaggccggcatgccaggtccagctcgtcgagtccggcggcggcctcgtccaggccggcgactccgtcaccctctcctgcaccgcctccggccgcaccttctcctcctacgccctcgcctggttccgccagcgccccggcaaggagcgcgagttcgtcgccggcctccgctggggcggccccaccaactacgccgactccgtcaaggaccgcttcaccatctccggcgactccgccaagcacaccatgtacctccagatgaactccctcaagcccgaggacaccgccgtctactactgcggctacaaccccggcggctgggccgtcccctcccagtacgagtacgactcctggggccagggcacccaggtcaccgtctcctccggtaccggcggaggcggatctggcggcggaggtagcggtggcggaggatctgaattcgacatccagatgacacagagccctagcagcctgtctgccagcgtgggagacagagtgaccatcacatgcaaggccagcgaccacatcaacaactggctggcctggtatcagcagaagcctggacaggcccctaagctgctgatctacggcgctaccacactggaaacaggcgtgcccagcagattttctggcagcggctctggcaccgactacaccctgacaatatccagcctccagcctgaggacttcgccacctactactgtcagcagagctggaacaccccttggacattcggccagggcaccaagctggaaatcaagagactcgaggacctgaagaacgtgttcccacctgaggtggccgtgttcgagcctagcgaggccgagatcagccacacccagaaagccaccctcgtgtgcctggctaccggcttctaccccgaccatgtggaactgtcttggtgggtcaacggcaaagaggtgcacagcggcgtgtgtaccgacccccagccactgaaagaacagcccgccctgaacgacagccggtactgcctgagcagcagactgagagtgtccgccaccttctggcagaacccccggaaccacttcagatgccaggtgcagttctacggcctgagcgagaacgacgagtggacccaggacagagccaagcccgtgacccagatcgtgtctgccgaagcctggggcagagccgattgcggctttaccagcgagagctaccagcagggcgtgctgagcgccaccatcctgtacgagatcctgctgggcaaggccaccctgtacgccgtgctggtgtctgccctggtgctgatggctatggtcaagcggaaggacagccggggaagggccaagcgatctggatctggagcaacaaacttctcactactcaaacaagcaggtgacgtggaggagaatcccgggcctactagtatggactggatttggcgcatccttttccttgtcggcgctgctaccggcgcccattccctgttcaatcaagaggtgcagatccctctgaccgagagctactgtggcccctgtcctaagaactggatctgctacaagaacaactgctaccagttcttcgacgagagcaagaattggtacgagagccaggccagctgcatgagccagaatgccagcctgctgaaggtgtacagcaaagaggaccaggacctgctgaaactggtcaagagctaccactggatgggccttgtgcacatccccaccaatggctcttggcagtgggaggacggcagcattctgagccctaacctgctgaccatcatcgagatgcagaagggcgactgcgccctgtacgccagcagctttaagggctacatcgagaattgcagcaccccgaacacctacatctgtatgcagagaaccgttggcggaggcggaagtggaggcggaggatctggcggcggaggctctgacctctttaatcaagaagtccagattccactcaccgaatcctactgcggaccttgtccaaaaaattggatttgttataagaacaactgttatcaattctttgatgagtctaaaaattggtatgagtcccaggcttcctgcatgtctcagaacgcttctctgctgaaagtctactctaaagaagatcaggatctcctgaagctcgtcaagtcttatcattggatggggctcgtccacattcctaccaacggaagctggcaatgggaagatggctccatcctgtctccaaatctgctcacgattattgaaatgcagaaaggggattgtgctctctacgccagctccttcaagggatatattgagaactgtagcacgcccaatacttatatctgtatgcaacggaccgtgggatccggcggcggaggatctggcggaggcggatctgggggcggaggctctttcgaacaagttcagcttcaacagcctggcgctgagctggtcaaacctggcgcttctgtgaagatgagctgcaaagccagcggctacgccttcagcagctactggatcaactggatgaagcagaaacccggccagggactcgaatggatcggccaaatctatcccggcgacggcgacaccaactacaacggcaagttcaagggcagagccacactgaccgccgatacctctagcagcacagcctacatgcagctgagcagcctgaccagcgaagatagcgccgtgtacttctgtgcccggtccatcacaacagtcgtgggctgcgctatggactattggggccagggaacaagcgtgaccgtgtctagtacgcgtatccagaaccctgatcctgccgtgtaccagctgcgggatagcaagagcagcgacaagagcgtgtgtctgttcaccgacttcgacagccagaccaacgtgtcccagagcaaggactccgacgtgtacatcaccgataagtgcgtgctggacatgcggagcatggacttcaagagcaactccgccgtggcctggtccaacaagtccgatttcgcctgcgccaacgccttcaacaacagcattatccccgaggacacattcttcccaagccccgagagcagctgcgacgtgaagctggtggaaaagagcttcgagacagacaccaacctgaacttccagaacctgagcgtgatcggcttcagaatcctgctgctgaaagtggccggctttaacctgctgatgaccctgcggctgtggtccagccgcgccaagagaagcggatctggcgtgaagcagaccctgaatttcgacctgctgaagctggctggcgacgtggaatccaacccaggcccttctagaggccatatgaccgagtacaagcccacggtgcgcctcgccacccgcgacgacgtccccagggccgtacgcaccctcgccgccgcgttcgccgactaccccgccacgcgccacaccgtcgatccggaccgccacatcgagcgggtcaccgagctgcaagaactcttcctcacgcgcgtcgggctcgacatcggcaaggtgtgggtcgcggacgacggcgccgcggtggcggtctggaccacgccggagagcgtcgaagcgggggcggtgttcgccgagatcggcccgcgcatggccgagttgagcggttcccggctggccgcgcagcaacagatggaaggcctcctggcgccgcaccggcccaaggagcccgcgtggttcctggccaccgtcggcgtctcgcccgaccaccagggcaagggtctgggcagcgccgtcgtgctccccggagtggaggcggccgagcgcgccggggtgcccgccttcctggagacctccgcgccccgcaacctccccttctacgagcggctcggcttcaccgtcaccgccgacgtcgaggtgcccgaaggaccgcgcacctggtgcatgacccgcaagcccggtgcctga

SEQ ID NO: 4293 - DNA, 3213 bp, Artificial Sequence
  Synthetic Polynucloetide
atggccttaccagtgaccgccttgctcctgccgctggccttgctgctccacgccgccaggccggcatgccaggtccagctcgtcgagtccggcggcggcctcgtccaggccggcgactccgtcaccctctcctgcaccgcctccggccgcaccttctcctcctacgccctcgcctggttccgccagcgccccggcaaggagcgcgagttcgtcgccggcctccgctggggcggccccaccaactacgccgactccgtcaaggaccgcttcaccatctccggcgactccgccaagcacaccatgtacctccagatgaactccctcaagcccgaggacaccgccgtctactactgcggctacaaccccggcggctgggccgtcccctcccagtacgagtacgactcctggggccagggcacccaggtcaccgtctcctccggtaccggcggaggcggatctggcggcggaggtagcggtggcggaggatctgaattcgacatccagatgacacagagccctagcagcctgtctgccagcgtgggagacagagtgaccatcacatgcaaggccagcgaccacatcaacaactggctggcctggtatcagcagaagcctggacaggcccctaagctgctgatctacggcgctaccacactggaaacaggcgtgcccagcagattttctggcagcggctctggcaccgactacaccctgacaatatccagcctccagcctgaggacttcgccacctactactgtcagcagagctggaacaccccttggacattcggccagggcaccaagctggaaatcaagagactcgaggacctgaagaacgtgttcccacctgaggtggccgtgttcgagcctagcgaggccgagatcagccacacccagaaagccaccctcgtgtgcctggctaccggcttctaccccgaccatgtggaactgtcttggtgggtcaacggcaaagaggtgcacagcggcgtgtgtaccgacccccagccactgaaagaacagcccgccctgaacgacagccggtactgcctgagcagcagactgagagtgtccgccaccttctggcagaacccccggaaccacttcagatgccaggtgcagttctacggcctgagcgagaacgacgagtggacccaggacagagccaagcccgtgacccagatcgtgtctgccgaagcctggggcagagccgattgcggctttaccagcgagagctaccagcagggcgtgctgagcgccaccatcctgtacgagatcctgctgggcaaggccaccctgtacgccgtgctggtgtctgccctggtgctgatggctatggtcaagcggaaggacagccggggaagggccaagcgatctggatctggagcaacaaacttctcactactcaaacaagcaggtgacgtggaggagaatcccgggcctactagtatggactggatttggcgcatccttttccttgtcggcgctgctaccggcgcccattccgggcccctgttcaatcaagaggtgcagatccctctgaccgagagctactgtggcccctgtcctaagaactggatctgctacaagaacaactgctaccagttcttcgacgagagcaagaattggtacgagagccaggccagctgcatgagccagaatgccagcctgctgaaggtgtacagcaaagaggaccaggacctgctgaaactggtcaagagctaccactggatgggccttgtgcacatccccaccaatggctcttggcagtgggaggacggcagcattctgagccctaacctgctgaccatcatcgagatgcagaagggcgactgcgccctgtacgccagcagctttaagggctacatcgagaattgcagcaccccgaacacctacatctgtatgcagagaaccgttggcggaggcggaagtggaggcggaggatctggcggcggaggctctgacctctttaatcaagaagtccagattccactcaccgaatcctactgcggaccttgtccaaaaaattggatttgttataagaacaactgttatcaattctttgatgagtctaaaaattggtatgagtcccaggcttcctgcatgtctcagaacgcttctctgctgaaagtctactctaaagaagatcaggatctcctgaagctcgtcaagtcttatcattggatggggctcgtccacattcctaccaacggaagctggcaatgggaagatggctccatcctgtctccaaatctgctcacgattattgaaatgcagaaaggggattgtgctctctacgccagctccttcaagggatatattgagaactgtagcacgcccaatacttatatctgtatgcaacggaccgtgggatccggcggcggaggatctggcggaggcggatctgggggcggaggctctttcgaacaagttcagcttcaacagcctggcgctgagctggtcaaacctggcgcttctgtgaagatgagctgcaaagccagcggctacgccttcagcagctactggatcaactggatgaagcagaaacccggccagggactcgaatggatcggccaaatctatcccggcgacggcgacaccaactacaacggcaagttcaagggcagagccacactgaccgccgatacctctagcagcacagcctacatgcagctgagcagcctgaccagcgaagatagcgccgtgtacttctgtgcccggtccatcacaacagtcgtgggctgcgctatggactattggggccagggaacaagcgtgaccgtgtctagtacgcgtatccagaaccctgatcctgccgtgtaccagctgcgggatagcaagagcagcgacaagagcgtgtgtctgttcaccgacttcgacagccagaccaacgtgtcccagagcaaggactccgacgtgtacatcaccgataagtgcgtgctggacatgcggagcatggacttcaagagcaactccgccgtggcctggtccaacaagtccgatttcgcctgcgccaacgccttcaacaacagcattatccccgaggacacattcttcccaagccccgagagcagctgcgacgtgaagctggtggaaaagagcttcgagacagacaccaacctgaacttccagaacctgagcgtgatcggcttcagaatcctgctgctgaaagtggccggctttaacctgctgatgaccctgcggctgtggtccagc

SEQ ID NO: 4294 - DNA, 3888 bp, Artificial Sequence
  Synthetic Polynucloetide
atggccttaccagtgaccgccttgctcctgccgctggccttgctgctccacgccgccaggccggcatgccaggtccagctcgtcgagtccggcggcggcctcgtccaggccggcgactccgtcaccctctcctgcaccgcctccggccgcaccttctcctcctacgccctcgcctggttccgccagcgccccggcaaggagcgcgagttcgtcgccggcctccgctggggcggccccaccaactacgccgactccgtcaaggaccgcttcaccatctccggcgactccgccaagcacaccatgtacctccagatgaactccctcaagcccgaggacaccgccgtctactactgcggctacaaccccggcggctgggccgtcccctcccagtacgagtacgactcctggggccagggcacccaggtcaccgtctcctccggtaccggcggaggcggatctggcggcggaggtagcggtggcggaggatctgaattcgacatccagatgacacagagccctagcagcctgtctgccagcgtgggagacagagtgaccatcacatgcaaggccagcgaccacatcaacaactggctggcctggtatcagcagaagcctggacaggcccctaagctgctgatctacggcgctaccacactggaaacaggcgtgcccagcagattttctggcagcggctctggcaccgactacaccctgacaatatccagcctccagcctgaggacttcgccacctactactgtcagcagagctggaacaccccttggacattcggccagggcaccaagctggaaatcaagagactcgaggacctgaagaacgtgttcccacctgaggtggccgtgttcgagcctagcgaggccgagatcagccacacccagaaagccaccctcgtgtgcctggctaccggcttctaccccgaccatgtggaactgtcttggtgggtcaacggcaaagaggtgcacagcggcgtgtgtaccgacccccagccactgaaagaacagcccgccctgaacgacagccggtactgcctgagcagcagactgagagtgtccgccaccttctggcagaacccccggaaccacttcagatgccaggtgcagttctacggcctgagcgagaacgacgagtggacccaggacagagccaagcccgtgacccagatcgtgtctgccgaagcctggggcagagccgattgcggctttaccagcgagagctaccagcagggcgtgctgagcgccaccatcctgtacgagatcctgctgggcaaggccaccctgtacgccgtgctggtgtctgccctggtgctgatggctatggtcaagcggaaggacagccggggaagggccaagcgatctggatctggagcaacaaacttctcactactcaaacaagcaggtgacgtggaggagaatcccgggcctactagtatggactggatttggcgcatccttttccttgtcggcgctgctaccggcgcccattccgggcccctgttcaatcaagaggtgcagatccctctgaccgagagctactgtggcccctgtcctaagaactggatctgctacaagaacaactgctaccagttcttcgacgagagcaagaattggtacgagagccaggccagctgcatgagccagaatgccagcctgctgaaggtgtacagcaaagaggaccaggacctgctgaaactggtcaagagctaccactggatgggccttgtgcacatccccaccaatggctcttggcagtgggaggacggcagcattctgagccctaacctgctgaccatcatcgagatgcagaagggcgactgcgccctgtacgccagcagctttaagggctacatcgagaattgcagcaccccgaacacctacatctgtatgcagagaaccgttggcggaggcggaagtggaggcggaggatctggcggcggaggctctgacctctttaatcaagaagtccagattccactcaccgaatcctactgcggaccttgtccaaaaaattggatttgttataagaacaactgttatcaattctttgatgagtctaaaaattggtatgagtcccaggcttcctgcatgtctcagaacgcttctctgctgaaagtctactctaaagaagatcaggatctcctgaagctcgtcaagtcttatcattggatggggctcgtccacattcctaccaacggaagctggcaatgggaagatggctccatcctgtctccaaatctgctcacgattattgaaatgcagaaaggggattgtgctctctacgccagctccttcaagggatatattgagaactgtagcacgcccaatacttatatctgtatgcaacggaccgtgggatccggcggcggaggatctggcggaggcggatctgggggcggaggctctttcgaacaagttcagcttcaacagcctggcgctgagctggtcaaacctggcgcttctgtgaagatgagctgcaaagccagcggctacgccttcagcagctactggatcaactggatgaagcagaaacccggccagggactcgaatggatcggccaaatctatcccggcgacggcgacaccaactacaacggcaagttcaagggcagagccacactgaccgccgatacctctagcagcacagcctacatgcagctgagcagcctgaccagcgaagatagcgccgtgtacttctgtgcccggtccatcacaacagtcgtgggctgcgctatggactattggggccagggaacaagcgtgaccgtgtctagtacgcgtatccagaaccctgatcctgccgtgtaccagctgcgggatagcaagagcagcgacaagagcgtgtgtctgttcaccgacttcgacagccagaccaacgtgtcccagagcaaggactccgacgtgtacatcaccgataagtgcgtgctggacatgcggagcatggacttcaagagcaactccgccgtggcctggtccaacaagtccgatttcgcctgcgccaacgccttcaacaacagcattatccccgaggacacattcttcccaagccccgagagcagctgcgacgtgaagctggtggaaaagagcttcgagacagacaccaacctgaacttccagaacctgagcgtgatcggcttcagaatcctgctgctgaaagtggccggctttaacctgctgatgaccctgcggctgtggtccagccgcgccaagagaagcggatctggcgtgaagcagaccctgaatttcgacctgctgaagctggctggcgacgtggaatccaacccaggcccttctagaggcgggatccacaccatggctacctacgaggtgctgtgcgaggtggcaagaaagctgggcaccgacgacagagaagtggtgctgttcctgctgaacgtgttcatccctcagcctacactggcccagctgatcggtgcactgagagccctgaaagaggaaggccggctgacctttcctctgctggccgaatgcctgttcagagccggaagaagggatctgctgcgggacctgctgcatctggaccccagatttctggaaagacacctggccggcaccatgagctacttcagcccttaccagctgaccgtgctgcacgttgacggcgaactgtgcgccagagatattcggagcctgatcttcctgagcaaggacaccatcggcagccggtctacccctcagacatttctgcactgggtgtactgcatggaaaacctggacctgctcggccccacagatgtggatgccctgatgtccatgctgagaagcctgagcagagtggacctccagagacaggtgcagacactgatgggactgcacctgagcggacctagccacagccagcactacagacacacccct

SEQ ID NO: 4295 - DNA, 3225 bp, Artificial Sequence
  Synthetic Polynucloetide
atggccttaccagtgaccgccttgctcctgccgctggccttgctgctccacgccgccaggccggcatgccaggtccagctcgtcgagtccggcggcggcctcgtccaggccggcgactccgtcaccctctcctgcaccgcctccggccgcaccttctcctcctacgccctcgcctggttccgccagcgccccggcaaggagcgcgagttcgtcgccggcctccgctggggcggccccaccaactacgccgactccgtcaaggaccgcttcaccatctccggcgactccgccaagcacaccatgtacctccagatgaactccctcaagcccgaggacaccgccgtctactactgcggctacaaccccggcggctgggccgtcccctcccagtacgagtacgactcctggggccagggcacccaggtcaccgtctcctccggtaccggcggaggcggatctggcggcggaggtagcggtggcggaggatctgaattcgacatccagatgacacagagccctagcagcctgtctgccagcgtgggagacagagtgaccatcacatgcaaggccagcgaccacatcaacaactggctggcctggtatcagcagaagcctggacaggcccctaagctgctgatctacggcgctaccacactggaaacaggcgtgcccagcagattttctggcagcggctctggcaccgactacaccctgacaatatccagcctccagcctgaggacttcgccacctactactgtcagcagagctggaacaccccttggacattcggccagggcaccaagctggaaatcaagagactcgagatccagaaccctgatcctgccgtgtaccagctgcgggatagcaagagcagcgacaagagcgtgtgtctgttcaccgacttcgacagccagaccaacgtgtcccagagcaaggactccgacgtgtacatcaccgataagtgcgtgctggacatgcggagcatggacttcaagagcaactccgccgtggcctggtccaacaagtccgatttcgcctgcgccaacgccttcaacaacagcattatccccgaggacacattcttcccaagccccgagagcagctgcgacgtgaagctggtggaaaagagcttcgagacagacaccaacctgaacttccagaacctgagcgtgatcggcttcagaatcctgctgctgaaagtggccggctttaacctgctgatgaccctgcggctgtggtccagccgcgccaagagaagcggatctggcgtgaagcagaccctgaatttcgacctgctgaagctggctggcgacgtggaatccaacccaggccctactagtatggactggatttggcgcatccttttccttgtcggcgctgctaccggcgcccattccgggcccctgttcaatcaagaggtgcagatccctctgaccgagagctactgtggcccctgtcctaagaactggatctgctacaagaacaactgctaccagttcttcgacgagagcaagaattggtacgagagccaggccagctgcatgagccagaatgccagcctgctgaaggtgtacagcaaagaggaccaggacctgctgaaactggtcaagagctaccactggatgggccttgtgcacatccccaccaatggctcttggcagtgggaggacggcagcattctgagccctaacctgctgaccatcatcgagatgcagaagggcgactgcgccctgtacgccagcagctttaagggctacatcgagaattgcagcaccccgaacacctacatctgtatgcagagaaccgttggcggaggcggaagtggaggcggaggatctggcggcggaggctctgacctctttaatcaagaagtccagattccactcaccgaatcctactgcggaccttgtccaaaaaattggatttgttataagaacaactgttatcaattctttgatgagtctaaaaattggtatgagtcccaggcttcctgcatgtctcagaacgcttctctgctgaaagtctactctaaagaagatcaggatctcctgaagctcgtcaagtcttatcattggatggggctcgtccacattcctaccaacggaagctggcaatgggaagatggctccatcctgtctccaaatctgctcacgattattgaaatgcagaaaggggattgtgctctctacgccagctccttcaagggatatattgagaactgtagcacgcccaatacttatatctgtatgcaacggaccgtgggatccggcggcggaggatctggcggaggcggatctgggggcggaggctctttcgaacaagttcagcttcaacagcctggcgctgagctggtcaaacctggcgcttctgtgaagatgagctgcaaagccagcggctacgccttcagcagctactggatcaactggatgaagcagaaacccggccagggactcgaatggatcggccaaatctatcccggcgacggcgacaccaactacaacggcaagttcaagggcagagccacactgaccgccgatacctctagcagcacagcctacatgcagctgagcagcctgaccagcgaagatagcgccgtgtacttctgtgcccggtccatcacaacagtcgtgggctgcgctatggactattggggccagggaacaagcgtgaccgtgtctagtacgcgtgaggacctgaagaacgtgttcccacctgaggtggccgtgttcgagcctagcgaggccgagatcagccacacccagaaagccaccctcgtgtgcctggctaccggcttctaccccgaccatgtggaactgtcttggtgggtcaacggcaaagaggtgcacagcggcgtgtgtaccgacccccagccactgaaagaacagcccgccctgaacgacagccggtactgcctgagcagcagactgagagtgtccgccaccttctggcagaacccccggaaccacttcagatgccaggtgcagttctacggcctgagcgagaacgacgagtggacccaggacagagccaagcccgtgacccagatcgtgtctgccgaagcctggggcagagccgattgcggctttaccagcgagagctaccagcagggcgtgctgagcgccaccatcctgtacgagatcctgctgggcaaggccaccctgtacgccgtgctggtgtctgccctggtgctgatggctatggtcaagcggaaggacagccgggga

SEQ ID NO: 4296 - DNA, 3891 bp, Artificial Sequence
  Synthetic Polynucloetide
atggccttaccagtgaccgccttgctcctgccgctggccttgctgctccacgccgccaggccggcatgccaggtccagctcgtcgagtccggcggcggcctcgtccaggccggcgactccgtcaccctctcctgcaccgcctccggccgcaccttctcctcctacgccctcgcctggttccgccagcgccccggcaaggagcgcgagttcgtcgccggcctccgctggggcggccccaccaactacgccgactccgtcaaggaccgcttcaccatctccggcgactccgccaagcacaccatgtacctccagatgaactccctcaagcccgaggacaccgccgtctactactgcggctacaaccccggcggctgggccgtcccctcccagtacgagtacgactcctggggccagggcacccaggtcaccgtctcctccggtaccggcggaggcggatctggcggcggaggtagcggtggcggaggatctgaattcgacatccagatgacacagagccctagcagcctgtctgccagcgtgggagacagagtgaccatcacatgcaaggccagcgaccacatcaacaactggctggcctggtatcagcagaagcctggacaggcccctaagctgctgatctacggcgctaccacactggaaacaggcgtgcccagcagattttctggcagcggctctggcaccgactacaccctgacaatatccagcctccagcctgaggacttcgccacctactactgtcagcagagctggaacaccccttggacattcggccagggcaccaagctggaaatcaagagactcgagatccagaaccctgatcctgccgtgtaccagctgcgggatagcaagagcagcgacaagagcgtgtgtctgttcaccgacttcgacagccagaccaacgtgtcccagagcaaggactccgacgtgtacatcaccgataagtgcgtgctggacatgcggagcatggacttcaagagcaactccgccgtggcctggtccaacaagtccgatttcgcctgcgccaacgccttcaacaacagcattatccccgaggacacattcttcccaagccccgagagcagctgcgacgtgaagctggtggaaaagagcttcgagacagacaccaacctgaacttccagaacctgagcgtgatcggcttcagaatcctgctgctgaaagtggccggctttaacctgctgatgaccctgcggctgtggtccagccgcgccaagagaagcggatctggcgtgaagcagaccctgaatttcgacctgctgaagctggctggcgacgtggaatccaacccaggccctactagtatggactggatttggcgcatccttttccttgtcggcgctgctaccggcgcccattccgggcccctgttcaatcaagaggtgcagatccctctgaccgagagctactgtggcccctgtcctaagaactggatctgctacaagaacaactgctaccagttcttcgacgagagcaagaattggtacgagagccaggccagctgcatgagccagaatgccagcctgctgaaggtgtacagcaaagaggaccaggacctgctgaaactggtcaagagctaccactggatgggccttgtgcacatccccaccaatggctcttggcagtgggaggacggcagcattctgagccctaacctgctgaccatcatcgagatgcagaagggcgactgcgccctgtacgccagcagctttaagggctacatcgagaattgcagcaccccgaacacctacatctgtatgcagagaaccgttggcggaggcggaagtggaggcggaggatctggcggcggaggctctgacctctttaatcaagaagtccagattccactcaccgaatcctactgcggaccttgtccaaaaaattggatttgttataagaacaactgttatcaattctttgatgagtctaaaaattggtatgagtcccaggcttcctgcatgtctcagaacgcttctctgctgaaagtctactctaaagaagatcaggatctcctgaagctcgtcaagtcttatcattggatggggctcgtccacattcctaccaacggaagctggcaatgggaagatggctccatcctgtctccaaatctgctcacgattattgaaatgcagaaaggggattgtgctctctacgccagctccttcaagggatatattgagaactgtagcacgcccaatacttatatctgtatgcaacggaccgtgggatccggcggcggaggatctggcggaggcggatctgggggcggaggctctttcgaacaagttcagcttcaacagcctggcgctgagctggtcaaacctggcgcttctgtgaagatgagctgcaaagccagcggctacgccttcagcagctactggatcaactggatgaagcagaaacccggccagggactcgaatggatcggccaaatctatcccggcgacggcgacaccaactacaacggcaagttcaagggcagagccacactgaccgccgatacctctagcagcacagcctacatgcagctgagcagcctgaccagcgaagatagcgccgtgtacttctgtgcccggtccatcacaacagtcgtgggctgcgctatggactattggggccagggaacaagcgtgaccgtgtctagtacgcgtgaggacctgaagaacgtgttcccacctgaggtggccgtgttcgagcctagcgaggccgagatcagccacacccagaaagccaccctcgtgtgcctggctaccggcttctaccccgaccatgtggaactgtcttggtgggtcaacggcaaagaggtgcacagcggcgtgtgtaccgacccccagccactgaaagaacagcccgccctgaacgacagccggtactgcctgagcagcagactgagagtgtccgccaccttctggcagaacccccggaaccacttcagatgccaggtgcagttctacggcctgagcgagaacgacgagtggacccaggacagagccaagcccgtgacccagatcgtgtctgccgaagcctggggcagagccgattgcggctttaccagcgagagctaccagcagggcgtgctgagcgccaccatcctgtacgagatcctgctgggcaaggccaccctgtacgccgtgctggtgtctgccctggtgctgatggctatggtcaagcggaaggacagccggggaagggccaagcgatctggatctggagcaacaaacttctcactactcaaacaagcaggtgacgtggaggagaatcccgggccttctagaggcgggatccacaccatggctacctacgaggtgctgtgcgaggtggcaagaaagctgggcaccgacgacagagaagtggtgctgttcctgctgaacgtgttcatccctcagcctacactggcccagctgatcggtgcactgagagccctgaaagaggaaggccggctgacctttcctctgctggccgaatgcctgttcagagccggaagaagggatctgctgcgggacctgctgcatctggaccccagatttctggaaagacacctggccggcaccatgagctacttcagcccttaccagctgaccgtgctgcacgttgacggcgaactgtgcgccagagatattcggagcctgatcttcctgagcaaggacaccatcggcagccggtctacccctcagacatttctgcactgggtgtactgcatggaaaacctggacctgctcggccccacagatgtggatgccctgatgtccatgctgagaagcctgagcagagtggacctccagagacaggtgcagacactgatgggactgcacctgagcggacctagccacagccagcactacagacacacccct

SEQ ID NO: 4297 - DNA, 3915 bp, Artificial Sequence
  Synthetic Polynucloetide
atggccttaccagtgaccgccttgctcctgccgctggccttgctgctccacgccgccaggccggcatgccaggtccagctcgtcgagtccggcggcggcctcgtccaggccggcgactccgtcaccctctcctgcaccgcctccggccgcaccttctcctcctacgccctcgcctggttccgccagcgccccggcaaggagcgcgagttcgtcgccggcctccgctggggcggccccaccaactacgccgactccgtcaaggaccgcttcaccatctccggcgactccgccaagcacaccatgtacctccagatgaactccctcaagcccgaggacaccgccgtctactactgcggctacaaccccggcggctgggccgtcccctcccagtacgagtacgactcctggggccagggcacccaggtcaccgtctcctccggtaccggcggaggcggatctggcggcggaggtagcggtggcggaggatctgaattcgacatccagatgacacagagccctagcagcctgtctgccagcgtgggagacagagtgaccatcacatgcaaggccagcgaccacatcaacaactggctggcctggtatcagcagaagcctggacaggcccctaagctgctgatctacggcgctaccacactggaaacaggcgtgcccagcagattttctggcagcggctctggcaccgactacaccctgacaatatccagcctccagcctgaggacttcgccacctactactgtcagcagagctggaacaccccttggacattcggccagggcaccaagctggaaatcaagagactcgaggacctgaagaacgtgttcccacctgaggtggccgtgttcgagcctagcgaggccgagatcagccacacccagaaagccaccctcgtgtgcctggctaccggcttctaccccgaccatgtggaactgtcttggtgggtcaacggcaaagaggtgcacagcggcgtgtctaccgacccccagccactgaaagaacagcccgccctgaacgacagccggtactgcctgagcagcagactgagagtgtccgccaccttctggcagaacccccggaaccacttcagatgccaggtgcagttctacggcctgagcgagaacgacgagtggacccaggacagagccaagcccgtgacccagatcgtgtctgccgaagcctggggcagagccgattgcggctttaccagcgagagctaccagcagggcgtgctgagcgccaccatcctgtacgagatcctgctgggcaaggccaccctgtacgccgtgctggtgtctgccctggtgctgatggctatggtcaagcggaaggacagccggggaagggccaagcgatctggatctggagcaacaaacttctcactactcaaacaagcaggtgacgtggaggagaatcccgggcctactagtatggactggatttggcgcatccttttccttgtcggcgctgctaccggcgcccattccgggcccctgttcaatcaagaggtgcagatccctctgaccgagagctactgtggcccctgtcctaagaactggatctgctacaagaacaactgctaccagttcttcgacgagagcaagaattggtacgagagccaggccagctgcatgagccagaatgccagcctgctgaaggtgtacagcaaagaggaccaggacctgctgaaactggtcaagagctaccactggatgggccttgtgcacatccccaccaatggctcttggcagtgggaggacggcagcattctgagccctaacctgctgaccatcatcgagatgcagaagggcgactgcgccctgtacgccagcagctttaagggctacatcgagaattgcagcaccccgaacacctacatctgtatgcagagaaccgttggcggaggcggaagtggaggcggaggatctggcggcggaggctctgacctctttaatcaagaagtccagattccactcaccgaatcctactgcggaccttgtccaaaaaattggatttgttataagaacaactgttatcaattctttgatgagtctaaaaattggtatgagtcccaggcttcctgcatgtctcagaacgcttctctgctgaaagtctactctaaagaagatcaggatctcctgaagctcgtcaagtcttatcattggatggggctcgtccacattcctaccaacggaagctggcaatgggaagatggctccatcctgtctccaaatctgctcacgattattgaaatgcagaaaggggattgtgctctctacgccagctccttcaagggatatattgagaactgtagcacgcccaatacttatatctgtatgcaacggaccgtgggatccggcggcggaggatctggcggaggcggatctgggggcggaggctctttcgaacaagttcagcttcaacagcctggcgctgagctggtcaaacctggcgcttctgtgaagatgagctgcaaagccagcggctacgccttcagcagctactggatcaactggatgaagcagaaacccggccagggactcgaatggatcggccaaatctatcccggcgacggcgacaccaactacaacggcaagttcaagggcagagccacactgaccgccgatacctctagcagcacagcctacatgcagctgagcagcctgaccagcgaagatagcgccgtgtacttctgtgcccggtccatcacaacagtcgtgggctgcgctatggactattggggccagggaacaagcgtgaccgtgtctagtacgcgtatccagaaccctgatcctgccgtgtaccagctgcgggatagcaagagcagcgacaagagcgtgtgtctgttcaccgacttcgacagccagaccaacgtgtcccagagcaaggactccgacgtgtacatcaccgataagaccgtgctggacatgcggagcatggacttcaagagcaactccgccgtggcctggtccaacaagtccgatttcgcctgcgccaacgccttcaacaacagcattatccccgaggacacattcttcccaagccccgagagcagctgcgacgtgaagctggtggaaaagagcttcgagacagacaccaacctgaacttccagaacctgagcgtgatcggcttcagaatcctgctgctgaaagtggccggctttaacctgctgatgaccctgcggctgtggtccagccgcgccaagagaagcggatctggcgtgaagcagaccctgaatttcgacctgctgaagctggctggcgacgtggaatccaacccaggcccttctagaggccatatgaccgagtacaagcccacggtgcgcctcgccacccgcgacgacgtccccagggccgtacgcaccctcgccgccgcgttcgccgactaccccgccacgcgccacaccgtcgatccggaccgccacatcgagcgggtcaccgagctgcaagaactcttcctcacgcgcgtcgggctcgacatcggcaaggtgtgggtcgcggacgacggcgccgcggtggcggtctggaccacgccggagagcgtcgaagcgggggcggtgttcgccgagatcggcccgcgcatggccgagttgagcggttcccggctggccgcgcagcaacagatggaaggcctcctggcgccgcaccggcccaaggagcccgcgtggttcctggccaccgtcggcgtctcgcccgaccaccagggcaagggtctgggcagcgccgtcgtgctccccggagtggaggcggccgagcgcgccggggtgcccgccttcctggagacctccgcgccccgcaacctccccttctacgagcggctcggcttcaccgtcaccgccgacgtcgaggtgcccgaaggaccgcgcacctggtgcatgacccgcaagcccggtgcctga

SEQ ID NO: 4298 - DNA, 4161 bp, Artificial Sequence
  Synthetic Polynucloetide
atggccttaccagtgaccgccttgctcctgccgctggccttgctgctccacgccgccaggccggcatgccaggtccagctcgtcgagtccggcggcggcctcgtccaggccggcgactccgtcaccctctcctgcaccgcctccggccgcaccttctcctcctacgccctcgcctggttccgccagcgccccggcaaggagcgcgagttcgtcgccggcctccgctggggcggccccaccaactacgccgactccgtcaaggaccgcttcaccatctccggcgactccgccaagcacaccatgtacctccagatgaactccctcaagcccgaggacaccgccgtctactactgcggctacaaccccggcggctgggccgtcccctcccagtacgagtacgactcctggggccagggcacccaggtcaccgtctcctccggtaccggcggaggcggatctggcggcggaggtagcggtggcggaggatctgaattcgacatccagatgacacagagccctagcagcctgtctgccagcgtgggagacagagtgaccatcacatgcaaggccagcgaccacatcaacaactggctggcctggtatcagcagaagcctggacaggcccctaagctgctgatctacggcgctaccacactggaaacaggcgtgcccagcagattttctggcagcggctctggcaccgactacaccctgacaatatccagcctccagcctgaggacttcgccacctactactgtcagcagagctggaacaccccttggacattcggccagggcaccaagctggaaatcaagagactcgaggacctgaagaacgtgttcccacctgaggtggccgtgttcgagcctagcgaggccgagatcagccacacccagaaagccaccctcgtgtgcctggctaccggcttctaccccgaccatgtggaactgtcttggtgggtcaacggcaaagaggtgcacagcggcgtgtctaccgacccccagccactgaaagaacagcccgccctgaacgacagccggtactgcctgagcagcagactgagagtgtccgccaccttctggcagaacccccggaaccacttcagatgccaggtgcagttctacggcctgagcgagaacgacgagtggacccaggacagagccaagcccgtgacccagatcgtgtctgccgaagcctggggcagagccgattgcggctttaccagcgagagctaccagcagggcgtgctgagcgccaccatcctgtacgagatcctgctgggcaaggccaccctgtacgccgtgctggtgtctgccctggtgctgatggctatggtcaagcggaaggacagccggggaagggccaagcgatctggatctggagcaacaaacttctcactactcaaacaagcaggtgacgtggaggagaatcccgggcctactagtatggactggatttggcgcatccttttccttgtcggcgctgctaccggcgcccattccgggcccctgttcaatcaagaggtgcagatccctctgaccgagagctactgtggcccctgtcctaagaactggatctgctacaagaacaactgctaccagttcttcgacgagagcaagaattggtacgagagccaggccagctgcatgagccagaatgccagcctgctgaaggtgtacagcaaagaggaccaggacctgctgaaactggtcaagagctaccactggatgggccttgtgcacatccccaccaatggctcttggcagtgggaggacggcagcattctgagccctaacctgctgaccatcatcgagatgcagaagggcgactgcgccctgtacgccagcagctttaagggctacatcgagaattgcagcaccccgaacacctacatctgtatgcagagaaccgttggcggaggcggaagtggaggcggaggatctggcggcggaggctctgacctctttaatcaagaagtccagattccactcaccgaatcctactgcggaccttgtccaaaaaattggatttgttataagaacaactgttatcaattctttgatgagtctaaaaattggtatgagtcccaggcttcctgcatgtctcagaacgcttctctgctgaaagtctactctaaagaagatcaggatctcctgaagctcgtcaagtcttatcattggatggggctcgtccacattcctaccaacggaagctggcaatgggaagatggctccatcctgtctccaaatctgctcacgattattgaaatgcagaaaggggattgtgctctctacgccagctccttcaagggatatattgagaactgtagcacgcccaatacttatatctgtatgcaacggaccgtgggatccggcggcggaggatctggcggaggcggatctgggggcggaggctctttcgaacaagttcagcttcaacagcctggcgctgagctggtcaaacctggcgcttctgtgaagatgagctgcaaagccagcggctacgccttcagcagctactggatcaactggatgaagcagaaacccggccagggactcgaatggatcggccaaatctatcccggcgacggcgacaccaactacaacggcaagttcaagggcagagccacactgaccgccgatacctctagcagcacagcctacatgcagctgagcagcctgaccagcgaagatagcgccgtgtacttctgtgcccggtccatcacaacagtcgtgggctgcgctatggactattggggccagggaacaagcgtgaccgtgtctagtacgcgtgagcagaaactgatctcggaagaggatgggagcggcaccccattcccttctctggcccctcccatcatgctgctggtggacggcaagcagcagatggtggtcgtgtgcctggtgctggatgtggccccacctggactggacagccccatctggtttagcgccggcaatggctctgccctggacgcctttacctacggcccaagccctgccaccgatggcacctggacaaatctggcccacctgagcctgcccagcgaggaactggcttcttgggagcctctcgtgtgccacacaggacctggcgctgagggacacagcagatccacccagcctatgcacctgtctggcgaggccagcaccgccagaacctgtcctcaggaacctctgagaggcacccctggcggagcactgtggctgggagtgctgagactgctgctgttcaagctgctgctgtttgacctgctgctgacctgctcctgtctgtgcgatcctgccggccctctgccttctcctgccaccaccacaagactgagagccctgggcagccacagactgcaccctgccacagagacaggcggcagagaggccacaagcagccctagaccccagcccagagacagaagatggggcgataccccccctggcagaaagcctggatctccagtccgcgccaagagaagcggatctggcgtgaagcagaccctgaatttcgacctgctgaagctggctggcgacgtggaatccaacccaggcccttctagaggccatatgaccgagtacaagcccacggtgcgcctcgccacccgcgacgacgtccccagggccgtacgcaccctcgccgccgcgttcgccgactaccccgccacgcgccacaccgtcgatccggaccgccacatcgagcgggtcaccgagctgcaagaactcttcctcacgcgcgtcgggctcgacatcggcaaggtgtgggtcgcggacgacggcgccgcggtggcggtctggaccacgccggagagcgtcgaagcgggggcggtgttcgccgagatcggcccgcgcatggccgagttgagcggttcccggctggccgcgcagcaacagatggaaggcctcctggcgccgcaccggcccaaggagcccgcgtggttcctggccaccgtcggcgtctcgcccgaccaccagggcaagggtctgggcagcgccgtcgtgctccccggagtggaggcggccgagcgcgccggggtgcccgccttcctggagacctccgcgccccgcaacctccccttctacgagcggctcggcttcaccgtcaccgccgacgtcgaggtgcccgaaggaccgcgcacctggtgcatgacccgcaagcccggtgcctga

SEQ ID NO: 4299 - DNA, 4026 bp, Artificial Sequence
  Synthetic Polynucloetide
atggccttaccagtgaccgccttgctcctgccgctggccttgctgctccacgccgccaggccggcatgccaggtccagctcgtcgagtccggcggcggcctcgtccaggccggcgactccgtcaccctctcctgcaccgcctccggccgcaccttctcctcctacgccctcgcctggttccgccagcgccccggcaaggagcgcgagttcgtcgccggcctccgctggggcggccccaccaactacgccgactccgtcaaggaccgcttcaccatctccggcgactccgccaagcacaccatgtacctccagatgaactccctcaagcccgaggacaccgccgtctactactgcggctacaaccccggcggctgggccgtcccctcccagtacgagtacgactcctggggccagggcacccaggtcaccgtctcctccggtaccggcggaggcggatctggcggcggaggtagcggtggcggaggatctgaattcgacatccagatgacacagagccctagcagcctgtctgccagcgtgggagacagagtgaccatcacatgcaaggccagcgaccacatcaacaactggctggcctggtatcagcagaagcctggacaggcccctaagctgctgatctacggcgctaccacactggaaacaggcgtgcccagcagattttctggcagcggctctggcaccgactacaccctgacaatatccagcctccagcctgaggacttcgccacctactactgtcagcagagctggaacaccccttggacattcggccagggcaccaagctggaaatcaagagactcgaggggaaaccaattcccaaccctcttctgggactggattcaaccggcagcggcgacaagcagctggacgccgacgtgtcccccaagcctaccatcttcctgccctctatcgccgagacaaagctccagaaggccggcacctacctgtgcctgctggaaaagttcttcccagatgtgattaagatccactggcaggaaaagaagtccaacaccatcctgggcagccaggaaggcaacaccatgaagaccaacgacacctacatgaagttcagctggctgaccgtgcccgagaagtccctggacaaagaacacagatgcatcgtgcggcacgaaaacaacaagaacggcgtggaccaggaaatcatcttcccacccatcaagaccgatgtgattacaatggaccccaaggacaactgctccaaggacgccaacgataccctgctgctccagctgaccaacaccagcgcctactacatgtacttgttgctgctgctgaagtccgtggtgtacttcgccatcatcacatgctgcctgctgcggagaaccgccttctgctgcaacggcgagaagtctagggccaagcgatctggatctggagcaacaaacttctcactactcaaacaagcaggtgacgtggaggagaatcccgggcctactagtatggactggatttggcgcatccttttccttgtcggcgctgctaccggcgcccattccgggcccctgttcaatcaagaggtgcagatccctctgaccgagagctactgtggcccctgtcctaagaactggatctgctacaagaacaactgctaccagttcttcgacgagagcaagaattggtacgagagccaggccagctgcatgagccagaatgccagcctgctgaaggtgtacagcaaagaggaccaggacctgctgaaactggtcaagagctaccactggatgggccttgtgcacatccccaccaatggctcttggcagtgggaggacggcagcattctgagccctaacctgctgaccatcatcgagatgcagaagggcgactgcgccctgtacgccagcagctttaagggctacatcgagaattgcagcaccccgaacacctacatctgtatgcagagaaccgttggcggaggcggaagtggaggcggaggatctggcggcggaggctctgacctctttaatcaagaagtccagattccactcaccgaatcctactgcggaccttgtccaaaaaattggatttgttataagaacaactgttatcaattctttgatgagtctaaaaattggtatgagtcccaggcttcctgcatgtctcagaacgcttctctgctgaaagtctactctaaagaagatcaggatctcctgaagctcgtcaagtcttatcattggatggggctcgtccacattcctaccaacggaagctggcaatgggaagatggctccatcctgtctccaaatctgctcacgattattgaaatgcagaaaggggattgtgctctctacgccagctccttcaagggatatattgagaactgtagcacgcccaatacttatatctgtatgcaacggaccgtgggatccggcggcggaggatctggcggaggcggatctgggggcggaggctctttcgaacaagttcagcttcaacagcctggcgctgagctggtcaaacctggcgcttctgtgaagatgagctgcaaagccagcggctacgccttcagcagctactggatcaactggatgaagcagaaacccggccagggactcgaatggatcggccaaatctatcccggcgacggcgacaccaactacaacggcaagttcaagggcagagccacactgaccgccgatacctctagcagcacagcctacatgcagctgagcagcctgaccagcgaagatagcgccgtgtacttctgtgcccggtccatcacaacagtcgtgggctgcgctatggactattggggccagggaacaagcgtgaccgtgtctagtacgcgtgagcagaaactgatctcggaagaggatgggagcggcagccagcctcacaccaagcccagcgtgttcgtgatgaagaacggcaccaacgtggcctgcctcgtgaaagagttctaccccaaggacatcaggatcaacctggtgtccagcaagaagatcaccgagttcgaccccgccatcgtgatctcccccagcggcaagtacaacgccgtgaagctggggaagtacgaggacagcaacagcgtgacctgctccgtgcagcacgacaacaagaccgtgcacagcaccgactttgaagtgaaaaccgactccaccgaccacgtgaagcccaaagagacagagaacaccaagcagcccagcaagagctgccacaagcccaaggccatcgtgcacaccgagaaagtgaacatgatgagcctgaccgtgctgggcctgcggatgctgttcgccaaaaccgtggccgtgaacttcctgctgaccgccaagctgttcttcctccgcgccaagagaagcggatctggcgtgaagcagaccctgaatttcgacctgctgaagctggctggcgacgtggaatccaacccaggcccttctagaggccatatgaccgagtacaagcccacggtgcgcctcgccacccgcgacgacgtccccagggccgtacgcaccctcgccgccgcgttcgccgactaccccgccacgcgccacaccgtcgatccggaccgccacatcgagcgggtcaccgagctgcaagaactcttcctcacgcgcgtcgggctcgacatcggcaaggtgtgggtcgcggacgacggcgccgcggtggcggtctggaccacgccggagagcgtcgaagcgggggcggtgttcgccgagatcggcccgcgcatggccgagttgagcggttcccggctggccgcgcagcaacagatggaaggcctcctggcgccgcaccggcccaaggagcccgcgtggttcctggccaccgtcggcgtctcgcccgaccaccagggcaagggtctgggcagcgccgtcgtgctccccggagtggaggcggccgagcgcgccggggtgcccgccttcctggagacctccgcgccccgcaacctccccttctacgagcggctcggcttcaccgtcaccgccgacgtcgaggtgcccgaaggaccgcgcacctggtgcatgacccgcaagcccggtgcctga

SEQ ID NO: 4300 - DNA, 3237 bp, Artificial Sequence
  Synthetic Polynucloetide
atggccttaccagtgaccgccttgctcctgccgctggccttgctgctccacgccgccaggccggcatgccaggtccagctcgtcgagtccggcggcggcctcgtccaggccggcgactccgtcaccctctcctgcaccgcctccggccgcaccttctcctcctacgccctcgcctggttccgccagcgccccggcaaggagcgcgagttcgtcgccggcctccgctggggcggccccaccaactacgccgactccgtcaaggaccgcttcaccatctccggcgactccgccaagcacaccatgtacctccagatgaactccctcaagcccgaggacaccgccgtctactactgcggctacaaccccggcggctgggccgtcccctcccagtacgagtacgactcctggggccagggcacccaggtcaccgtctcctccggtaccggcggaggcggatctggcggcggaggtagcggtggcggaggatctgaattcgacatccagatgacacagagccctagcagcctgtctgccagcgtgggagacagagtgaccatcacatgcaaggccagcgaccacatcaacaactggctggcctggtatcagcagaagcctggacaggcccctaagctgctgatctacggcgctaccacactggaaacaggcgtgcccagcagattttctggcagcggctctggcaccgactacaccctgacaatatccagcctccagcctgaggacttcgccacctactactgtcagcagagctggaacaccccttggacattcggccagggcaccaagctggaaatcaagagactcgagagccagcctcacaccaagcccagcgtgttcgtgatgaagaacggcaccaacgtggcctgcctcgtgaaagagttctaccccaaggacatcaggatcaacctggtgtccagcaagaagatcaccgagttcgaccccgccatcgtgatctcccccagcggcaagtacaacgccgtgaagctggggaagtacgaggacagcaacagcgtgacctgctccgtgcagcacgacaacaagaccgtgcacagcaccgactttgaagtgaaaaccgactccaccgaccacgtgaagcccaaagagacagagaacaccaagcagcccagcaagagctgccacaagcccaaggccatcgtgcacaccgagaaagtgaacatgatgagcctgaccgtgctgggcctgcggatgctgttcgccaaaaccgtggccgtgaacttcctgctgaccgccaagctgttcttcctcagggccaagcgatctggatctggagcaacaaacttctcactactcaaacaagcaggtgacgtggaggagaatcccgggcctactagtatggactggatttggcgcatccttttccttgtcggcgctgctaccggcgcccattccgggcccctgttcaatcaagaggtgcagatccctctgaccgagagctactgtggcccctgtcctaagaactggatctgctacaagaacaactgctaccagttcttcgacgagagcaagaattggtacgagagccaggccagctgcatgagccagaatgccagcctgctgaaggtgtacagcaaagaggaccaggacctgctgaaactggtcaagagctaccactggatgggccttgtgcacatccccaccaatggctcttggcagtgggaggacggcagcattctgagccctaacctgctgaccatcatcgagatgcagaagggcgactgcgccctgtacgccagcagctttaagggctacatcgagaattgcagcaccccgaacacctacatctgtatgcagagaaccgttggcggaggcggaagtggaggcggaggatctggcggcggaggctctgacctctttaatcaagaagtccagattccactcaccgaatcctactgcggaccttgtccaaaaaattggatttgttataagaacaactgttatcaattctttgatgagtctaaaaattggtatgagtcccaggcttcctgcatgtctcagaacgcttctctgctgaaagtctactctaaagaagatcaggatctcctgaagctcgtcaagtcttatcattggatggggctcgtccacattcctaccaacggaagctggcaatgggaagatggctccatcctgtctccaaatctgctcacgattattgaaatgcagaaaggggattgtgctctctacgccagctccttcaagggatatattgagaactgtagcacgcccaatacttatatctgtatgcaacggaccgtgggatccggcggcggaggatctggcggaggcggatctgggggcggaggctctttcgaacaagttcagcttcaacagcctggcgctgagctggtcaaacctggcgcttctgtgaagatgagctgcaaagccagcggctacgccttcagcagctactggatcaactggatgaagcagaaacccggccagggactcgaatggatcggccaaatctatcccggcgacggcgacaccaactacaacggcaagttcaagggcagagccacactgaccgccgatacctctagcagcacagcctacatgcagctgagcagcctgaccagcgaagatagcgccgtgtacttctgtgcccggtccatcacaacagtcgtgggctgcgctatggactattggggccagggaacaagcgtgaccgtgtctagtacgcgtgacaagcagctggacgccgacgtgtcccccaagcctaccatcttcctgccctctatcgccgagacaaagctccagaaggccggcacctacctgtgcctgctggaaaagttcttcccagatgtgattaagatccactggcaggaaaagaagtccaacaccatcctgggcagccaggaaggcaacaccatgaagaccaacgacacctacatgaagttcagctggctgaccgtgcccgagaagtccctggacaaagaacacagatgcatcgtgcggcacgaaaacaacaagaacggcgtggaccaggaaatcatcttcccacccatcaagaccgatgtgattacaatggaccccaaggacaactgctccaaggacgccaacgataccctgctgctccagctgaccaacaccagcgcctactacatgtacttgttgctgctgctgaagtccgtggtgtacttcgccatcatcacatgctgcctgctgcggagaaccgccttctgctgcaacggcgagaagtct

SEQ ID NO: 4301 - DNA, 4446 bp, Artificial Sequence
  Synthetic Polynucloetide
atggccttaccagtgaccgccttgctcctgccgctggccttgctgctccacgccgccaggccggcatgccaggtccagctcgtcgagtccggcggcggcctcgtccaggccggcgactccgtcaccctctcctgcaccgcctccggccgcaccttctcctcctacgccctcgcctggttccgccagcgccccggcaaggagcgcgagttcgtcgccggcctccgctggggcggccccaccaactacgccgactccgtcaaggaccgcttcaccatctccggcgactccgccaagcacaccatgtacctccagatgaactccctcaagcccgaggacaccgccgtctactactgcggctacaaccccggcggctgggccgtcccctcccagtacgagtacgactcctggggccagggcacccaggtcaccgtctcctccggtaccggcggaggcggatctggcggcggaggtagcggtggcggaggatctgaattcgacatccagatgacacagagccctagcagcctgtctgccagcgtgggagacagagtgaccatcacatgcaaggccagcgaccacatcaacaactggctggcctggtatcagcagaagcctggacaggcccctaagctgctgatctacggcgctaccacactggaaacaggcgtgcccagcagattttctggcagcggctctggcaccgactacaccctgacaatatccagcctccagcctgaggacttcgccacctactactgtcagcagagctggaacaccccttggacattcggccagggcaccaagctggaaatcaagagaggacagcctaaggccaatcctaccgtgacactgttccctccaagcagcgaagaactccaggccaacaaggccacacttgtgtgcctgatctccgacttctaccctggggctgtgacagtggcttggaaggccgatggatctcctgtgaaagccggcgtggaaaccaccaagccatccaagcagagcaacaacaaatacgccgccagctcctacctgagcctgacacctgagcagtggaagtcccacagatcctacagctgccaagtgacccacgaaggcagcaccgtggaaaagacagtggcccctacagagtgcagcggatcccagagcttcggcctgctggaccccaagctgtgctacctgctggatggcatcctgttcatctacggcgtgatcctgaccgccctgttcctgagagtgaagttcagcagaagcgccgacgcccctgcctaccagcagggacagaaccaactgtacaacgagctgaacctgggcagacgggaagagtacgacgtgctggacaagcggagaggcagggaccctgagatgggcggaaagccccagcggagaaagaacccccaggaaggactgtataacgaactccagaaagacaagatggccgaagcctacagcgagatcggcatgaagggcgagcggagaagaggcaagggccacgatggcctgtaccagggcctgagcaccgccaccaaggacacctatgacgccctgcacatgcaggccctgcctccaagaagggccaagcgatctggatctggagcaacaaacttctcactactcaaacaagcaggtgacgtggaggagaatcccgggcctactagtatggactggatttggcgcatccttttccttgtcggcgctgctaccggcgcccattccgggcccctgttcaatcaagaggtgcagatccctctgaccgagagctactgtggcccctgtcctaagaactggatctgctacaagaacaactgctaccagttcttcgacgagagcaagaattggtacgagagccaggccagctgcatgagccagaatgccagcctgctgaaggtgtacagcaaagaggaccaggacctgctgaaactggtcaagagctaccactggatgggccttgtgcacatccccaccaatggctcttggcagtgggaggacggcagcattctgagccctaacctgctgaccatcatcgagatgcagaagggcgactgcgccctgtacgccagcagctttaagggctacatcgagaattgcagcaccccgaacacctacatctgtatgcagagaaccgttggcggaggcggaagtggaggcggaggatctggcggcggaggctctgacctctttaatcaagaagtccagattccactcaccgaatcctactgcggaccttgtccaaaaaattggatttgttataagaacaactgttatcaattctttgatgagtctaaaaattggtatgagtcccaggcttcctgcatgtctcagaacgcttctctgctgaaagtctactctaaagaagatcaggatctcctgaagctcgtcaagtcttatcattggatggggctcgtccacattcctaccaacggaagctggcaatgggaagatggctccatcctgtctccaaatctgctcacgattattgaaatgcagaaaggggattgtgctctctacgccagctccttcaagggatatattgagaactgtagcacgcccaatacttatatctgtatgcaacggaccgtgggatccggcggcggaggatctggcggaggcggatctgggggcggaggctctttcgaacaagttcagcttcaacagcctggcgctgagctggtcaaacctggcgcttctgtgaagatgagctgcaaagccagcggctacgccttcagcagctactggatcaactggatgaagcagaaacccggccagggactcgaatggatcggccaaatctatcccggcgacggcgacaccaactacaacggcaagttcaagggcagagccacactgaccgccgatacctctagcagcacagcctacatgcagctgagcagcctgaccagcgaagatagcgccgtgtacttctgtgcccggtccatcacaacagtcgtgggctgcgctatggactattggggccagggaacaagcgtgaccgtgtctagtgcctctacaaagggaccctccgtgtttcctctggctcccagcagcaagtctacaagcggaggaacagccgctctgggctgcctggtcaaggattactttcccgagcctgtgaccgtgtcctggaatagcggagcactgacaagcggcgtgcacacctttccagccgtgctgcaaagcagcggcctgtactctctgagcagcgtggtcacagtgcctagctctagcctgggcacccagacctacatctgcaatgtgaaccacaagcctagcaacaccaaggtggacaagagagtggaacccaagagctgtggtacccagagttttgggttgttggaccctaaattgtgctatctgttggacggaatcctgttcatttacggagtgatcctgaccgcattgttcctgcgggttaagttttccagatccgcagacgcacccgcttaccaacaagggcagaaccaactctacaatgaacttaatttggggcggagggaagagtacgacgttctggacaaaaggaggggacgagatcccgagatgggcggaaagcctcagcgaaggaagaatccgcaagaggggctttataacgaactccagaaagataaaatggcagaagcctatagtgagattgggatgaagggagaaaggaggaggggtaaaggtcacgatgggttgtaccaaggattgagcacagccactaaagatacctatgatgcgctccacatgcaggccctgccgccaagacgcgccaagagaagcggatctggcgtgaagcagaccctgaatttcgacctgctgaagctggctggcgacgtggaatccaacccaggcccttctagaggccatatgaccgagtacaagcccacggtgcgcctcgccacccgcgacgacgtccccagggccgtacgcaccctcgccgccgcgttcgccgactaccccgccacgcgccacaccgtcgatccggaccgccacatcgagcgggtcaccgagctgcaagaactcttcctcacgcgcgtcgggctcgacatcggcaaggtgtgggtcgcggacgacggcgccgcggtggcggtctggaccacgccggagagcgtcgaagcgggggcggtgttcgccgagatcggcccgcgcatggccgagttgagcggttcccggctggccgcgcagcaacagatggaaggcctcctggcgccgcaccggcccaaggagcccgcgtggttcctggccaccgtcggcgtctcgcccgaccaccagggcaagggtctgggcagcgccgtcgtgctccccggagtggaggcggccgagcgcgccggggtgcccgccttcctggagacctccgcgccccgcaacctccccttctacgagcggctcggcttcaccgtcaccgccgacgtcgaggtgcccgaaggaccgcgcacctggtgcatgacccgcaagcccggtgcctga

SEQ ID NO: 4302 - DNA, 3801 bp, Artificial Sequence
  Synthetic Polynucloetide
atggccttaccagtgaccgccttgctcctgccgctggccttgctgctccacgccgccaggccggcatgccaggtccagctcgtcgagtccggcggcggcctcgtccaggccggcgactccgtcaccctctcctgcaccgcctccggccgcaccttctcctcctacgccctcgcctggttccgccagcgccccggcaaggagcgcgagttcgtcgccggcctccgctggggcggccccaccaactacgccgactccgtcaaggaccgcttcaccatctccggcgactccgccaagcacaccatgtacctccagatgaactccctcaagcccgaggacaccgccgtctactactgcggctacaaccccggcggctgggccgtcccctcccagtacgagtacgactcctggggccagggcacccaggtcaccgtctcctccggtaccggcggaggcggatctggcggcggaggtagcggtggcggaggatctgaattcgacatccagatgacacagagccctagcagcctgtctgccagcgtgggagacagagtgaccatcacatgcaaggccagcgaccacatcaacaactggctggcctggtatcagcagaagcctggacaggcccctaagctgctgatctacggcgctaccacactggaaacaggcgtgcccagcagattttctggcagcggctctggcaccgactacaccctgacaatatccagcctccagcctgaggacttcgccacctactactgtcagcagagctggaacaccccttggacattcggccagggcaccaagctggaaatcaagagactcgaggacctgaagaacgtgttcccacctgaggtggccgtgttcgagcctagcgaggccgagatcagccacacccagaaagccaccctcgtgtgcctggctaccggcttctaccccgaccatgtggaactgtcttggtgggtcaacggcaaagaggtgcacagcggcgtgtctaccgacccccagccactgaaagaacagcccgccctgaacgacagccggtactgcctgagcagcagactgagagtgtccgccaccttctggcagaacccccggaaccacttcagatgccaggtgcagttctacggcctgagcgagaacgacgagtggacccaggacagagccaagcccgtgacccagatcgtgtctgccgaagcctggggcagagccgattgcggatcccagagcttcggcctgctggaccccaagctgtgctacctgctggatggcatcctgttcatctacggcgtgatcctgaccgccctgttcctgagagtgaagttcagcagaagcgccgacgcccctgcctaccagcagggacagaaccaactgtacaacgagctgaacctgggcagacgggaagagtacgacgtgctggacaagcggagaggcagggaccctgagatgggcggaaagccccagcggagaaagaacccccaggaaggactgtataacgaactccagaaagacaagatggccgaagcctacagcgagatcggcatgaagggcgagcggagaagaggcaagggccacgatggcctgtaccagggcctgagcaccgccaccaaggacacctatgacgccctgcacatgcaggccctgcctccaagaagggccaagcgatctggatctggagcaacaaacttctcactactcaaacaagcaggtgacgtggaggagaatcccgggcctactagtatggactggatttggcgcatccttttccttgtcggcgctgctaccggcgcccattccgggcccctgttcaatcaagaggtgcagatccctctgaccgagagctactgtggcccctgtcctaagaactggatctgctacaagaacaactgctaccagttcttcgacgagagcaagaattggtacgagagccaggccagctgcatgagccagaatgccagcctgctgaaggtgtacagcaaagaggaccaggacctgctgaaactggtcaagagctaccactggatgggccttgtgcacatccccaccaatggctcttggcagtgggaggacggcagcattctgagccctaacctgctgaccatcatcgagatgcagaagggcgactgcgccctgtacgccagcagctttaagggctacatcgagaattgcagcaccccgaacacctacatctgtatgcagagaaccgttggcggaggcggaagtggaggcggaggatctggcggcggaggctctgacctctttaatcaagaagtccagattccactcaccgaatcctactgcggaccttgtccaaaaaattggatttgttataagaacaactgttatcaattctttgatgagtctaaaaattggtatgagtcccaggcttcctgcatgtctcagaacgcttctctgctgaaagtctactctaaagaagatcaggatctcctgaagctcgtcaagtcttatcattggatggggctcgtccacattcctaccaacggaagctggcaatgggaagatggctccatcctgtctccaaatctgctcacgattattgaaatgcagaaaggggattgtgctctctacgccagctccttcaagggatatattgagaactgtagcacgcccaatacttatatctgtatgcaacggaccgtgggatccggcggcggaggatctggcggaggcggatctgggggcggaggctctttcgaacaagttcagcttcaacagcctggcgctgagctggtcaaacctggcgcttctgtgaagatgagctgcaaagccagcggctacgccttcagcagctactggatcaactggatgaagcagaaacccggccagggactcgaatggatcggccaaatctatcccggcgacggcgacaccaactacaacggcaagttcaagggcagagccacactgaccgccgatacctctagcagcacagcctacatgcagctgagcagcctgaccagcgaagatagcgccgtgtacttctgtgcccggtccatcacaacagtcgtgggctgcgctatggactattggggccagggaacaagcgtgaccgtgtctagtacgcgtatccagaaccctgatcctgccgtgtaccagctgcgggatagcaagagcagcgacaagagcgtgtgtctgttcaccgacttcgacagccagaccaacgtgtcccagagcaaggactccgacgtgtacatcaccgataagaccgtgctggacatgcggagcatggacttcaagagcaactccgccgtggcctggtccaacaagtccgatttcgcctgcgccaacgccttcaacaacagcattatccccgaggacacattcttcccaagccccgagagcagctgcggtacccagagttttgggttgttggaccctaaattgtgctatctgttggacggaatcctgttcatttacggagtgatcctgaccgcattgttcctgcgggttaagttttccagatccgcagacgcacccgcttaccaacaagggcagaaccaactctacaatgaacttaatttggggcggagggaagagtacgacgttctggacaaaaggaggggacgagatcccgagatgggcggaaagcctcagcgaaggaagaatccgcaagaggggctttataacgaactccagaaagataaaatggcagaagcctatagtgagattgggatgaagggagaaaggaggaggggtaaaggtcacgatgggttgtaccaaggattgagcacagccactaaagatacctatgatgcgctccacatgcaggccctgccgccaaga

SEQ ID NO: 4303 - DNA, 3801 bp, Artificial Sequence
  Synthetic Polynucloetide
atggccttaccagtgaccgccttgctcctgccgctggccttgctgctccacgccgccaggccggcatgccaggtccagctcgtcgagtccggcggcggcctcgtccaggccggcgactccgtcaccctctcctgcaccgcctccggccgcaccttctcctcctacgccctcgcctggttccgccagcgccccggcaaggagcgcgagttcgtcgccggcctccgctggggcggccccaccaactacgccgactccgtcaaggaccgcttcaccatctccggcgactccgccaagcacaccatgtacctccagatgaactccctcaagcccgaggacaccgccgtctactactgcggctacaaccccggcggctgggccgtcccctcccagtacgagtacgactcctggggccagggcacccaggtcaccgtctcctccggtaccggcggaggcggatctggcggcggaggtagcggtggcggaggatctgaattcgacatccagatgacacagagccctagcagcctgtctgccagcgtgggagacagagtgaccatcacatgcaaggccagcgaccacatcaacaactggctggcctggtatcagcagaagcctggacaggcccctaagctgctgatctacggcgctaccacactggaaacaggcgtgcccagcagattttctggcagcggctctggcaccgactacaccctgacaatatccagcctccagcctgaggacttcgccacctactactgtcagcagagctggaacaccccttggacattcggccagggcaccaagctggaaatcaagagactcgaggacctgaagaacgtgttcccacctgaggtggccgtgttcgagcctagcaaggccgagatcgcccacacccagaaagccaccctcgtgtgcctggctaccggcttctaccccgaccatgtggaactgtcttggtgggtcaacggcaaagaggtgcacagcggcgtgtgtaccgacccccagccactgaaagaacagcccgccctgaacgacagccggtactgcctgagcagcagactgagagtgtccgccaccttctggcagaacccccggaaccacttcagatgccaggtgcagttctacggcctgagcgagaacgacgagtggacccaggacagagccaagcccgtgacccagatcgtgtctgccgaagcctggggcagagccgattgcggatcccagagcttcggcctgctggaccccaagctgtgctacctgctggatggcatcctgttcatctacggcgtgatcctgaccgccctgttcctgagagtgaagttcagcagaagcgccgacgcccctgcctaccagcagggacagaaccaactgtacaacgagctgaacctgggcagacgggaagagtacgacgtgctggacaagcggagaggcagggaccctgagatgggcggaaagccccagcggagaaagaacccccaggaaggactgtataacgaactccagaaagacaagatggccgaagcctacagcgagatcggcatgaagggcgagcggagaagaggcaagggccacgatggcctgtaccagggcctgagcaccgccaccaaggacacctatgacgccctgcacatgcaggccctgcctccaagaagggccaagcgatctggatctggagcaacaaacttctcactactcaaacaagcaggtgacgtggaggagaatcccgggcctactagtatggactggatttggcgcatccttttccttgtcggcgctgctaccggcgcccattccgggcccctgttcaatcaagaggtgcagatccctctgaccgagagctactgtggcccctgtcctaagaactggatctgctacaagaacaactgctaccagttcttcgacgagagcaagaattggtacgagagccaggccagctgcatgagccagaatgccagcctgctgaaggtgtacagcaaagaggaccaggacctgctgaaactggtcaagagctaccactggatgggccttgtgcacatccccaccaatggctcttggcagtgggaggacggcagcattctgagccctaacctgctgaccatcatcgagatgcagaagggcgactgcgccctgtacgccagcagctttaagggctacatcgagaattgcagcaccccgaacacctacatctgtatgcagagaaccgttggcggaggcggaagtggaggcggaggatctggcggcggaggctctgacctctttaatcaagaagtccagattccactcaccgaatcctactgcggaccttgtccaaaaaattggatttgttataagaacaactgttatcaattctttgatgagtctaaaaattggtatgagtcccaggcttcctgcatgtctcagaacgcttctctgctgaaagtctactctaaagaagatcaggatctcctgaagctcgtcaagtcttatcattggatggggctcgtccacattcctaccaacggaagctggcaatgggaagatggctccatcctgtctccaaatctgctcacgattattgaaatgcagaaaggggattgtgctctctacgccagctccttcaagggatatattgagaactgtagcacgcccaatacttatatctgtatgcaacggaccgtgggatccggcggcggaggatctggcggaggcggatctgggggcggaggctctttcgaacaagttcagcttcaacagcctggcgctgagctggtcaaacctggcgcttctgtgaagatgagctgcaaagccagcggctacgccttcagcagctactggatcaactggatgaagcagaaacccggccagggactcgaatggatcggccaaatctatcccggcgacggcgacaccaactacaacggcaagttcaagggcagagccacactgaccgccgatacctctagcagcacagcctacatgcagctgagcagcctgaccagcgaagatagcgccgtgtacttctgtgcccggtccatcacaacagtcgtgggctgcgctatggactattggggccagggaacaagcgtgaccgtgtctagtacgcgtatccagaaccctgatcctgccgtgtaccagctgcgggatagcaagagcagcgacaagagcgtgtgtctgttcaccgacttcgacagccagaccaacgtgtcccagagcaaggactccgacgtgtacatcaccgataagtgcgtgctggacatgcggagcatggacttcaagagcaactccgccgtggcctggtccaacaagtccgatttcgcctgcgccaacgccttcaacaacagcattatccccgaggacacattcttcccaagcagcgacgtgccctgcggtacccagagttttgggttgttggaccctaaattgtgctatctgttggacggaatcctgttcatttacggagtgatcctgaccgcattgttcctgcgggttaagttttccagatccgcagacgcacccgcttaccaacaagggcagaaccaactctacaatgaacttaatttggggcggagggaagagtacgacgttctggacaaaaggaggggacgagatcccgagatgggcggaaagcctcagcgaaggaagaatccgcaagaggggctttataacgaactccagaaagataaaatggcagaagcctatagtgagattgggatgaagggagaaaggaggaggggtaaaggtcacgatgggttgtaccaaggattgagcacagccactaaagatacctatgatgcgctccacatgcaggccctgccgccaaga

SEQ ID NO: 4304 - DNA, 4014 bp, Artificial Sequence
  Synthetic Polynucloetide
atggccttaccagtgaccgccttgctcctgccgctggccttgctgctccacgccgccaggccggcatgccaggtccagctcgtcgagtccggcggcggcctcgtccaggccggcgactccgtcaccctctcctgcaccgcctccggccgcaccttctcctcctacgccctcgcctggttccgccagcgccccggcaaggagcgcgagttcgtcgccggcctccgctggggcggccccaccaactacgccgactccgtcaaggaccgcttcaccatctccggcgactccgccaagcacaccatgtacctccagatgaactccctcaagcccgaggacaccgccgtctactactgcggctacaaccccggcggctgggccgtcccctcccagtacgagtacgactcctggggccagggcacccaggtcaccgtctcctccggtaccggcggaggcggatctggcggcggaggtagcggtggcggaggatctgaattcgacatccagatgacacagagccctagcagcctgtctgccagcgtgggagacagagtgaccatcacatgcaaggccagcgaccacatcaacaactggctggcctggtatcagcagaagcctggacaggcccctaagctgctgatctacggcgctaccacactggaaacaggcgtgcccagcagattttctggcagcggctctggcaccgactacaccctgacaatatccagcctccagcctgaggacttcgccacctactactgtcagcagagctggaacaccccttggacattcggccagggcaccaagctggaaatcaagagactcgaggggaaaccaattcccaaccctcttctgggactggattcaaccggcagcggcgaggacctgaagaacgtgttcccacctgaggtggccgtgttcgagcctagcgaggccgagatcagccacacccagaaagccaccctcgtgtgcctggctaccggcttctaccccgaccatgtggaactgtcttggtgggtcaacggcaaagaggtgcacagcggcgtgtctaccgacccccagccactgaaagaacagcccgccctgaacgacagccggtactgcctgagcagcagactgagagtgtccgccaccttctggcagaacccccggaaccacttcagatgccaggtgcagttctacggcctgagcgagaacgacgagtggacccaggacagagccaagcccgtgacccagatcgtgtctgccgaagcctggggcagagccgattgcggatcccagagcttcggcctgctggaccccaagctgtgctacctgctggatggcatcctgttcatctacggcgtgatcctgaccgccctgttcctgagagtgaagttcagcagaagcgccgacgcccctgcctaccagcagggacagaaccaactgtacaacgagctgaacctgggcagacgggaagagtacgacgtgctggacaagcggagaggcagggaccctgagatgggcggaaagccccagcggagaaagaacccccaggaaggactgtataacgaactccagaaagacaagatggccgaagcctacagcgagatcggcatgaagggcgagcggagaagaggcaagggccacgatggcctgtaccagggcctgagcaccgccaccaaggacacctatgacgccctgcacatgcaggccctgcctccaagaagggccaagcgatctggatctggagcaacaaacttctcactactcaaacaagcaggtgacgtggaggagaatcccgggcctactagtatggactggatttggcgcatccttttccttgtcggcgctgctaccggcgcccattccgggcccctgttcaatcaagaggtgcagatccctctgaccgagagctactgtggcccctgtcctaagaactggatctgctacaagaacaactgctaccagttcttcgacgagagcaagaattggtacgagagccaggccagctgcatgagccagaatgccagcctgctgaaggtgtacagcaaagaggaccaggacctgctgaaactggtcaagagctaccactggatgggccttgtgcacatccccaccaatggctcttggcagtgggaggacggcagcattctgagccctaacctgctgaccatcatcgagatgcagaagggcgactgcgccctgtacgccagcagctttaagggctacatcgagaattgcagcaccccgaacacctacatctgtatgcagagaaccgttggcggaggcggaagtggaggcggaggatctggcggcggaggctctgacctctttaatcaagaagtccagattccactcaccgaatcctactgcggaccttgtccaaaaaattggatttgttataagaacaactgttatcaattctttgatgagtctaaaaattggtatgagtcccaggcttcctgcatgtctcagaacgcttctctgctgaaagtctactctaaagaagatcaggatctcctgaagctcgtcaagtcttatcattggatggggctcgtccacattcctaccaacggaagctggcaatgggaagatggctccatcctgtctccaaatctgctcacgattattgaaatgcagaaaggggattgtgctctctacgccagctccttcaagggatatattgagaactgtagcacgcccaatacttatatctgtatgcaacggaccgtgggatccggcggcggaggatctggcggaggcggatctgggggcggaggctctttcgaacaagttcagcttcaacagcctggcgctgagctggtcaaacctggcgcttctgtgaagatgagctgcaaagccagcggctacgccttcagcagctactggatcaactggatgaagcagaaacccggccagggactcgaatggatcggccaaatctatcccggcgacggcgacaccaactacaacggcaagttcaagggcagagccacactgaccgccgatacctctagcagcacagcctacatgcagctgagcagcctgaccagcgaagatagcgccgtgtacttctgtgcccggtccatcacaacagtcgtgggctgcgctatggactattggggccagggaacaagcgtgaccgtgtctagtacgcgtgagcagaaactgatctcggaagaggatgggagcggcatccagaaccctgatcctgccgtgtaccagctgcgggatagcaagagcagcgacaagagcgtgtgtctgttcaccgacttcgacagccagaccaacgtgtcccagagcaaggactccgacgtgtacatcaccgataagaccgtgctggacatgcggagcatggacttcaagagcaactccgccgtggcctggtccaacaagtccgatttcgcctgcgccaacgccttcaacaacagcattatccccgaggacacattcttcccaagccccgagagcagctgcggtacccagagttttgggttgttggaccctaaattgtgctatctgttggacggaatcctgttcatttacggagtgatcctgaccgcattgttcctgaggagcaagcggtcacggctgctccacagcgattacatgaatatgacaccacgaagaccgggtcctactcgcaaacactaccaaccctacgcacctccccgcgactttgcagcgtaccgatctcgggttaagttttccagatccgcagacgcacccgcttaccaacaagggcagaaccaactctacaatgaacttaatttggggcggagggaagagtacgacgttctggacaaaaggaggggacgagatcccgagatgggcggaaagcctcagcgaaggaagaatccgcaagaggggctttataacgaactccagaaagataaaatggcagaagcctatagtgagattgggatgaagggagaaaggaggaggggtaaaggtcacgatgggttgtaccaaggattgagcacagccactaaagatacctatgatgcgctccacatgcaggccctgccgccaaga

SEQ ID NO: 4305 - DNA, 4137 bp, Artificial Sequence
  Synthetic Polynucloetide
atggccttaccagtgaccgccttgctcctgccgctggccttgctgctccacgccgccaggccggcatgccaggtccagctcgtcgagtccggcggcggcctcgtccaggccggcgactccgtcaccctctcctgcaccgcctccggccgcaccttctcctcctacgccctcgcctggttccgccagcgccccggcaaggagcgcgagttcgtcgccggcctccgctggggcggccccaccaactacgccgactccgtcaaggaccgcttcaccatctccggcgactccgccaagcacaccatgtacctccagatgaactccctcaagcccgaggacaccgccgtctactactgcggctacaaccccggcggctgggccgtcccctcccagtacgagtacgactcctggggccagggcacccaggtcaccgtctcctccggtaccggcggaggcggatctggcggcggaggtagcggtggcggaggatctgaattcgacatccagatgacacagagccctagcagcctgtctgccagcgtgggagacagagtgaccatcacatgcaaggccagcgaccacatcaacaactggctggcctggtatcagcagaagcctggacaggcccctaagctgctgatctacggcgctaccacactggaaacaggcgtgcccagcagattttctggcagcggctctggcaccgactacaccctgacaatatccagcctccagcctgaggacttcgccacctactactgtcagcagagctggaacaccccttggacattcggccagggcaccaagctggaaatcaagagactcgaggggaaaccaattcccaaccctcttctgggactggattcaaccggcagcggcgaggacctgaagaacgtgttcccacctgaggtggccgtgttcgagcctagcgaggccgagatcagccacacccagaaagccaccctcgtgtgcctggctaccggcttctaccccgaccatgtggaactgtcttggtgggtcaacggcaaagaggtgcacagcggcgtgtctaccgacccccagccactgaaagaacagcccgccctgaacgacagccggtactgcctgagcagcagactgagagtgtccgccaccttctggcagaacccccggaaccacttcagatgccaggtgcagttctacggcctgagcgagaacgacgagtggacccaggacagagccaagcccgtgacccagatcgtgtctgccgaagcctggggcagagccgattgcggatcccagagcttcggcctgctggaccccaagctgtgctacctgctggatggcatcctgttcatctacggcgtgatcctgaccgccctgttcctgaggagtaagaggagcaggctcctgcacagtgactacatgaacatgactccacgccgccccggacccacccgcaagcattaccagccctatgccccaccacgcgacttcgcagcctatcgctccagagtgaagttcagcagaagcgccgacgcccctgcctaccagcagggacagaaccaactgtacaacgagctgaacctgggcagacgggaagagtacgacgtgctggacaagcggagaggcagggaccctgagatgggcggaaagccccagcggagaaagaacccccaggaaggactgtataacgaactccagaaagacaagatggccgaagcctacagcgagatcggcatgaagggcgagcggagaagaggcaagggccacgatggcctgtaccagggcctgagcaccgccaccaaggacacctatgacgccctgcacatgcaggccctgcctccaagaagggccaagcgatctggatctggagcaacaaacttctcactactcaaacaagcaggtgacgtggaggagaatcccgggcctactagtatggactggatttggcgcatccttttccttgtcggcgctgctaccggcgcccattccgggcccctgttcaatcaagaggtgcagatccctctgaccgagagctactgtggcccctgtcctaagaactggatctgctacaagaacaactgctaccagttcttcgacgagagcaagaattggtacgagagccaggccagctgcatgagccagaatgccagcctgctgaaggtgtacagcaaagaggaccaggacctgctgaaactggtcaagagctaccactggatgggccttgtgcacatccccaccaatggctcttggcagtgggaggacggcagcattctgagccctaacctgctgaccatcatcgagatgcagaagggcgactgcgccctgtacgccagcagctttaagggctacatcgagaattgcagcaccccgaacacctacatctgtatgcagagaaccgttggcggaggcggaagtggaggcggaggatctggcggcggaggctctgacctctttaatcaagaagtccagattccactcaccgaatcctactgcggaccttgtccaaaaaattggatttgttataagaacaactgttatcaattctttgatgagtctaaaaattggtatgagtcccaggcttcctgcatgtctcagaacgcttctctgctgaaagtctactctaaagaagatcaggatctcctgaagctcgtcaagtcttatcattggatggggctcgtccacattcctaccaacggaagctggcaatgggaagatggctccatcctgtctccaaatctgctcacgattattgaaatgcagaaaggggattgtgctctctacgccagctccttcaagggatatattgagaactgtagcacgcccaatacttatatctgtatgcaacggaccgtgggatccggcggcggaggatctggcggaggcggatctgggggcggaggctctttcgaacaagttcagcttcaacagcctggcgctgagctggtcaaacctggcgcttctgtgaagatgagctgcaaagccagcggctacgccttcagcagctactggatcaactggatgaagcagaaacccggccagggactcgaatggatcggccaaatctatcccggcgacggcgacaccaactacaacggcaagttcaagggcagagccacactgaccgccgatacctctagcagcacagcctacatgcagctgagcagcctgaccagcgaagatagcgccgtgtacttctgtgcccggtccatcacaacagtcgtgggctgcgctatggactattggggccagggaacaagcgtgaccgtgtctagtacgcgtgagcagaaactgatctcggaagaggatgggagcggcatccagaaccctgatcctgccgtgtaccagctgcgggatagcaagagcagcgacaagagcgtgtgtctgttcaccgacttcgacagccagaccaacgtgtcccagagcaaggactccgacgtgtacatcaccgataagaccgtgctggacatgcggagcatggacttcaagagcaactccgccgtggcctggtccaacaagtccgatttcgcctgcgccaacgccttcaacaacagcattatccccgaggacacattcttcccaagccccgagagcagctgcggtacccagagttttgggttgttggaccctaaattgtgctatctgttggacggaatcctgttcatttacggagtgatcctgaccgcattgttcctgaggagcaagcggtcacggctgctccacagcgattacatgaatatgacaccacgaagaccgggtcctactcgcaaacactaccaaccctacgcacctccccgcgactttgcagcgtaccgatctcgggttaagttttccagatccgcagacgcacccgcttaccaacaagggcagaaccaactctacaatgaacttaatttggggcggagggaagagtacgacgttctggacaaaaggaggggacgagatcccgagatgggcggaaagcctcagcgaaggaagaatccgcaagaggggctttataacgaactccagaaagataaaatggcagaagcctatagtgagattgggatgaagggagaaaggaggaggggtaaaggtcacgatgggttgtaccaaggattgagcacagccactaaagatacctatgatgcgctccacatgcaggccctgccgccaaga

SEQ ID NO: 4306 - DNA, 4020 bp, Artificial Sequence
  Synthetic Polynucloetide
atggccttaccagtgaccgccttgctcctgccgctggccttgctgctccacgccgccaggccggcatgccaggtccagctcgtcgagtccggcggcggcctcgtccaggccggcgactccgtcaccctctcctgcaccgcctccggccgcaccttctcctcctacgccctcgcctggttccgccagcgccccggcaaggagcgcgagttcgtcgccggcctccgctggggcggccccaccaactacgccgactccgtcaaggaccgcttcaccatctccggcgactccgccaagcacaccatgtacctccagatgaactccctcaagcccgaggacaccgccgtctactactgcggctacaaccccggcggctgggccgtcccctcccagtacgagtacgactcctggggccagggcacccaggtcaccgtctcctccggtaccggcggaggcggatctggcggcggaggtagcggtggcggaggatctgaattcgacatccagatgacacagagccctagcagcctgtctgccagcgtgggagacagagtgaccatcacatgcaaggccagcgaccacatcaacaactggctggcctggtatcagcagaagcctggacaggcccctaagctgctgatctacggcgctaccacactggaaacaggcgtgcccagcagattttctggcagcggctctggcaccgactacaccctgacaatatccagcctccagcctgaggacttcgccacctactactgtcagcagagctggaacaccccttggacattcggccagggcaccaagctggaaatcaagagactcgaggggaaaccaattcccaaccctcttctgggactggattcaaccggcagcggcgaggacctgaagaacgtgttcccacctgaggtggccgtgttcgagcctagcgaggccgagatcagccacacccagaaagccaccctcgtgtgcctggctaccggcttctaccccgaccatgtggaactgtcttggtgggtcaacggcaaagaggtgcacagcggcgtgtctaccgacccccagccactgaaagaacagcccgccctgaacgacagccggtactgcctgagcagcagactgagagtgtccgccaccttctggcagaacccccggaaccacttcagatgccaggtgcagttctacggcctgagcgagaacgacgagtggacccaggacagagccaagcccgtgacccagatcgtgtctgccgaagcctggggcagagccgattgcggatcccagagcttcggcctgctggaccccaagctgtgctacctgctggatggcatcctgttcatctacggcgtgatcctgaccgccctgttcctgagagtgaagttcagcagaagcgccgacgcccctgcctaccagcagggacagaaccaactgtacaacgagctgaacctgggcagacgggaagagtacgacgtgctggacaagcggagaggcagggaccctgagatgggcggaaagccccagcggagaaagaacccccaggaaggactgtataacgaactccagaaagacaagatggccgaagcctacagcgagatcggcatgaagggcgagcggagaagaggcaagggccacgatggcctgtaccagggcctgagcaccgccaccaaggacacctatgacgccctgcacatgcaggccctgcctccaagaagggccaagcgatctggatctggagcaacaaacttctcactactcaaacaagcaggtgacgtggaggagaatcccgggcctactagtatggactggatttggcgcatccttttccttgtcggcgctgctaccggcgcccattccgggcccctgttcaatcaagaggtgcagatccctctgaccgagagctactgtggcccctgtcctaagaactggatctgctacaagaacaactgctaccagttcttcgacgagagcaagaattggtacgagagccaggccagctgcatgagccagaatgccagcctgctgaaggtgtacagcaaagaggaccaggacctgctgaaactggtcaagagctaccactggatgggccttgtgcacatccccaccaatggctcttggcagtgggaggacggcagcattctgagccctaacctgctgaccatcatcgagatgcagaagggcgactgcgccctgtacgccagcagctttaagggctacatcgagaattgcagcaccccgaacacctacatctgtatgcagagaaccgttggcggaggcggaagtggaggcggaggatctggcggcggaggctctgacctctttaatcaagaagtccagattccactcaccgaatcctactgcggaccttgtccaaaaaattggatttgttataagaacaactgttatcaattctttgatgagtctaaaaattggtatgagtcccaggcttcctgcatgtctcagaacgcttctctgctgaaagtctactctaaagaagatcaggatctcctgaagctcgtcaagtcttatcattggatggggctcgtccacattcctaccaacggaagctggcaatgggaagatggctccatcctgtctccaaatctgctcacgattattgaaatgcagaaaggggattgtgctctctacgccagctccttcaagggatatattgagaactgtagcacgcccaatacttatatctgtatgcaacggaccgtgggatccggcggcggaggatctggcggaggcggatctgggggcggaggctctttcgaacaagttcagcttcaacagcctggcgctgagctggtcaaacctggcgcttctgtgaagatgagctgcaaagccagcggctacgccttcagcagctactggatcaactggatgaagcagaaacccggccagggactcgaatggatcggccaaatctatcccggcgacggcgacaccaactacaacggcaagttcaagggcagagccacactgaccgccgatacctctagcagcacagcctacatgcagctgagcagcctgaccagcgaagatagcgccgtgtacttctgtgcccggtccatcacaacagtcgtgggctgcgctatggactattggggccagggaacaagcgtgaccgtgtctagtacgcgtgagcagaaactgatctcggaagaggatctggggagcggcatccagaaccctgatcctgccgtgtaccagctgcgggatagcaagagcagcgacaagagcgtgtgtctgttcaccgacttcgacagccagaccaacgtgtcccagagcaaggactccgacgtgtacatcaccgataagaccgtgctggacatgcggagcatggacttcaagagcaactccgccgtggcctggtccaacaagtccgatttcgcctgcgccaacgccttcaacaacagcattatccccgaggacacattcttcccaagccccgagagcagctgcggtacccagagttttgggttgttggaccctaaattgtgctatctgttggacggaatcctgttcatttacggagtgatcctgaccgcattgttcctgaagagaggccggaagaagctgctgtacatcttcaagcagcctttcatgcggcccgtgcagaccacccaggaagaggacggctgctcctgccggttccccgaggaagaagaaggcggctgcgagctgcgggttaagttttccagatccgcagacgcacccgcttaccaacaagggcagaaccaactctacaatgaacttaatttggggcggagggaagagtacgacgttctggacaaaaggaggggacgagatcccgagatgggcggaaagcctcagcgaaggaagaatccgcaagaggggctttataacgaactccagaaagataaaatggcagaagcctatagtgagattgggatgaagggagaaaggaggaggggtaaaggtcacgatgggttgtaccaaggattgagcacagccactaaagatacctatgatgcgctccacatgcaggccctgccgccaaga

SEQ ID NO: 4307 - DNA, 4146 bp, Artificial Sequence
  Synthetic Polynucloetide
atggccttaccagtgaccgccttgctcctgccgctggccttgctgctccacgccgccaggccggcatgccaggtccagctcgtcgagtccggcggcggcctcgtccaggccggcgactccgtcaccctctcctgcaccgcctccggccgcaccttctcctcctacgccctcgcctggttccgccagcgccccggcaaggagcgcgagttcgtcgccggcctccgctggggcggccccaccaactacgccgactccgtcaaggaccgcttcaccatctccggcgactccgccaagcacaccatgtacctccagatgaactccctcaagcccgaggacaccgccgtctactactgcggctacaaccccggcggctgggccgtcccctcccagtacgagtacgactcctggggccagggcacccaggtcaccgtctcctccggtaccggcggaggcggatctggcggcggaggtagcggtggcggaggatctgaattcgacatccagatgacacagagccctagcagcctgtctgccagcgtgggagacagagtgaccatcacatgcaaggccagcgaccacatcaacaactggctggcctggtatcagcagaagcctggacaggcccctaagctgctgatctacggcgctaccacactggaaacaggcgtgcccagcagattttctggcagcggctctggcaccgactacaccctgacaatatccagcctccagcctgaggacttcgccacctactactgtcagcagagctggaacaccccttggacattcggccagggcaccaagctggaaatcaagagactcgaggggaaaccaattcccaaccctcttctgggactggattcaaccggcagcggcgaggacctgaagaacgtgttcccacctgaggtggccgtgttcgagcctagcgaggccgagatcagccacacccagaaagccaccctcgtgtgcctggctaccggcttctaccccgaccatgtggaactgtcttggtgggtcaacggcaaagaggtgcacagcggcgtgtctaccgacccccagccactgaaagaacagcccgccctgaacgacagccggtactgcctgagcagcagactgagagtgtccgccaccttctggcagaacccccggaaccacttcagatgccaggtgcagttctacggcctgagcgagaacgacgagtggacccaggacagagccaagcccgtgacccagatcgtgtctgccgaagcctggggcagagccgattgcggatcccagagcttcggcctgctggaccccaagctgtgctacctgctggatggcatcctgttcatctacggcgtgatcctgaccgccctgttcctgaaacggggcagaaagaaactcctgtatatattcaaacaaccatttatgagaccagtacaaactactcaagaggaagatggctgtagctgccgatttccagaagaagaagaaggaggatgtgaactgagagtgaagttcagcagaagcgccgacgcccctgcctaccagcagggacagaaccaactgtacaacgagctgaacctgggcagacgggaagagtacgacgtgctggacaagcggagaggcagggaccctgagatgggcggaaagccccagcggagaaagaacccccaggaaggactgtataacgaactccagaaagacaagatggccgaagcctacagcgagatcggcatgaagggcgagcggagaagaggcaagggccacgatggcctgtaccagggcctgagcaccgccaccaaggacacctatgacgccctgcacatgcaggccctgcctccaagaagggccaagcgatctggatctggagcaacaaacttctcactactcaaacaagcaggtgacgtggaggagaatcccgggcctactagtatggactggatttggcgcatccttttccttgtcggcgctgctaccggcgcccattccgggcccctgttcaatcaagaggtgcagatccctctgaccgagagctactgtggcccctgtcctaagaactggatctgctacaagaacaactgctaccagttcttcgacgagagcaagaattggtacgagagccaggccagctgcatgagccagaatgccagcctgctgaaggtgtacagcaaagaggaccaggacctgctgaaactggtcaagagctaccactggatgggccttgtgcacatccccaccaatggctcttggcagtgggaggacggcagcattctgagccctaacctgctgaccatcatcgagatgcagaagggcgactgcgccctgtacgccagcagctttaagggctacatcgagaattgcagcaccccgaacacctacatctgtatgcagagaaccgttggcggaggcggaagtggaggcggaggatctggcggcggaggctctgacctctttaatcaagaagtccagattccactcaccgaatcctactgcggaccttgtccaaaaaattggatttgttataagaacaactgttatcaattctttgatgagtctaaaaattggtatgagtcccaggcttcctgcatgtctcagaacgcttctctgctgaaagtctactctaaagaagatcaggatctcctgaagctcgtcaagtcttatcattggatggggctcgtccacattcctaccaacggaagctggcaatgggaagatggctccatcctgtctccaaatctgctcacgattattgaaatgcagaaaggggattgtgctctctacgccagctccttcaagggatatattgagaactgtagcacgcccaatacttatatctgtatgcaacggaccgtgggatccggcggcggaggatctggcggaggcggatctgggggcggaggctctttcgaacaagttcagcttcaacagcctggcgctgagctggtcaaacctggcgcttctgtgaagatgagctgcaaagccagcggctacgccttcagcagctactggatcaactggatgaagcagaaacccggccagggactcgaatggatcggccaaatctatcccggcgacggcgacaccaactacaacggcaagttcaagggcagagccacactgaccgccgatacctctagcagcacagcctacatgcagctgagcagcctgaccagcgaagatagcgccgtgtacttctgtgcccggtccatcacaacagtcgtgggctgcgctatggactattggggccagggaacaagcgtgaccgtgtctagtacgcgtgagcagaaactgatctcggaagaggatctggggagcggcatccagaaccctgatcctgccgtgtaccagctgcgggatagcaagagcagcgacaagagcgtgtgtctgttcaccgacttcgacagccagaccaacgtgtcccagagcaaggactccgacgtgtacatcaccgataagaccgtgctggacatgcggagcatggacttcaagagcaactccgccgtggcctggtccaacaagtccgatttcgcctgcgccaacgccttcaacaacagcattatccccgaggacacattcttcccaagccccgagagcagctgcggtacccagagttttgggttgttggaccctaaattgtgctatctgttggacggaatcctgttcatttacggagtgatcctgaccgcattgttcctgaagagaggccggaagaagctgctgtacatcttcaagcagcctttcatgcggcccgtgcagaccacccaggaagaggacggctgctcctgccggttccccgaggaagaagaaggcggctgcgagctgcgggttaagttttccagatccgcagacgcacccgcttaccaacaagggcagaaccaactctacaatgaacttaatttggggcggagggaagagtacgacgttctggacaaaaggaggggacgagatcccgagatgggcggaaagcctcagcgaaggaagaatccgcaagaggggctttataacgaactccagaaagataaaatggcagaagcctatagtgagattgggatgaagggagaaaggaggaggggtaaaggtcacgatgggttgtaccaaggattgagcacagccactaaagatacctatgatgcgctccacatgcaggccctgccgccaaga

SEQ ID NO: 4308 - DNA, 3819 bp, Artificial Sequence
  Synthetic Polynucloetide
atggccttaccagtgaccgccttgctcctgccgctggccttgctgctccacgccgccaggccggcatgccaggtccagctcgtcgagtccggcggcggcctcgtccaggccggcgactccgtcaccctctcctgcaccgcctccggccgcaccttctcctcctacgccctcgcctggttccgccagcgccccggcaaggagcgcgagttcgtcgccggcctccgctggggcggccccaccaactacgccgactccgtcaaggaccgcttcaccatctccggcgactccgccaagcacaccatgtacctccagatgaactccctcaagcccgaggacaccgccgtctactactgcggctacaaccccggcggctgggccgtcccctcccagtacgagtacgactcctggggccagggcacccaggtcaccgtctcctccggtaccggcggaggcggatctggcggcggaggtagcggtggcggaggatctgaattcgacatccagatgacacagagccctagcagcctgtctgccagcgtgggagacagagtgaccatcacatgcaaggccagcgaccacatcaacaactggctggcctggtatcagcagaagcctggacaggcccctaagctgctgatctacggcgctaccacactggaaacaggcgtgcccagcagattttctggcagcggctctggcaccgactacaccctgacaatatccagcctccagcctgaggacttcgccacctactactgtcagcagagctggaacaccccttggacattcggccagggcaccaagctggaaatcaagagactcgagcagagcttcggcctgctggaccccaagctgtgctacctgctggatggcatcctgttcatctacggcgtgatcctgaccgccctgttcctgagagtgaagttcagcagaagcgccgacgcccctgcctaccagcagggacagaaccaactgtacaacgagctgaacctgggcagacgggaagagtacgacgtgctggacaagcggagaggcagggaccctgagatgggcggaaagccccagcggagaaagaacccccaggaaggactgtataacgaactccagaaagacaagatggccgaagcctacagcgagatcggcatgaagggcgagcggagaagaggcaagggccacgatggcctgtaccagggcctgagcaccgccaccaaggacacctatgacgccctgcacatgcaggccctgcctccaagaagggccaagcgatctggatctggagcaacaaacttctcactactcaaacaagcaggtgacgtggaggagaatcccgggcctactagtatggactggatttggcgcatccttttccttgtcggcgctgctaccggcgcccattccgggcccctgttcaatcaagaggtgcagatccctctgaccgagagctactgtggcccctgtcctaagaactggatctgctacaagaacaactgctaccagttcttcgacgagagcaagaattggtacgagagccaggccagctgcatgagccagaatgccagcctgctgaaggtgtacagcaaagaggaccaggacctgctgaaactggtcaagagctaccactggatgggccttgtgcacatccccaccaatggctcttggcagtgggaggacggcagcattctgagccctaacctgctgaccatcatcgagatgcagaagggcgactgcgccctgtacgccagcagctttaagggctacatcgagaattgcagcaccccgaacacctacatctgtatgcagagaaccgttggcggaggcggaagtggaggcggaggatctggcggcggaggctctgacctctttaatcaagaagtccagattccactcaccgaatcctactgcggaccttgtccaaaaaattggatttgttataagaacaactgttatcaattctttgatgagtctaaaaattggtatgagtcccaggcttcctgcatgtctcagaacgcttctctgctgaaagtctactctaaagaagatcaggatctcctgaagctcgtcaagtcttatcattggatggggctcgtccacattcctaccaacggaagctggcaatgggaagatggctccatcctgtctccaaatctgctcacgattattgaaatgcagaaaggggattgtgctctctacgccagctccttcaagggatatattgagaactgtagcacgcccaatacttatatctgtatgcaacggaccgtgggatccggcggcggaggatctggcggaggcggatctgggggcggaggctctttcgaacaagttcagcttcaacagcctggcgctgagctggtcaaacctggcgcttctgtgaagatgagctgcaaagccagcggctacgccttcagcagctactggatcaactggatgaagcagaaacccggccagggactcgaatggatcggccaaatctatcccggcgacggcgacaccaactacaacggcaagttcaagggcagagccacactgaccgccgatacctctagcagcacagcctacatgcagctgagcagcctgaccagcgaagatagcgccgtgtacttctgtgcccggtccatcacaacagtcgtgggctgcgctatggactattggggccagggaacaagcgtgaccgtgtctagtacgcgtcagagttttgggttgttggaccctaaattgtgctatctgttggacggaatcctgttcatttacggagtgatcctgaccgcattgttcctgcgggttaagttttccagatccgcagacgcacccgcttaccaacaagggcagaaccaactctacaatgaacttaatttggggcggagggaagagtacgacgttctggacaaaaggaggggacgagatcccgagatgggcggaaagcctcagcgaaggaagaatccgcaagaggggctttataacgaactccagaaagataaaatggcagaagcctatagtgagattgggatgaagggagaaaggaggaggggtaaaggtcacgatgggttgtaccaaggattgagcacagccactaaagatacctatgatgcgctccacatgcaggccctgccgccaagacgcgccaagagaagcggatctggcgtgaagcagaccctgaatttcgacctgctgaagctggctggcgacgtggaatccaacccaggcccttctagaggccatatgaccgagtacaagcccacggtgcgcctcgccacccgcgacgacgtccccagggccgtacgcaccctcgccgccgcgttcgccgactaccccgccacgcgccacaccgtcgatccggaccgccacatcgagcgggtcaccgagctgcaagaactcttcctcacgcgcgtcgggctcgacatcggcaaggtgtgggtcgcggacgacggcgccgcggtggcggtctggaccacgccggagagcgtcgaagcgggggcggtgttcgccgagatcggcccgcgcatggccgagttgagcggttcccggctggccgcgcagcaacagatggaaggcctcctggcgccgcaccggcccaaggagcccgcgtggttcctggccaccgtcggcgtctcgcccgaccaccagggcaagggtctgggcagcgccgtcgtgctccccggagtggaggcggccgagcgcgccggggtgcccgccttcctggagacctccgcgccccgcaacctccccttctacgagcggctcggcttcaccgtcaccgccgacgtcgaggtgcccgaaggaccgcgcacctggtgcatgacccgcaagcccggtgcctga

SEQ ID NO: 4309 - DNA, 3291 bp, Artificial Sequence
  Synthetic Polynucloetide
atggccttaccagtgaccgccttgctcctgccgctggccttgctgctccacgccgccaggccggcatgccaggtccagctcgtcgagtccggcggcggcctcgtccaggccggcgactccgtcaccctctcctgcaccgcctccggccgcaccttctcctcctacgccctcgcctggttccgccagcgccccggcaaggagcgcgagttcgtcgccggcctccgctggggcggccccaccaactacgccgactccgtcaaggaccgcttcaccatctccggcgactccgccaagcacaccatgtacctccagatgaactccctcaagcccgaggacaccgccgtctactactgcggctacaaccccggcggctgggccgtcccctcccagtacgagtacgactcctggggccagggcacccaggtcaccgtctcctccggtaccggcggaggcggatctggcggcggaggtagcggtggcggaggatctgaattcgacatccagatgacacagagccctagcagcctgtctgccagcgtgggagacagagtgaccatcacatgcaaggccagcgaccacatcaacaactggctggcctggtatcagcagaagcctggacaggcccctaagctgctgatctacggcgctaccacactggaaacaggcgtgcccagcagattttctggcagcggctctggcaccgactacaccctgacaatatccagcctccagcctgaggacttcgccacctactactgtcagcagagctggaacaccccttggacattcggccagggcaccaagctggaaatcaagagactcgagggacagcctaaggccaatcctaccgtgacactgttccctccaagcagcgaagaactccaggccaacaaggccacacttgtgtgcctgatctccgacttctaccctggggctgtgacagtggcttggaaggccgatggatctcctgtgaaagccggcgtggaaaccaccaagccatccaagcagagcaacaacaaatacgccgccagctcctacctgagcctgacacctgagcagtggaagtcccacagatcctacagctgccaagtgacccacgaaggcagcaccgtggaaaagacagtggcccctacagagtgcagccccatcaagaccgatgtgattacaatggaccccaaggacaactgctccaaggacgccaacgataccctgctgctccagctgaccaacaccagcgcctactacatgtacttgttgctgctgctgaagtccgtggtgtacttcgccatcatcacatgctgcctgctgcggagaaccgccttctgctgcaacggcgagaagtctagggccaagcgatctggatctggagcaacaaacttctcactactcaaacaagcaggtgacgtggaggagaatcccgggcctactagtatggactggatttggcgcatccttttccttgtcggcgctgctaccggcgcccattccgggcccctgttcaatcaagaggtgcagatccctctgaccgagagctactgtggcccctgtcctaagaactggatctgctacaagaacaactgctaccagttcttcgacgagagcaagaattggtacgagagccaggccagctgcatgagccagaatgccagcctgctgaaggtgtacagcaaagaggaccaggacctgctgaaactggtcaagagctaccactggatgggccttgtgcacatccccaccaatggctcttggcagtgggaggacggcagcattctgagccctaacctgctgaccatcatcgagatgcagaagggcgactgcgccctgtacgccagcagctttaagggctacatcgagaattgcagcaccccgaacacctacatctgtatgcagagaaccgttggcggaggcggaagtggaggcggaggatctggcggcggaggctctgacctctttaatcaagaagtccagattccactcaccgaatcctactgcggaccttgtccaaaaaattggatttgttataagaacaactgttatcaattctttgatgagtctaaaaattggtatgagtcccaggcttcctgcatgtctcagaacgcttctctgctgaaagtctactctaaagaagatcaggatctcctgaagctcgtcaagtcttatcattggatggggctcgtccacattcctaccaacggaagctggcaatgggaagatggctccatcctgtctccaaatctgctcacgattattgaaatgcagaaaggggattgtgctctctacgccagctccttcaagggatatattgagaactgtagcacgcccaatacttatatctgtatgcaacggaccgtgggatccggcggcggaggatctggcggaggcggatctgggggcggaggctctttcgaacaagttcagcttcaacagcctggcgctgagctggtcaaacctggcgcttctgtgaagatgagctgcaaagccagcggctacgccttcagcagctactggatcaactggatgaagcagaaacccggccagggactcgaatggatcggccaaatctatcccggcgacggcgacaccaactacaacggcaagttcaagggcagagccacactgaccgccgatacctctagcagcacagcctacatgcagctgagcagcctgaccagcgaagatagcgccgtgtacttctgtgcccggtccatcacaacagtcgtgggctgcgctatggactattggggccagggaacaagcgtgaccgtgtctagtacgcgtgcctctacaaagggaccctccgtgtttcctctggctcccagcagcaagtctacaagcggaggaacagccgctctgggctgcctggtcaaggattactttcccgagcctgtgaccgtgtcctggaatagcggagcactgacaagcggcgtgcacacctttccagccgtgctgcaaagcagcggcctgtactctctgagcagcgtggtcacagtgcctagctctagcctgggcacccagacctacatctgcaatgtgaaccacaagcctagcaacaccaaggtggacaagagagtggaacccaagagctgtgaagtgaaaaccgactccaccgaccacgtgaagcccaaagagacagagaacaccaagcagcccagcaagagctgccacaagcccaaggccatcgtgcacaccgagaaagtgaacatgatgagcctgaccgtgctgggcctgcggatgctgttcgccaaaaccgtggccgtgaacttcctgctgaccgccaagctgttcttcctc

SEQ ID NO: 4310 - DNA, 3225 bp, Artificial Sequence
  Synthetic Polynucloetide
atggccttaccagtgaccgccttgctcctgccgctggccttgctgctccacgccgccaggccggcatgccaggtccagctcgtcgagtccggcggcggcctcgtccaggccggcgactccgtcaccctctcctgcaccgcctccggccgcaccttctcctcctacgccctcgcctggttccgccagcgccccggcaaggagcgcgagttcgtcgccggcctccgctggggcggccccaccaactacgccgactccgtcaaggaccgcttcaccatctccggcgactccgccaagcacaccatgtacctccagatgaactccctcaagcccgaggacaccgccgtctactactgcggctacaaccccggcggctgggccgtcccctcccagtacgagtacgactcctggggccagggcacccaggtcaccgtctcctccggtaccggcggaggcggatctggcggcggaggtagcggtggcggaggatctgaattcgacatccagatgacacagagccctagcagcctgtctgccagcgtgggagacagagtgaccatcacatgcaaggccagcgaccacatcaacaactggctggcctggtatcagcagaagcctggacaggcccctaagctgctgatctacggcgctaccacactggaaacaggcgtgcccagcagattttctggcagcggctctggcaccgactacaccctgacaatatccagcctccagcctgaggacttcgccacctactactgtcagcagagctggaacaccccttggacattcggccagggcaccaagctggaaatcaagagactcgagggacagcctaaggccaatcctaccgtgacactgttccctccaagcagcgaagaactccaggccaacaaggccacacttgtgtgcctgatctccgacttctaccctggggctgtgacagtggcttggaaggccgatggatctcctgtgaaagccggcgtggaaaccaccaagccatccaagcagagcaacaacaaatacgccgccagctcctacctgagcctgacacctgagcagtggaagtcccacagatcctacagctgccaagtgacccacgaaggcagcaccgtggaaaagacagtggcccctacagagtgcagcggcagagccgattgcggcatcaccagcgccagctaccaccagggcgtgctgagcgccaccatcctgtacgagatcctgctgggcaaggccaccctgtacgccgtgctggtgtctgccctggtgctgatggctatggtcaagcggaaggacagccggggaagggccaagcgatctggatctggagcaacaaacttctcactactcaaacaagcaggtgacgtggaggagaatcccgggcctactagtatggactggatttggcgcatccttttccttgtcggcgctgctaccggcgcccattccgggcccctgttcaatcaagaggtgcagatccctctgaccgagagctactgtggcccctgtcctaagaactggatctgctacaagaacaactgctaccagttcttcgacgagagcaagaattggtacgagagccaggccagctgcatgagccagaatgccagcctgctgaaggtgtacagcaaagaggaccaggacctgctgaaactggtcaagagctaccactggatgggccttgtgcacatccccaccaatggctcttggcagtgggaggacggcagcattctgagccctaacctgctgaccatcatcgagatgcagaagggcgactgcgccctgtacgccagcagctttaagggctacatcgagaattgcagcaccccgaacacctacatctgtatgcagagaaccgttggcggaggcggaagtggaggcggaggatctggcggcggaggctctgacctctttaatcaagaagtccagattccactcaccgaatcctactgcggaccttgtccaaaaaattggatttgttataagaacaactgttatcaattctttgatgagtctaaaaattggtatgagtcccaggcttcctgcatgtctcagaacgcttctctgctgaaagtctactctaaagaagatcaggatctcctgaagctcgtcaagtcttatcattggatggggctcgtccacattcctaccaacggaagctggcaatgggaagatggctccatcctgtctccaaatctgctcacgattattgaaatgcagaaaggggattgtgctctctacgccagctccttcaagggatatattgagaactgtagcacgcccaatacttatatctgtatgcaacggaccgtgggatccggcggcggaggatctggcggaggcggatctgggggcggaggctctttcgaacaagttcagcttcaacagcctggcgctgagctggtcaaacctggcgcttctgtgaagatgagctgcaaagccagcggctacgccttcagcagctactggatcaactggatgaagcagaaacccggccagggactcgaatggatcggccaaatctatcccggcgacggcgacaccaactacaacggcaagttcaagggcagagccacactgaccgccgatacctctagcagcacagcctacatgcagctgagcagcctgaccagcgaagatagcgccgtgtacttctgtgcccggtccatcacaacagtcgtgggctgcgctatggactattggggccagggaacaagcgtgaccgtgtctagtacgcgtgcctctacaaagggaccctccgtgtttcctctggctcccagcagcaagtctacaagcggaggaacagccgctctgggctgcctggtcaaggattactttcccgagcctgtgaccgtgtcctggaatagcggagcactgacaagcggcgtgcacacctttccagccgtgctgcaaagcagcggcctgtactctctgagcagcgtggtcacagtgcctagctctagcctgggcacccagacctacatctgcaatgtgaaccacaagcctagcaacaccaaggtggacaagagagtggaacccaagagctgtatccccgaggacacattcttcccaagcagcgacgtgccctgcgacgtgaagctggtggaaaagagcttcgagacagacaccaacctgaacttccagaacctgagcgtgatcggcttcagaatcctgctgctgaaagtggccggctttaacctgctgatgaccctgcggctgtggtccagc

SEQ ID NO: 4311 - DNA, 3225 bp, Artificial Sequence
  Synthetic Polynucloetide
atggccttaccagtgaccgccttgctcctgccgctggccttgctgctccacgccgccaggccggcatgccaggtccagctcgtcgagtccggcggcggcctcgtccaggccggcgactccgtcaccctctcctgcaccgcctccggccgcaccttctcctcctacgccctcgcctggttccgccagcgccccggcaaggagcgcgagttcgtcgccggcctccgctggggcggccccaccaactacgccgactccgtcaaggaccgcttcaccatctccggcgactccgccaagcacaccatgtacctccagatgaactccctcaagcccgaggacaccgccgtctactactgcggctacaaccccggcggctgggccgtcccctcccagtacgagtacgactcctggggccagggcacccaggtcaccgtctcctccggtaccggcggaggcggatctggcggcggaggtagcggtggcggaggatctgaattcgacatccagatgacacagagccctagcagcctgtctgccagcgtgggagacagagtgaccatcacatgcaaggccagcgaccacatcaacaactggctggcctggtatcagcagaagcctggacaggcccctaagctgctgatctacggcgctaccacactggaaacaggcgtgcccagcagattttctggcagcggctctggcaccgactacaccctgacaatatccagcctccagcctgaggacttcgccacctactactgtcagcagagctggaacaccccttggacattcggccagggcaccaagctggaaatcaagagactcgagggacagcctaaggccaatcctaccgtgacactgttccctccaagcagcgaagaactccaggccaacaaggccacacttgtgtgcctgatctccgacttctaccctggggctgtgacagtggcttggaaggccgatggatctcctgtgaaagccggcgtggaaaccaccaagccatccaagcagagcaacaacaaatacgccgccagctcctacctgagcctgacacctgagcagtggaagtcccacagatcctacagctgccaagtgacccacgaaggcagcaccgtggaaaagacagtggcccctacagagtgcagcggcagagccgattgcggctttaccagcgagagctaccagcagggcgtgctgagcgccaccatcctgtacgagatcctgctgggcaaggccaccctgtacgccgtgctggtgtctgccctggtgctgatggctatggtcaagcggaaggacagccggggaagggccaagcgatctggatctggagcaacaaacttctcactactcaaacaagcaggtgacgtggaggagaatcccgggcctactagtatggactggatttggcgcatccttttccttgtcggcgctgctaccggcgcccattccgggcccctgttcaatcaagaggtgcagatccctctgaccgagagctactgtggcccctgtcctaagaactggatctgctacaagaacaactgctaccagttcttcgacgagagcaagaattggtacgagagccaggccagctgcatgagccagaatgccagcctgctgaaggtgtacagcaaagaggaccaggacctgctgaaactggtcaagagctaccactggatgggccttgtgcacatccccaccaatggctcttggcagtgggaggacggcagcattctgagccctaacctgctgaccatcatcgagatgcagaagggcgactgcgccctgtacgccagcagctttaagggctacatcgagaattgcagcaccccgaacacctacatctgtatgcagagaaccgttggcggaggcggaagtggaggcggaggatctggcggcggaggctctgacctctttaatcaagaagtccagattccactcaccgaatcctactgcggaccttgtccaaaaaattggatttgttataagaacaactgttatcaattctttgatgagtctaaaaattggtatgagtcccaggcttcctgcatgtctcagaacgcttctctgctgaaagtctactctaaagaagatcaggatctcctgaagctcgtcaagtcttatcattggatggggctcgtccacattcctaccaacggaagctggcaatgggaagatggctccatcctgtctccaaatctgctcacgattattgaaatgcagaaaggggattgtgctctctacgccagctccttcaagggatatattgagaactgtagcacgcccaatacttatatctgtatgcaacggaccgtgggatccggcggcggaggatctggcggaggcggatctgggggcggaggctctttcgaacaagttcagcttcaacagcctggcgctgagctggtcaaacctggcgcttctgtgaagatgagctgcaaagccagcggctacgccttcagcagctactggatcaactggatgaagcagaaacccggccagggactcgaatggatcggccaaatctatcccggcgacggcgacaccaactacaacggcaagttcaagggcagagccacactgaccgccgatacctctagcagcacagcctacatgcagctgagcagcctgaccagcgaagatagcgccgtgtacttctgtgcccggtccatcacaacagtcgtgggctgcgctatggactattggggccagggaacaagcgtgaccgtgtctagtacgcgtgcctctacaaagggaccctccgtgtttcctctggctcccagcagcaagtctacaagcggaggaacagccgctctgggctgcctggtcaaggattactttcccgagcctgtgaccgtgtcctggaatagcggagcactgacaagcggcgtgcacacctttccagccgtgctgcaaagcagcggcctgtactctctgagcagcgtggtcacagtgcctagctctagcctgggcacccagacctacatctgcaatgtgaaccacaagcctagcaacaccaaggtggacaagagagtggaacccaagagctgtatccccgaggacacattcttcccaagccccgagagcagctgcgacgtgaagctggtggaaaagagcttcgagacagacaccaacctgaacttccagaacctgagcgtgatcggcttcagaatcctgctgctgaaagtggccggctttaacctgctgatgaccctgcggctgtggtccagc

SEQ ID NO: 4312 - DNA, 3120 bp, Artificial Sequence
  Synthetic Polynucloetide
atggccttaccagtgaccgccttgctcctgccgctggccttgctgctccacgccgccaggccggcatgccaggtccagctcgtcgagtccggcggcggcctcgtccaggccggcgactccgtcaccctctcctgcaccgcctccggccgcaccttctcctcctacgccctcgcctggttccgccagcgccccggcaaggagcgcgagttcgtcgccggcctccgctggggcggccccaccaactacgccgactccgtcaaggaccgcttcaccatctccggcgactccgccaagcacaccatgtacctccagatgaactccctcaagcccgaggacaccgccgtctactactgcggctacaaccccggcggctgggccgtcccctcccagtacgagtacgactcctggggccagggcacccaggtcaccgtctcctccctcgagggacagcctaaggccaatcctaccgtgacactgttccctccaagcagcgaagaactccaggccaacaaggccacacttgtgtgcctgatctccgacttctaccctggggctgtgacagtggcttggaaggccgatggatctcctgtgaaagccggcgtggaaaccaccaagccatccaagcagagcaacaacaaatacgccgccagctcctacctgagcctgacacctgagcagtggaagtcccacagatcctacagctgccaagtgacccacgaaggcagcaccgtggaaaagacagtggcccctacagagtgcagcggcagagccgattgcggctttaccagcgagagctaccagcagggcgtgctgagcgccaccatcctgtacgagatcctgctgggcaaggccaccctgtacgccgtgctggtgtctgccctggtgctgatggctatggtcaagcggaaggacagccggggaagggccaagcgatctggatctggagcaacaaacttctcactactcaaacaagcaggtgacgtggaggagaatcccgggcctactagtatggactggatttggcgcatccttttccttgtcggcgctgctaccggcgcgcattccctgttcaatcaagaggtgcagatccctctgaccgagagctactgtggcccctgtcctaagaactggatctgctacaagaacaactgctaccagttcttcgacgagagcaagaattggtacgagagccaggccagctgcatgagccagaatgccagcctgctgaaggtgtacagcaaagaggaccaggacctgctgaaactggtcaagagctaccactggatgggccttgtgcacatccccaccaatggctcttggcagtgggaggacggcagcattctgagccctaacctgctgaccatcatcgagatgcagaagggcgactgcgccctgtacgccagcagctttaagggctacatcgagaattgcagcaccccgaacacctacatctgtatgcagagaaccgttggcggaggcggaagtggaggcggaggatctggcggcggaggctctgacctctttaatcaagaagtccagattccactcaccgaatcctactgcggaccttgtccaaaaaattggatttgttataagaacaactgttatcaattctttgatgagtctaaaaattggtatgagtcccaggcttcctgcatgtctcagaacgcttctctgctgaaagtctactctaaagaagatcaggatctcctgaagctcgtcaagtcttatcattggatggggctcgtccacattcctaccaacggaagctggcaatgggaagatggctccatcctgtctccaaatctgctcacgattattgaaatgcagaaaggggattgtgctctctacgccagctccttcaagggatatattgagaactgtagcacgcccaatacttatatctgtatgcaacggaccgtgacgcgtgcctctacaaagggaccctccgtgtttcctctggctcccagcagcaagtctacaagcggaggaacagccgctctgggctgcctggtcaaggattactttcccgagcctgtgaccgtgtcctggaatagcggagcactgacaagcggcgtgcacacctttccagccgtgctgcaaagcagcggcctgtactctctgagcagcgtggtcacagtgcctagctctagcctgggcacccagacctacatctgcaatgtgaaccacaagcctagcaacaccaaggtggacaagagagtggaacccaagagctgtatccccgaggacacattcttcccaagccccgagagcagctgcgacgtgaagctggtggaaaagagcttcgagacagacaccaacctgaacttccagaacctgagcgtgatcggcttcagaatcctgctgctgaaagtggccggctttaacctgctgatgaccctgcggctgtggtccagccgcgccaagagaagcggatctggcgtgaagcagaccctgaatttcgacctgctgaagctggctggcgacgtggaatccaacccaggcccttctagaggccatatgaccgagtacaagcccacggtgcgcctcgccacccgcgacgacgtccccagggccgtacgcaccctcgccgccgcgttcgccgactaccccgccacgcgccacaccgtcgatccggaccgccacatcgagcgggtcaccgagctgcaagaactcttcctcacgcgcgtcgggctcgacatcggcaaggtgtgggtcgcggacgacggcgccgcggtggcggtctggaccacgccggagagcgtcgaagcgggggcggtgttcgccgagatcggcccgcgcatggccgagttgagcggttcccggctggccgcgcagcaacagatggaaggcctcctggcgccgcaccggcccaaggagcccgcgtggttcctggccaccgtcggcgtctcgcccgaccaccagggcaagggtctgggcagcgccgtcgtgctccccggagtggaggcggccgagcgcgccggggtgcccgccttcctggagacctccgcgccccgcaacctccccttctacgagcggctcggcttcaccgtcaccgccgacgtcgaggtgcccgaaggaccgcgcacctggtgcatgacccgcaagcccggtgcctga

SEQ ID NO: 4313 - DNA, 2418 bp, Artificial Sequence
  Synthetic Polynucloetide
atggccttaccagtgaccgccttgctcctgccgctggccttgctgctccacgccgccaggccggcatgccaggtccagctcgtcgagtccggcggcggcctcgtccaggccggcgactccgtcaccctctcctgcaccgcctccggccgcaccttctcctcctacgccctcgcctggttccgccagcgccccggcaaggagcgcgagttcgtcgccggcctccgctggggcggccccaccaactacgccgactccgtcaaggaccgcttcaccatctccggcgactccgccaagcacaccatgtacctccagatgaactccctcaagcccgaggacaccgccgtctactactgcggctacaaccccggcggctgggccgtcccctcccagtacgagtacgactcctggggccagggcacccaggtcaccgtctcctccctcgagggacagcctaaggccaatcctaccgtgacactgttccctccaagcagcgaagaactccaggccaacaaggccacacttgtgtgcctgatctccgacttctaccctggggctgtgacagtggcttggaaggccgatggatctcctgtgaaagccggcgtggaaaccaccaagccatccaagcagagcaacaacaaatacgccgccagctcctacctgagcctgacacctgagcagtggaagtcccacagatcctacagctgccaagtgacccacgaaggcagcaccgtggaaaagacagtggcccctacagagtgcagcggcagagccgattgcggctttaccagcgagagctaccagcagggcgtgctgagcgccaccatcctgtacgagatcctgctgggcaaggccaccctgtacgccgtgctggtgtctgccctggtgctgatggctatggtcaagcggaaggacagccggggaagggccaagcgatctggatctggagcaacaaacttctcactactcaaacaagcaggtgacgtggaggagaatcccgggcctactagtatggactggatttggcgcatccttttccttgtcggcgctgctaccggcgcgcattccctgttcaatcaagaggtgcagatccctctgaccgagagctactgtggcccctgtcctaagaactggatctgctacaagaacaactgctaccagttcttcgacgagagcaagaattggtacgagagccaggccagctgcatgagccagaatgccagcctgctgaaggtgtacagcaaagaggaccaggacctgctgaaactggtcaagagctaccactggatgggccttgtgcacatccccaccaatggctcttggcagtgggaggacggcagcattctgagccctaacctgctgaccatcatcgagatgcagaagggcgactgcgccctgtacgccagcagctttaagggctacatcgagaattgcagcaccccgaacacctacatctgtatgcagagaaccgttggcggaggcggaagtggaggcggaggatctggcggcggaggctctgacctctttaatcaagaagtccagattccactcaccgaatcctactgcggaccttgtccaaaaaattggatttgttataagaacaactgttatcaattctttgatgagtctaaaaattggtatgagtcccaggcttcctgcatgtctcagaacgcttctctgctgaaagtctactctaaagaagatcaggatctcctgaagctcgtcaagtcttatcattggatggggctcgtccacattcctaccaacggaagctggcaatgggaagatggctccatcctgtctccaaatctgctcacgattattgaaatgcagaaaggggattgtgctctctacgccagctccttcaagggatatattgagaactgtagcacgcccaatacttatatctgtatgcaacggaccgtgacgcgtgcctctacaaagggaccctccgtgtttcctctggctcccagcagcaagtctacaagcggaggaacagccgctctgggctgcctggtcaaggattactttcccgagcctgtgaccgtgtcctggaatagcggagcactgacaagcggcgtgcacacctttccagccgtgctgcaaagcagcggcctgtactctctgagcagcgtggtcacagtgcctagctctagcctgggcacccagacctacatctgcaatgtgaaccacaagcctagcaacaccaaggtggacaagagagtggaacccaagagctgtatccccgaggacacattcttcccaagccccgagagcagctgcgacgtgaagctggtggaaaagagcttcgagacagacaccaacctgaacttccagaacctgagcgtgatcggcttcagaatcctgctgctgaaagtggccggctttaacctgctgatgaccctgcggctgtggtccagc

SEQ ID NO: 4314 - DNA, 2505 bp, Artificial Sequence
  Synthetic Polynucloetide
atggccttaccagtgaccgccttgctcctgccgctggccttgctgctccacgccgccaggccggcatgccaggtccagctcgtcgagtccggcggcggcctcgtccaggccggcgactccgtcaccctctcctgcaccgcctccggccgcaccttctcctcctacgccctcgcctggttccgccagcgccccggcaaggagcgcgagttcgtcgccggcctccgctggggcggccccaccaactacgccgactccgtcaaggaccgcttcaccatctccggcgactccgccaagcacaccatgtacctccagatgaactccctcaagcccgaggacaccgccgtctactactgcggctacaaccccggcggctgggccgtcccctcccagtacgagtacgactcctggggccagggcacccaggtcaccgtctcctccctcgagggatctggcagagccgattgcggctttaccagcgagagctaccagcagggcgtgctgagcgccaccatcctgtacgagatcctgctgggcaaggccaccctgtacgccgtgctggtgtctgccctggtgctgatggctatggtcaagcggaaggacagccggggaagggccaagcgatctggatctggagcaacaaacttctcactactcaaacaagcaggtgacgtggaggagaatcccgggcctactagtatggactggatttggcgcatccttttccttgtcggcgctgctaccggcgcgcattccctgttcaatcaagaggtgcagatccctctgaccgagagctactgtggcccctgtcctaagaactggatctgctacaagaacaactgctaccagttcttcgacgagagcaagaattggtacgagagccaggccagctgcatgagccagaatgccagcctgctgaaggtgtacagcaaagaggaccaggacctgctgaaactggtcaagagctaccactggatgggccttgtgcacatccccaccaatggctcttggcagtgggaggacggcagcattctgagccctaacctgctgaccatcatcgagatgcagaagggcgactgcgccctgtacgccagcagctttaagggctacatcgagaattgcagcaccccgaacacctacatctgtatgcagagaaccgttggcggaggcggaagtggaggcggaggatctggcggcggaggctctgacctctttaatcaagaagtccagattccactcaccgaatcctactgcggaccttgtccaaaaaattggatttgttataagaacaactgttatcaattctttgatgagtctaaaaattggtatgagtcccaggcttcctgcatgtctcagaacgcttctctgctgaaagtctactctaaagaagatcaggatctcctgaagctcgtcaagtcttatcattggatggggctcgtccacattcctaccaacggaagctggcaatgggaagatggctccatcctgtctccaaatctgctcacgattattgaaatgcagaaaggggattgtgctctctacgccagctccttcaagggatatattgagaactgtagcacgcccaatacttatatctgtatgcaacggaccgtgacgcgtggcagcatccccgaggacacattcttcccaagccccgagagcagctgcgacgtgaagctggtggaaaagagcttcgagacagacaccaacctgaacttccagaacctgagcgtgatcggcttcagaatcctgctgctgaaagtggccggctttaacctgctgatgaccctgcggctgtggtccagccgcgccaagagaagcggatctggcgtgaagcagaccctgaatttcgacctgctgaagctggctggcgacgtggaatccaacccaggcccttctagaggccatatgaccgagtacaagcccacggtgcgcctcgccacccgcgacgacgtccccagggccgtacgcaccctcgccgccgcgttcgccgactaccccgccacgcgccacaccgtcgatccggaccgccacatcgagcgggtcaccgagctgcaagaactcttcctcacgcgcgtcgggctcgacatcggcaaggtgtgggtcgcggacgacggcgccgcggtggcggtctggaccacgccggagagcgtcgaagcgggggcggtgttcgccgagatcggcccgcgcatggccgagttgagcggttcccggctggccgcgcagcaacagatggaaggcctcctggcgccgcaccggcccaaggagcccgcgtggttcctggccaccgtcggcgtctcgcccgaccaccagggcaagggtctgggcagcgccgtcgtgctccccggagtggaggcggccgagcgcgccggggtgcccgccttcctggagacctccgcgccccgcaacctccccttctacgagcggctcggcttcaccgtcaccgccgacgtcgaggtgcccgaaggaccgcgcacctggtgcatgacccgcaagcccggtgcctga

SEQ ID NO: 4315 - DNA, 1803 bp, Artificial Sequence
  Synthetic Polynucloetide
atggccttaccagtgaccgccttgctcctgccgctggccttgctgctccacgccgccaggccggcatgccaggtccagctcgtcgagtccggcggcggcctcgtccaggccggcgactccgtcaccctctcctgcaccgcctccggccgcaccttctcctcctacgccctcgcctggttccgccagcgccccggcaaggagcgcgagttcgtcgccggcctccgctggggcggccccaccaactacgccgactccgtcaaggaccgcttcaccatctccggcgactccgccaagcacaccatgtacctccagatgaactccctcaagcccgaggacaccgccgtctactactgcggctacaaccccggcggctgggccgtcccctcccagtacgagtacgactcctggggccagggcacccaggtcaccgtctcctccctcgagggatctggcagagccgattgcggctttaccagcgagagctaccagcagggcgtgctgagcgccaccatcctgtacgagatcctgctgggcaaggccaccctgtacgccgtgctggtgtctgccctggtgctgatggctatggtcaagcggaaggacagccggggaagggccaagcgatctggatctggagcaacaaacttctcactactcaaacaagcaggtgacgtggaggagaatcccgggcctactagtatggactggatttggcgcatccttttccttgtcggcgctgctaccggcgcgcattccctgttcaatcaagaggtgcagatccctctgaccgagagctactgtggcccctgtcctaagaactggatctgctacaagaacaactgctaccagttcttcgacgagagcaagaattggtacgagagccaggccagctgcatgagccagaatgccagcctgctgaaggtgtacagcaaagaggaccaggacctgctgaaactggtcaagagctaccactggatgggccttgtgcacatccccaccaatggctcttggcagtgggaggacggcagcattctgagccctaacctgctgaccatcatcgagatgcagaagggcgactgcgccctgtacgccagcagctttaagggctacatcgagaattgcagcaccccgaacacctacatctgtatgcagagaaccgttggcggaggcggaagtggaggcggaggatctggcggcggaggctctgacctctttaatcaagaagtccagattccactcaccgaatcctactgcggaccttgtccaaaaaattggatttgttataagaacaactgttatcaattctttgatgagtctaaaaattggtatgagtcccaggcttcctgcatgtctcagaacgcttctctgctgaaagtctactctaaagaagatcaggatctcctgaagctcgtcaagtcttatcattggatggggctcgtccacattcctaccaacggaagctggcaatgggaagatggctccatcctgtctccaaatctgctcacgattattgaaatgcagaaaggggattgtgctctctacgccagctccttcaagggatatattgagaactgtagcacgcccaatacttatatctgtatgcaacggaccgtgacgcgtggcagcatccccgaggacacattcttcccaagccccgagagcagctgcgacgtgaagctggtggaaaagagcttcgagacagacaccaacctgaacttccagaacctgagcgtgatcggcttcagaatcctgctgctgaaagtggccggctttaacctgctgatgaccctgcggctgtggtccagc

SEQ ID NO: 4316 - DNA, 2532 bp, Artificial Sequence
  Synthetic Polynucloetide
atggccttaccagtgaccgccttgctcctgccgctggccttgctgctccacgccgccaggccggcatgccaggtccagctcgtcgagtccggcggcggcctcgtccaggccggcgactccgtcaccctctcctgcaccgcctccggccgcaccttctcctcctacgccctcgcctggttccgccagcgccccggcaaggagcgcgagttcgtcgccggcctccgctggggcggccccaccaactacgccgactccgtcaaggaccgcttcaccatctccggcgactccgccaagcacaccatgtacctccagatgaactccctcaagcccgaggacaccgccgtctactactgcggctacaaccccggcggctgggccgtcccctcccagtacgagtacgactcctggggccagggcacccaggtcaccgtctcctccctcgaggacaaaactcacacatgcccaccgtgcccagcaggcagagccgattgcggctttaccagcgagagctaccagcagggcgtgctgagcgccaccatcctgtacgagatcctgctgggcaaggccaccctgtacgccgtgctggtgtctgccctggtgctgatggctatggtcaagcggaaggacagccggggaagggccaagcgatctggatctggagcaacaaacttctcactactcaaacaagcaggtgacgtggaggagaatcccgggcctactagtatggactggatttggcgcatccttttccttgtcggcgctgctaccggcgcgcattccctgttcaatcaagaggtgcagatccctctgaccgagagctactgtggcccctgtcctaagaactggatctgctacaagaacaactgctaccagttcttcgacgagagcaagaattggtacgagagccaggccagctgcatgagccagaatgccagcctgctgaaggtgtacagcaaagaggaccaggacctgctgaaactggtcaagagctaccactggatgggccttgtgcacatccccaccaatggctcttggcagtgggaggacggcagcattctgagccctaacctgctgaccatcatcgagatgcagaagggcgactgcgccctgtacgccagcagctttaagggctacatcgagaattgcagcaccccgaacacctacatctgtatgcagagaaccgttggcggaggcggaagtggaggcggaggatctggcggcggaggctctgacctctttaatcaagaagtccagattccactcaccgaatcctactgcggaccttgtccaaaaaattggatttgttataagaacaactgttatcaattctttgatgagtctaaaaattggtatgagtcccaggcttcctgcatgtctcagaacgcttctctgctgaaagtctactctaaagaagatcaggatctcctgaagctcgtcaagtcttatcattggatggggctcgtccacattcctaccaacggaagctggcaatgggaagatggctccatcctgtctccaaatctgctcacgattattgaaatgcagaaaggggattgtgctctctacgccagctccttcaagggatatattgagaactgtagcacgcccaatacttatatctgtatgcaacggaccgtgacgcgtggcagcatccccgaggacacattcttcccaagccccgagagcagctgcgacgtgaagctggtggaaaagagcttcgagacagacaccaacctgaacttccagaacctgagcgtgatcggcttcagaatcctgctgctgaaagtggccggctttaacctgctgatgaccctgcggctgtggtccagccgcgccaagagaagcggatctggcgtgaagcagaccctgaatttcgacctgctgaagctggctggcgacgtggaatccaacccaggcccttctagaggccatatgaccgagtacaagcccacggtgcgcctcgccacccgcgacgacgtccccagggccgtacgcaccctcgccgccgcgttcgccgactaccccgccacgcgccacaccgtcgatccggaccgccacatcgagcgggtcaccgagctgcaagaactcttcctcacgcgcgtcgggctcgacatcggcaaggtgtgggtcgcggacgacggcgccgcggtggcggtctggaccacgccggagagcgtcgaagcgggggcggtgttcgccgagatcggcccgcgcatggccgagttgagcggttcccggctggccgcgcagcaacagatggaaggcctcctggcgccgcaccggcccaaggagcccgcgtggttcctggccaccgtcggcgtctcgcccgaccaccagggcaagggtctgggcagcgccgtcgtgctccccggagtggaggcggccgagcgcgccggggtgcccgccttcctggagacctccgcgccccgcaacctccccttctacgagcggctcggcttcaccgtcaccgccgacgtcgaggtgcccgaaggaccgcgcacctggtgcatgacccgcaagcccggtgcctga

SEQ ID NO: 4317 - DNA, 2532 bp, Artificial Sequence
  Synthetic Polynucloetide
atggccttaccagtgaccgccttgctcctgccgctggccttgctgctccacgccgccaggccggcatgccaggtccagctcgtcgagtccggcggcggcctcgtccaggccggcgactccgtcaccctctcctgcaccgcctccggccgcaccttctcctcctacgccctcgcctggttccgccagcgccccggcaaggagcgcgagttcgtcgccggcctccgctggggcggccccaccaactacgccgactccgtcaaggaccgcttcaccatctccggcgactccgccaagcacaccatgtacctccagatgaactccctcaagcccgaggacaccgccgtctactactgcggctacaaccccggcggctgggccgtcccctcccagtacgagtacgactcctggggccagggcacccaggtcaccgtctcctccctcgagggatctggcagagccgattgcggctttaccagcgagagctaccagcagggcgtgctgagcgccaccatcctgtacgagatcctgctgggcaaggccaccctgtacgccgtgctggtgtctgccctggtgctgatggctatggtcaagcggaaggacagccggggaagggccaagcgatctggatctggagcaacaaacttctcactactcaaacaagcaggtgacgtggaggagaatcccgggcctactagtatggactggatttggcgcatccttttccttgtcggcgctgctaccggcgcgcattccctgttcaatcaagaggtgcagatccctctgaccgagagctactgtggcccctgtcctaagaactggatctgctacaagaacaactgctaccagttcttcgacgagagcaagaattggtacgagagccaggccagctgcatgagccagaatgccagcctgctgaaggtgtacagcaaagaggaccaggacctgctgaaactggtcaagagctaccactggatgggccttgtgcacatccccaccaatggctcttggcagtgggaggacggcagcattctgagccctaacctgctgaccatcatcgagatgcagaagggcgactgcgccctgtacgccagcagctttaagggctacatcgagaattgcagcaccccgaacacctacatctgtatgcagagaaccgttggcggaggcggaagtggaggcggaggatctggcggcggaggctctgacctctttaatcaagaagtccagattccactcaccgaatcctactgcggaccttgtccaaaaaattggatttgttataagaacaactgttatcaattctttgatgagtctaaaaattggtatgagtcccaggcttcctgcatgtctcagaacgcttctctgctgaaagtctactctaaagaagatcaggatctcctgaagctcgtcaagtcttatcattggatggggctcgtccacattcctaccaacggaagctggcaatgggaagatggctccatcctgtctccaaatctgctcacgattattgaaatgcagaaaggggattgtgctctctacgccagctccttcaagggatatattgagaactgtagcacgcccaatacttatatctgtatgcaacggaccgtgacgcgtgataaaactcatacctgtccgccatgcccggcaatccccgaggacacattcttcccaagccccgagagcagctgcgacgtgaagctggtggaaaagagcttcgagacagacaccaacctgaacttccagaacctgagcgtgatcggcttcagaatcctgctgctgaaagtggccggctttaacctgctgatgaccctgcggctgtggtccagccgcgccaagagaagcggatctggcgtgaagcagaccctgaatttcgacctgctgaagctggctggcgacgtggaatccaacccaggcccttctagaggccatatgaccgagtacaagcccacggtgcgcctcgccacccgcgacgacgtccccagggccgtacgcaccctcgccgccgcgttcgccgactaccccgccacgcgccacaccgtcgatccggaccgccacatcgagcgggtcaccgagctgcaagaactcttcctcacgcgcgtcgggctcgacatcggcaaggtgtgggtcgcggacgacggcgccgcggtggcggtctggaccacgccggagagcgtcgaagcgggggcggtgttcgccgagatcggcccgcgcatggccgagttgagcggttcccggctggccgcgcagcaacagatggaaggcctcctggcgccgcaccggcccaaggagcccgcgtggttcctggccaccgtcggcgtctcgcccgaccaccagggcaagggtctgggcagcgccgtcgtgctccccggagtggaggcggccgagcgcgccggggtgcccgccttcctggagacctccgcgccccgcaacctccccttctacgagcggctcggcttcaccgtcaccgccgacgtcgaggtgcccgaaggaccgcgcacctggtgcatgacccgcaagcccggtgcctga

SEQ ID NO: 4318 - DNA, 2559 bp, Artificial Sequence
  Synthetic Polynucloetide
atggccttaccagtgaccgccttgctcctgccgctggccttgctgctccacgccgccaggccggcatgccaggtccagctcgtcgagtccggcggcggcctcgtccaggccggcgactccgtcaccctctcctgcaccgcctccggccgcaccttctcctcctacgccctcgcctggttccgccagcgccccggcaaggagcgcgagttcgtcgccggcctccgctggggcggccccaccaactacgccgactccgtcaaggaccgcttcaccatctccggcgactccgccaagcacaccatgtacctccagatgaactccctcaagcccgaggacaccgccgtctactactgcggctacaaccccggcggctgggccgtcccctcccagtacgagtacgactcctggggccagggcacccaggtcaccgtctcctccctcgaggacaaaactcacacatgcccaccgtgcccagcaggcagagccgattgcggctttaccagcgagagctaccagcagggcgtgctgagcgccaccatcctgtacgagatcctgctgggcaaggccaccctgtacgccgtgctggtgtctgccctggtgctgatggctatggtcaagcggaaggacagccggggaagggccaagcgatctggatctggagcaacaaacttctcactactcaaacaagcaggtgacgtggaggagaatcccgggcctactagtatggactggatttggcgcatccttttccttgtcggcgctgctaccggcgcgcattccctgttcaatcaagaggtgcagatccctctgaccgagagctactgtggcccctgtcctaagaactggatctgctacaagaacaactgctaccagttcttcgacgagagcaagaattggtacgagagccaggccagctgcatgagccagaatgccagcctgctgaaggtgtacagcaaagaggaccaggacctgctgaaactggtcaagagctaccactggatgggccttgtgcacatccccaccaatggctcttggcagtgggaggacggcagcattctgagccctaacctgctgaccatcatcgagatgcagaagggcgactgcgccctgtacgccagcagctttaagggctacatcgagaattgcagcaccccgaacacctacatctgtatgcagagaaccgttggcggaggcggaagtggaggcggaggatctggcggcggaggctctgacctctttaatcaagaagtccagattccactcaccgaatcctactgcggaccttgtccaaaaaattggatttgttataagaacaactgttatcaattctttgatgagtctaaaaattggtatgagtcccaggcttcctgcatgtctcagaacgcttctctgctgaaagtctactctaaagaagatcaggatctcctgaagctcgtcaagtcttatcattggatggggctcgtccacattcctaccaacggaagctggcaatgggaagatggctccatcctgtctccaaatctgctcacgattattgaaatgcagaaaggggattgtgctctctacgccagctccttcaagggatatattgagaactgtagcacgcccaatacttatatctgtatgcaacggaccgtgacgcgtgataaaactcatacctgtccgccatgcccggcaatccccgaggacacattcttcccaagccccgagagcagctgcgacgtgaagctggtggaaaagagcttcgagacagacaccaacctgaacttccagaacctgagcgtgatcggcttcagaatcctgctgctgaaagtggccggctttaacctgctgatgaccctgcggctgtggtccagccgcgccaagagaagcggatctggcgtgaagcagaccctgaatttcgacctgctgaagctggctggcgacgtggaatccaacccaggcccttctagaggccatatgaccgagtacaagcccacggtgcgcctcgccacccgcgacgacgtccccagggccgtacgcaccctcgccgccgcgttcgccgactaccccgccacgcgccacaccgtcgatccggaccgccacatcgagcgggtcaccgagctgcaagaactcttcctcacgcgcgtcgggctcgacatcggcaaggtgtgggtcgcggacgacggcgccgcggtggcggtctggaccacgccggagagcgtcgaagcgggggcggtgttcgccgagatcggcccgcgcatggccgagttgagcggttcccggctggccgcgcagcaacagatggaaggcctcctggcgccgcaccggcccaaggagcccgcgtggttcctggccaccgtcggcgtctcgcccgaccaccagggcaagggtctgggcagcgccgtcgtgctccccggagtggaggcggccgagcgcgccggggtgcccgccttcctggagacctccgcgccccgcaacctccccttctacgagcggctcggcttcaccgtcaccgccgacgtcgaggtgcccgaaggaccgcgcacctggtgcatgacccgcaagcccggtgcctga

SEQ ID NO: 4319 - DNA, 1857 bp, Artificial Sequence
  Synthetic Polynucloetide
atggccttaccagtgaccgccttgctcctgccgctggccttgctgctccacgccgccaggccggcatgccaggtccagctcgtcgagtccggcggcggcctcgtccaggccggcgactccgtcaccctctcctgcaccgcctccggccgcaccttctcctcctacgccctcgcctggttccgccagcgccccggcaaggagcgcgagttcgtcgccggcctccgctggggcggccccaccaactacgccgactccgtcaaggaccgcttcaccatctccggcgactccgccaagcacaccatgtacctccagatgaactccctcaagcccgaggacaccgccgtctactactgcggctacaaccccggcggctgggccgtcccctcccagtacgagtacgactcctggggccagggcacccaggtcaccgtctcctccctcgaggacaaaactcacacatgcccaccgtgcccagcaggcagagccgattgcggctttaccagcgagagctaccagcagggcgtgctgagcgccaccatcctgtacgagatcctgctgggcaaggccaccctgtacgccgtgctggtgtctgccctggtgctgatggctatggtcaagcggaaggacagccggggaagggccaagcgatctggatctggagcaacaaacttctcactactcaaacaagcaggtgacgtggaggagaatcccgggcctactagtatggactggatttggcgcatccttttccttgtcggcgctgctaccggcgcgcattccctgttcaatcaagaggtgcagatccctctgaccgagagctactgtggcccctgtcctaagaactggatctgctacaagaacaactgctaccagttcttcgacgagagcaagaattggtacgagagccaggccagctgcatgagccagaatgccagcctgctgaaggtgtacagcaaagaggaccaggacctgctgaaactggtcaagagctaccactggatgggccttgtgcacatccccaccaatggctcttggcagtgggaggacggcagcattctgagccctaacctgctgaccatcatcgagatgcagaagggcgactgcgccctgtacgccagcagctttaagggctacatcgagaattgcagcaccccgaacacctacatctgtatgcagagaaccgttggcggaggcggaagtggaggcggaggatctggcggcggaggctctgacctctttaatcaagaagtccagattccactcaccgaatcctactgcggaccttgtccaaaaaattggatttgttataagaacaactgttatcaattctttgatgagtctaaaaattggtatgagtcccaggcttcctgcatgtctcagaacgcttctctgctgaaagtctactctaaagaagatcaggatctcctgaagctcgtcaagtcttatcattggatggggctcgtccacattcctaccaacggaagctggcaatgggaagatggctccatcctgtctccaaatctgctcacgattattgaaatgcagaaaggggattgtgctctctacgccagctccttcaagggatatattgagaactgtagcacgcccaatacttatatctgtatgcaacggaccgtgacgcgtgataaaactcatacctgtccgccatgcccggcaatccccgaggacacattcttcccaagccccgagagcagctgcgacgtgaagctggtggaaaagagcttcgagacagacaccaacctgaacttccagaacctgagcgtgatcggcttcagaatcctgctgctgaaagtggccggctttaacctgctgatgaccctgcggctgtggtccagc

SEQ ID NO: 4320 - DNA, 1830 bp, Artificial Sequence
  Synthetic Polynucloetide
atggccttaccagtgaccgccttgctcctgccgctggccttgctgctccacgccgccaggccggcatgccaggtccagctcgtcgagtccggcggcggcctcgtccaggccggcgactccgtcaccctctcctgcaccgcctccggccgcaccttctcctcctacgccctcgcctggttccgccagcgccccggcaaggagcgcgagttcgtcgccggcctccgctggggcggccccaccaactacgccgactccgtcaaggaccgcttcaccatctccggcgactccgccaagcacaccatgtacctccagatgaactccctcaagcccgaggacaccgccgtctactactgcggctacaaccccggcggctgggccgtcccctcccagtacgagtacgactcctggggccagggcacccaggtcaccgtctcctccctcgagggatctggcagagccgattgcggctttaccagcgagagctaccagcagggcgtgctgagcgccaccatcctgtacgagatcctgctgggcaaggccaccctgtacgccgtgctggtgtctgccctggtgctgatggctatggtcaagcggaaggacagccggggaagggccaagcgatctggatctggagcaacaaacttctcactactcaaacaagcaggtgacgtggaggagaatcccgggcctactagtatggactggatttggcgcatccttttccttgtcggcgctgctaccggcgcgcattccctgttcaatcaagaggtgcagatccctctgaccgagagctactgtggcccctgtcctaagaactggatctgctacaagaacaactgctaccagttcttcgacgagagcaagaattggtacgagagccaggccagctgcatgagccagaatgccagcctgctgaaggtgtacagcaaagaggaccaggacctgctgaaactggtcaagagctaccactggatgggccttgtgcacatccccaccaatggctcttggcagtgggaggacggcagcattctgagccctaacctgctgaccatcatcgagatgcagaagggcgactgcgccctgtacgccagcagctttaagggctacatcgagaattgcagcaccccgaacacctacatctgtatgcagagaaccgttggcggaggcggaagtggaggcggaggatctggcggcggaggctctgacctctttaatcaagaagtccagattccactcaccgaatcctactgcggaccttgtccaaaaaattggatttgttataagaacaactgttatcaattctttgatgagtctaaaaattggtatgagtcccaggcttcctgcatgtctcagaacgcttctctgctgaaagtctactctaaagaagatcaggatctcctgaagctcgtcaagtcttatcattggatggggctcgtccacattcctaccaacggaagctggcaatgggaagatggctccatcctgtctccaaatctgctcacgattattgaaatgcagaaaggggattgtgctctctacgccagctccttcaagggatatattgagaactgtagcacgcccaatacttatatctgtatgcaacggaccgtgacgcgtgataaaactcatacctgtccgccatgcccggcaatccccgaggacacattcttcccaagccccgagagcagctgcgacgtgaagctggtggaaaagagcttcgagacagacaccaacctgaacttccagaacctgagcgtgatcggcttcagaatcctgctgctgaaagtggccggctttaacctgctgatgaccctgcggctgtggtccagc

SEQ ID NO: 4321 - DNA, 3186 bp, Artificial Sequence
  Synthetic Polynucloetide
atggccttaccagtgaccgccttgctcctgccgctggccttgctgctccacgccgccaggccggcatgccaggtccagctcgtcgagtccggcggcggcctcgtccaggccggcgactccgtcaccctctcctgcaccgcctccggccgcaccttctcctcctacgccctcgcctggttccgccagcgccccggcaaggagcgcgagttcgtcgccggcctccgctggggcggccccaccaactacgccgactccgtcaaggaccgcttcaccatctccggcgactccgccaagcacaccatgtacctccagatgaactccctcaagcccgaggacaccgccgtctactactgcggctacaaccccggcggctgggccgtcccctcccagtacgagtacgactcctggggccagggcacccaggtcaccgtctcctccctcgagggacagcctaaggccaatcctaccgtgacactgttccctccaagcagcgaagaactccaggccaacaaggccacacttgtgtgcctgatctccgacttctaccctggggctgtgacagtggcttggaaggccgatggatctcctgtgaaagccggcgtggaaaccaccaagccatccaagcagagcaacaacaaatacgccgccagctcctacctgagcctgacacctgagcagtggaagtcccacagatcctacagctgccaagtgacccacgaaggcagcaccgtggaaaagacagtggcccctacagagtgcagccccatcaagaccgatgtgattacaatggaccccaaggacaactgctccaaggacgccaacgataccctgctgctccagctgaccaacaccagcgcctactacatgtacttgttgctgctgctgaagtccgtggtgtacttcgccatcatcacatgctgcctgctgcggagaaccgccttctgctgcaacggcgagaagtctagggccaagcgatctggatctggagcaacaaacttctcactactcaaacaagcaggtgacgtggaggagaatcccgggcctactagtatggactggatttggcgcatccttttccttgtcggcgctgctaccggcgcgcattccctgttcaatcaagaggtgcagatccctctgaccgagagctactgtggcccctgtcctaagaactggatctgctacaagaacaactgctaccagttcttcgacgagagcaagaattggtacgagagccaggccagctgcatgagccagaatgccagcctgctgaaggtgtacagcaaagaggaccaggacctgctgaaactggtcaagagctaccactggatgggccttgtgcacatccccaccaatggctcttggcagtgggaggacggcagcattctgagccctaacctgctgaccatcatcgagatgcagaagggcgactgcgccctgtacgccagcagctttaagggctacatcgagaattgcagcaccccgaacacctacatctgtatgcagagaaccgttggcggaggcggaagtggaggcggaggatctggcggcggaggctctgacctctttaatcaagaagtccagattccactcaccgaatcctactgcggaccttgtccaaaaaattggatttgttataagaacaactgttatcaattctttgatgagtctaaaaattggtatgagtcccaggcttcctgcatgtctcagaacgcttctctgctgaaagtctactctaaagaagatcaggatctcctgaagctcgtcaagtcttatcattggatggggctcgtccacattcctaccaacggaagctggcaatgggaagatggctccatcctgtctccaaatctgctcacgattattgaaatgcagaaaggggattgtgctctctacgccagctccttcaagggatatattgagaactgtagcacgcccaatacttatatctgtatgcaacggaccgtgacgcgtgcctctacaaagggaccctccgtgtttcctctggctcccagcagcaagtctacaagcggaggaacagccgctctgggctgcctggtcaaggattactttcccgagcctgtgaccgtgtcctggaatagcggagcactgacaagcggcgtgcacacctttccagccgtgctgcaaagcagcggcctgtactctctgagcagcgtggtcacagtgcctagctctagcctgggcacccagacctacatctgcaatgtgaaccacaagcctagcaacaccaaggtggacaagagagtggaacccaagagctgtgaagtgaaaaccgactccaccgaccacgtgaagcccaaagagacagagaacaccaagcagcccagcaagagctgccacaagcccaaggccatcgtgcacaccgagaaagtgaacatgatgagcctgaccgtgctgggcctgcggatgctgttcgccaaaaccgtggccgtgaacttcctgctgaccgccaagctgttcttcctccgcgccaagagaagcggatctggcgtgaagcagaccctgaatttcgacctgctgaagctggctggcgacgtggaatccaacccaggcccttctagaggccatatgaccgagtacaagcccacggtgcgcctcgccacccgcgacgacgtccccagggccgtacgcaccctcgccgccgcgttcgccgactaccccgccacgcgccacaccgtcgatccggaccgccacatcgagcgggtcaccgagctgcaagaactcttcctcacgcgcgtcgggctcgacatcggcaaggtgtgggtcgcggacgacggcgccgcggtggcggtctggaccacgccggagagcgtcgaagcgggggcggtgttcgccgagatcggcccgcgcatggccgagttgagcggttcccggctggccgcgcagcaacagatggaaggcctcctggcgccgcaccggcccaaggagcccgcgtggttcctggccaccgtcggcgtctcgcccgaccaccagggcaagggtctgggcagcgccgtcgtgctccccggagtggaggcggccgagcgcgccggggtgcccgccttcctggagacctccgcgccccgcaacctccccttctacgagcggctcggcttcaccgtcaccgccgacgtcgaggtgcccgaaggaccgcgcacctggtgcatgacccgcaagcccggtgcctga

SEQ ID NO: 4322 - DNA, 2484 bp, Artificial Sequence
  Synthetic Polynucloetide
atggccttaccagtgaccgccttgctcctgccgctggccttgctgctccacgccgccaggccggcatgccaggtccagctcgtcgagtccggcggcggcctcgtccaggccggcgactccgtcaccctctcctgcaccgcctccggccgcaccttctcctcctacgccctcgcctggttccgccagcgccccggcaaggagcgcgagttcgtcgccggcctccgctggggcggccccaccaactacgccgactccgtcaaggaccgcttcaccatctccggcgactccgccaagcacaccatgtacctccagatgaactccctcaagcccgaggacaccgccgtctactactgcggctacaaccccggcggctgggccgtcccctcccagtacgagtacgactcctggggccagggcacccaggtcaccgtctcctccctcgagggacagcctaaggccaatcctaccgtgacactgttccctccaagcagcgaagaactccaggccaacaaggccacacttgtgtgcctgatctccgacttctaccctggggctgtgacagtggcttggaaggccgatggatctcctgtgaaagccggcgtggaaaccaccaagccatccaagcagagcaacaacaaatacgccgccagctcctacctgagcctgacacctgagcagtggaagtcccacagatcctacagctgccaagtgacccacgaaggcagcaccgtggaaaagacagtggcccctacagagtgcagccccatcaagaccgatgtgattacaatggaccccaaggacaactgctccaaggacgccaacgataccctgctgctccagctgaccaacaccagcgcctactacatgtacttgttgctgctgctgaagtccgtggtgtacttcgccatcatcacatgctgcctgctgcggagaaccgccttctgctgcaacggcgagaagtctagggccaagcgatctggatctggagcaacaaacttctcactactcaaacaagcaggtgacgtggaggagaatcccgggcctactagtatggactggatttggcgcatccttttccttgtcggcgctgctaccggcgcgcattccctgttcaatcaagaggtgcagatccctctgaccgagagctactgtggcccctgtcctaagaactggatctgctacaagaacaactgctaccagttcttcgacgagagcaagaattggtacgagagccaggccagctgcatgagccagaatgccagcctgctgaaggtgtacagcaaagaggaccaggacctgctgaaactggtcaagagctaccactggatgggccttgtgcacatccccaccaatggctcttggcagtgggaggacggcagcattctgagccctaacctgctgaccatcatcgagatgcagaagggcgactgcgccctgtacgccagcagctttaagggctacatcgagaattgcagcaccccgaacacctacatctgtatgcagagaaccgttggcggaggcggaagtggaggcggaggatctggcggcggaggctctgacctctttaatcaagaagtccagattccactcaccgaatcctactgcggaccttgtccaaaaaattggatttgttataagaacaactgttatcaattctttgatgagtctaaaaattggtatgagtcccaggcttcctgcatgtctcagaacgcttctctgctgaaagtctactctaaagaagatcaggatctcctgaagctcgtcaagtcttatcattggatggggctcgtccacattcctaccaacggaagctggcaatgggaagatggctccatcctgtctccaaatctgctcacgattattgaaatgcagaaaggggattgtgctctctacgccagctccttcaagggatatattgagaactgtagcacgcccaatacttatatctgtatgcaacggaccgtgacgcgtgcctctacaaagggaccctccgtgtttcctctggctcccagcagcaagtctacaagcggaggaacagccgctctgggctgcctggtcaaggattactttcccgagcctgtgaccgtgtcctggaatagcggagcactgacaagcggcgtgcacacctttccagccgtgctgcaaagcagcggcctgtactctctgagcagcgtggtcacagtgcctagctctagcctgggcacccagacctacatctgcaatgtgaaccacaagcctagcaacaccaaggtggacaagagagtggaacccaagagctgtgaagtgaaaaccgactccaccgaccacgtgaagcccaaagagacagagaacaccaagcagcccagcaagagctgccacaagcccaaggccatcgtgcacaccgagaaagtgaacatgatgagcctgaccgtgctgggcctgcggatgctgttcgccaaaaccgtggccgtgaacttcctgctgaccgccaagctgttcttcctc

SEQ ID NO: 4323 - DNA, 2571 bp, Artificial Sequence
  Synthetic Polynucloetide
atggccttaccagtgaccgccttgctcctgccgctggccttgctgctccacgccgccaggccggcatgccaggtccagctcgtcgagtccggcggcggcctcgtccaggccggcgactccgtcaccctctcctgcaccgcctccggccgcaccttctcctcctacgccctcgcctggttccgccagcgccccggcaaggagcgcgagttcgtcgccggcctccgctggggcggccccaccaactacgccgactccgtcaaggaccgcttcaccatctccggcgactccgccaagcacaccatgtacctccagatgaactccctcaagcccgaggacaccgccgtctactactgcggctacaaccccggcggctgggccgtcccctcccagtacgagtacgactcctggggccagggcacccaggtcaccgtctcctccctcgagggatctcccatcaagaccgatgtgattacaatggaccccaaggacaactgctccaaggacgccaacgataccctgctgctccagctgaccaacaccagcgcctactacatgtacttgttgctgctgctgaagtccgtggtgtacttcgccatcatcacatgctgcctgctgcggagaaccgccttctgctgcaacggcgagaagtctagggccaagcgatctggatctggagcaacaaacttctcactactcaaacaagcaggtgacgtggaggagaatcccgggcctactagtatggactggatttggcgcatccttttccttgtcggcgctgctaccggcgcgcattccctgttcaatcaagaggtgcagatccctctgaccgagagctactgtggcccctgtcctaagaactggatctgctacaagaacaactgctaccagttcttcgacgagagcaagaattggtacgagagccaggccagctgcatgagccagaatgccagcctgctgaaggtgtacagcaaagaggaccaggacctgctgaaactggtcaagagctaccactggatgggccttgtgcacatccccaccaatggctcttggcagtgggaggacggcagcattctgagccctaacctgctgaccatcatcgagatgcagaagggcgactgcgccctgtacgccagcagctttaagggctacatcgagaattgcagcaccccgaacacctacatctgtatgcagagaaccgttggcggaggcggaagtggaggcggaggatctggcggcggaggctctgacctctttaatcaagaagtccagattccactcaccgaatcctactgcggaccttgtccaaaaaattggatttgttataagaacaactgttatcaattctttgatgagtctaaaaattggtatgagtcccaggcttcctgcatgtctcagaacgcttctctgctgaaagtctactctaaagaagatcaggatctcctgaagctcgtcaagtcttatcattggatggggctcgtccacattcctaccaacggaagctggcaatgggaagatggctccatcctgtctccaaatctgctcacgattattgaaatgcagaaaggggattgtgctctctacgccagctccttcaagggatatattgagaactgtagcacgcccaatacttatatctgtatgcaacggaccgtgacgcgtggcagcgaagtgaaaaccgactccaccgaccacgtgaagcccaaagagacagagaacaccaagcagcccagcaagagctgccacaagcccaaggccatcgtgcacaccgagaaagtgaacatgatgagcctgaccgtgctgggcctgcggatgctgttcgccaaaaccgtggccgtgaacttcctgctgaccgccaagctgttcttcctccgcgccaagagaagcggatctggcgtgaagcagaccctgaatttcgacctgctgaagctggctggcgacgtggaatccaacccaggcccttctagaggccatatgaccgagtacaagcccacggtgcgcctcgccacccgcgacgacgtccccagggccgtacgcaccctcgccgccgcgttcgccgactaccccgccacgcgccacaccgtcgatccggaccgccacatcgagcgggtcaccgagctgcaagaactcttcctcacgcgcgtcgggctcgacatcggcaaggtgtgggtcgcggacgacggcgccgcggtggcggtctggaccacgccggagagcgtcgaagcgggggcggtgttcgccgagatcggcccgcgcatggccgagttgagcggttcccggctggccgcgcagcaacagatggaaggcctcctggcgccgcaccggcccaaggagcccgcgtggttcctggccaccgtcggcgtctcgcccgaccaccagggcaagggtctgggcagcgccgtcgtgctccccggagtggaggcggccgagcgcgccggggtgcccgccttcctggagacctccgcgccccgcaacctccccttctacgagcggctcggcttcaccgtcaccgccgacgtcgaggtgcccgaaggaccgcgcacctggtgcatgacccgcaagcccggtgcctga

SEQ ID NO: 4324 - DNA, 1869 bp, Artificial Sequence
  Synthetic Polynucloetide
atggccttaccagtgaccgccttgctcctgccgctggccttgctgctccacgccgccaggccggcatgccaggtccagctcgtcgagtccggcggcggcctcgtccaggccggcgactccgtcaccctctcctgcaccgcctccggccgcaccttctcctcctacgccctcgcctggttccgccagcgccccggcaaggagcgcgagttcgtcgccggcctccgctggggcggccccaccaactacgccgactccgtcaaggaccgcttcaccatctccggcgactccgccaagcacaccatgtacctccagatgaactccctcaagcccgaggacaccgccgtctactactgcggctacaaccccggcggctgggccgtcccctcccagtacgagtacgactcctggggccagggcacccaggtcaccgtctcctccctcgagggatctcccatcaagaccgatgtgattacaatggaccccaaggacaactgctccaaggacgccaacgataccctgctgctccagctgaccaacaccagcgcctactacatgtacttgttgctgctgctgaagtccgtggtgtacttcgccatcatcacatgctgcctgctgcggagaaccgccttctgctgcaacggcgagaagtctagggccaagcgatctggatctggagcaacaaacttctcactactcaaacaagcaggtgacgtggaggagaatcccgggcctactagtatggactggatttggcgcatccttttccttgtcggcgctgctaccggcgcgcattccctgttcaatcaagaggtgcagatccctctgaccgagagctactgtggcccctgtcctaagaactggatctgctacaagaacaactgctaccagttcttcgacgagagcaagaattggtacgagagccaggccagctgcatgagccagaatgccagcctgctgaaggtgtacagcaaagaggaccaggacctgctgaaactggtcaagagctaccactggatgggccttgtgcacatccccaccaatggctcttggcagtgggaggacggcagcattctgagccctaacctgctgaccatcatcgagatgcagaagggcgactgcgccctgtacgccagcagctttaagggctacatcgagaattgcagcaccccgaacacctacatctgtatgcagagaaccgttggcggaggcggaagtggaggcggaggatctggcggcggaggctctgacctctttaatcaagaagtccagattccactcaccgaatcctactgcggaccttgtccaaaaaattggatttgttataagaacaactgttatcaattctttgatgagtctaaaaattggtatgagtcccaggcttcctgcatgtctcagaacgcttctctgctgaaagtctactctaaagaagatcaggatctcctgaagctcgtcaagtcttatcattggatggggctcgtccacattcctaccaacggaagctggcaatgggaagatggctccatcctgtctccaaatctgctcacgattattgaaatgcagaaaggggattgtgctctctacgccagctccttcaagggatatattgagaactgtagcacgcccaatacttatatctgtatgcaacggaccgtgacgcgtggcagcgaagtgaaaaccgactccaccgaccacgtgaagcccaaagagacagagaacaccaagcagcccagcaagagctgccacaagcccaaggccatcgtgcacaccgagaaagtgaacatgatgagcctgaccgtgctgggcctgcggatgctgttcgccaaaaccgtggccgtgaacttcctgctgaccgccaagctgttcttcctc

SEQ ID NO: 4325 - DNA, 2598 bp, Artificial Sequence
  Synthetic Polynucloetide
atggccttaccagtgaccgccttgctcctgccgctggccttgctgctccacgccgccaggccggcatgccaggtccagctcgtcgagtccggcggcggcctcgtccaggccggcgactccgtcaccctctcctgcaccgcctccggccgcaccttctcctcctacgccctcgcctggttccgccagcgccccggcaaggagcgcgagttcgtcgccggcctccgctggggcggccccaccaactacgccgactccgtcaaggaccgcttcaccatctccggcgactccgccaagcacaccatgtacctccagatgaactccctcaagcccgaggacaccgccgtctactactgcggctacaaccccggcggctgggccgtcccctcccagtacgagtacgactcctggggccagggcacccaggtcaccgtctcctccctcgaggacaaaactcacacatgcccaccgtgcccagcacccatcaagaccgatgtgattacaatggaccccaaggacaactgctccaaggacgccaacgataccctgctgctccagctgaccaacaccagcgcctactacatgtacttgttgctgctgctgaagtccgtggtgtacttcgccatcatcacatgctgcctgctgcggagaaccgccttctgctgcaacggcgagaagtctagggccaagcgatctggatctggagcaacaaacttctcactactcaaacaagcaggtgacgtggaggagaatcccgggcctactagtatggactggatttggcgcatccttttccttgtcggcgctgctaccggcgcgcattccctgttcaatcaagaggtgcagatccctctgaccgagagctactgtggcccctgtcctaagaactggatctgctacaagaacaactgctaccagttcttcgacgagagcaagaattggtacgagagccaggccagctgcatgagccagaatgccagcctgctgaaggtgtacagcaaagaggaccaggacctgctgaaactggtcaagagctaccactggatgggccttgtgcacatccccaccaatggctcttggcagtgggaggacggcagcattctgagccctaacctgctgaccatcatcgagatgcagaagggcgactgcgccctgtacgccagcagctttaagggctacatcgagaattgcagcaccccgaacacctacatctgtatgcagagaaccgttggcggaggcggaagtggaggcggaggatctggcggcggaggctctgacctctttaatcaagaagtccagattccactcaccgaatcctactgcggaccttgtccaaaaaattggatttgttataagaacaactgttatcaattctttgatgagtctaaaaattggtatgagtcccaggcttcctgcatgtctcagaacgcttctctgctgaaagtctactctaaagaagatcaggatctcctgaagctcgtcaagtcttatcattggatggggctcgtccacattcctaccaacggaagctggcaatgggaagatggctccatcctgtctccaaatctgctcacgattattgaaatgcagaaaggggattgtgctctctacgccagctccttcaagggatatattgagaactgtagcacgcccaatacttatatctgtatgcaacggaccgtgacgcgtggcagcgaagtgaaaaccgactccaccgaccacgtgaagcccaaagagacagagaacaccaagcagcccagcaagagctgccacaagcccaaggccatcgtgcacaccgagaaagtgaacatgatgagcctgaccgtgctgggcctgcggatgctgttcgccaaaaccgtggccgtgaacttcctgctgaccgccaagctgttcttcctccgcgccaagagaagcggatctggcgtgaagcagaccctgaatttcgacctgctgaagctggctggcgacgtggaatccaacccaggcccttctagaggccatatgaccgagtacaagcccacggtgcgcctcgccacccgcgacgacgtccccagggccgtacgcaccctcgccgccgcgttcgccgactaccccgccacgcgccacaccgtcgatccggaccgccacatcgagcgggtcaccgagctgcaagaactcttcctcacgcgcgtcgggctcgacatcggcaaggtgtgggtcgcggacgacggcgccgcggtggcggtctggaccacgccggagagcgtcgaagcgggggcggtgttcgccgagatcggcccgcgcatggccgagttgagcggttcccggctggccgcgcagcaacagatggaaggcctcctggcgccgcaccggcccaaggagcccgcgtggttcctggccaccgtcggcgtctcgcccgaccaccagggcaagggtctgggcagcgccgtcgtgctccccggagtggaggcggccgagcgcgccggggtgcccgccttcctggagacctccgcgccccgcaacctccccttctacgagcggctcggcttcaccgtcaccgccgacgtcgaggtgcccgaaggaccgcgcacctggtgcatgacccgcaagcccggtgcctga

SEQ ID NO: 4326 - DNA, 2598 bp, Artificial Sequence
  Synthetic Polynucloetide
atggccttaccagtgaccgccttgctcctgccgctggccttgctgctccacgccgccaggccggcatgccaggtccagctcgtcgagtccggcggcggcctcgtccaggccggcgactccgtcaccctctcctgcaccgcctccggccgcaccttctcctcctacgccctcgcctggttccgccagcgccccggcaaggagcgcgagttcgtcgccggcctccgctggggcggccccaccaactacgccgactccgtcaaggaccgcttcaccatctccggcgactccgccaagcacaccatgtacctccagatgaactccctcaagcccgaggacaccgccgtctactactgcggctacaaccccggcggctgggccgtcccctcccagtacgagtacgactcctggggccagggcacccaggtcaccgtctcctccctcgagggatctcccatcaagaccgatgtgattacaatggaccccaaggacaactgctccaaggacgccaacgataccctgctgctccagctgaccaacaccagcgcctactacatgtacttgttgctgctgctgaagtccgtggtgtacttcgccatcatcacatgctgcctgctgcggagaaccgccttctgctgcaacggcgagaagtctagggccaagcgatctggatctggagcaacaaacttctcactactcaaacaagcaggtgacgtggaggagaatcccgggcctactagtatggactggatttggcgcatccttttccttgtcggcgctgctaccggcgcgcattccctgttcaatcaagaggtgcagatccctctgaccgagagctactgtggcccctgtcctaagaactggatctgctacaagaacaactgctaccagttcttcgacgagagcaagaattggtacgagagccaggccagctgcatgagccagaatgccagcctgctgaaggtgtacagcaaagaggaccaggacctgctgaaactggtcaagagctaccactggatgggccttgtgcacatccccaccaatggctcttggcagtgggaggacggcagcattctgagccctaacctgctgaccatcatcgagatgcagaagggcgactgcgccctgtacgccagcagctttaagggctacatcgagaattgcagcaccccgaacacctacatctgtatgcagagaaccgttggcggaggcggaagtggaggcggaggatctggcggcggaggctctgacctctttaatcaagaagtccagattccactcaccgaatcctactgcggaccttgtccaaaaaattggatttgttataagaacaactgttatcaattctttgatgagtctaaaaattggtatgagtcccaggcttcctgcatgtctcagaacgcttctctgctgaaagtctactctaaagaagatcaggatctcctgaagctcgtcaagtcttatcattggatggggctcgtccacattcctaccaacggaagctggcaatgggaagatggctccatcctgtctccaaatctgctcacgattattgaaatgcagaaaggggattgtgctctctacgccagctccttcaagggatatattgagaactgtagcacgcccaatacttatatctgtatgcaacggaccgtgacgcgtgataaaactcatacctgtccgccatgcccggcagaagtgaaaaccgactccaccgaccacgtgaagcccaaagagacagagaacaccaagcagcccagcaagagctgccacaagcccaaggccatcgtgcacaccgagaaagtgaacatgatgagcctgaccgtgctgggcctgcggatgctgttcgccaaaaccgtggccgtgaacttcctgctgaccgccaagctgttcttcctccgcgccaagagaagcggatctggcgtgaagcagaccctgaatttcgacctgctgaagctggctggcgacgtggaatccaacccaggcccttctagaggccatatgaccgagtacaagcccacggtgcgcctcgccacccgcgacgacgtccccagggccgtacgcaccctcgccgccgcgttcgccgactaccccgccacgcgccacaccgtcgatccggaccgccacatcgagcgggtcaccgagctgcaagaactcttcctcacgcgcgtcgggctcgacatcggcaaggtgtgggtcgcggacgacggcgccgcggtggcggtctggaccacgccggagagcgtcgaagcgggggcggtgttcgccgagatcggcccgcgcatggccgagttgagcggttcccggctggccgcgcagcaacagatggaaggcctcctggcgccgcaccggcccaaggagcccgcgtggttcctggccaccgtcggcgtctcgcccgaccaccagggcaagggtctgggcagcgccgtcgtgctccccggagtggaggcggccgagcgcgccggggtgcccgccttcctggagacctccgcgccccgcaacctccccttctacgagcggctcggcttcaccgtcaccgccgacgtcgaggtgcccgaaggaccgcgcacctggtgcatgacccgcaagcccggtgcctga

SEQ ID NO: 4327 - DNA, 2625 bp, Artificial Sequence
  Synthetic Polynucloetide
atggccttaccagtgaccgccttgctcctgccgctggccttgctgctccacgccgccaggccggcatgccaggtccagctcgtcgagtccggcggcggcctcgtccaggccggcgactccgtcaccctctcctgcaccgcctccggccgcaccttctcctcctacgccctcgcctggttccgccagcgccccggcaaggagcgcgagttcgtcgccggcctccgctggggcggccccaccaactacgccgactccgtcaaggaccgcttcaccatctccggcgactccgccaagcacaccatgtacctccagatgaactccctcaagcccgaggacaccgccgtctactactgcggctacaaccccggcggctgggccgtcccctcccagtacgagtacgactcctggggccagggcacccaggtcaccgtctcctccctcgaggacaaaactcacacatgcccaccgtgcccagcacccatcaagaccgatgtgattacaatggaccccaaggacaactgctccaaggacgccaacgataccctgctgctccagctgaccaacaccagcgcctactacatgtacttgttgctgctgctgaagtccgtggtgtacttcgccatcatcacatgctgcctgctgcggagaaccgccttctgctgcaacggcgagaagtctagggccaagcgatctggatctggagcaacaaacttctcactactcaaacaagcaggtgacgtggaggagaatcccgggcctactagtatggactggatttggcgcatccttttccttgtcggcgctgctaccggcgcgcattccctgttcaatcaagaggtgcagatccctctgaccgagagctactgtggcccctgtcctaagaactggatctgctacaagaacaactgctaccagttcttcgacgagagcaagaattggtacgagagccaggccagctgcatgagccagaatgccagcctgctgaaggtgtacagcaaagaggaccaggacctgctgaaactggtcaagagctaccactggatgggccttgtgcacatccccaccaatggctcttggcagtgggaggacggcagcattctgagccctaacctgctgaccatcatcgagatgcagaagggcgactgcgccctgtacgccagcagctttaagggctacatcgagaattgcagcaccccgaacacctacatctgtatgcagagaaccgttggcggaggcggaagtggaggcggaggatctggcggcggaggctctgacctctttaatcaagaagtccagattccactcaccgaatcctactgcggaccttgtccaaaaaattggatttgttataagaacaactgttatcaattctttgatgagtctaaaaattggtatgagtcccaggcttcctgcatgtctcagaacgcttctctgctgaaagtctactctaaagaagatcaggatctcctgaagctcgtcaagtcttatcattggatggggctcgtccacattcctaccaacggaagctggcaatgggaagatggctccatcctgtctccaaatctgctcacgattattgaaatgcagaaaggggattgtgctctctacgccagctccttcaagggatatattgagaactgtagcacgcccaatacttatatctgtatgcaacggaccgtgacgcgtgataaaactcatacctgtccgccatgcccggcagaagtgaaaaccgactccaccgaccacgtgaagcccaaagagacagagaacaccaagcagcccagcaagagctgccacaagcccaaggccatcgtgcacaccgagaaagtgaacatgatgagcctgaccgtgctgggcctgcggatgctgttcgccaaaaccgtggccgtgaacttcctgctgaccgccaagctgttcttcctccgcgccaagagaagcggatctggcgtgaagcagaccctgaatttcgacctgctgaagctggctggcgacgtggaatccaacccaggcccttctagaggccatatgaccgagtacaagcccacggtgcgcctcgccacccgcgacgacgtccccagggccgtacgcaccctcgccgccgcgttcgccgactaccccgccacgcgccacaccgtcgatccggaccgccacatcgagcgggtcaccgagctgcaagaactcttcctcacgcgcgtcgggctcgacatcggcaaggtgtgggtcgcggacgacggcgccgcggtggcggtctggaccacgccggagagcgtcgaagcgggggcggtgttcgccgagatcggcccgcgcatggccgagttgagcggttcccggctggccgcgcagcaacagatggaaggcctcctggcgccgcaccggcccaaggagcccgcgtggttcctggccaccgtcggcgtctcgcccgaccaccagggcaagggtctgggcagcgccgtcgtgctccccggagtggaggcggccgagcgcgccggggtgcccgccttcctggagacctccgcgccccgcaacctccccttctacgagcggctcggcttcaccgtcaccgccgacgtcgaggtgcccgaaggaccgcgcacctggtgcatgacccgcaagcccggtgcctga

SEQ ID NO: 4328 - DNA, 1923 bp, Artificial Sequence
  Synthetic Polynucloetide
atggccttaccagtgaccgccttgctcctgccgctggccttgctgctccacgccgccaggccggcatgccaggtccagctcgtcgagtccggcggcggcctcgtccaggccggcgactccgtcaccctctcctgcaccgcctccggccgcaccttctcctcctacgccctcgcctggttccgccagcgccccggcaaggagcgcgagttcgtcgccggcctccgctggggcggccccaccaactacgccgactccgtcaaggaccgcttcaccatctccggcgactccgccaagcacaccatgtacctccagatgaactccctcaagcccgaggacaccgccgtctactactgcggctacaaccccggcggctgggccgtcccctcccagtacgagtacgactcctggggccagggcacccaggtcaccgtctcctccctcgaggacaaaactcacacatgcccaccgtgcccagcacccatcaagaccgatgtgattacaatggaccccaaggacaactgctccaaggacgccaacgataccctgctgctccagctgaccaacaccagcgcctactacatgtacttgttgctgctgctgaagtccgtggtgtacttcgccatcatcacatgctgcctgctgcggagaaccgccttctgctgcaacggcgagaagtctagggccaagcgatctggatctggagcaacaaacttctcactactcaaacaagcaggtgacgtggaggagaatcccgggcctactagtatggactggatttggcgcatccttttccttgtcggcgctgctaccggcgcgcattccctgttcaatcaagaggtgcagatccctctgaccgagagctactgtggcccctgtcctaagaactggatctgctacaagaacaactgctaccagttcttcgacgagagcaagaattggtacgagagccaggccagctgcatgagccagaatgccagcctgctgaaggtgtacagcaaagaggaccaggacctgctgaaactggtcaagagctaccactggatgggccttgtgcacatccccaccaatggctcttggcagtgggaggacggcagcattctgagccctaacctgctgaccatcatcgagatgcagaagggcgactgcgccctgtacgccagcagctttaagggctacatcgagaattgcagcaccccgaacacctacatctgtatgcagagaaccgttggcggaggcggaagtggaggcggaggatctggcggcggaggctctgacctctttaatcaagaagtccagattccactcaccgaatcctactgcggaccttgtccaaaaaattggatttgttataagaacaactgttatcaattctttgatgagtctaaaaattggtatgagtcccaggcttcctgcatgtctcagaacgcttctctgctgaaagtctactctaaagaagatcaggatctcctgaagctcgtcaagtcttatcattggatggggctcgtccacattcctaccaacggaagctggcaatgggaagatggctccatcctgtctccaaatctgctcacgattattgaaatgcagaaaggggattgtgctctctacgccagctccttcaagggatatattgagaactgtagcacgcccaatacttatatctgtatgcaacggaccgtgacgcgtgataaaactcatacctgtccgccatgcccggcagaagtgaaaaccgactccaccgaccacgtgaagcccaaagagacagagaacaccaagcagcccagcaagagctgccacaagcccaaggccatcgtgcacaccgagaaagtgaacatgatgagcctgaccgtgctgggcctgcggatgctgttcgccaaaaccgtggccgtgaacttcctgctgaccgccaagctgttcttcctc

SEQ ID NO: 4329 - DNA, 1896 bp, Artificial Sequence
  Synthetic Polynucloetide
atggccttaccagtgaccgccttgctcctgccgctggccttgctgctccacgccgccaggccggcatgccaggtccagctcgtcgagtccggcggcggcctcgtccaggccggcgactccgtcaccctctcctgcaccgcctccggccgcaccttctcctcctacgccctcgcctggttccgccagcgccccggcaaggagcgcgagttcgtcgccggcctccgctggggcggccccaccaactacgccgactccgtcaaggaccgcttcaccatctccggcgactccgccaagcacaccatgtacctccagatgaactccctcaagcccgaggacaccgccgtctactactgcggctacaaccccggcggctgggccgtcccctcccagtacgagtacgactcctggggccagggcacccaggtcaccgtctcctccctcgagggatctcccatcaagaccgatgtgattacaatggaccccaaggacaactgctccaaggacgccaacgataccctgctgctccagctgaccaacaccagcgcctactacatgtacttgttgctgctgctgaagtccgtggtgtacttcgccatcatcacatgctgcctgctgcggagaaccgccttctgctgcaacggcgagaagtctagggccaagcgatctggatctggagcaacaaacttctcactactcaaacaagcaggtgacgtggaggagaatcccgggcctactagtatggactggatttggcgcatccttttccttgtcggcgctgctaccggcgcgcattccctgttcaatcaagaggtgcagatccctctgaccgagagctactgtggcccctgtcctaagaactggatctgctacaagaacaactgctaccagttcttcgacgagagcaagaattggtacgagagccaggccagctgcatgagccagaatgccagcctgctgaaggtgtacagcaaagaggaccaggacctgctgaaactggtcaagagctaccactggatgggccttgtgcacatccccaccaatggctcttggcagtgggaggacggcagcattctgagccctaacctgctgaccatcatcgagatgcagaagggcgactgcgccctgtacgccagcagctttaagggctacatcgagaattgcagcaccccgaacacctacatctgtatgcagagaaccgttggcggaggcggaagtggaggcggaggatctggcggcggaggctctgacctctttaatcaagaagtccagattccactcaccgaatcctactgcggaccttgtccaaaaaattggatttgttataagaacaactgttatcaattctttgatgagtctaaaaattggtatgagtcccaggcttcctgcatgtctcagaacgcttctctgctgaaagtctactctaaagaagatcaggatctcctgaagctcgtcaagtcttatcattggatggggctcgtccacattcctaccaacggaagctggcaatgggaagatggctccatcctgtctccaaatctgctcacgattattgaaatgcagaaaggggattgtgctctctacgccagctccttcaagggatatattgagaactgtagcacgcccaatacttatatctgtatgcaacggaccgtgacgcgtgataaaactcatacctgtccgccatgcccggcagaagtgaaaaccgactccaccgaccacgtgaagcccaaagagacagagaacaccaagcagcccagcaagagctgccacaagcccaaggccatcgtgcacaccgagaaagtgaacatgatgagcctgaccgtgctgggcctgcggatgctgttcgccaaaaccgtggccgtgaacttcctgctgaccgccaagctgttcttcctc

SEQ ID NO: 4330 - DNA, 2547 bp, Artificial Sequence
  Synthetic Polynucloetide
atggccttaccagtgaccgccttgctcctgccgctggccttgctgctccacgccgccaggccggcatgccaggtccagctcgtcgagtccggcggcggcctcgtccaggccggcgactccgtcaccctctcctgcaccgcctccggccgcaccttctcctcctacgccctcgcctggttccgccagcgccccggcaaggagcgcgagttcgtcgccggcctccgctggggcggccccaccaactacgccgactccgtcaaggaccgcttcaccatctccggcgactccgccaagcacaccatgtacctccagatgaactccctcaagcccgaggacaccgccgtctactactgcggctacaaccccggcggctgggccgtcccctcccagtacgagtacgactcctggggccagggcacccaggtcaccgtctcctccctcgagggatctatggaccccaaggacaactgctccaaggacgccaacgataccctgctgctccagctgaccaacaccagcgcctactacatgtacttgttgctgctgctgaagtccgtggtgtacttcgccatcatcacatgctgcctgctgcggagaaccgccttctgctgcaacggcgagaagtctagggccaagcgatctggatctggagcaacaaacttctcactactcaaacaagcaggtgacgtggaggagaatcccgggcctactagtatggactggatttggcgcatccttttccttgtcggcgctgctaccggcgcgcattccctgttcaatcaagaggtgcagatccctctgaccgagagctactgtggcccctgtcctaagaactggatctgctacaagaacaactgctaccagttcttcgacgagagcaagaattggtacgagagccaggccagctgcatgagccagaatgccagcctgctgaaggtgtacagcaaagaggaccaggacctgctgaaactggtcaagagctaccactggatgggccttgtgcacatccccaccaatggctcttggcagtgggaggacggcagcattctgagccctaacctgctgaccatcatcgagatgcagaagggcgactgcgccctgtacgccagcagctttaagggctacatcgagaattgcagcaccccgaacacctacatctgtatgcagagaaccgttggcggaggcggaagtggaggcggaggatctggcggcggaggctctgacctctttaatcaagaagtccagattccactcaccgaatcctactgcggaccttgtccaaaaaattggatttgttataagaacaactgttatcaattctttgatgagtctaaaaattggtatgagtcccaggcttcctgcatgtctcagaacgcttctctgctgaaagtctactctaaagaagatcaggatctcctgaagctcgtcaagtcttatcattggatggggctcgtccacattcctaccaacggaagctggcaatgggaagatggctccatcctgtctccaaatctgctcacgattattgaaatgcagaaaggggattgtgctctctacgccagctccttcaagggatatattgagaactgtagcacgcccaatacttatatctgtatgcaacggaccgtgacgcgtggcagcgaagtgaaaaccgactccaccgaccacgtgaagcccaaagagacagagaacaccaagcagcccagcaagagctgccacaagcccaaggccatcgtgcacaccgagaaagtgaacatgatgagcctgaccgtgctgggcctgcggatgctgttcgccaaaaccgtggccgtgaacttcctgctgaccgccaagctgttcttcctccgcgccaagagaagcggatctggcgtgaagcagaccctgaatttcgacctgctgaagctggctggcgacgtggaatccaacccaggcccttctagaggccatatgaccgagtacaagcccacggtgcgcctcgccacccgcgacgacgtccccagggccgtacgcaccctcgccgccgcgttcgccgactaccccgccacgcgccacaccgtcgatccggaccgccacatcgagcgggtcaccgagctgcaagaactcttcctcacgcgcgtcgggctcgacatcggcaaggtgtgggtcgcggacgacggcgccgcggtggcggtctggaccacgccggagagcgtcgaagcgggggcggtgttcgccgagatcggcccgcgcatggccgagttgagcggttcccggctggccgcgcagcaacagatggaaggcctcctggcgccgcaccggcccaaggagcccgcgtggttcctggccaccgtcggcgtctcgcccgaccaccagggcaagggtctgggcagcgccgtcgtgctccccggagtggaggcggccgagcgcgccggggtgcccgccttcctggagacctccgcgccccgcaacctccccttctacgagcggctcggcttcaccgtcaccgccgacgtcgaggtgcccgaaggaccgcgcacctggtgcatgacccgcaagcccggtgcctga

SEQ ID NO: 4331 - DNA, 2550 bp, Artificial Sequence
  Synthetic Polynucloetide
atggccttaccagtgaccgccttgctcctgccgctggccttgctgctccacgccgccaggccggcatgccaggtccagctcgtcgagtccggcggcggcctcgtccaggccggcgactccgtcaccctctcctgcaccgcctccggccgcaccttctcctcctacgccctcgcctggttccgccagcgccccggcaaggagcgcgagttcgtcgccggcctccgctggggcggccccaccaactacgccgactccgtcaaggaccgcttcaccatctccggcgactccgccaagcacaccatgtacctccagatgaactccctcaagcccgaggacaccgccgtctactactgcggctacaaccccggcggctgggccgtcccctcccagtacgagtacgactcctggggccagggcacccaggtcaccgtctcctccctcgagggatctcccatcaagaccgatgtgattacaatggaccccaaggacaactgctccaaggacgccaacgataccctgctgctccagctgaccaacaccagcgcctactacatgtacttgttgctgctgctgaagtccgtggtgtacttcgccatcatcacatgctgcctgctgcggagaaccgccttctgctgcaacggcgagaagtctagggccaagcgatctggatctggagcaacaaacttctcactactcaaacaagcaggtgacgtggaggagaatcccgggcctactagtatggactggatttggcgcatccttttccttgtcggcgctgctaccggcgcgcattccctgttcaatcaagaggtgcagatccctctgaccgagagctactgtggcccctgtcctaagaactggatctgctacaagaacaactgctaccagttcttcgacgagagcaagaattggtacgagagccaggccagctgcatgagccagaatgccagcctgctgaaggtgtacagcaaagaggaccaggacctgctgaaactggtcaagagctaccactggatgggccttgtgcacatccccaccaatggctcttggcagtgggaggacggcagcattctgagccctaacctgctgaccatcatcgagatgcagaagggcgactgcgccctgtacgccagcagctttaagggctacatcgagaattgcagcaccccgaacacctacatctgtatgcagagaaccgttggcggaggcggaagtggaggcggaggatctggcggcggaggctctgacctctttaatcaagaagtccagattccactcaccgaatcctactgcggaccttgtccaaaaaattggatttgttataagaacaactgttatcaattctttgatgagtctaaaaattggtatgagtcccaggcttcctgcatgtctcagaacgcttctctgctgaaagtctactctaaagaagatcaggatctcctgaagctcgtcaagtcttatcattggatggggctcgtccacattcctaccaacggaagctggcaatgggaagatggctccatcctgtctccaaatctgctcacgattattgaaatgcagaaaggggattgtgctctctacgccagctccttcaagggatatattgagaactgtagcacgcccaatacttatatctgtatgcaacggaccgtgacgcgtggcagcgaccacgtgaagcccaaagagacagagaacaccaagcagcccagcaagagctgccacaagcccaaggccatcgtgcacaccgagaaagtgaacatgatgagcctgaccgtgctgggcctgcggatgctgttcgccaaaaccgtggccgtgaacttcctgctgaccgccaagctgttcttcctccgcgccaagagaagcggatctggcgtgaagcagaccctgaatttcgacctgctgaagctggctggcgacgtggaatccaacccaggcccttctagaggccatatgaccgagtacaagcccacggtgcgcctcgccacccgcgacgacgtccccagggccgtacgcaccctcgccgccgcgttcgccgactaccccgccacgcgccacaccgtcgatccggaccgccacatcgagcgggtcaccgagctgcaagaactcttcctcacgcgcgtcgggctcgacatcggcaaggtgtgggtcgcggacgacggcgccgcggtggcggtctggaccacgccggagagcgtcgaagcgggggcggtgttcgccgagatcggcccgcgcatggccgagttgagcggttcccggctggccgcgcagcaacagatggaaggcctcctggcgccgcaccggcccaaggagcccgcgtggttcctggccaccgtcggcgtctcgcccgaccaccagggcaagggtctgggcagcgccgtcgtgctccccggagtggaggcggccgagcgcgccggggtgcccgccttcctggagacctccgcgccccgcaacctccccttctacgagcggctcggcttcaccgtcaccgccgacgtcgaggtgcccgaaggaccgcgcacctggtgcatgacccgcaagcccggtgcctga

SEQ ID NO: 4332 - DNA, 2526 bp, Artificial Sequence
  Synthetic Polynucloetide
atggccttaccagtgaccgccttgctcctgccgctggccttgctgctccacgccgccaggccggcatgccaggtccagctcgtcgagtccggcggcggcctcgtccaggccggcgactccgtcaccctctcctgcaccgcctccggccgcaccttctcctcctacgccctcgcctggttccgccagcgccccggcaaggagcgcgagttcgtcgccggcctccgctggggcggccccaccaactacgccgactccgtcaaggaccgcttcaccatctccggcgactccgccaagcacaccatgtacctccagatgaactccctcaagcccgaggacaccgccgtctactactgcggctacaaccccggcggctgggccgtcccctcccagtacgagtacgactcctggggccagggcacccaggtcaccgtctcctccctcgagggatctatggaccccaaggacaactgctccaaggacgccaacgataccctgctgctccagctgaccaacaccagcgcctactacatgtacttgttgctgctgctgaagtccgtggtgtacttcgccatcatcacatgctgcctgctgcggagaaccgccttctgctgcaacggcgagaagtctagggccaagcgatctggatctggagcaacaaacttctcactactcaaacaagcaggtgacgtggaggagaatcccgggcctactagtatggactggatttggcgcatccttttccttgtcggcgctgctaccggcgcgcattccctgttcaatcaagaggtgcagatccctctgaccgagagctactgtggcccctgtcctaagaactggatctgctacaagaacaactgctaccagttcttcgacgagagcaagaattggtacgagagccaggccagctgcatgagccagaatgccagcctgctgaaggtgtacagcaaagaggaccaggacctgctgaaactggtcaagagctaccactggatgggccttgtgcacatccccaccaatggctcttggcagtgggaggacggcagcattctgagccctaacctgctgaccatcatcgagatgcagaagggcgactgcgccctgtacgccagcagctttaagggctacatcgagaattgcagcaccccgaacacctacatctgtatgcagagaaccgttggcggaggcggaagtggaggcggaggatctggcggcggaggctctgacctctttaatcaagaagtccagattccactcaccgaatcctactgcggaccttgtccaaaaaattggatttgttataagaacaactgttatcaattctttgatgagtctaaaaattggtatgagtcccaggcttcctgcatgtctcagaacgcttctctgctgaaagtctactctaaagaagatcaggatctcctgaagctcgtcaagtcttatcattggatggggctcgtccacattcctaccaacggaagctggcaatgggaagatggctccatcctgtctccaaatctgctcacgattattgaaatgcagaaaggggattgtgctctctacgccagctccttcaagggatatattgagaactgtagcacgcccaatacttatatctgtatgcaacggaccgtgacgcgtggcagcgaccacgtgaagcccaaagagacagagaacaccaagcagcccagcaagagctgccacaagcccaaggccatcgtgcacaccgagaaagtgaacatgatgagcctgaccgtgctgggcctgcggatgctgttcgccaaaaccgtggccgtgaacttcctgctgaccgccaagctgttcttcctccgcgccaagagaagcggatctggcgtgaagcagaccctgaatttcgacctgctgaagctggctggcgacgtggaatccaacccaggcccttctagaggccatatgaccgagtacaagcccacggtgcgcctcgccacccgcgacgacgtccccagggccgtacgcaccctcgccgccgcgttcgccgactaccccgccacgcgccacaccgtcgatccggaccgccacatcgagcgggtcaccgagctgcaagaactcttcctcacgcgcgtcgggctcgacatcggcaaggtgtgggtcgcggacgacggcgccgcggtggcggtctggaccacgccggagagcgtcgaagcgggggcggtgttcgccgagatcggcccgcgcatggccgagttgagcggttcccggctggccgcgcagcaacagatggaaggcctcctggcgccgcaccggcccaaggagcccgcgtggttcctggccaccgtcggcgtctcgcccgaccaccagggcaagggtctgggcagcgccgtcgtgctccccggagtggaggcggccgagcgcgccggggtgcccgccttcctggagacctccgcgccccgcaacctccccttctacgagcggctcggcttcaccgtcaccgccgacgtcgaggtgcccgaaggaccgcgcacctggtgcatgacccgcaagcccggtgcctga

SEQ ID NO: 4333 - DNA, 1824 bp, Artificial Sequence
  Synthetic Polynucloetide
atggccttaccagtgaccgccttgctcctgccgctggccttgctgctccacgccgccaggccggcatgccaggtccagctcgtcgagtccggcggcggcctcgtccaggccggcgactccgtcaccctctcctgcaccgcctccggccgcaccttctcctcctacgccctcgcctggttccgccagcgccccggcaaggagcgcgagttcgtcgccggcctccgctggggcggccccaccaactacgccgactccgtcaaggaccgcttcaccatctccggcgactccgccaagcacaccatgtacctccagatgaactccctcaagcccgaggacaccgccgtctactactgcggctacaaccccggcggctgggccgtcccctcccagtacgagtacgactcctggggccagggcacccaggtcaccgtctcctccctcgagggatctatggaccccaaggacaactgctccaaggacgccaacgataccctgctgctccagctgaccaacaccagcgcctactacatgtacttgttgctgctgctgaagtccgtggtgtacttcgccatcatcacatgctgcctgctgcggagaaccgccttctgctgcaacggcgagaagtctagggccaagcgatctggatctggagcaacaaacttctcactactcaaacaagcaggtgacgtggaggagaatcccgggcctactagtatggactggatttggcgcatccttttccttgtcggcgctgctaccggcgcgcattccctgttcaatcaagaggtgcagatccctctgaccgagagctactgtggcccctgtcctaagaactggatctgctacaagaacaactgctaccagttcttcgacgagagcaagaattggtacgagagccaggccagctgcatgagccagaatgccagcctgctgaaggtgtacagcaaagaggaccaggacctgctgaaactggtcaagagctaccactggatgggccttgtgcacatccccaccaatggctcttggcagtgggaggacggcagcattctgagccctaacctgctgaccatcatcgagatgcagaagggcgactgcgccctgtacgccagcagctttaagggctacatcgagaattgcagcaccccgaacacctacatctgtatgcagagaaccgttggcggaggcggaagtggaggcggaggatctggcggcggaggctctgacctctttaatcaagaagtccagattccactcaccgaatcctactgcggaccttgtccaaaaaattggatttgttataagaacaactgttatcaattctttgatgagtctaaaaattggtatgagtcccaggcttcctgcatgtctcagaacgcttctctgctgaaagtctactctaaagaagatcaggatctcctgaagctcgtcaagtcttatcattggatggggctcgtccacattcctaccaacggaagctggcaatgggaagatggctccatcctgtctccaaatctgctcacgattattgaaatgcagaaaggggattgtgctctctacgccagctccttcaagggatatattgagaactgtagcacgcccaatacttatatctgtatgcaacggaccgtgacgcgtggcagcgaccacgtgaagcccaaagagacagagaacaccaagcagcccagcaagagctgccacaagcccaaggccatcgtgcacaccgagaaagtgaacatgatgagcctgaccgtgctgggcctgcggatgctgttcgccaaaaccgtggccgtgaacttcctgctgaccgccaagctgttcttcctc

SEQ ID NO: 4334 - DNA, 2553 bp, Artificial Sequence
  Synthetic Polynucloetide
atggccttaccagtgaccgccttgctcctgccgctggccttgctgctccacgccgccaggccggcatgccaggtccagctcgtcgagtccggcggcggcctcgtccaggccggcgactccgtcaccctctcctgcaccgcctccggccgcaccttctcctcctacgccctcgcctggttccgccagcgccccggcaaggagcgcgagttcgtcgccggcctccgctggggcggccccaccaactacgccgactccgtcaaggaccgcttcaccatctccggcgactccgccaagcacaccatgtacctccagatgaactccctcaagcccgaggacaccgccgtctactactgcggctacaaccccggcggctgggccgtcccctcccagtacgagtacgactcctggggccagggcacccaggtcaccgtctcctccctcgaggacaaaactcacacatgcccaccgtgcccagcaatggaccccaaggacaactgctccaaggacgccaacgataccctgctgctccagctgaccaacaccagcgcctactacatgtacttgttgctgctgctgaagtccgtggtgtacttcgccatcatcacatgctgcctgctgcggagaaccgccttctgctgcaacggcgagaagtctagggccaagcgatctggatctggagcaacaaacttctcactactcaaacaagcaggtgacgtggaggagaatcccgggcctactagtatggactggatttggcgcatccttttccttgtcggcgctgctaccggcgcgcattccctgttcaatcaagaggtgcagatccctctgaccgagagctactgtggcccctgtcctaagaactggatctgctacaagaacaactgctaccagttcttcgacgagagcaagaattggtacgagagccaggccagctgcatgagccagaatgccagcctgctgaaggtgtacagcaaagaggaccaggacctgctgaaactggtcaagagctaccactggatgggccttgtgcacatccccaccaatggctcttggcagtgggaggacggcagcattctgagccctaacctgctgaccatcatcgagatgcagaagggcgactgcgccctgtacgccagcagctttaagggctacatcgagaattgcagcaccccgaacacctacatctgtatgcagagaaccgttggcggaggcggaagtggaggcggaggatctggcggcggaggctctgacctctttaatcaagaagtccagattccactcaccgaatcctactgcggaccttgtccaaaaaattggatttgttataagaacaactgttatcaattctttgatgagtctaaaaattggtatgagtcccaggcttcctgcatgtctcagaacgcttctctgctgaaagtctactctaaagaagatcaggatctcctgaagctcgtcaagtcttatcattggatggggctcgtccacattcctaccaacggaagctggcaatgggaagatggctccatcctgtctccaaatctgctcacgattattgaaatgcagaaaggggattgtgctctctacgccagctccttcaagggatatattgagaactgtagcacgcccaatacttatatctgtatgcaacggaccgtgacgcgtggcagcgaccacgtgaagcccaaagagacagagaacaccaagcagcccagcaagagctgccacaagcccaaggccatcgtgcacaccgagaaagtgaacatgatgagcctgaccgtgctgggcctgcggatgctgttcgccaaaaccgtggccgtgaacttcctgctgaccgccaagctgttcttcctccgcgccaagagaagcggatctggcgtgaagcagaccctgaatttcgacctgctgaagctggctggcgacgtggaatccaacccaggcccttctagaggccatatgaccgagtacaagcccacggtgcgcctcgccacccgcgacgacgtccccagggccgtacgcaccctcgccgccgcgttcgccgactaccccgccacgcgccacaccgtcgatccggaccgccacatcgagcgggtcaccgagctgcaagaactcttcctcacgcgcgtcgggctcgacatcggcaaggtgtgggtcgcggacgacggcgccgcggtggcggtctggaccacgccggagagcgtcgaagcgggggcggtgttcgccgagatcggcccgcgcatggccgagttgagcggttcccggctggccgcgcagcaacagatggaaggcctcctggcgccgcaccggcccaaggagcccgcgtggttcctggccaccgtcggcgtctcgcccgaccaccagggcaagggtctgggcagcgccgtcgtgctccccggagtggaggcggccgagcgcgccggggtgcccgccttcctggagacctccgcgccccgcaacctccccttctacgagcggctcggcttcaccgtcaccgccgacgtcgaggtgcccgaaggaccgcgcacctggtgcatgacccgcaagcccggtgcctga

SEQ ID NO: 4335 - DNA, 2580 bp, Artificial Sequence
  Synthetic Polynucloetide
atggccttaccagtgaccgccttgctcctgccgctggccttgctgctccacgccgccaggccggcatgccaggtccagctcgtcgagtccggcggcggcctcgtccaggccggcgactccgtcaccctctcctgcaccgcctccggccgcaccttctcctcctacgccctcgcctggttccgccagcgccccggcaaggagcgcgagttcgtcgccggcctccgctggggcggccccaccaactacgccgactccgtcaaggaccgcttcaccatctccggcgactccgccaagcacaccatgtacctccagatgaactccctcaagcccgaggacaccgccgtctactactgcggctacaaccccggcggctgggccgtcccctcccagtacgagtacgactcctggggccagggcacccaggtcaccgtctcctccctcgaggacaaaactcacacatgcccaccgtgcccagcaatggaccccaaggacaactgctccaaggacgccaacgataccctgctgctccagctgaccaacaccagcgcctactacatgtacttgttgctgctgctgaagtccgtggtgtacttcgccatcatcacatgctgcctgctgcggagaaccgccttctgctgcaacggcgagaagtctagggccaagcgatctggatctggagcaacaaacttctcactactcaaacaagcaggtgacgtggaggagaatcccgggcctactagtatggactggatttggcgcatccttttccttgtcggcgctgctaccggcgcgcattccctgttcaatcaagaggtgcagatccctctgaccgagagctactgtggcccctgtcctaagaactggatctgctacaagaacaactgctaccagttcttcgacgagagcaagaattggtacgagagccaggccagctgcatgagccagaatgccagcctgctgaaggtgtacagcaaagaggaccaggacctgctgaaactggtcaagagctaccactggatgggccttgtgcacatccccaccaatggctcttggcagtgggaggacggcagcattctgagccctaacctgctgaccatcatcgagatgcagaagggcgactgcgccctgtacgccagcagctttaagggctacatcgagaattgcagcaccccgaacacctacatctgtatgcagagaaccgttggcggaggcggaagtggaggcggaggatctggcggcggaggctctgacctctttaatcaagaagtccagattccactcaccgaatcctactgcggaccttgtccaaaaaattggatttgttataagaacaactgttatcaattctttgatgagtctaaaaattggtatgagtcccaggcttcctgcatgtctcagaacgcttctctgctgaaagtctactctaaagaagatcaggatctcctgaagctcgtcaagtcttatcattggatggggctcgtccacattcctaccaacggaagctggcaatgggaagatggctccatcctgtctccaaatctgctcacgattattgaaatgcagaaaggggattgtgctctctacgccagctccttcaagggatatattgagaactgtagcacgcccaatacttatatctgtatgcaacggaccgtgacgcgtgataaaactcatacctgtccgccatgcccggcagaccacgtgaagcccaaagagacagagaacaccaagcagcccagcaagagctgccacaagcccaaggccatcgtgcacaccgagaaagtgaacatgatgagcctgaccgtgctgggcctgcggatgctgttcgccaaaaccgtggccgtgaacttcctgctgaccgccaagctgttcttcctccgcgccaagagaagcggatctggcgtgaagcagaccctgaatttcgacctgctgaagctggctggcgacgtggaatccaacccaggcccttctagaggccatatgaccgagtacaagcccacggtgcgcctcgccacccgcgacgacgtccccagggccgtacgcaccctcgccgccgcgttcgccgactaccccgccacgcgccacaccgtcgatccggaccgccacatcgagcgggtcaccgagctgcaagaactcttcctcacgcgcgtcgggctcgacatcggcaaggtgtgggtcgcggacgacggcgccgcggtggcggtctggaccacgccggagagcgtcgaagcgggggcggtgttcgccgagatcggcccgcgcatggccgagttgagcggttcccggctggccgcgcagcaacagatggaaggcctcctggcgccgcaccggcccaaggagcccgcgtggttcctggccaccgtcggcgtctcgcccgaccaccagggcaagggtctgggcagcgccgtcgtgctccccggagtggaggcggccgagcgcgccggggtgcccgccttcctggagacctccgcgccccgcaacctccccttctacgagcggctcggcttcaccgtcaccgccgacgtcgaggtgcccgaaggaccgcgcacctggtgcatgacccgcaagcccggtgcctga

SEQ ID NO: 4336 - DNA, 1878 bp, Artificial Sequence
  Synthetic Polynucloetide
atggccttaccagtgaccgccttgctcctgccgctggccttgctgctccacgccgccaggccggcatgccaggtccagctcgtcgagtccggcggcggcctcgtccaggccggcgactccgtcaccctctcctgcaccgcctccggccgcaccttctcctcctacgccctcgcctggttccgccagcgccccggcaaggagcgcgagttcgtcgccggcctccgctggggcggccccaccaactacgccgactccgtcaaggaccgcttcaccatctccggcgactccgccaagcacaccatgtacctccagatgaactccctcaagcccgaggacaccgccgtctactactgcggctacaaccccggcggctgggccgtcccctcccagtacgagtacgactcctggggccagggcacccaggtcaccgtctcctccctcgaggacaaaactcacacatgcccaccgtgcccagcaatggaccccaaggacaactgctccaaggacgccaacgataccctgctgctccagctgaccaacaccagcgcctactacatgtacttgttgctgctgctgaagtccgtggtgtacttcgccatcatcacatgctgcctgctgcggagaaccgccttctgctgcaacggcgagaagtctagggccaagcgatctggatctggagcaacaaacttctcactactcaaacaagcaggtgacgtggaggagaatcccgggcctactagtatggactggatttggcgcatccttttccttgtcggcgctgctaccggcgcgcattccctgttcaatcaagaggtgcagatccctctgaccgagagctactgtggcccctgtcctaagaactggatctgctacaagaacaactgctaccagttcttcgacgagagcaagaattggtacgagagccaggccagctgcatgagccagaatgccagcctgctgaaggtgtacagcaaagaggaccaggacctgctgaaactggtcaagagctaccactggatgggccttgtgcacatccccaccaatggctcttggcagtgggaggacggcagcattctgagccctaacctgctgaccatcatcgagatgcagaagggcgactgcgccctgtacgccagcagctttaagggctacatcgagaattgcagcaccccgaacacctacatctgtatgcagagaaccgttggcggaggcggaagtggaggcggaggatctggcggcggaggctctgacctctttaatcaagaagtccagattccactcaccgaatcctactgcggaccttgtccaaaaaattggatttgttataagaacaactgttatcaattctttgatgagtctaaaaattggtatgagtcccaggcttcctgcatgtctcagaacgcttctctgctgaaagtctactctaaagaagatcaggatctcctgaagctcgtcaagtcttatcattggatggggctcgtccacattcctaccaacggaagctggcaatgggaagatggctccatcctgtctccaaatctgctcacgattattgaaatgcagaaaggggattgtgctctctacgccagctccttcaagggatatattgagaactgtagcacgcccaatacttatatctgtatgcaacggaccgtgacgcgtgataaaactcatacctgtccgccatgcccggcagaccacgtgaagcccaaagagacagagaacaccaagcagcccagcaagagctgccacaagcccaaggccatcgtgcacaccgagaaagtgaacatgatgagcctgaccgtgctgggcctgcggatgctgttcgccaaaaccgtggccgtgaacttcctgctgaccgccaagctgttcttcctc

SEQ ID NO: 4337 - DNA, 921 bp, Artificial Sequence
  Synthetic Polynucloetide
atggccttaccagtgaccgccttgctcctgccgctggccttgctgctccacgccgccaggccggcatgccaggtccagctcgtcgagtccggcggcggcctcgtccaggccggcgactccgtcaccctctcctgcaccgcctccggccgcaccttctcctcctacgccctcgcctggttccgccagcgccccggcaaggagcgcgagttcgtcgccggcctccgctggggcggccccaccaactacgccgactccgtcaaggaccgcttcaccatctccggcgactccgccaagcacaccatgtacctccagatgaactccctcaagcccgaggacaccgccgtctactactgcggctacaaccccggcggctgggccgtcccctcccagtacgagtacgactcctggggccagggcacccaggtcaccgtctcctccctcgagggacagcctaaggccaatcctaccgtgacactgttccctccaagcagcgaagaactccaggccaacaaggccacacttgtgtgcctgatctccgacttctaccctggggctgtgacagtggcttggaaggccgatggatctcctgtgaaagccggcgtggaaaccaccaagccatccaagcagagcaacaacaaatacgccgccagctcctacctgagcctgacacctgagcagtggaagtcccacagatcctacagctgccaagtgacccacgaaggcagcaccgtggaaaagacagtggcccctacagagtgcagcggcagagccgattgcggctttaccagcgagagctaccagcagggcgtgctgagcgccaccatcctgtacgagatcctgctgggcaaggccaccctgtacgccgtgctggtgtctgccctggtgctgatggctatggtcaagcggaaggacagccgggga

SEQ ID NO: 4338 - DNA, 1410 bp, Artificial Sequence
  Synthetic Polynucloetide
atggactggatttggcgcatccttttccttgtcggcgctgctaccggcgcgcattccctgttcaatcaagaggtgcagatccctctgaccgagagctactgtggcccctgtcctaagaactggatctgctacaagaacaactgctaccagttcttcgacgagagcaagaattggtacgagagccaggccagctgcatgagccagaatgccagcctgctgaaggtgtacagcaaagaggaccaggacctgctgaaactggtcaagagctaccactggatgggccttgtgcacatccccaccaatggctcttggcagtgggaggacggcagcattctgagccctaacctgctgaccatcatcgagatgcagaagggcgactgcgccctgtacgccagcagctttaagggctacatcgagaattgcagcaccccgaacacctacatctgtatgcagagaaccgttggcggaggcggaagtggaggcggaggatctggcggcggaggctctgacctctttaatcaagaagtccagattccactcaccgaatcctactgcggaccttgtccaaaaaattggatttgttataagaacaactgttatcaattctttgatgagtctaaaaattggtatgagtcccaggcttcctgcatgtctcagaacgcttctctgctgaaagtctactctaaagaagatcaggatctcctgaagctcgtcaagtcttatcattggatggggctcgtccacattcctaccaacggaagctggcaatgggaagatggctccatcctgtctccaaatctgctcacgattattgaaatgcagaaaggggattgtgctctctacgccagctccttcaagggatatattgagaactgtagcacgcccaatacttatatctgtatgcaacggaccgtgacgcgtgcctctacaaagggaccctccgtgtttcctctggctcccagcagcaagtctacaagcggaggaacagccgctctgggctgcctggtcaaggattactttcccgagcctgtgaccgtgtcctggaatagcggagcactgacaagcggcgtgcacacctttccagccgtgctgcaaagcagcggcctgtactctctgagcagcgtggtcacagtgcctagctctagcctgggcacccagacctacatctgcaatgtgaaccacaagcctagcaacaccaaggtggacaagagagtggaacccaagagctgtatccccgaggacacattcttcccaagccccgagagcagctgcgacgtgaagctggtggaaaagagcttcgagacagacaccaacctgaacttccagaacctgagcgtgatcggcttcagaatcctgctgctgaaagtggccggctttaacctgctgatgaccctgcggctgtggtccagc

SEQ ID NO: 4339 - DNA, 963 bp, Artificial Sequence
  Synthetic Polynucloetide
atggccttaccagtgaccgccttgctcctgccgctggccttgctgctccacgccgccaggccggcatgccaggtccagctcgtcgagtccggcggcggcctcgtccaggccggcgactccgtcaccctctcctgcaccgcctccggccgcaccttctcctcctacgccctcgcctggttccgccagcgccccggcaaggagcgcgagttcgtcgccggcctccgctggggcggccccaccaactacgccgactccgtcaaggaccgcttcaccatctccggcgactccgccaagcacaccatgtacctccagatgaactccctcaagcccgaggacaccgccgtctactactgcggctacaaccccggcggctgggccgtcccctcccagtacgagtacgactcctggggccagggcacccaggtcaccgtctcctccctcgagggacagcctaaggccaatcctaccgtgacactgttccctccaagcagcgaagaactccaggccaacaaggccacacttgtgtgcctgatctccgacttctaccctggggctgtgacagtggcttggaaggccgatggatctcctgtgaaagccggcgtggaaaccaccaagccatccaagcagagcaacaacaaatacgccgccagctcctacctgagcctgacacctgagcagtggaagtcccacagatcctacagctgccaagtgacccacgaaggcagcaccgtggaaaagacagtggcccctacagagtgcagccccatcaagaccgatgtgattacaatggaccccaaggacaactgctccaaggacgccaacgataccctgctgctccagctgaccaacaccagcgcctactacatgtacttgttgctgctgctgaagtccgtggtgtacttcgccatcatcacatgctgcctgctgcggagaaccgccttctgctgcaacggcgagaagtct

SEQ ID NO: 4340 - DNA, 1434 bp, Artificial Sequence
  Synthetic Polynucloetide
atggactggatttggcgcatccttttccttgtcggcgctgctaccggcgcgcattccctgttcaatcaagaggtgcagatccctctgaccgagagctactgtggcccctgtcctaagaactggatctgctacaagaacaactgctaccagttcttcgacgagagcaagaattggtacgagagccaggccagctgcatgagccagaatgccagcctgctgaaggtgtacagcaaagaggaccaggacctgctgaaactggtcaagagctaccactggatgggccttgtgcacatccccaccaatggctcttggcagtgggaggacggcagcattctgagccctaacctgctgaccatcatcgagatgcagaagggcgactgcgccctgtacgccagcagctttaagggctacatcgagaattgcagcaccccgaacacctacatctgtatgcagagaaccgttggcggaggcggaagtggaggcggaggatctggcggcggaggctctgacctctttaatcaagaagtccagattccactcaccgaatcctactgcggaccttgtccaaaaaattggatttgttataagaacaactgttatcaattctttgatgagtctaaaaattggtatgagtcccaggcttcctgcatgtctcagaacgcttctctgctgaaagtctactctaaagaagatcaggatctcctgaagctcgtcaagtcttatcattggatggggctcgtccacattcctaccaacggaagctggcaatgggaagatggctccatcctgtctccaaatctgctcacgattattgaaatgcagaaaggggattgtgctctctacgccagctccttcaagggatatattgagaactgtagcacgcccaatacttatatctgtatgcaacggaccgtgacgcgtgcctctacaaagggaccctccgtgtttcctctggctcccagcagcaagtctacaagcggaggaacagccgctctgggctgcctggtcaaggattactttcccgagcctgtgaccgtgtcctggaatagcggagcactgacaagcggcgtgcacacctttccagccgtgctgcaaagcagcggcctgtactctctgagcagcgtggtcacagtgcctagctctagcctgggcacccagacctacatctgcaatgtgaaccacaagcctagcaacaccaaggtggacaagagagtggaacccaagagctgtgaagtgaaaaccgactccaccgaccacgtgaagcccaaagagacagagaacaccaagcagcccagcaagagctgccacaagcccaaggccatcgtgcacaccgagaaagtgaacatgatgagcctgaccgtgctgggcctgcggatgctgttcgccaaaaccgtggccgtgaacttcctgctgaccgccaagctgttcttcctc

SEQ ID NO: 4341 - DNA, 1722 bp, Artificial Sequence
  Synthetic Polynucloetide
atggactggatttggcgcatccttttccttgtcggcgctgctaccggcgcccattccgggcccatggaccccgacctggaaatcagagccgccttcctgcggcagagaaacacagccctgagaacagaggtggccgagctggaacaagaggtgcagcggctggaaaacgaggtgtcccagtacgagacaagatacggccctctcggaggcggaaaaggatccggcggcggaggatctggcggaggcggatctgggggcggaggctctttcgaacaagttcagcttcaacagcctggcgctgagctggtcaaacctggcgcttctgtgaagatgagctgcaaagccagcggctacgccttcagcagctactggatcaactggatgaagcagaaacccggccagggactcgaatggatcggccaaatctatcccggcgacggcgacaccaactacaacggcaagttcaagggcagagccacactgaccgccgatacctctagcagcacagcctacatgcagctgagcagcctgaccagcgaagatagcgccgtgtacttctgtgcccggtccatcacaacagtcgtgggctgcgctatggactattggggccagggaacaagcgtgaccgtgtctagtggcggaggcggaagtggaggcggaggatctggcggcggaggctctgacatccagatgacacagagccctagcagcctgtctgccagcgtgggagacagagtgaccatcacatgcaaggccagcgaccacatcaacaactggctggcctggtatcagcagaagcctggacaggcccctaagctgctgatctacggcgctaccacactggaaacaggcgtgcccagcagattttctggcagcggctctggcaccgactacaccctgacaatatccagcctccagcctgaggacttcgccacctactactgtcagcagagctggaacaccccttggacattcggccagggcaccaagctggaaatcaagagaacgcgtgagcagaaactgatctcggaagaggatctggcgaagcccaccacgacgccagcgccgcgaccaccaacaccggcgcccaccatcgcgtcgcagcccctgtccctgcgcccagaggcgtgccggccagcggcggggggcgcagtgcacacgagggggctggacttcgcctgtgacatctacatctgggcgcccttggccgggacttgtggggtccttctcctgtcactggttatcaccctttactgcaaacggggcagaaagaaactcctgtatatattcaaacaaccatttatgagaccagtacaaactactcaagaggaagatggctgtagctgccgatttccagaagaagaagaaggaggatgtgaactgagagtgaagttcagcaggagcgcagacgcccccgcgtaccagcagggccagaaccagctctataacgagctgaatctaggacgaagagaggagtacgatgttttggacaagagacgtggccgggaccctgagatggggggaaagccgagaaggaagaaccctcaggaaggcctgtacaatgaactgcagaaagataagatggcggaggcctacagtgagattgggatgaaaggcgagcgccggaggggcaaggggcacgatggcctttaccagggtctcagtacagccaccaaggacacctacgacgcccttcacatgcaggccctgccccctcgctga

SEQ ID NO: 4342 - DNA, 2781 bp, Artificial Sequence
  Synthetic Polynucloetide
atggccttaccagtgaccgccttgctcctgccgctggccttgctgctccacgccgccaggccggacatccagatgacacagagccctagcagcctgtctgccagcgtgggagacagagtgaccatcacatgcaaggccagcgaccacatcaacaactggctggcctggtatcagcagaagcctggacaggcccctaagctgctgatctacggcgctaccacactggaaacaggcgtgcccagcagattttctggcagcggctctggcaccgactacaccctgacaatatccagcctccagcctgaggacttcgccacctactactgtcagcagagctggaacaccccttggacattcggccagggcaccaagctggaaatcaagagactcgagatccagaaccctgatcctgccgtgtaccagctgcgggatagcaagagcagcgacaagagcgtgtgtctgttcaccgacttcgacagccagaccaacgtgtcccagagcaaggactccgacgtgtacatcaccgataagtgcgtgctggacatgcggagcatggacttcaagagcaactccgccgtggcctggtccaacaagtccgatttcgcctgcgccaacgccttcaacaacagcattatccccgaggacacattcttcccaagcagcgacgtgccctgcgacgtgaagctggtggaaaagagcttcgagacagacaccaacctgaacttccagaacctgagcgtgatcggcttcagaatcctgctgctgaaagtggccggctttaacctgctgatgaccctgcggctgtggtccagccgcgccaagagaagcggatctggcgtgaagcagaccctgaatttcgacctgctgaagctggctggcgacgtggaatccaacccaggccctactagtatggactggatttggcgcatccttttccttgtcggcgctgctaccggcgcccattccgggcccatggaccccgacctggaaatcagagccgccttcctgcggcagagaaacacagccctgagaacagaggtggccgagctggaacaagaggtgcagcggctggaaaacgaggtgtcccagtacgagacaagatacggccctctcggaggcggaaaaggatccggcggcggaggatctggcggaggcggatctgggggcggaggctctttcgaacaagttcagcttcaacagcctggcgctgagctggtcaaacctggcgcttctgtgaagatgagctgcaaagccagcggctacgccttcagcagctactggatcaactggatgaagcagaaacccggccagggactcgaatggatcggccaaatctatcccggcgacggcgacaccaactacaacggcaagttcaagggcagagccacactgaccgccgatacctctagcagcacagcctacatgcagctgagcagcctgaccagcgaagatagcgccgtgtacttctgtgcccggtccatcacaacagtcgtgggctgcgctatggactattggggccagggaacaagcgtgaccgtgtctagtacgcgtgaggacctgaagaacgtgttcccacctgaggtggccgtgttcgagcctagcaaggccgagatcgcccacacccagaaagccaccctcgtgtgcctggctaccggcttctaccccgaccatgtggaactgtcttggtgggtcaacggcaaagaggtgcacagcggcgtgtgtaccgacccccagccactgaaagaacagcccgccctgaacgacagccggtactgcctgagcagcagactgagagtgtccgccaccttctggcagaacccccggaaccacttcagatgccaggtgcagttctacggcctgagcgagaacgacgagtggacccaggacagagccaagcccgtgacccagatcgtgtctgccgaagcctggggcagagccgattgcggcatcaccagcgccagctaccaccagggcgtgctgagcgccaccatcctgtacgagatcctgctgggcaaggccaccctgtacgccgtgctggtgtctgccctggtgctgatggctatggtcaagcggaaggacagccggggaagggccaagcgatctggatctggagcaacaaacttctcactactcaaacaagcaggtgacgtggaggagaatcccgggccttctagaggccatatgaccgagtacaagcccacggtgcgcctcgccacccgcgacgacgtccccagggccgtacgcaccctcgccgccgcgttcgccgactaccccgccacgcgccacaccgtcgatccggaccgccacatcgagcgggtcaccgagctgcaagaactcttcctcacgcgcgtcgggctcgacatcggcaaggtgtgggtcgcggacgacggcgccgcggtggcggtctggaccacgccggagagcgtcgaagcgggggcggtgttcgccgagatcggcccgcgcatggccgagttgagcggttcccggctggccgcgcagcaacagatggaaggcctcctggcgccgcaccggcccaaggagcccgcgtggttcctggccaccgtcggcgtctcgcccgaccaccagggcaagggtctgggcagcgccgtcgtgctccccggagtggaggcggccgagcgcgccggggtgcccgccttcctggagacctccgcgccccgcaacctccccttctacgagcggctcggcttcaccgtcaccgccgacgtcgaggtgcccgaaggaccgcgcacctggtgcatgacccgcaagcccggtgcctga

SEQ ID NO: 4343 - DNA, 2778 bp, Artificial Sequence
  Synthetic Polynucloetide
atggccttaccagtgaccgccttgctcctgccgctggccttgctgctccacgccgccaggccggacatccagatgacacagagccctagcagcctgtctgccagcgtgggagacagagtgaccatcacatgcaaggccagcgaccacatcaacaactggctggcctggtatcagcagaagcctggacaggcccctaagctgctgatctacggcgctaccacactggaaacaggcgtgcccagcagattttctggcagcggctctggcaccgactacaccctgacaatatccagcctccagcctgaggacttcgccacctactactgtcagcagagctggaacaccccttggacattcggccagggcaccaagctggaaatcaagagactcgaggacctgaagaacgtgttcccacctgaggtggccgtgttcgagcctagcaaggccgagatcgcccacacccagaaagccaccctcgtgtgcctggctaccggcttctaccccgaccatgtggaactgtcttggtgggtcaacggcaaagaggtgcacagcggcgtgtgtaccgacccccagccactgaaagaacagcccgccctgaacgacagccggtactgcctgagcagcagactgagagtgtccgccaccttctggcagaacccccggaaccacttcagatgccaggtgcagttctacggcctgagcgagaacgacgagtggacccaggacagagccaagcccgtgacccagatcgtgtctgccgaagcctggggcagagccgattgcggcatcaccagcgccagctaccaccagggcgtgctgagcgccaccatcctgtacgagatcctgctgggcaaggccaccctgtacgccgtgctggtgtctgccctggtgctgatggctatggtcaagcggaaggacagccggggaagggccaagcgatctggatctggagcaacaaacttctcactactcaaacaagcaggtgacgtggaggagaatcccgggcctactagtatggactggatttggcgcatccttttccttgtcggcgctgctaccggcgcccattccgggcccatggaccccgacctggaaatcagagccgccttcctgcggcagagaaacacagccctgagaacagaggtggccgagctggaacaagaggtgcagcggctggaaaacgaggtgtcccagtacgagacaagatacggccctctcggaggcggaaaaggatccggcggcggaggatctggcggaggcggatctgggggcggaggctctttcgaacaagttcagcttcaacagcctggcgctgagctggtcaaacctggcgcttctgtgaagatgagctgcaaagccagcggctacgccttcagcagctactggatcaactggatgaagcagaaacccggccagggactcgaatggatcggccaaatctatcccggcgacggcgacaccaactacaacggcaagttcaagggcagagccacactgaccgccgatacctctagcagcacagcctacatgcagctgagcagcctgaccagcgaagatagcgccgtgtacttctgtgcccggtccatcacaacagtcgtgggctgcgctatggactattggggccagggaacaagcgtgaccgtgtctagtacgcgtatccagaaccctgatcctgccgtgtaccagctgcgggatagcaagagcagcgacaagagcgtgtgtctgttcaccgacttcgacagccagaccaacgtgtcccagagcaaggactccgacgtgtacatcaccgataagtgcgtgctggacatgcggagcatggacttcaagagcaactccgccgtggcctggtccaacaagtccgatttcgcctgcgccaacgccttcaacaacagcattatccccgaggacacattcttcccaagcagcgacgtgccctgcgacgtgaagctggtggaaaagagcttcgagacagacaccaacctgaacttccagaacctgagcgtgatcggcttcagaatcctgctgctgaaagtggccggctttaacctgctgatgaccctgcggctgtggtccagccgcgccaagagaagcggatctggcgtgaagcagaccctgaatttcgacctgctgaagctggctggcgacgtggaatccaacccaggcccttctagaggccatatgaccgagtacaagcccacggtgcgcctcgccacccgcgacgacgtccccagggccgtacgcaccctcgccgccgcgttcgccgactaccccgccacgcgccacaccgtcgatccggaccgccacatcgagcgggtcaccgagctgcaagaactcttcctcacgcgcgtcgggctcgacatcggcaaggtgtgggtcgcggacgacggcgccgcggtggcggtctggaccacgccggagagcgtcgaagcgggggcggtgttcgccgagatcggcccgcgcatggccgagttgagcggttcccggctggccgcgcagcaacagatggaaggcctcctggcgccgcaccggcccaaggagcccgcgtggttcctggccaccgtcggcgtctcgcccgaccaccagggcaagggtctgggcagcgccgtcgtgctccccggagtggaggcggccgagcgcgccggggtgcccgccttcctggagacctccgcgccccgcaacctccccttctacgagcggctcggcttcaccgtcaccgccgacgtcgaggtgcccgaaggaccgcgcacctggtgcatgacccgcaagcccggtgcctga

SEQ ID NO: 4344 - DNA, 2778 bp, Artificial Sequence
  Synthetic Polynucloetide
atggccttaccagtgaccgccttgctcctgccgctggccttgctgctccacgccgccaggccggacatccagatgacacagagccctagcagcctgtctgccagcgtgggagacagagtgaccatcacatgcaaggccagcgaccacatcaacaactggctggcctggtatcagcagaagcctggacaggcccctaagctgctgatctacggcgctaccacactggaaacaggcgtgcccagcagattttctggcagcggctctggcaccgactacaccctgacaatatccagcctccagcctgaggacttcgccacctactactgtcagcagagctggaacaccccttggacattcggccagggcaccaagctggaaatcaagagactcgaggacctgaagaacgtgttcccacctgaggtggccgtgttcgagcctagcgaggccgagatcagccacacccagaaagccaccctcgtgtgcctggctaccggcttctaccccgaccatgtggaactgtcttggtgggtcaacggcaaagaggtgcacagcggcgtgtgtaccgacccccagccactgaaagaacagcccgccctgaacgacagccggtactgcctgagcagcagactgagagtgtccgccaccttctggcagaacccccggaaccacttcagatgccaggtgcagttctacggcctgagcgagaacgacgagtggacccaggacagagccaagcccgtgacccagatcgtgtctgccgaagcctggggcagagccgattgcggctttaccagcgagagctaccagcagggcgtgctgagcgccaccatcctgtacgagatcctgctgggcaaggccaccctgtacgccgtgctggtgtctgccctggtgctgatggctatggtcaagcggaaggacagccggggaagggccaagcgatctggatctggagcaacaaacttctcactactcaaacaagcaggtgacgtggaggagaatcccgggcctactagtatggactggatttggcgcatccttttccttgtcggcgctgctaccggcgcccattccgggcccatggaccccgacctggaaatcagagccgccttcctgcggcagagaaacacagccctgagaacagaggtggccgagctggaacaagaggtgcagcggctggaaaacgaggtgtcccagtacgagacaagatacggccctctcggaggcggaaaaggatccggcggcggaggatctggcggaggcggatctgggggcggaggctctttcgaacaagttcagcttcaacagcctggcgctgagctggtcaaacctggcgcttctgtgaagatgagctgcaaagccagcggctacgccttcagcagctactggatcaactggatgaagcagaaacccggccagggactcgaatggatcggccaaatctatcccggcgacggcgacaccaactacaacggcaagttcaagggcagagccacactgaccgccgatacctctagcagcacagcctacatgcagctgagcagcctgaccagcgaagatagcgccgtgtacttctgtgcccggtccatcacaacagtcgtgggctgcgctatggactattggggccagggaacaagcgtgaccgtgtctagtacgcgtatccagaaccctgatcctgccgtgtaccagctgcgggatagcaagagcagcgacaagagcgtgtgtctgttcaccgacttcgacagccagaccaacgtgtcccagagcaaggactccgacgtgtacatcaccgataagtgcgtgctggacatgcggagcatggacttcaagagcaactccgccgtggcctggtccaacaagtccgatttcgcctgcgccaacgccttcaacaacagcattatccccgaggacacattcttcccaagccccgagagcagctgcgacgtgaagctggtggaaaagagcttcgagacagacaccaacctgaacttccagaacctgagcgtgatcggcttcagaatcctgctgctgaaagtggccggctttaacctgctgatgaccctgcggctgtggtccagccgcgccaagagaagcggatctggcgtgaagcagaccctgaatttcgacctgctgaagctggctggcgacgtggaatccaacccaggcccttctagaggccatatgaccgagtacaagcccacggtgcgcctcgccacccgcgacgacgtccccagggccgtacgcaccctcgccgccgcgttcgccgactaccccgccacgcgccacaccgtcgatccggaccgccacatcgagcgggtcaccgagctgcaagaactcttcctcacgcgcgtcgggctcgacatcggcaaggtgtgggtcgcggacgacggcgccgcggtggcggtctggaccacgccggagagcgtcgaagcgggggcggtgttcgccgagatcggcccgcgcatggccgagttgagcggttcccggctggccgcgcagcaacagatggaaggcctcctggcgccgcaccggcccaaggagcccgcgtggttcctggccaccgtcggcgtctcgcccgaccaccagggcaagggtctgggcagcgccgtcgtgctccccggagtggaggcggccgagcgcgccggggtgcccgccttcctggagacctccgcgccccgcaacctccccttctacgagcggctcggcttcaccgtcaccgccgacgtcgaggtgcccgaaggaccgcgcacctggtgcatgacccgcaagcccggtgcctga

SEQ ID NO: 4345 - DNA, 2076 bp, Artificial Sequence
  Synthetic Polynucloetide
atggccttaccagtgaccgccttgctcctgccgctggccttgctgctccacgccgccaggccggacatccagatgacacagagccctagcagcctgtctgccagcgtgggagacagagtgaccatcacatgcaaggccagcgaccacatcaacaactggctggcctggtatcagcagaagcctggacaggcccctaagctgctgatctacggcgctaccacactggaaacaggcgtgcccagcagattttctggcagcggctctggcaccgactacaccctgacaatatccagcctccagcctgaggacttcgccacctactactgtcagcagagctggaacaccccttggacattcggccagggcaccaagctggaaatcaagagactcgaggacctgaagaacgtgttcccacctgaggtggccgtgttcgagcctagcgaggccgagatcagccacacccagaaagccaccctcgtgtgcctggctaccggcttctaccccgaccatgtggaactgtcttggtgggtcaacggcaaagaggtgcacagcggcgtgtgtaccgacccccagccactgaaagaacagcccgccctgaacgacagccggtactgcctgagcagcagactgagagtgtccgccaccttctggcagaacccccggaaccacttcagatgccaggtgcagttctacggcctgagcgagaacgacgagtggacccaggacagagccaagcccgtgacccagatcgtgtctgccgaagcctggggcagagccgattgcggctttaccagcgagagctaccagcagggcgtgctgagcgccaccatcctgtacgagatcctgctgggcaaggccaccctgtacgccgtgctggtgtctgccctggtgctgatggctatggtcaagcggaaggacagccggggaagggccaagcgatctggatctggagcaacaaacttctcactactcaaacaagcaggtgacgtggaggagaatcccgggcctactagtatggactggatttggcgcatccttttccttgtcggcgctgctaccggcgcccattccgggcccatggaccccgacctggaaatcagagccgccttcctgcggcagagaaacacagccctgagaacagaggtggccgagctggaacaagaggtgcagcggctggaaaacgaggtgtcccagtacgagacaagatacggccctctcggaggcggaaaaggatccggcggcggaggatctggcggaggcggatctgggggcggaggctctttcgaacaagttcagcttcaacagcctggcgctgagctggtcaaacctggcgcttctgtgaagatgagctgcaaagccagcggctacgccttcagcagctactggatcaactggatgaagcagaaacccggccagggactcgaatggatcggccaaatctatcccggcgacggcgacaccaactacaacggcaagttcaagggcagagccacactgaccgccgatacctctagcagcacagcctacatgcagctgagcagcctgaccagcgaagatagcgccgtgtacttctgtgcccggtccatcacaacagtcgtgggctgcgctatggactattggggccagggaacaagcgtgaccgtgtctagtacgcgtatccagaaccctgatcctgccgtgtaccagctgcgggatagcaagagcagcgacaagagcgtgtgtctgttcaccgacttcgacagccagaccaacgtgtcccagagcaaggactccgacgtgtacatcaccgataagtgcgtgctggacatgcggagcatggacttcaagagcaactccgccgtggcctggtccaacaagtccgatttcgcctgcgccaacgccttcaacaacagcattatccccgaggacacattcttcccaagccccgagagcagctgcgacgtgaagctggtggaaaagagcttcgagacagacaccaacctgaacttccagaacctgagcgtgatcggcttcagaatcctgctgctgaaagtggccggctttaacctgctgatgaccctgcggctgtggtccagc

SEQ ID NO: 4346 - DNA, 2751 bp, Artificial Sequence
  Synthetic Polynucloetide
atggccttaccagtgaccgccttgctcctgccgctggccttgctgctccacgccgccaggccggacatccagatgacacagagccctagcagcctgtctgccagcgtgggagacagagtgaccatcacatgcaaggccagcgaccacatcaacaactggctggcctggtatcagcagaagcctggacaggcccctaagctgctgatctacggcgctaccacactggaaacaggcgtgcccagcagattttctggcagcggctctggcaccgactacaccctgacaatatccagcctccagcctgaggacttcgccacctactactgtcagcagagctggaacaccccttggacattcggccagggcaccaagctggaaatcaagagactcgaggacctgaagaacgtgttcccacctgaggtggccgtgttcgagcctagcgaggccgagatcagccacacccagaaagccaccctcgtgtgcctggctaccggcttctaccccgaccatgtggaactgtcttggtgggtcaacggcaaagaggtgcacagcggcgtgtgtaccgacccccagccactgaaagaacagcccgccctgaacgacagccggtactgcctgagcagcagactgagagtgtccgccaccttctggcagaacccccggaaccacttcagatgccaggtgcagttctacggcctgagcgagaacgacgagtggacccaggacagagccaagcccgtgacccagatcgtgtctgccgaagcctggggcagagccgattgcggctttaccagcgagagctaccagcagggcgtgctgagcgccaccatcctgtacgagatcctgctgggcaaggccaccctgtacgccgtgctggtgtctgccctggtgctgatggctatggtcaagcggaaggacagccggggaagggccaagcgatctggatctggagcaacaaacttctcactactcaaacaagcaggtgacgtggaggagaatcccgggcctactagtatggactggatttggcgcatccttttccttgtcggcgctgctaccggcgcccattccgggcccatggaccccgacctggaaatcagagccgccttcctgcggcagagaaacacagccctgagaacagaggtggccgagctggaacaagaggtgcagcggctggaaaacgaggtgtcccagtacgagacaagatacggccctctcggaggcggaaaaggatccggcggcggaggatctggcggaggcggatctgggggcggaggctctttcgaacaagttcagcttcaacagcctggcgctgagctggtcaaacctggcgcttctgtgaagatgagctgcaaagccagcggctacgccttcagcagctactggatcaactggatgaagcagaaacccggccagggactcgaatggatcggccaaatctatcccggcgacggcgacaccaactacaacggcaagttcaagggcagagccacactgaccgccgatacctctagcagcacagcctacatgcagctgagcagcctgaccagcgaagatagcgccgtgtacttctgtgcccggtccatcacaacagtcgtgggctgcgctatggactattggggccagggaacaagcgtgaccgtgtctagtacgcgtatccagaaccctgatcctgccgtgtaccagctgcgggatagcaagagcagcgacaagagcgtgtgtctgttcaccgacttcgacagccagaccaacgtgtcccagagcaaggactccgacgtgtacatcaccgataagtgcgtgctggacatgcggagcatggacttcaagagcaactccgccgtggcctggtccaacaagtccgatttcgcctgcgccaacgccttcaacaacagcattatccccgaggacacattcttcccaagccccgagagcagctgcgacgtgaagctggtggaaaagagcttcgagacagacaccaacctgaacttccagaacctgagcgtgatcggcttcagaatcctgctgctgaaagtggccggctttaacctgctgatgaccctgcggctgtggtccagccgcgccaagagaagcggatctggcgtgaagcagaccctgaatttcgacctgctgaagctggctggcgacgtggaatccaacccaggcccttctagaggcgggatccacaccatggctacctacgaggtgctgtgcgaggtggcaagaaagctgggcaccgacgacagagaagtggtgctgttcctgctgaacgtgttcatccctcagcctacactggcccagctgatcggtgcactgagagccctgaaagaggaaggccggctgacctttcctctgctggccgaatgcctgttcagagccggaagaagggatctgctgcgggacctgctgcatctggaccccagatttctggaaagacacctggccggcaccatgagctacttcagcccttaccagctgaccgtgctgcacgttgacggcgaactgtgcgccagagatattcggagcctgatcttcctgagcaaggacaccatcggcagccggtctacccctcagacatttctgcactgggtgtactgcatggaaaacctggacctgctcggccccacagatgtggatgccctgatgtccatgctgagaagcctgagcagagtggacctccagagacaggtgcagacactgatgggactgcacctgagcggacctagccacagccagcactacagacacacccct

SEQ ID NO: 4347 - DNA, 2088 bp, Artificial Sequence
  Synthetic Polynucloetide
atggccttaccagtgaccgccttgctcctgccgctggccttgctgctccacgccgccaggccggacatccagatgacacagagccctagcagcctgtctgccagcgtgggagacagagtgaccatcacatgcaaggccagcgaccacatcaacaactggctggcctggtatcagcagaagcctggacaggcccctaagctgctgatctacggcgctaccacactggaaacaggcgtgcccagcagattttctggcagcggctctggcaccgactacaccctgacaatatccagcctccagcctgaggacttcgccacctactactgtcagcagagctggaacaccccttggacattcggccagggcaccaagctggaaatcaagagactcgagatccagaaccctgatcctgccgtgtaccagctgcgggatagcaagagcagcgacaagagcgtgtgtctgttcaccgacttcgacagccagaccaacgtgtcccagagcaaggactccgacgtgtacatcaccgataagtgcgtgctggacatgcggagcatggacttcaagagcaactccgccgtggcctggtccaacaagtccgatttcgcctgcgccaacgccttcaacaacagcattatccccgaggacacattcttcccaagccccgagagcagctgcgacgtgaagctggtggaaaagagcttcgagacagacaccaacctgaacttccagaacctgagcgtgatcggcttcagaatcctgctgctgaaagtggccggctttaacctgctgatgaccctgcggctgtggtccagccgcgccaagagaagcggatctggcgtgaagcagaccctgaatttcgacctgctgaagctggctggcgacgtggaatccaacccaggccctactagtatggactggatttggcgcatccttttccttgtcggcgctgctaccggcgcccattccgggcccatggaccccgacctggaaatcagagccgccttcctgcggcagagaaacacagccctgagaacagaggtggccgagctggaacaagaggtgcagcggctggaaaacgaggtgtcccagtacgagacaagatacggccctctcggaggcggaaaaggatccggcggcggaggatctggcggaggcggatctgggggcggaggctctttcgaacaagttcagcttcaacagcctggcgctgagctggtcaaacctggcgcttctgtgaagatgagctgcaaagccagcggctacgccttcagcagctactggatcaactggatgaagcagaaacccggccagggactcgaatggatcggccaaatctatcccggcgacggcgacaccaactacaacggcaagttcaagggcagagccacactgaccgccgatacctctagcagcacagcctacatgcagctgagcagcctgaccagcgaagatagcgccgtgtacttctgtgcccggtccatcacaacagtcgtgggctgcgctatggactattggggccagggaacaagcgtgaccgtgtctagtacgcgtgaggacctgaagaacgtgttcccacctgaggtggccgtgttcgagcctagcgaggccgagatcagccacacccagaaagccaccctcgtgtgcctggctaccggcttctaccccgaccatgtggaactgtcttggtgggtcaacggcaaagaggtgcacagcggcgtgtgtaccgacccccagccactgaaagaacagcccgccctgaacgacagccggtactgcctgagcagcagactgagagtgtccgccaccttctggcagaacccccggaaccacttcagatgccaggtgcagttctacggcctgagcgagaacgacgagtggacccaggacagagccaagcccgtgacccagatcgtgtctgccgaagcctggggcagagccgattgcggctttaccagcgagagctaccagcagggcgtgctgagcgccaccatcctgtacgagatcctgctgggcaaggccaccctgtacgccgtgctggtgtctgccctggtgctgatggctatggtcaagcggaaggacagccgggga

SEQ ID NO: 4348 - DNA, 2754 bp, Artificial Sequence
  Synthetic Polynucloetide
atggccttaccagtgaccgccttgctcctgccgctggccttgctgctccacgccgccaggccggacatccagatgacacagagccctagcagcctgtctgccagcgtgggagacagagtgaccatcacatgcaaggccagcgaccacatcaacaactggctggcctggtatcagcagaagcctggacaggcccctaagctgctgatctacggcgctaccacactggaaacaggcgtgcccagcagattttctggcagcggctctggcaccgactacaccctgacaatatccagcctccagcctgaggacttcgccacctactactgtcagcagagctggaacaccccttggacattcggccagggcaccaagctggaaatcaagagactcgagatccagaaccctgatcctgccgtgtaccagctgcgggatagcaagagcagcgacaagagcgtgtgtctgttcaccgacttcgacagccagaccaacgtgtcccagagcaaggactccgacgtgtacatcaccgataagtgcgtgctggacatgcggagcatggacttcaagagcaactccgccgtggcctggtccaacaagtccgatttcgcctgcgccaacgccttcaacaacagcattatccccgaggacacattcttcccaagccccgagagcagctgcgacgtgaagctggtggaaaagagcttcgagacagacaccaacctgaacttccagaacctgagcgtgatcggcttcagaatcctgctgctgaaagtggccggctttaacctgctgatgaccctgcggctgtggtccagccgcgccaagagaagcggatctggcgtgaagcagaccctgaatttcgacctgctgaagctggctggcgacgtggaatccaacccaggccctactagtatggactggatttggcgcatccttttccttgtcggcgctgctaccggcgcccattccgggcccatggaccccgacctggaaatcagagccgccttcctgcggcagagaaacacagccctgagaacagaggtggccgagctggaacaagaggtgcagcggctggaaaacgaggtgtcccagtacgagacaagatacggccctctcggaggcggaaaaggatccggcggcggaggatctggcggaggcggatctgggggcggaggctctttcgaacaagttcagcttcaacagcctggcgctgagctggtcaaacctggcgcttctgtgaagatgagctgcaaagccagcggctacgccttcagcagctactggatcaactggatgaagcagaaacccggccagggactcgaatggatcggccaaatctatcccggcgacggcgacaccaactacaacggcaagttcaagggcagagccacactgaccgccgatacctctagcagcacagcctacatgcagctgagcagcctgaccagcgaagatagcgccgtgtacttctgtgcccggtccatcacaacagtcgtgggctgcgctatggactattggggccagggaacaagcgtgaccgtgtctagtacgcgtgaggacctgaagaacgtgttcccacctgaggtggccgtgttcgagcctagcgaggccgagatcagccacacccagaaagccaccctcgtgtgcctggctaccggcttctaccccgaccatgtggaactgtcttggtgggtcaacggcaaagaggtgcacagcggcgtgtgtaccgacccccagccactgaaagaacagcccgccctgaacgacagccggtactgcctgagcagcagactgagagtgtccgccaccttctggcagaacccccggaaccacttcagatgccaggtgcagttctacggcctgagcgagaacgacgagtggacccaggacagagccaagcccgtgacccagatcgtgtctgccgaagcctggggcagagccgattgcggctttaccagcgagagctaccagcagggcgtgctgagcgccaccatcctgtacgagatcctgctgggcaaggccaccctgtacgccgtgctggtgtctgccctggtgctgatggctatggtcaagcggaaggacagccggggaagggccaagcgatctggatctggagcaacaaacttctcactactcaaacaagcaggtgacgtggaggagaatcccgggccttctagaggcgggatccacaccatggctacctacgaggtgctgtgcgaggtggcaagaaagctgggcaccgacgacagagaagtggtgctgttcctgctgaacgtgttcatccctcagcctacactggcccagctgatcggtgcactgagagccctgaaagaggaaggccggctgacctttcctctgctggccgaatgcctgttcagagccggaagaagggatctgctgcgggacctgctgcatctggaccccagatttctggaaagacacctggccggcaccatgagctacttcagcccttaccagctgaccgtgctgcacgttgacggcgaactgtgcgccagagatattcggagcctgatcttcctgagcaaggacaccatcggcagccggtctacccctcagacatttctgcactgggtgtactgcatggaaaacctggacctgctcggccccacagatgtggatgccctgatgtccatgctgagaagcctgagcagagtggacctccagagacaggtgcagacactgatgggactgcacctgagcggacctagccacagccagcactacagacacacccct

SEQ ID NO: 4349 - DNA, 2778 bp, Artificial Sequence
  Synthetic Polynucloetide
atggccttaccagtgaccgccttgctcctgccgctggccttgctgctccacgccgccaggccggacatccagatgacacagagccctagcagcctgtctgccagcgtgggagacagagtgaccatcacatgcaaggccagcgaccacatcaacaactggctggcctggtatcagcagaagcctggacaggcccctaagctgctgatctacggcgctaccacactggaaacaggcgtgcccagcagattttctggcagcggctctggcaccgactacaccctgacaatatccagcctccagcctgaggacttcgccacctactactgtcagcagagctggaacaccccttggacattcggccagggcaccaagctggaaatcaagagactcgaggacctgaagaacgtgttcccacctgaggtggccgtgttcgagcctagcgaggccgagatcagccacacccagaaagccaccctcgtgtgcctggctaccggcttctaccccgaccatgtggaactgtcttggtgggtcaacggcaaagaggtgcacagcggcgtgtctaccgacccccagccactgaaagaacagcccgccctgaacgacagccggtactgcctgagcagcagactgagagtgtccgccaccttctggcagaacccccggaaccacttcagatgccaggtgcagttctacggcctgagcgagaacgacgagtggacccaggacagagccaagcccgtgacccagatcgtgtctgccgaagcctggggcagagccgattgcggctttaccagcgagagctaccagcagggcgtgctgagcgccaccatcctgtacgagatcctgctgggcaaggccaccctgtacgccgtgctggtgtctgccctggtgctgatggctatggtcaagcggaaggacagccggggaagggccaagcgatctggatctggagcaacaaacttctcactactcaaacaagcaggtgacgtggaggagaatcccgggcctactagtatggactggatttggcgcatccttttccttgtcggcgctgctaccggcgcccattccgggcccatggaccccgacctggaaatcagagccgccttcctgcggcagagaaacacagccctgagaacagaggtggccgagctggaacaagaggtgcagcggctggaaaacgaggtgtcccagtacgagacaagatacggccctctcggaggcggaaaaggatccggcggcggaggatctggcggaggcggatctgggggcggaggctctttcgaacaagttcagcttcaacagcctggcgctgagctggtcaaacctggcgcttctgtgaagatgagctgcaaagccagcggctacgccttcagcagctactggatcaactggatgaagcagaaacccggccagggactcgaatggatcggccaaatctatcccggcgacggcgacaccaactacaacggcaagttcaagggcagagccacactgaccgccgatacctctagcagcacagcctacatgcagctgagcagcctgaccagcgaagatagcgccgtgtacttctgtgcccggtccatcacaacagtcgtgggctgcgctatggactattggggccagggaacaagcgtgaccgtgtctagtacgcgtatccagaaccctgatcctgccgtgtaccagctgcgggatagcaagagcagcgacaagagcgtgtgtctgttcaccgacttcgacagccagaccaacgtgtcccagagcaaggactccgacgtgtacatcaccgataagaccgtgctggacatgcggagcatggacttcaagagcaactccgccgtggcctggtccaacaagtccgatttcgcctgcgccaacgccttcaacaacagcattatccccgaggacacattcttcccaagccccgagagcagctgcgacgtgaagctggtggaaaagagcttcgagacagacaccaacctgaacttccagaacctgagcgtgatcggcttcagaatcctgctgctgaaagtggccggctttaacctgctgatgaccctgcggctgtggtccagccgcgccaagagaagcggatctggcgtgaagcagaccctgaatttcgacctgctgaagctggctggcgacgtggaatccaacccaggcccttctagaggccatatgaccgagtacaagcccacggtgcgcctcgccacccgcgacgacgtccccagggccgtacgcaccctcgccgccgcgttcgccgactaccccgccacgcgccacaccgtcgatccggaccgccacatcgagcgggtcaccgagctgcaagaactcttcctcacgcgcgtcgggctcgacatcggcaaggtgtgggtcgcggacgacggcgccgcggtggcggtctggaccacgccggagagcgtcgaagcgggggcggtgttcgccgagatcggcccgcgcatggccgagttgagcggttcccggctggccgcgcagcaacagatggaaggcctcctggcgccgcaccggcccaaggagcccgcgtggttcctggccaccgtcggcgtctcgcccgaccaccagggcaagggtctgggcagcgccgtcgtgctccccggagtggaggcggccgagcgcgccggggtgcccgccttcctggagacctccgcgccccgcaacctccccttctacgagcggctcggcttcaccgtcaccgccgacgtcgaggtgcccgaaggaccgcgcacctggtgcatgacccgcaagcccggtgcctga

SEQ ID NO: 4350 - DNA, 3024 bp, Artificial Sequence
  Synthetic Polynucloetide
atggccttaccagtgaccgccttgctcctgccgctggccttgctgctccacgccgccaggccggacatccagatgacacagagccctagcagcctgtctgccagcgtgggagacagagtgaccatcacatgcaaggccagcgaccacatcaacaactggctggcctggtatcagcagaagcctggacaggcccctaagctgctgatctacggcgctaccacactggaaacaggcgtgcccagcagattttctggcagcggctctggcaccgactacaccctgacaatatccagcctccagcctgaggacttcgccacctactactgtcagcagagctggaacaccccttggacattcggccagggcaccaagctggaaatcaagagactcgaggacctgaagaacgtgttcccacctgaggtggccgtgttcgagcctagcgaggccgagatcagccacacccagaaagccaccctcgtgtgcctggctaccggcttctaccccgaccatgtggaactgtcttggtgggtcaacggcaaagaggtgcacagcggcgtgtctaccgacccccagccactgaaagaacagcccgccctgaacgacagccggtactgcctgagcagcagactgagagtgtccgccaccttctggcagaacccccggaaccacttcagatgccaggtgcagttctacggcctgagcgagaacgacgagtggacccaggacagagccaagcccgtgacccagatcgtgtctgccgaagcctggggcagagccgattgcggctttaccagcgagagctaccagcagggcgtgctgagcgccaccatcctgtacgagatcctgctgggcaaggccaccctgtacgccgtgctggtgtctgccctggtgctgatggctatggtcaagcggaaggacagccggggaagggccaagcgatctggatctggagcaacaaacttctcactactcaaacaagcaggtgacgtggaggagaatcccgggcctactagtatggactggatttggcgcatccttttccttgtcggcgctgctaccggcgcccattccgggcccatggaccccgacctggaaatcagagccgccttcctgcggcagagaaacacagccctgagaacagaggtggccgagctggaacaagaggtgcagcggctggaaaacgaggtgtcccagtacgagacaagatacggccctctcggaggcggaaaaggatccggcggcggaggatctggcggaggcggatctgggggcggaggctctttcgaacaagttcagcttcaacagcctggcgctgagctggtcaaacctggcgcttctgtgaagatgagctgcaaagccagcggctacgccttcagcagctactggatcaactggatgaagcagaaacccggccagggactcgaatggatcggccaaatctatcccggcgacggcgacaccaactacaacggcaagttcaagggcagagccacactgaccgccgatacctctagcagcacagcctacatgcagctgagcagcctgaccagcgaagatagcgccgtgtacttctgtgcccggtccatcacaacagtcgtgggctgcgctatggactattggggccagggaacaagcgtgaccgtgtctagtacgcgtgagcagaaactgatctcggaagaggatgggagcggcaccccattcccttctctggcccctcccatcatgctgctggtggacggcaagcagcagatggtggtcgtgtgcctggtgctggatgtggccccacctggactggacagccccatctggtttagcgccggcaatggctctgccctggacgcctttacctacggcccaagccctgccaccgatggcacctggacaaatctggcccacctgagcctgcccagcgaggaactggcttcttgggagcctctcgtgtgccacacaggacctggcgctgagggacacagcagatccacccagcctatgcacctgtctggcgaggccagcaccgccagaacctgtcctcaggaacctctgagaggcacccctggcggagcactgtggctgggagtgctgagactgctgctgttcaagctgctgctgtttgacctgctgctgacctgctcctgtctgtgcgatcctgccggccctctgccttctcctgccaccaccacaagactgagagccctgggcagccacagactgcaccctgccacagagacaggcggcagagaggccacaagcagccctagaccccagcccagagacagaagatggggcgataccccccctggcagaaagcctggatctccagtccgcgccaagagaagcggatctggcgtgaagcagaccctgaatttcgacctgctgaagctggctggcgacgtggaatccaacccaggcccttctagaggccatatgaccgagtacaagcccacggtgcgcctcgccacccgcgacgacgtccccagggccgtacgcaccctcgccgccgcgttcgccgactaccccgccacgcgccacaccgtcgatccggaccgccacatcgagcgggtcaccgagctgcaagaactcttcctcacgcgcgtcgggctcgacatcggcaaggtgtgggtcgcggacgacggcgccgcggtggcggtctggaccacgccggagagcgtcgaagcgggggcggtgttcgccgagatcggcccgcgcatggccgagttgagcggttcccggctggccgcgcagcaacagatggaaggcctcctggcgccgcaccggcccaaggagcccgcgtggttcctggccaccgtcggcgtctcgcccgaccaccagggcaagggtctgggcagcgccgtcgtgctccccggagtggaggcggccgagcgcgccggggtgcccgccttcctggagacctccgcgccccgcaacctccccttctacgagcggctcggcttcaccgtcaccgccgacgtcgaggtgcccgaaggaccgcgcacctggtgcatgacccgcaagcccggtgcctga

SEQ ID NO: 4351 - DNA, 2889 bp, Artificial Sequence
  Synthetic Polynucloetide
atggccttaccagtgaccgccttgctcctgccgctggccttgctgctccacgccgccaggccggacatccagatgacacagagccctagcagcctgtctgccagcgtgggagacagagtgaccatcacatgcaaggccagcgaccacatcaacaactggctggcctggtatcagcagaagcctggacaggcccctaagctgctgatctacggcgctaccacactggaaacaggcgtgcccagcagattttctggcagcggctctggcaccgactacaccctgacaatatccagcctccagcctgaggacttcgccacctactactgtcagcagagctggaacaccccttggacattcggccagggcaccaagctggaaatcaagagactcgaggggaaaccaattcccaaccctcttctgggactggattcaaccggcagcggcgacaagcagctggacgccgacgtgtcccccaagcctaccatcttcctgccctctatcgccgagacaaagctccagaaggccggcacctacctgtgcctgctggaaaagttcttcccagatgtgattaagatccactggcaggaaaagaagtccaacaccatcctgggcagccaggaaggcaacaccatgaagaccaacgacacctacatgaagttcagctggctgaccgtgcccgagaagtccctggacaaagaacacagatgcatcgtgcggcacgaaaacaacaagaacggcgtggaccaggaaatcatcttcccacccatcaagaccgatgtgattacaatggaccccaaggacaactgctccaaggacgccaacgataccctgctgctccagctgaccaacaccagcgcctactacatgtacttgttgctgctgctgaagtccgtggtgtacttcgccatcatcacatgctgcctgctgcggagaaccgccttctgctgcaacggcgagaagtctagggccaagcgatctggatctggagcaacaaacttctcactactcaaacaagcaggtgacgtggaggagaatcccgggcctactagtatggactggatttggcgcatccttttccttgtcggcgctgctaccggcgcccattccgggcccatggaccccgacctggaaatcagagccgccttcctgcggcagagaaacacagccctgagaacagaggtggccgagctggaacaagaggtgcagcggctggaaaacgaggtgtcccagtacgagacaagatacggccctctcggaggcggaaaaggatccggcggcggaggatctggcggaggcggatctgggggcggaggctctttcgaacaagttcagcttcaacagcctggcgctgagctggtcaaacctggcgcttctgtgaagatgagctgcaaagccagcggctacgccttcagcagctactggatcaactggatgaagcagaaacccggccagggactcgaatggatcggccaaatctatcccggcgacggcgacaccaactacaacggcaagttcaagggcagagccacactgaccgccgatacctctagcagcacagcctacatgcagctgagcagcctgaccagcgaagatagcgccgtgtacttctgtgcccggtccatcacaacagtcgtgggctgcgctatggactattggggccagggaacaagcgtgaccgtgtctagtacgcgtgagcagaaactgatctcggaagaggatgggagcggcagccagcctcacaccaagcccagcgtgttcgtgatgaagaacggcaccaacgtggcctgcctcgtgaaagagttctaccccaaggacatcaggatcaacctggtgtccagcaagaagatcaccgagttcgaccccgccatcgtgatctcccccagcggcaagtacaacgccgtgaagctggggaagtacgaggacagcaacagcgtgacctgctccgtgcagcacgacaacaagaccgtgcacagcaccgactttgaagtgaaaaccgactccaccgaccacgtgaagcccaaagagacagagaacaccaagcagcccagcaagagctgccacaagcccaaggccatcgtgcacaccgagaaagtgaacatgatgagcctgaccgtgctgggcctgcggatgctgttcgccaaaaccgtggccgtgaacttcctgctgaccgccaagctgttcttcctccgcgccaagagaagcggatctggcgtgaagcagaccctgaatttcgacctgctgaagctggctggcgacgtggaatccaacccaggcccttctagaggccatatgaccgagtacaagcccacggtgcgcctcgccacccgcgacgacgtccccagggccgtacgcaccctcgccgccgcgttcgccgactaccccgccacgcgccacaccgtcgatccggaccgccacatcgagcgggtcaccgagctgcaagaactcttcctcacgcgcgtcgggctcgacatcggcaaggtgtgggtcgcggacgacggcgccgcggtggcggtctggaccacgccggagagcgtcgaagcgggggcggtgttcgccgagatcggcccgcgcatggccgagttgagcggttcccggctggccgcgcagcaacagatggaaggcctcctggcgccgcaccggcccaaggagcccgcgtggttcctggccaccgtcggcgtctcgcccgaccaccagggcaagggtctgggcagcgccgtcgtgctccccggagtggaggcggccgagcgcgccggggtgcccgccttcctggagacctccgcgccccgcaacctccccttctacgagcggctcggcttcaccgtcaccgccgacgtcgaggtgcccgaaggaccgcgcacctggtgcatgacccgcaagcccggtgcctga

SEQ ID NO: 4352 - DNA, 2100 bp, Artificial Sequence
  Synthetic Polynucloetide
atggccttaccagtgaccgccttgctcctgccgctggccttgctgctccacgccgccaggccggacatccagatgacacagagccctagcagcctgtctgccagcgtgggagacagagtgaccatcacatgcaaggccagcgaccacatcaacaactggctggcctggtatcagcagaagcctggacaggcccctaagctgctgatctacggcgctaccacactggaaacaggcgtgcccagcagattttctggcagcggctctggcaccgactacaccctgacaatatccagcctccagcctgaggacttcgccacctactactgtcagcagagctggaacaccccttggacattcggccagggcaccaagctggaaatcaagagactcgagagccagcctcacaccaagcccagcgtgttcgtgatgaagaacggcaccaacgtggcctgcctcgtgaaagagttctaccccaaggacatcaggatcaacctggtgtccagcaagaagatcaccgagttcgaccccgccatcgtgatctcccccagcggcaagtacaacgccgtgaagctggggaagtacgaggacagcaacagcgtgacctgctccgtgcagcacgacaacaagaccgtgcacagcaccgactttgaagtgaaaaccgactccaccgaccacgtgaagcccaaagagacagagaacaccaagcagcccagcaagagctgccacaagcccaaggccatcgtgcacaccgagaaagtgaacatgatgagcctgaccgtgctgggcctgcggatgctgttcgccaaaaccgtggccgtgaacttcctgctgaccgccaagctgttcttcctcagggccaagcgatctggatctggagcaacaaacttctcactactcaaacaagcaggtgacgtggaggagaatcccgggcctactagtatggactggatttggcgcatccttttccttgtcggcgctgctaccggcgcccattccgggcccatggaccccgacctggaaatcagagccgccttcctgcggcagagaaacacagccctgagaacagaggtggccgagctggaacaagaggtgcagcggctggaaaacgaggtgtcccagtacgagacaagatacggccctctcggaggcggaaaaggatccggcggcggaggatctggcggaggcggatctgggggcggaggctctttcgaacaagttcagcttcaacagcctggcgctgagctggtcaaacctggcgcttctgtgaagatgagctgcaaagccagcggctacgccttcagcagctactggatcaactggatgaagcagaaacccggccagggactcgaatggatcggccaaatctatcccggcgacggcgacaccaactacaacggcaagttcaagggcagagccacactgaccgccgatacctctagcagcacagcctacatgcagctgagcagcctgaccagcgaagatagcgccgtgtacttctgtgcccggtccatcacaacagtcgtgggctgcgctatggactattggggccagggaacaagcgtgaccgtgtctagtacgcgtgacaagcagctggacgccgacgtgtcccccaagcctaccatcttcctgccctctatcgccgagacaaagctccagaaggccggcacctacctgtgcctgctggaaaagttcttcccagatgtgattaagatccactggcaggaaaagaagtccaacaccatcctgggcagccaggaaggcaacaccatgaagaccaacgacacctacatgaagttcagctggctgaccgtgcccgagaagtccctggacaaagaacacagatgcatcgtgcggcacgaaaacaacaagaacggcgtggaccaggaaatcatcttcccacccatcaagaccgatgtgattacaatggaccccaaggacaactgctccaaggacgccaacgataccctgctgctccagctgaccaacaccagcgcctactacatgtacttgttgctgctgctgaagtccgtggtgtacttcgccatcatcacatgctgcctgctgcggagaaccgccttctgctgcaacggcgagaagtct

SEQ ID NO: 4353 - DNA, 3309 bp, Artificial Sequence
  Synthetic Polynucloetide
atggccttaccagtgaccgccttgctcctgccgctggccttgctgctccacgccgccaggccggacatccagatgacacagagccctagcagcctgtctgccagcgtgggagacagagtgaccatcacatgcaaggccagcgaccacatcaacaactggctggcctggtatcagcagaagcctggacaggcccctaagctgctgatctacggcgctaccacactggaaacaggcgtgcccagcagattttctggcagcggctctggcaccgactacaccctgacaatatccagcctccagcctgaggacttcgccacctactactgtcagcagagctggaacaccccttggacattcggccagggcaccaagctggaaatcaagagaggacagcctaaggccaatcctaccgtgacactgttccctccaagcagcgaagaactccaggccaacaaggccacacttgtgtgcctgatctccgacttctaccctggggctgtgacagtggcttggaaggccgatggatctcctgtgaaagccggcgtggaaaccaccaagccatccaagcagagcaacaacaaatacgccgccagctcctacctgagcctgacacctgagcagtggaagtcccacagatcctacagctgccaagtgacccacgaaggcagcaccgtggaaaagacagtggcccctacagagtgcagcggatcccagagcttcggcctgctggaccccaagctgtgctacctgctggatggcatcctgttcatctacggcgtgatcctgaccgccctgttcctgagagtgaagttcagcagaagcgccgacgcccctgcctaccagcagggacagaaccaactgtacaacgagctgaacctgggcagacgggaagagtacgacgtgctggacaagcggagaggcagggaccctgagatgggcggaaagccccagcggagaaagaacccccaggaaggactgtataacgaactccagaaagacaagatggccgaagcctacagcgagatcggcatgaagggcgagcggagaagaggcaagggccacgatggcctgtaccagggcctgagcaccgccaccaaggacacctatgacgccctgcacatgcaggccctgcctccaagaagggccaagcgatctggatctggagcaacaaacttctcactactcaaacaagcaggtgacgtggaggagaatcccgggcctactagtatggactggatttggcgcatccttttccttgtcggcgctgctaccggcgcccattccgggcccatggaccccgacctggaaatcagagccgccttcctgcggcagagaaacacagccctgagaacagaggtggccgagctggaacaagaggtgcagcggctggaaaacgaggtgtcccagtacgagacaagatacggccctctcggaggcggaaaaggatccggcggcggaggatctggcggaggcggatctgggggcggaggctctttcgaacaagttcagcttcaacagcctggcgctgagctggtcaaacctggcgcttctgtgaagatgagctgcaaagccagcggctacgccttcagcagctactggatcaactggatgaagcagaaacccggccagggactcgaatggatcggccaaatctatcccggcgacggcgacaccaactacaacggcaagttcaagggcagagccacactgaccgccgatacctctagcagcacagcctacatgcagctgagcagcctgaccagcgaagatagcgccgtgtacttctgtgcccggtccatcacaacagtcgtgggctgcgctatggactattggggccagggaacaagcgtgaccgtgtctagtgcctctacaaagggaccctccgtgtttcctctggctcccagcagcaagtctacaagcggaggaacagccgctctgggctgcctggtcaaggattactttcccgagcctgtgaccgtgtcctggaatagcggagcactgacaagcggcgtgcacacctttccagccgtgctgcaaagcagcggcctgtactctctgagcagcgtggtcacagtgcctagctctagcctgggcacccagacctacatctgcaatgtgaaccacaagcctagcaacaccaaggtggacaagagagtggaacccaagagctgtggtacccagagttttgggttgttggaccctaaattgtgctatctgttggacggaatcctgttcatttacggagtgatcctgaccgcattgttcctgcgggttaagttttccagatccgcagacgcacccgcttaccaacaagggcagaaccaactctacaatgaacttaatttggggcggagggaagagtacgacgttctggacaaaaggaggggacgagatcccgagatgggcggaaagcctcagcgaaggaagaatccgcaagaggggctttataacgaactccagaaagataaaatggcagaagcctatagtgagattgggatgaagggagaaaggaggaggggtaaaggtcacgatgggttgtaccaaggattgagcacagccactaaagatacctatgatgcgctccacatgcaggccctgccgccaagacgcgccaagagaagcggatctggcgtgaagcagaccctgaatttcgacctgctgaagctggctggcgacgtggaatccaacccaggcccttctagaggccatatgaccgagtacaagcccacggtgcgcctcgccacccgcgacgacgtccccagggccgtacgcaccctcgccgccgcgttcgccgactaccccgccacgcgccacaccgtcgatccggaccgccacatcgagcgggtcaccgagctgcaagaactcttcctcacgcgcgtcgggctcgacatcggcaaggtgtgggtcgcggacgacggcgccgcggtggcggtctggaccacgccggagagcgtcgaagcgggggcggtgttcgccgagatcggcccgcgcatggccgagttgagcggttcccggctggccgcgcagcaacagatggaaggcctcctggcgccgcaccggcccaaggagcccgcgtggttcctggccaccgtcggcgtctcgcccgaccaccagggcaagggtctgggcagcgccgtcgtgctccccggagtggaggcggccgagcgcgccggggtgcccgccttcctggagacctccgcgccccgcaacctccccttctacgagcggctcggcttcaccgtcaccgccgacgtcgaggtgcccgaaggaccgcgcacctggtgcatgacccgcaagcccggtgcctga

SEQ ID NO: 4354 - DNA, 2664 bp, Artificial Sequence
  Synthetic Polynucloetide
atggccttaccagtgaccgccttgctcctgccgctggccttgctgctccacgccgccaggccggacatccagatgacacagagccctagcagcctgtctgccagcgtgggagacagagtgaccatcacatgcaaggccagcgaccacatcaacaactggctggcctggtatcagcagaagcctggacaggcccctaagctgctgatctacggcgctaccacactggaaacaggcgtgcccagcagattttctggcagcggctctggcaccgactacaccctgacaatatccagcctccagcctgaggacttcgccacctactactgtcagcagagctggaacaccccttggacattcggccagggcaccaagctggaaatcaagagactcgaggacctgaagaacgtgttcccacctgaggtggccgtgttcgagcctagcgaggccgagatcagccacacccagaaagccaccctcgtgtgcctggctaccggcttctaccccgaccatgtggaactgtcttggtgggtcaacggcaaagaggtgcacagcggcgtgtctaccgacccccagccactgaaagaacagcccgccctgaacgacagccggtactgcctgagcagcagactgagagtgtccgccaccttctggcagaacccccggaaccacttcagatgccaggtgcagttctacggcctgagcgagaacgacgagtggacccaggacagagccaagcccgtgacccagatcgtgtctgccgaagcctggggcagagccgattgcggatcccagagcttcggcctgctggaccccaagctgtgctacctgctggatggcatcctgttcatctacggcgtgatcctgaccgccctgttcctgagagtgaagttcagcagaagcgccgacgcccctgcctaccagcagggacagaaccaactgtacaacgagctgaacctgggcagacgggaagagtacgacgtgctggacaagcggagaggcagggaccctgagatgggcggaaagccccagcggagaaagaacccccaggaaggactgtataacgaactccagaaagacaagatggccgaagcctacagcgagatcggcatgaagggcgagcggagaagaggcaagggccacgatggcctgtaccagggcctgagcaccgccaccaaggacacctatgacgccctgcacatgcaggccctgcctccaagaagggccaagcgatctggatctggagcaacaaacttctcactactcaaacaagcaggtgacgtggaggagaatcccgggcctactagtatggactggatttggcgcatccttttccttgtcggcgctgctaccggcgcccattccgggcccatggaccccgacctggaaatcagagccgccttcctgcggcagagaaacacagccctgagaacagaggtggccgagctggaacaagaggtgcagcggctggaaaacgaggtgtcccagtacgagacaagatacggccctctcggaggcggaaaaggatccggcggcggaggatctggcggaggcggatctgggggcggaggctctttcgaacaagttcagcttcaacagcctggcgctgagctggtcaaacctggcgcttctgtgaagatgagctgcaaagccagcggctacgccttcagcagctactggatcaactggatgaagcagaaacccggccagggactcgaatggatcggccaaatctatcccggcgacggcgacaccaactacaacggcaagttcaagggcagagccacactgaccgccgatacctctagcagcacagcctacatgcagctgagcagcctgaccagcgaagatagcgccgtgtacttctgtgcccggtccatcacaacagtcgtgggctgcgctatggactattggggccagggaacaagcgtgaccgtgtctagtacgcgtatccagaaccctgatcctgccgtgtaccagctgcgggatagcaagagcagcgacaagagcgtgtgtctgttcaccgacttcgacagccagaccaacgtgtcccagagcaaggactccgacgtgtacatcaccgataagaccgtgctggacatgcggagcatggacttcaagagcaactccgccgtggcctggtccaacaagtccgatttcgcctgcgccaacgccttcaacaacagcattatccccgaggacacattcttcccaagccccgagagcagctgcggtacccagagttttgggttgttggaccctaaattgtgctatctgttggacggaatcctgttcatttacggagtgatcctgaccgcattgttcctgcgggttaagttttccagatccgcagacgcacccgcttaccaacaagggcagaaccaactctacaatgaacttaatttggggcggagggaagagtacgacgttctggacaaaaggaggggacgagatcccgagatgggcggaaagcctcagcgaaggaagaatccgcaagaggggctttataacgaactccagaaagataaaatggcagaagcctatagtgagattgggatgaagggagaaaggaggaggggtaaaggtcacgatgggttgtaccaaggattgagcacagccactaaagatacctatgatgcgctccacatgcaggccctgccgccaaga

SEQ ID NO: 4355 - DNA, 2664 bp, Artificial Sequence
  Synthetic Polynucloetide
atggccttaccagtgaccgccttgctcctgccgctggccttgctgctccacgccgccaggccggacatccagatgacacagagccctagcagcctgtctgccagcgtgggagacagagtgaccatcacatgcaaggccagcgaccacatcaacaactggctggcctggtatcagcagaagcctggacaggcccctaagctgctgatctacggcgctaccacactggaaacaggcgtgcccagcagattttctggcagcggctctggcaccgactacaccctgacaatatccagcctccagcctgaggacttcgccacctactactgtcagcagagctggaacaccccttggacattcggccagggcaccaagctggaaatcaagagactcgaggacctgaagaacgtgttcccacctgaggtggccgtgttcgagcctagcaaggccgagatcgcccacacccagaaagccaccctcgtgtgcctggctaccggcttctaccccgaccatgtggaactgtcttggtgggtcaacggcaaagaggtgcacagcggcgtgtgtaccgacccccagccactgaaagaacagcccgccctgaacgacagccggtactgcctgagcagcagactgagagtgtccgccaccttctggcagaacccccggaaccacttcagatgccaggtgcagttctacggcctgagcgagaacgacgagtggacccaggacagagccaagcccgtgacccagatcgtgtctgccgaagcctggggcagagccgattgcggatcccagagcttcggcctgctggaccccaagctgtgctacctgctggatggcatcctgttcatctacggcgtgatcctgaccgccctgttcctgagagtgaagttcagcagaagcgccgacgcccctgcctaccagcagggacagaaccaactgtacaacgagctgaacctgggcagacgggaagagtacgacgtgctggacaagcggagaggcagggaccctgagatgggcggaaagccccagcggagaaagaacccccaggaaggactgtataacgaactccagaaagacaagatggccgaagcctacagcgagatcggcatgaagggcgagcggagaagaggcaagggccacgatggcctgtaccagggcctgagcaccgccaccaaggacacctatgacgccctgcacatgcaggccctgcctccaagaagggccaagcgatctggatctggagcaacaaacttctcactactcaaacaagcaggtgacgtggaggagaatcccgggcctactagtatggactggatttggcgcatccttttccttgtcggcgctgctaccggcgcccattccgggcccatggaccccgacctggaaatcagagccgccttcctgcggcagagaaacacagccctgagaacagaggtggccgagctggaacaagaggtgcagcggctggaaaacgaggtgtcccagtacgagacaagatacggccctctcggaggcggaaaaggatccggcggcggaggatctggcggaggcggatctgggggcggaggctctttcgaacaagttcagcttcaacagcctggcgctgagctggtcaaacctggcgcttctgtgaagatgagctgcaaagccagcggctacgccttcagcagctactggatcaactggatgaagcagaaacccggccagggactcgaatggatcggccaaatctatcccggcgacggcgacaccaactacaacggcaagttcaagggcagagccacactgaccgccgatacctctagcagcacagcctacatgcagctgagcagcctgaccagcgaagatagcgccgtgtacttctgtgcccggtccatcacaacagtcgtgggctgcgctatggactattggggccagggaacaagcgtgaccgtgtctagtacgcgtatccagaaccctgatcctgccgtgtaccagctgcgggatagcaagagcagcgacaagagcgtgtgtctgttcaccgacttcgacagccagaccaacgtgtcccagagcaaggactccgacgtgtacatcaccgataagtgcgtgctggacatgcggagcatggacttcaagagcaactccgccgtggcctggtccaacaagtccgatttcgcctgcgccaacgccttcaacaacagcattatccccgaggacacattcttcccaagcagcgacgtgccctgcggtacccagagttttgggttgttggaccctaaattgtgctatctgttggacggaatcctgttcatttacggagtgatcctgaccgcattgttcctgcgggttaagttttccagatccgcagacgcacccgcttaccaacaagggcagaaccaactctacaatgaacttaatttggggcggagggaagagtacgacgttctggacaaaaggaggggacgagatcccgagatgggcggaaagcctcagcgaaggaagaatccgcaagaggggctttataacgaactccagaaagataaaatggcagaagcctatagtgagattgggatgaagggagaaaggaggaggggtaaaggtcacgatgggttgtaccaaggattgagcacagccactaaagatacctatgatgcgctccacatgcaggccctgccgccaaga

SEQ ID NO: 4356 - DNA, 2877 bp, Artificial Sequence
  Synthetic Polynucloetide
atggccttaccagtgaccgccttgctcctgccgctggccttgctgctccacgccgccaggccggacatccagatgacacagagccctagcagcctgtctgccagcgtgggagacagagtgaccatcacatgcaaggccagcgaccacatcaacaactggctggcctggtatcagcagaagcctggacaggcccctaagctgctgatctacggcgctaccacactggaaacaggcgtgcccagcagattttctggcagcggctctggcaccgactacaccctgacaatatccagcctccagcctgaggacttcgccacctactactgtcagcagagctggaacaccccttggacattcggccagggcaccaagctggaaatcaagagactcgaggggaaaccaattcccaaccctcttctgggactggattcaaccggcagcggcgaggacctgaagaacgtgttcccacctgaggtggccgtgttcgagcctagcgaggccgagatcagccacacccagaaagccaccctcgtgtgcctggctaccggcttctaccccgaccatgtggaactgtcttggtgggtcaacggcaaagaggtgcacagcggcgtgtctaccgacccccagccactgaaagaacagcccgccctgaacgacagccggtactgcctgagcagcagactgagagtgtccgccaccttctggcagaacccccggaaccacttcagatgccaggtgcagttctacggcctgagcgagaacgacgagtggacccaggacagagccaagcccgtgacccagatcgtgtctgccgaagcctggggcagagccgattgcggatcccagagcttcggcctgctggaccccaagctgtgctacctgctggatggcatcctgttcatctacggcgtgatcctgaccgccctgttcctgagagtgaagttcagcagaagcgccgacgcccctgcctaccagcagggacagaaccaactgtacaacgagctgaacctgggcagacgggaagagtacgacgtgctggacaagcggagaggcagggaccctgagatgggcggaaagccccagcggagaaagaacccccaggaaggactgtataacgaactccagaaagacaagatggccgaagcctacagcgagatcggcatgaagggcgagcggagaagaggcaagggccacgatggcctgtaccagggcctgagcaccgccaccaaggacacctatgacgccctgcacatgcaggccctgcctccaagaagggccaagcgatctggatctggagcaacaaacttctcactactcaaacaagcaggtgacgtggaggagaatcccgggcctactagtatggactggatttggcgcatccttttccttgtcggcgctgctaccggcgcccattccgggcccatggaccccgacctggaaatcagagccgccttcctgcggcagagaaacacagccctgagaacagaggtggccgagctggaacaagaggtgcagcggctggaaaacgaggtgtcccagtacgagacaagatacggccctctcggaggcggaaaaggatccggcggcggaggatctggcggaggcggatctgggggcggaggctctttcgaacaagttcagcttcaacagcctggcgctgagctggtcaaacctggcgcttctgtgaagatgagctgcaaagccagcggctacgccttcagcagctactggatcaactggatgaagcagaaacccggccagggactcgaatggatcggccaaatctatcccggcgacggcgacaccaactacaacggcaagttcaagggcagagccacactgaccgccgatacctctagcagcacagcctacatgcagctgagcagcctgaccagcgaagatagcgccgtgtacttctgtgcccggtccatcacaacagtcgtgggctgcgctatggactattggggccagggaacaagcgtgaccgtgtctagtacgcgtgagcagaaactgatctcggaagaggatgggagcggcatccagaaccctgatcctgccgtgtaccagctgcgggatagcaagagcagcgacaagagcgtgtgtctgttcaccgacttcgacagccagaccaacgtgtcccagagcaaggactccgacgtgtacatcaccgataagaccgtgctggacatgcggagcatggacttcaagagcaactccgccgtggcctggtccaacaagtccgatttcgcctgcgccaacgccttcaacaacagcattatccccgaggacacattcttcccaagccccgagagcagctgcggtacccagagttttgggttgttggaccctaaattgtgctatctgttggacggaatcctgttcatttacggagtgatcctgaccgcattgttcctgaggagcaagcggtcacggctgctccacagcgattacatgaatatgacaccacgaagaccgggtcctactcgcaaacactaccaaccctacgcacctccccgcgactttgcagcgtaccgatctcgggttaagttttccagatccgcagacgcacccgcttaccaacaagggcagaaccaactctacaatgaacttaatttggggcggagggaagagtacgacgttctggacaaaaggaggggacgagatcccgagatgggcggaaagcctcagcgaaggaagaatccgcaagaggggctttataacgaactccagaaagataaaatggcagaagcctatagtgagattgggatgaagggagaaaggaggaggggtaaaggtcacgatgggttgtaccaaggattgagcacagccactaaagatacctatgatgcgctccacatgcaggccctgccgccaaga

SEQ ID NO: 4357 - DNA, 3000 bp, Artificial Sequence
  Synthetic Polynucloetide
atggccttaccagtgaccgccttgctcctgccgctggccttgctgctccacgccgccaggccggacatccagatgacacagagccctagcagcctgtctgccagcgtgggagacagagtgaccatcacatgcaaggccagcgaccacatcaacaactggctggcctggtatcagcagaagcctggacaggcccctaagctgctgatctacggcgctaccacactggaaacaggcgtgcccagcagattttctggcagcggctctggcaccgactacaccctgacaatatccagcctccagcctgaggacttcgccacctactactgtcagcagagctggaacaccccttggacattcggccagggcaccaagctggaaatcaagagactcgaggggaaaccaattcccaaccctcttctgggactggattcaaccggcagcggcgaggacctgaagaacgtgttcccacctgaggtggccgtgttcgagcctagcgaggccgagatcagccacacccagaaagccaccctcgtgtgcctggctaccggcttctaccccgaccatgtggaactgtcttggtgggtcaacggcaaagaggtgcacagcggcgtgtctaccgacccccagccactgaaagaacagcccgccctgaacgacagccggtactgcctgagcagcagactgagagtgtccgccaccttctggcagaacccccggaaccacttcagatgccaggtgcagttctacggcctgagcgagaacgacgagtggacccaggacagagccaagcccgtgacccagatcgtgtctgccgaagcctggggcagagccgattgcggatcccagagcttcggcctgctggaccccaagctgtgctacctgctggatggcatcctgttcatctacggcgtgatcctgaccgccctgttcctgaggagtaagaggagcaggctcctgcacagtgactacatgaacatgactccacgccgccccggacccacccgcaagcattaccagccctatgccccaccacgcgacttcgcagcctatcgctccagagtgaagttcagcagaagcgccgacgcccctgcctaccagcagggacagaaccaactgtacaacgagctgaacctgggcagacgggaagagtacgacgtgctggacaagcggagaggcagggaccctgagatgggcggaaagccccagcggagaaagaacccccaggaaggactgtataacgaactccagaaagacaagatggccgaagcctacagcgagatcggcatgaagggcgagcggagaagaggcaagggccacgatggcctgtaccagggcctgagcaccgccaccaaggacacctatgacgccctgcacatgcaggccctgcctccaagaagggccaagcgatctggatctggagcaacaaacttctcactactcaaacaagcaggtgacgtggaggagaatcccgggcctactagtatggactggatttggcgcatccttttccttgtcggcgctgctaccggcgcccattccgggcccatggaccccgacctggaaatcagagccgccttcctgcggcagagaaacacagccctgagaacagaggtggccgagctggaacaagaggtgcagcggctggaaaacgaggtgtcccagtacgagacaagatacggccctctcggaggcggaaaaggatccggcggcggaggatctggcggaggcggatctgggggcggaggctctttcgaacaagttcagcttcaacagcctggcgctgagctggtcaaacctggcgcttctgtgaagatgagctgcaaagccagcggctacgccttcagcagctactggatcaactggatgaagcagaaacccggccagggactcgaatggatcggccaaatctatcccggcgacggcgacaccaactacaacggcaagttcaagggcagagccacactgaccgccgatacctctagcagcacagcctacatgcagctgagcagcctgaccagcgaagatagcgccgtgtacttctgtgcccggtccatcacaacagtcgtgggctgcgctatggactattggggccagggaacaagcgtgaccgtgtctagtacgcgtgagcagaaactgatctcggaagaggatgggagcggcatccagaaccctgatcctgccgtgtaccagctgcgggatagcaagagcagcgacaagagcgtgtgtctgttcaccgacttcgacagccagaccaacgtgtcccagagcaaggactccgacgtgtacatcaccgataagaccgtgctggacatgcggagcatggacttcaagagcaactccgccgtggcctggtccaacaagtccgatttcgcctgcgccaacgccttcaacaacagcattatccccgaggacacattcttcccaagccccgagagcagctgcggtacccagagttttgggttgttggaccctaaattgtgctatctgttggacggaatcctgttcatttacggagtgatcctgaccgcattgttcctgaggagcaagcggtcacggctgctccacagcgattacatgaatatgacaccacgaagaccgggtcctactcgcaaacactaccaaccctacgcacctccccgcgactttgcagcgtaccgatctcgggttaagttttccagatccgcagacgcacccgcttaccaacaagggcagaaccaactctacaatgaacttaatttggggcggagggaagagtacgacgttctggacaaaaggaggggacgagatcccgagatgggcggaaagcctcagcgaaggaagaatccgcaagaggggctttataacgaactccagaaagataaaatggcagaagcctatagtgagattgggatgaagggagaaaggaggaggggtaaaggtcacgatgggttgtaccaaggattgagcacagccactaaagatacctatgatgcgctccacatgcaggccctgccgccaaga

SEQ ID NO: 4358 - DNA, 2883 bp, Artificial Sequence
  Synthetic Polynucloetide
atggccttaccagtgaccgccttgctcctgccgctggccttgctgctccacgccgccaggccggacatccagatgacacagagccctagcagcctgtctgccagcgtgggagacagagtgaccatcacatgcaaggccagcgaccacatcaacaactggctggcctggtatcagcagaagcctggacaggcccctaagctgctgatctacggcgctaccacactggaaacaggcgtgcccagcagattttctggcagcggctctggcaccgactacaccctgacaatatccagcctccagcctgaggacttcgccacctactactgtcagcagagctggaacaccccttggacattcggccagggcaccaagctggaaatcaagagactcgaggggaaaccaattcccaaccctcttctgggactggattcaaccggcagcggcgaggacctgaagaacgtgttcccacctgaggtggccgtgttcgagcctagcgaggccgagatcagccacacccagaaagccaccctcgtgtgcctggctaccggcttctaccccgaccatgtggaactgtcttggtgggtcaacggcaaagaggtgcacagcggcgtgtctaccgacccccagccactgaaagaacagcccgccctgaacgacagccggtactgcctgagcagcagactgagagtgtccgccaccttctggcagaacccccggaaccacttcagatgccaggtgcagttctacggcctgagcgagaacgacgagtggacccaggacagagccaagcccgtgacccagatcgtgtctgccgaagcctggggcagagccgattgcggatcccagagcttcggcctgctggaccccaagctgtgctacctgctggatggcatcctgttcatctacggcgtgatcctgaccgccctgttcctgagagtgaagttcagcagaagcgccgacgcccctgcctaccagcagggacagaaccaactgtacaacgagctgaacctgggcagacgggaagagtacgacgtgctggacaagcggagaggcagggaccctgagatgggcggaaagccccagcggagaaagaacccccaggaaggactgtataacgaactccagaaagacaagatggccgaagcctacagcgagatcggcatgaagggcgagcggagaagaggcaagggccacgatggcctgtaccagggcctgagcaccgccaccaaggacacctatgacgccctgcacatgcaggccctgcctccaagaagggccaagcgatctggatctggagcaacaaacttctcactactcaaacaagcaggtgacgtggaggagaatcccgggcctactagtatggactggatttggcgcatccttttccttgtcggcgctgctaccggcgcccattccgggcccatggaccccgacctggaaatcagagccgccttcctgcggcagagaaacacagccctgagaacagaggtggccgagctggaacaagaggtgcagcggctggaaaacgaggtgtcccagtacgagacaagatacggccctctcggaggcggaaaaggatccggcggcggaggatctggcggaggcggatctgggggcggaggctctttcgaacaagttcagcttcaacagcctggcgctgagctggtcaaacctggcgcttctgtgaagatgagctgcaaagccagcggctacgccttcagcagctactggatcaactggatgaagcagaaacccggccagggactcgaatggatcggccaaatctatcccggcgacggcgacaccaactacaacggcaagttcaagggcagagccacactgaccgccgatacctctagcagcacagcctacatgcagctgagcagcctgaccagcgaagatagcgccgtgtacttctgtgcccggtccatcacaacagtcgtgggctgcgctatggactattggggccagggaacaagcgtgaccgtgtctagtacgcgtgagcagaaactgatctcggaagaggatctggggagcggcatccagaaccctgatcctgccgtgtaccagctgcgggatagcaagagcagcgacaagagcgtgtgtctgttcaccgacttcgacagccagaccaacgtgtcccagagcaaggactccgacgtgtacatcaccgataagaccgtgctggacatgcggagcatggacttcaagagcaactccgccgtggcctggtccaacaagtccgatttcgcctgcgccaacgccttcaacaacagcattatccccgaggacacattcttcccaagccccgagagcagctgcggtacccagagttttgggttgttggaccctaaattgtgctatctgttggacggaatcctgttcatttacggagtgatcctgaccgcattgttcctgaagagaggccggaagaagctgctgtacatcttcaagcagcctttcatgcggcccgtgcagaccacccaggaagaggacggctgctcctgccggttccccgaggaagaagaaggcggctgcgagctgcgggttaagttttccagatccgcagacgcacccgcttaccaacaagggcagaaccaactctacaatgaacttaatttggggcggagggaagagtacgacgttctggacaaaaggaggggacgagatcccgagatgggcggaaagcctcagcgaaggaagaatccgcaagaggggctttataacgaactccagaaagataaaatggcagaagcctatagtgagattgggatgaagggagaaaggaggaggggtaaaggtcacgatgggttgtaccaaggattgagcacagccactaaagatacctatgatgcgctccacatgcaggccctgccgccaaga

SEQ ID NO: 4359 - DNA, 3009 bp, Artificial Sequence
  Synthetic Polynucloetide
atggccttaccagtgaccgccttgctcctgccgctggccttgctgctccacgccgccaggccggacatccagatgacacagagccctagcagcctgtctgccagcgtgggagacagagtgaccatcacatgcaaggccagcgaccacatcaacaactggctggcctggtatcagcagaagcctggacaggcccctaagctgctgatctacggcgctaccacactggaaacaggcgtgcccagcagattttctggcagcggctctggcaccgactacaccctgacaatatccagcctccagcctgaggacttcgccacctactactgtcagcagagctggaacaccccttggacattcggccagggcaccaagctggaaatcaagagactcgaggggaaaccaattcccaaccctcttctgggactggattcaaccggcagcggcgaggacctgaagaacgtgttcccacctgaggtggccgtgttcgagcctagcgaggccgagatcagccacacccagaaagccaccctcgtgtgcctggctaccggcttctaccccgaccatgtggaactgtcttggtgggtcaacggcaaagaggtgcacagcggcgtgtctaccgacccccagccactgaaagaacagcccgccctgaacgacagccggtactgcctgagcagcagactgagagtgtccgccaccttctggcagaacccccggaaccacttcagatgccaggtgcagttctacggcctgagcgagaacgacgagtggacccaggacagagccaagcccgtgacccagatcgtgtctgccgaagcctggggcagagccgattgcggatcccagagcttcggcctgctggaccccaagctgtgctacctgctggatggcatcctgttcatctacggcgtgatcctgaccgccctgttcctgaaacggggcagaaagaaactcctgtatatattcaaacaaccatttatgagaccagtacaaactactcaagaggaagatggctgtagctgccgatttccagaagaagaagaaggaggatgtgaactgagagtgaagttcagcagaagcgccgacgcccctgcctaccagcagggacagaaccaactgtacaacgagctgaacctgggcagacgggaagagtacgacgtgctggacaagcggagaggcagggaccctgagatgggcggaaagccccagcggagaaagaacccccaggaaggactgtataacgaactccagaaagacaagatggccgaagcctacagcgagatcggcatgaagggcgagcggagaagaggcaagggccacgatggcctgtaccagggcctgagcaccgccaccaaggacacctatgacgccctgcacatgcaggccctgcctccaagaagggccaagcgatctggatctggagcaacaaacttctcactactcaaacaagcaggtgacgtggaggagaatcccgggcctactagtatggactggatttggcgcatccttttccttgtcggcgctgctaccggcgcccattccgggcccatggaccccgacctggaaatcagagccgccttcctgcggcagagaaacacagccctgagaacagaggtggccgagctggaacaagaggtgcagcggctggaaaacgaggtgtcccagtacgagacaagatacggccctctcggaggcggaaaaggatccggcggcggaggatctggcggaggcggatctgggggcggaggctctttcgaacaagttcagcttcaacagcctggcgctgagctggtcaaacctggcgcttctgtgaagatgagctgcaaagccagcggctacgccttcagcagctactggatcaactggatgaagcagaaacccggccagggactcgaatggatcggccaaatctatcccggcgacggcgacaccaactacaacggcaagttcaagggcagagccacactgaccgccgatacctctagcagcacagcctacatgcagctgagcagcctgaccagcgaagatagcgccgtgtacttctgtgcccggtccatcacaacagtcgtgggctgcgctatggactattggggccagggaacaagcgtgaccgtgtctagtacgcgtgagcagaaactgatctcggaagaggatctggggagcggcatccagaaccctgatcctgccgtgtaccagctgcgggatagcaagagcagcgacaagagcgtgtgtctgttcaccgacttcgacagccagaccaacgtgtcccagagcaaggactccgacgtgtacatcaccgataagaccgtgctggacatgcggagcatggacttcaagagcaactccgccgtggcctggtccaacaagtccgatttcgcctgcgccaacgccttcaacaacagcattatccccgaggacacattcttcccaagccccgagagcagctgcggtacccagagttttgggttgttggaccctaaattgtgctatctgttggacggaatcctgttcatttacggagtgatcctgaccgcattgttcctgaagagaggccggaagaagctgctgtacatcttcaagcagcctttcatgcggcccgtgcagaccacccaggaagaggacggctgctcctgccggttccccgaggaagaagaaggcggctgcgagctgcgggttaagttttccagatccgcagacgcacccgcttaccaacaagggcagaaccaactctacaatgaacttaatttggggcggagggaagagtacgacgttctggacaaaaggaggggacgagatcccgagatgggcggaaagcctcagcgaaggaagaatccgcaagaggggctttataacgaactccagaaagataaaatggcagaagcctatagtgagattgggatgaagggagaaaggaggaggggtaaaggtcacgatgggttgtaccaaggattgagcacagccactaaagatacctatgatgcgctccacatgcaggccctgccgccaaga

SEQ ID NO: 4360 - DNA, 2682 bp, Artificial Sequence
  Synthetic Polynucloetide
atggccttaccagtgaccgccttgctcctgccgctggccttgctgctccacgccgccaggccggacatccagatgacacagagccctagcagcctgtctgccagcgtgggagacagagtgaccatcacatgcaaggccagcgaccacatcaacaactggctggcctggtatcagcagaagcctggacaggcccctaagctgctgatctacggcgctaccacactggaaacaggcgtgcccagcagattttctggcagcggctctggcaccgactacaccctgacaatatccagcctccagcctgaggacttcgccacctactactgtcagcagagctggaacaccccttggacattcggccagggcaccaagctggaaatcaagagactcgagcagagcttcggcctgctggaccccaagctgtgctacctgctggatggcatcctgttcatctacggcgtgatcctgaccgccctgttcctgagagtgaagttcagcagaagcgccgacgcccctgcctaccagcagggacagaaccaactgtacaacgagctgaacctgggcagacgggaagagtacgacgtgctggacaagcggagaggcagggaccctgagatgggcggaaagccccagcggagaaagaacccccaggaaggactgtataacgaactccagaaagacaagatggccgaagcctacagcgagatcggcatgaagggcgagcggagaagaggcaagggccacgatggcctgtaccagggcctgagcaccgccaccaaggacacctatgacgccctgcacatgcaggccctgcctccaagaagggccaagcgatctggatctggagcaacaaacttctcactactcaaacaagcaggtgacgtggaggagaatcccgggcctactagtatggactggatttggcgcatccttttccttgtcggcgctgctaccggcgcccattccgggcccatggaccccgacctggaaatcagagccgccttcctgcggcagagaaacacagccctgagaacagaggtggccgagctggaacaagaggtgcagcggctggaaaacgaggtgtcccagtacgagacaagatacggccctctcggaggcggaaaaggatccggcggcggaggatctggcggaggcggatctgggggcggaggctctttcgaacaagttcagcttcaacagcctggcgctgagctggtcaaacctggcgcttctgtgaagatgagctgcaaagccagcggctacgccttcagcagctactggatcaactggatgaagcagaaacccggccagggactcgaatggatcggccaaatctatcccggcgacggcgacaccaactacaacggcaagttcaagggcagagccacactgaccgccgatacctctagcagcacagcctacatgcagctgagcagcctgaccagcgaagatagcgccgtgtacttctgtgcccggtccatcacaacagtcgtgggctgcgctatggactattggggccagggaacaagcgtgaccgtgtctagtacgcgtcagagttttgggttgttggaccctaaattgtgctatctgttggacggaatcctgttcatttacggagtgatcctgaccgcattgttcctgcgggttaagttttccagatccgcagacgcacccgcttaccaacaagggcagaaccaactctacaatgaacttaatttggggcggagggaagagtacgacgttctggacaaaaggaggggacgagatcccgagatgggcggaaagcctcagcgaaggaagaatccgcaagaggggctttataacgaactccagaaagataaaatggcagaagcctatagtgagattgggatgaagggagaaaggaggaggggtaaaggtcacgatgggttgtaccaaggattgagcacagccactaaagatacctatgatgcgctccacatgcaggccctgccgccaagacgcgccaagagaagcggatctggcgtgaagcagaccctgaatttcgacctgctgaagctggctggcgacgtggaatccaacccaggcccttctagaggccatatgaccgagtacaagcccacggtgcgcctcgccacccgcgacgacgtccccagggccgtacgcaccctcgccgccgcgttcgccgactaccccgccacgcgccacaccgtcgatccggaccgccacatcgagcgggtcaccgagctgcaagaactcttcctcacgcgcgtcgggctcgacatcggcaaggtgtgggtcgcggacgacggcgccgcggtggcggtctggaccacgccggagagcgtcgaagcgggggcggtgttcgccgagatcggcccgcgcatggccgagttgagcggttcccggctggccgcgcagcaacagatggaaggcctcctggcgccgcaccggcccaaggagcccgcgtggttcctggccaccgtcggcgtctcgcccgaccaccagggcaagggtctgggcagcgccgtcgtgctccccggagtggaggcggccgagcgcgccggggtgcccgccttcctggagacctccgcgccccgcaacctccccttctacgagcggctcggcttcaccgtcaccgccgacgtcgaggtgcccgaaggaccgcgcacctggtgcatgacccgcaagcccggtgcctga

SEQ ID NO: 4361 - DNA, 2154 bp, Artificial Sequence
  Synthetic Polynucloetide
atggccttaccagtgaccgccttgctcctgccgctggccttgctgctccacgccgccaggccggacatccagatgacacagagccctagcagcctgtctgccagcgtgggagacagagtgaccatcacatgcaaggccagcgaccacatcaacaactggctggcctggtatcagcagaagcctggacaggcccctaagctgctgatctacggcgctaccacactggaaacaggcgtgcccagcagattttctggcagcggctctggcaccgactacaccctgacaatatccagcctccagcctgaggacttcgccacctactactgtcagcagagctggaacaccccttggacattcggccagggcaccaagctggaaatcaagagactcgagggacagcctaaggccaatcctaccgtgacactgttccctccaagcagcgaagaactccaggccaacaaggccacacttgtgtgcctgatctccgacttctaccctggggctgtgacagtggcttggaaggccgatggatctcctgtgaaagccggcgtggaaaccaccaagccatccaagcagagcaacaacaaatacgccgccagctcctacctgagcctgacacctgagcagtggaagtcccacagatcctacagctgccaagtgacccacgaaggcagcaccgtggaaaagacagtggcccctacagagtgcagccccatcaagaccgatgtgattacaatggaccccaaggacaactgctccaaggacgccaacgataccctgctgctccagctgaccaacaccagcgcctactacatgtacttgttgctgctgctgaagtccgtggtgtacttcgccatcatcacatgctgcctgctgcggagaaccgccttctgctgcaacggcgagaagtctagggccaagcgatctggatctggagcaacaaacttctcactactcaaacaagcaggtgacgtggaggagaatcccgggcctactagtatggactggatttggcgcatccttttccttgtcggcgctgctaccggcgcccattccgggcccatggaccccgacctggaaatcagagccgccttcctgcggcagagaaacacagccctgagaacagaggtggccgagctggaacaagaggtgcagcggctggaaaacgaggtgtcccagtacgagacaagatacggccctctcggaggcggaaaaggatccggcggcggaggatctggcggaggcggatctgggggcggaggctctttcgaacaagttcagcttcaacagcctggcgctgagctggtcaaacctggcgcttctgtgaagatgagctgcaaagccagcggctacgccttcagcagctactggatcaactggatgaagcagaaacccggccagggactcgaatggatcggccaaatctatcccggcgacggcgacaccaactacaacggcaagttcaagggcagagccacactgaccgccgatacctctagcagcacagcctacatgcagctgagcagcctgaccagcgaagatagcgccgtgtacttctgtgcccggtccatcacaacagtcgtgggctgcgctatggactattggggccagggaacaagcgtgaccgtgtctagtacgcgtgcctctacaaagggaccctccgtgtttcctctggctcccagcagcaagtctacaagcggaggaacagccgctctgggctgcctggtcaaggattactttcccgagcctgtgaccgtgtcctggaatagcggagcactgacaagcggcgtgcacacctttccagccgtgctgcaaagcagcggcctgtactctctgagcagcgtggtcacagtgcctagctctagcctgggcacccagacctacatctgcaatgtgaaccacaagcctagcaacaccaaggtggacaagagagtggaacccaagagctgtgaagtgaaaaccgactccaccgaccacgtgaagcccaaagagacagagaacaccaagcagcccagcaagagctgccacaagcccaaggccatcgtgcacaccgagaaagtgaacatgatgagcctgaccgtgctgggcctgcggatgctgttcgccaaaaccgtggccgtgaacttcctgctgaccgccaagctgttcttcctc

SEQ ID NO: 4362 - DNA, 2088 bp, Artificial Sequence
  Synthetic Polynucloetide
atggccttaccagtgaccgccttgctcctgccgctggccttgctgctccacgccgccaggccggacatccagatgacacagagccctagcagcctgtctgccagcgtgggagacagagtgaccatcacatgcaaggccagcgaccacatcaacaactggctggcctggtatcagcagaagcctggacaggcccctaagctgctgatctacggcgctaccacactggaaacaggcgtgcccagcagattttctggcagcggctctggcaccgactacaccctgacaatatccagcctccagcctgaggacttcgccacctactactgtcagcagagctggaacaccccttggacattcggccagggcaccaagctggaaatcaagagactcgagggacagcctaaggccaatcctaccgtgacactgttccctccaagcagcgaagaactccaggccaacaaggccacacttgtgtgcctgatctccgacttctaccctggggctgtgacagtggcttggaaggccgatggatctcctgtgaaagccggcgtggaaaccaccaagccatccaagcagagcaacaacaaatacgccgccagctcctacctgagcctgacacctgagcagtggaagtcccacagatcctacagctgccaagtgacccacgaaggcagcaccgtggaaaagacagtggcccctacagagtgcagcggcagagccgattgcggcatcaccagcgccagctaccaccagggcgtgctgagcgccaccatcctgtacgagatcctgctgggcaaggccaccctgtacgccgtgctggtgtctgccctggtgctgatggctatggtcaagcggaaggacagccggggaagggccaagcgatctggatctggagcaacaaacttctcactactcaaacaagcaggtgacgtggaggagaatcccgggcctactagtatggactggatttggcgcatccttttccttgtcggcgctgctaccggcgcccattccgggcccatggaccccgacctggaaatcagagccgccttcctgcggcagagaaacacagccctgagaacagaggtggccgagctggaacaagaggtgcagcggctggaaaacgaggtgtcccagtacgagacaagatacggccctctcggaggcggaaaaggatccggcggcggaggatctggcggaggcggatctgggggcggaggctctttcgaacaagttcagcttcaacagcctggcgctgagctggtcaaacctggcgcttctgtgaagatgagctgcaaagccagcggctacgccttcagcagctactggatcaactggatgaagcagaaacccggccagggactcgaatggatcggccaaatctatcccggcgacggcgacaccaactacaacggcaagttcaagggcagagccacactgaccgccgatacctctagcagcacagcctacatgcagctgagcagcctgaccagcgaagatagcgccgtgtacttctgtgcccggtccatcacaacagtcgtgggctgcgctatggactattggggccagggaacaagcgtgaccgtgtctagtacgcgtgcctctacaaagggaccctccgtgtttcctctggctcccagcagcaagtctacaagcggaggaacagccgctctgggctgcctggtcaaggattactttcccgagcctgtgaccgtgtcctggaatagcggagcactgacaagcggcgtgcacacctttccagccgtgctgcaaagcagcggcctgtactctctgagcagcgtggtcacagtgcctagctctagcctgggcacccagacctacatctgcaatgtgaaccacaagcctagcaacaccaaggtggacaagagagtggaacccaagagctgtatccccgaggacacattcttcccaagcagcgacgtgccctgcgacgtgaagctggtggaaaagagcttcgagacagacaccaacctgaacttccagaacctgagcgtgatcggcttcagaatcctgctgctgaaagtggccggctttaacctgctgatgaccctgcggctgtggtccagc

SEQ ID NO: 4363 - DNA, 2088 bp, Artificial Sequence
  Synthetic Polynucloetide
atggccttaccagtgaccgccttgctcctgccgctggccttgctgctccacgccgccaggccggacatccagatgacacagagccctagcagcctgtctgccagcgtgggagacagagtgaccatcacatgcaaggccagcgaccacatcaacaactggctggcctggtatcagcagaagcctggacaggcccctaagctgctgatctacggcgctaccacactggaaacaggcgtgcccagcagattttctggcagcggctctggcaccgactacaccctgacaatatccagcctccagcctgaggacttcgccacctactactgtcagcagagctggaacaccccttggacattcggccagggcaccaagctggaaatcaagagactcgagggacagcctaaggccaatcctaccgtgacactgttccctccaagcagcgaagaactccaggccaacaaggccacacttgtgtgcctgatctccgacttctaccctggggctgtgacagtggcttggaaggccgatggatctcctgtgaaagccggcgtggaaaccaccaagccatccaagcagagcaacaacaaatacgccgccagctcctacctgagcctgacacctgagcagtggaagtcccacagatcctacagctgccaagtgacccacgaaggcagcaccgtggaaaagacagtggcccctacagagtgcagcggcagagccgattgcggctttaccagcgagagctaccagcagggcgtgctgagcgccaccatcctgtacgagatcctgctgggcaaggccaccctgtacgccgtgctggtgtctgccctggtgctgatggctatggtcaagcggaaggacagccggggaagggccaagcgatctggatctggagcaacaaacttctcactactcaaacaagcaggtgacgtggaggagaatcccgggcctactagtatggactggatttggcgcatccttttccttgtcggcgctgctaccggcgcccattccgggcccatggaccccgacctggaaatcagagccgccttcctgcggcagagaaacacagccctgagaacagaggtggccgagctggaacaagaggtgcagcggctggaaaacgaggtgtcccagtacgagacaagatacggccctctcggaggcggaaaaggatccggcggcggaggatctggcggaggcggatctgggggcggaggctctttcgaacaagttcagcttcaacagcctggcgctgagctggtcaaacctggcgcttctgtgaagatgagctgcaaagccagcggctacgccttcagcagctactggatcaactggatgaagcagaaacccggccagggactcgaatggatcggccaaatctatcccggcgacggcgacaccaactacaacggcaagttcaagggcagagccacactgaccgccgatacctctagcagcacagcctacatgcagctgagcagcctgaccagcgaagatagcgccgtgtacttctgtgcccggtccatcacaacagtcgtgggctgcgctatggactattggggccagggaacaagcgtgaccgtgtctagtacgcgtgcctctacaaagggaccctccgtgtttcctctggctcccagcagcaagtctacaagcggaggaacagccgctctgggctgcctggtcaaggattactttcccgagcctgtgaccgtgtcctggaatagcggagcactgacaagcggcgtgcacacctttccagccgtgctgcaaagcagcggcctgtactctctgagcagcgtggtcacagtgcctagctctagcctgggcacccagacctacatctgcaatgtgaaccacaagcctagcaacaccaaggtggacaagagagtggaacccaagagctgtatccccgaggacacattcttcccaagccccgagagcagctgcgacgtgaagctggtggaaaagagcttcgagacagacaccaacctgaacttccagaacctgagcgtgatcggcttcagaatcctgctgctgaaagtggccggctttaacctgctgatgaccctgcggctgtggtccagc

SEQ ID NO: 4364 - DNA, 1578 bp, Artificial Sequence
  Synthetic Polynucloetide
atggactggatttggcgcatccttttccttgtcggcgctgctaccggcgcccattccgggcccatggaccccgacctggaaatcagagccgccttcctgcggcagagaaacacagccctgagaacagaggtggccgagctggaacaagaggtgcagcggctggaaaacgaggtgtcccagtacgagacaagatacggccctctcggaggcggaaaaggatccggcggcggaggatctggcggaggcggatctgggggcggaggctctttcgaacaagttcagcttcaacagcctggcgctgagctggtcaaacctggcgcttctgtgaagatgagctgcaaagccagcggctacgccttcagcagctactggatcaactggatgaagcagaaacccggccagggactcgaatggatcggccaaatctatcccggcgacggcgacaccaactacaacggcaagttcaagggcagagccacactgaccgccgatacctctagcagcacagcctacatgcagctgagcagcctgaccagcgaagatagcgccgtgtacttctgtgcccggtccatcacaacagtcgtgggctgcgctatggactattggggccagggaacaagcgtgaccgtgtctagtggcggaggcggaagtggaggcggaggatctggcggcggaggctctgacatccagatgacacagagccctagcagcctgtctgccagcgtgggagacagagtgaccatcacatgcaaggccagcgaccacatcaacaactggctggcctggtatcagcagaagcctggacaggcccctaagctgctgatctacggcgctaccacactggaaacaggcgtgcccagcagattttctggcagcggctctggcaccgactacaccctgacaatatccagcctccagcctgaggacttcgccacctactactgtcagcagagctggaacaccccttggacattcggccagggcaccaagctggaaatcaagagaacgcgtggcggaggcagcgacggtaacgaggagatgggaggaatcactcaaaccccttacaaagtctcaatttcaggaacaactgttatccttacatgtccccagtatcctggcagcgagatcctttggcagcataacgacaagaatatagggggagatgaagacgataagaatatcggatctgacgaggatcacttgagcctgaaagagttctccgagcttgaacaaagcggatattatgtgtgctatccgcgcgggtcaaagccggaagacgctaacttttacctttatctccgagccagagtgtgcgaaaattgcatggaaatggacgttatgtccgttgctacaatagttatcgtagatatatgcatcacgggtggactgcttctgctggtttattattggtccaagaatagaaaggccaaagctaaacccgtgaccagaggcgctggcgcaggcggaaggcaaaggggacaaaacaaagaacggccaccaccagtgccaaatccagattatgagcctattcggaaaggacagagggacctgtactctggcctgaatcagagaagaatc

SEQ ID NO: 4365 - DNA, 1473 bp, Artificial Sequence
  Synthetic Polynucloetide
atggactggatttggcgcatccttttccttgtcggcgctgctaccggcgcccattccgggcccatggaccccgacctggaaatcagagccgccttcctgcggcagagaaacacagccctgagaacagaggtggccgagctggaacaagaggtgcagcggctggaaaacgaggtgtcccagtacgagacaagatacggccctctcggaggcggaaaaggatccggcggcggaggatctggcggaggcggatctgggggcggaggctctttcgaacaagttcagcttcaacagcctggcgctgagctggtcaaacctggcgcttctgtgaagatgagctgcaaagccagcggctacgccttcagcagctactggatcaactggatgaagcagaaacccggccagggactcgaatggatcggccaaatctatcccggcgacggcgacaccaactacaacggcaagttcaagggcagagccacactgaccgccgatacctctagcagcacagcctacatgcagctgagcagcctgaccagcgaagatagcgccgtgtacttctgtgcccggtccatcacaacagtcgtgggctgcgctatggactattggggccagggaacaagcgtgaccgtgtctagtggcggaggcggaagtggaggcggaggatctggcggcggaggctctgacatccagatgacacagagccctagcagcctgtctgccagcgtgggagacagagtgaccatcacatgcaaggccagcgaccacatcaacaactggctggcctggtatcagcagaagcctggacaggcccctaagctgctgatctacggcgctaccacactggaaacaggcgtgcccagcagattttctggcagcggctctggcaccgactacaccctgacaatatccagcctccagcctgaggacttcgccacctactactgtcagcagagctggaacaccccttggacattcggccagggcaccaagctggaaatcaagagaacgcgtggcggaggcagcttcaagatccccatcgaggaactggaagatcgggtgttcgtgaactgcaacacctctatcacctgggtggaaggcaccgtgggaacactgctgagcgacatcaccagactggacctcggcaagcggattctggaccctcggggcatctacagatgcaacggcaccgacatctacaaggacaaagaaagcaccgtgcaggtccactacagaatgtgccagtcctgcgtggaactggaccctgctacagtggccggcatcatcgtgaccgatgtgatcgctactctgctgctggctctgggagtgttctgcttcgccggacacgaaacaggcagactgtctggcgctgccgatacacaggccctgctgagaaacgaccaagtgtatcagcccctgcgcgacagagatgatgcccagtattctcacctcggcggcaactgggctagaaacaag

SEQ ID NO: 4366 - DNA, 1503 bp, Artificial Sequence
  Synthetic Polynucloetide
atggactggatttggcgcatccttttccttgtcggcgctgctaccggcgcccattccgggcccatggaccccgacctggaaatcagagccgccttcctgcggcagagaaacacagccctgagaacagaggtggccgagctggaacaagaggtgcagcggctggaaaacgaggtgtcccagtacgagacaagatacggccctctcggaggcggaaaaggatccggcggcggaggatctggcggaggcggatctgggggcggaggctctttcgaacaagttcagcttcaacagcctggcgctgagctggtcaaacctggcgcttctgtgaagatgagctgcaaagccagcggctacgccttcagcagctactggatcaactggatgaagcagaaacccggccagggactcgaatggatcggccaaatctatcccggcgacggcgacaccaactacaacggcaagttcaagggcagagccacactgaccgccgatacctctagcagcacagcctacatgcagctgagcagcctgaccagcgaagatagcgccgtgtacttctgtgcccggtccatcacaacagtcgtgggctgcgctatggactattggggccagggaacaagcgtgaccgtgtctagtggcggaggcggaagtggaggcggaggatctggcggcggaggctctgacatccagatgacacagagccctagcagcctgtctgccagcgtgggagacagagtgaccatcacatgcaaggccagcgaccacatcaacaactggctggcctggtatcagcagaagcctggacaggcccctaagctgctgatctacggcgctaccacactggaaacaggcgtgcccagcagattttctggcagcggctctggcaccgactacaccctgacaatatccagcctccagcctgaggacttcgccacctactactgtcagcagagctggaacaccccttggacattcggccagggcaccaagctggaaatcaagagaacgcgtggcggaggcagccagagcatcaagggcaaccacctggtcaaggtgtacgactaccaagaggacggcagcgtgctgctgacatgtgatgccgaggccaagaacatcacctggtttaaggacggcaagatgatcggcttcctgaccgaggacaagaagaagtggaacctgggcagcaacgctaaggaccccagaggcatgtatcagtgcaagggcagccagaacaagagcaagcccctccaggtgtactaccggatgtgccagaactgcatcgagctgaacgccgctaccatcagcggctttctgttcgccgagatcgtgtccatcttcgtgctggccgtgggcgtgtactttatcgctggacaggatggcgtgcggcagagcagagcttccgataagcaaaccctgctgcctaacgaccagctgtaccagcctctgaaggacagagaggacgaccagtacagccacctccagggcaatcagctgagaagaaac

SEQ ID NO: 4367 - DNA, 1452 bp, Artificial Sequence
  Synthetic Polynucloetide
atggactggatttggcgcatccttttccttgtcggcgctgctaccggcgcccattccgggcccatggaccccgacctggaaatcagagccgccttcctgcggcagagaaacacagccctgagaacagaggtggccgagctggaacaagaggtgcagcggctggaaaacgaggtgtcccagtacgagacaagatacggccctctcggaggcggaaaaggatccggcggcggaggatctggcggaggcggatctgggggcggaggctctttcgaacaagttcagcttcaacagcctggcgctgagctggtcaaacctggcgcttctgtgaagatgagctgcaaagccagcggctacgccttcagcagctactggatcaactggatgaagcagaaacccggccagggactcgaatggatcggccaaatctatcccggcgacggcgacaccaactacaacggcaagttcaagggcagagccacactgaccgccgatacctctagcagcacagcctacatgcagctgagcagcctgaccagcgaagatagcgccgtgtacttctgtgcccggtccatcacaacagtcgtgggctgcgctatggactattggggccagggaacaagcgtgaccgtgtctagtggcggaggcggaagtggaggcggaggatctggcggcggaggctctgacatccagatgacacagagccctagcagcctgtctgccagcgtgggagacagagtgaccatcacatgcaaggccagcgaccacatcaacaactggctggcctggtatcagcagaagcctggacaggcccctaagctgctgatctacggcgctaccacactggaaacaggcgtgcccagcagattttctggcagcggctctggcaccgactacaccctgacaatatccagcctccagcctgaggacttcgccacctactactgtcagcagagctggaacaccccttggacattcggccagggcaccaagctggaaatcaagagaacgcgtggcggaggcagccagagttttgggttgttggaccctaaattgtgctatctgttggacggaatcctgttcatttacggagtgatcctgaccgcattgttcctgcgggttaagttttccagatccgcagacgcacccgcttaccaacaagggcagaaccaactctacaatgaacttaatttggggcggagggaagagtacgacgttctggacaaaaggaggggacgagatcccgagatgggcggaaagcctcagcgaaggaagaatccgcaagaggggctttataacgaactccagaaagataaaatggcagaagcctatagtgagattgggatgaagggagaaaggaggaggggtaaaggtcacgatgggttgtaccaaggattgagcacagccactaaagatacctatgatgcgctccacatgcaggccctgccgccaaga

SEQ ID NO: 4368 - DNA, 1563 bp, Artificial Sequence
  Synthetic Polynucloetide
atggactggatttggcgcatccttttccttgtcggcgctgctaccggcgcccattccgggcccatggaccccgacctggaaatcagagccgccttcctgcggcagagaaacacagccctgagaacagaggtggccgagctggaacaagaggtgcagcggctggaaaacgaggtgtcccagtacgagacaagatacggccctctcggaggcggaaaaggatccggcggcggaggatctggcggaggcggatctgggggcggaggctctttcgaacaagttcagcttcaacagcctggcgctgagctggtcaaacctggcgcttctgtgaagatgagctgcaaagccagcggctacgccttcagcagctactggatcaactggatgaagcagaaacccggccagggactcgaatggatcggccaaatctatcccggcgacggcgacaccaactacaacggcaagttcaagggcagagccacactgaccgccgatacctctagcagcacagcctacatgcagctgagcagcctgaccagcgaagatagcgccgtgtacttctgtgcccggtccatcacaacagtcgtgggctgcgctatggactattggggccagggaacaagcgtgaccgtgtctagtacgcgtatccagaaccctgatcctgccgtgtaccagctgcgggatagcaagagcagcgacaagagcgtgtgtctgttcaccgacttcgacagccagaccaacgtgtcccagagcaaggactccgacgtgtacatcaccgataagaccgtgctggacatgcggagcatggacttcaagagcaactccgccgtggcctggtccaacaagtccgatttcgcctgcgccaacgccttcaacaacagcattatccccgaggacacattcttcccaagccccgagagcagctgcgacgtgaagctggtggaaaagagcttcgagacagacaccaacctgaacttccagaacctgagcgtgatcggcttcagaatcctgctgctgaaagtggccggctttaacctgctgatgaccctgcggctgtggtccagccgcgccaagagaagcggatctggcgtgaagcagaccctgaatttcgacctgctgaagctggctggcgacgtggaatccaacccaggcccttctagaggccatatggccaagcctttgtctcaagaagaatccaccctcattgaaagagcaacggctacaatcaacagcatccccatctctgaagactacagcgtcgccagcgcagctctctctagcgacggccgcatcttcactggtgtcaatgtatatcattttactgggggaccttgtgcagaactcgtggtgctgggcactgctgctgctgcggcagctggcaacctgacttgtatcgtcgcgatcggaaatgagaacaggggcatcttgagcccctgcggacggtgccgacaggtgcttctcgatctgcatcctgggatcaaagccatagtgaaggacagtgatggacagccgacggcagttgggattcgtgaattgctgccctctggttatgtgtgggagggctga

SEQ ID NO: 4369 - DNA, 1062 bp, Artificial Sequence
  Synthetic Polynucloetide
atggactggatttggcgcatccttttccttgtcggcgctgctaccggcgcccattccgggcccatggaccccgacctggaaatcagagccgccttcctgcggcagagaaacacagccctgagaacagaggtggccgagctggaacaagaggtgcagcggctggaaaacgaggtgtcccagtacgagacaagatacggccctctcggaggcggaaaaggatccggcggcggaggatctggcggaggcggatctgggggcggaggctctttcgaacaagttcagcttcaacagcctggcgctgagctggtcaaacctggcgcttctgtgaagatgagctgcaaagccagcggctacgccttcagcagctactggatcaactggatgaagcagaaacccggccagggactcgaatggatcggccaaatctatcccggcgacggcgacaccaactacaacggcaagttcaagggcagagccacactgaccgccgatacctctagcagcacagcctacatgcagctgagcagcctgaccagcgaagatagcgccgtgtacttctgtgcccggtccatcacaacagtcgtgggctgcgctatggactattggggccagggaacaagcgtgaccgtgtctagtacgcgtatccagaaccctgatcctgccgtgtaccagctgcgggatagcaagagcagcgacaagagcgtgtgtctgttcaccgacttcgacagccagaccaacgtgtcccagagcaaggactccgacgtgtacatcaccgataagaccgtgctggacatgcggagcatggacttcaagagcaactccgccgtggcctggtccaacaagtccgatttcgcctgcgccaacgccttcaacaacagcattatccccgaggacacattcttcccaagccccgagagcagctgcgacgtgaagctggtggaaaagagcttcgagacagacaccaacctgaacttccagaacctgagcgtgatcggcttcagaatcctgctgctgaaagtggccggctttaacctgctgatgaccctgcggctgtggtccagc

SEQ ID NO: 4370 - DNA, 1599 bp, Artificial Sequence
  Synthetic Polynucloetide
atggactggatttggcgcatccttttccttgtcggcgctgctaccggcgcccattccgggcccatggaccccgacctggaaatcagagccgccttcctgcggcagagaaacacagccctgagaacagaggtggccgagctggaacaagaggtgcagcggctggaaaacgaggtgtcccagtacgagacaagatacggccctctcggaggcggaaaaggatccggcggcggaggatctggcggaggcggatctgggggcggaggctctttcgaacaagttcagcttcaacagcctggcgctgagctggtcaaacctggcgcttctgtgaagatgagctgcaaagccagcggctacgccttcagcagctactggatcaactggatgaagcagaaacccggccagggactcgaatggatcggccaaatctatcccggcgacggcgacaccaactacaacggcaagttcaagggcagagccacactgaccgccgatacctctagcagcacagcctacatgcagctgagcagcctgaccagcgaagatagcgccgtgtacttctgtgcccggtccatcacaacagtcgtgggctgcgctatggactattggggccagggaacaagcgtgaccgtgtctagtacgcgtgagcagaaactgatctcggaagaggatgggagcggcatccagaaccctgatcctgccgtgtaccagctgcgggatagcaagagcagcgacaagagcgtgtgtctgttcaccgacttcgacagccagaccaacgtgtcccagagcaaggactccgacgtgtacatcaccgataagtgcgtgctggacatgcggagcatggacttcaagagcaactccgccgtggcctggtccaacaagtccgatttcgcctgcgccaacgccttcaacaacagcattatccccgaggacacattcttcccaagccccgagagcagctgcgacgtgaagctggtggaaaagagcttcgagacagacaccaacctgaacttccagaacctgagcgtgatcggcttcagaatcctgctgctgaaagtggccggctttaacctgctgatgaccctgcggctgtggtccagccgcgccaagagaagcggatctggcgtgaagcagaccctgaatttcgacctgctgaagctggctggcgacgtggaatccaacccaggcccttctagaggccatatggccaagcctttgtctcaagaagaatccaccctcattgaaagagcaacggctacaatcaacagcatccccatctctgaagactacagcgtcgccagcgcagctctctctagcgacggccgcatcttcactggtgtcaatgtatatcattttactgggggaccttgtgcagaactcgtggtgctgggcactgctgctgctgcggcagctggcaacctgacttgtatcgtcgcgatcggaaatgagaacaggggcatcttgagcccctgcggacggtgccgacaggtgcttctcgatctgcatcctgggatcaaagccatagtgaaggacagtgatggacagccgacggcagttgggattcgtgaattgctgccctctggttatgtgtgggagggctga

SEQ ID NO: 4371 - DNA, 1101 bp, Artificial Sequence
  Synthetic Polynucloetide
atggactggatttggcgcatccttttccttgtcggcgctgctaccggcgcccattccgggcccatggaccccgacctggaaatcagagccgccttcctgcggcagagaaacacagccctgagaacagaggtggccgagctggaacaagaggtgcagcggctggaaaacgaggtgtcccagtacgagacaagatacggccctctcggaggcggaaaaggatccggcggcggaggatctggcggaggcggatctgggggcggaggctctttcgaacaagttcagcttcaacagcctggcgctgagctggtcaaacctggcgcttctgtgaagatgagctgcaaagccagcggctacgccttcagcagctactggatcaactggatgaagcagaaacccggccagggactcgaatggatcggccaaatctatcccggcgacggcgacaccaactacaacggcaagttcaagggcagagccacactgaccgccgatacctctagcagcacagcctacatgcagctgagcagcctgaccagcgaagatagcgccgtgtacttctgtgcccggtccatcacaacagtcgtgggctgcgctatggactattggggccagggaacaagcgtgaccgtgtctagtacgcgtgagcagaaactgatctcggaagaggatgggagcggcatccagaaccctgatcctgccgtgtaccagctgcgggatagcaagagcagcgacaagagcgtgtgtctgttcaccgacttcgacagccagaccaacgtgtcccagagcaaggactccgacgtgtacatcaccgataagtgcgtgctggacatgcggagcatggacttcaagagcaactccgccgtggcctggtccaacaagtccgatttcgcctgcgccaacgccttcaacaacagcattatccccgaggacacattcttcccaagccccgagagcagctgcgacgtgaagctggtggaaaagagcttcgagacagacaccaacctgaacttccagaacctgagcgtgatcggcttcagaatcctgctgctgaaagtggccggctttaacctgctgatgaccctgcggctgtggtccagctga

SEQ ID NO: 4372 - DNA, 1902 bp, Artificial Sequence; identical to SEQ ID NO: 4118
  Synthetic Polynucloetide

SEQ ID NO: 4373 - DNA, 1923 bp, Artificial Sequence; identical to SEQ ID NO: 4119
  Synthetic Polynucloetide

SEQ ID NO: 4374 - DNA, 3162 bp, Artificial Sequence; identical to SEQ ID NO: 4120
  Synthetic Polynucloetide

SEQ ID NO: 4375 - DNA, 2982 bp, Artificial Sequence; identical to SEQ ID NO: 4121
  Synthetic Polynucloetide

SEQ ID NO: 4376 - DNA, 2979 bp, Artificial Sequence; identical to SEQ ID NO: 4122
  Synthetic Polynucloetide

SEQ ID NO: 4377 - DNA, 2277 bp, Artificial Sequence; identical to SEQ ID NO: 4123
  Synthetic Polynucloetide

SEQ ID NO: 4378 - DNA, 2952 bp, Artificial Sequence; identical to SEQ ID NO: 4124
  Synthetic Polynucloetide

SEQ ID NO: 4379 - DNA, 2289 bp, Artificial Sequence; identical to SEQ ID NO: 4125
  Synthetic Polynucloetide

SEQ ID NO: 4380 - DNA, 2955 bp, Artificial Sequence; identical to SEQ ID NO: 4126
  Synthetic Polynucloetide

SEQ ID NO: 4381 - DNA, 3114 bp, Artificial Sequence; identical to SEQ ID NO: 4127
  Synthetic Polynucloetide

SEQ ID NO: 4382 - DNA, 3117 bp, Artificial Sequence; identical to SEQ ID NO: 4128
  Synthetic Polynucloetide

SEQ ID NO: 4383 - DNA, 2979 bp, Artificial Sequence; identical to SEQ ID NO: 4129
  Synthetic Polynucloetide

SEQ ID NO: 4384 - DNA, 3225 bp, Artificial Sequence; identical to SEQ ID NO: 4130
  Synthetic Polynucloetide

SEQ ID NO: 4385 - DNA, 3279 bp, Artificial Sequence; identical to SEQ ID NO: 4131
  Synthetic Polynucloetide

SEQ ID NO: 4386 - DNA, 3090 bp, Artificial Sequence; identical to SEQ ID NO: 4132
  Synthetic Polynucloetide

SEQ ID NO: 4387 - DNA, 2301 bp, Artificial Sequence; identical to SEQ ID NO: 4133
  Synthetic Polynucloetide

SEQ ID NO: 4388 - DNA, 3135 bp, Artificial Sequence; identical to SEQ ID NO: 4134
  Synthetic Polynucloetide

SEQ ID NO: 4389 - DNA, 3510 bp, Artificial Sequence; identical to SEQ ID NO: 4135
  Synthetic Polynucloetide

SEQ ID NO: 4390 - DNA, 2865 bp, Artificial Sequence; identical to SEQ ID NO: 4136
  Synthetic Polynucloetide

SEQ ID NO: 4391 - DNA, 2865 bp, Artificial Sequence; identical to SEQ ID NO: 4137
  Synthetic Polynucloetide

SEQ ID NO: 4392 - DNA, 3078 bp, Artificial Sequence; identical to SEQ ID NO: 4138
  Synthetic Polynucloetide

SEQ ID NO: 4393 - DNA, 3201 bp, Artificial Sequence; identical to SEQ ID NO: 4139
  Synthetic Polynucloetide

SEQ ID NO: 4394 - DNA, 3084 bp, Artificial Sequence; identical to SEQ ID NO: 4140
  Synthetic Polynucloetide

SEQ ID NO: 4395 - DNA, 3210 bp, Artificial Sequence; identical to SEQ ID NO: 4141
  Synthetic Polynucloetide

SEQ ID NO: 4396 - DNA, 2883 bp, Artificial Sequence; identical to SEQ ID NO: 4142
  Synthetic Polynucloetide

SEQ ID NO: 4397 - DNA, 2355 bp, Artificial Sequence; identical to SEQ ID NO: 4143
  Synthetic Polynucloetide

SEQ ID NO: 4398 - DNA, 2289 bp, Artificial Sequence; identical to SEQ ID NO: 4144
  Synthetic Polynucloetide

SEQ ID NO: 4399 - DNA, 2289 bp, Artificial Sequence; identical to SEQ ID NO: 4145
  Synthetic Polynucloetide

SEQ ID NO: 4400 - DNA, 1767 bp, Artificial Sequence; identical to SEQ ID NO: 4146
  Synthetic Polynucloetide

SEQ ID NO: 4401 - DNA, 1662 bp, Artificial Sequence; identical to SEQ ID NO: 4147
  Synthetic Polynucloetide

SEQ ID NO: 4402 - DNA, 1692 bp, Artificial Sequence; identical to SEQ ID NO: 4148
  Synthetic Polynucloetide

SEQ ID NO: 4403 - DNA, 1641 bp, Artificial Sequence; identical to SEQ ID NO: 4149
  Synthetic Polynucloetide

SEQ ID NO: 4404 - DNA, 2343 bp, Artificial Sequence; identical to SEQ ID NO: 4150
  Synthetic Polynucloetide

SEQ ID NO: 4405 - DNA, 2439 bp, Artificial Sequence; identical to SEQ ID NO: 4151
  Synthetic Polynucloetide

SEQ ID NO: 4406 - DNA, 2589 bp, Artificial Sequence; identical to SEQ ID NO: 4152
  Synthetic Polynucloetide

SEQ ID NO: 4407 - DNA, 2031 bp, Artificial Sequence; identical to SEQ ID NO: 4153
  Synthetic Polynucloetide

SEQ ID NO: 4408 - DNA, 1338 bp, Artificial Sequence; identical to SEQ ID NO: 4154
  Synthetic Polynucloetide

SEQ ID NO: 4409 - DNA, 1353 bp, Artificial Sequence; identical to SEQ ID NO: 4155
  Synthetic Polynucloetide

SEQ ID NO: 4410 - DNA, 852 bp, Artificial Sequence; identical to SEQ ID NO: 4156
  Synthetic Polynucloetide

SEQ ID NO: 4411 - DNA, 2085 bp, Artificial Sequence; identical to SEQ ID NO: 4157
  Synthetic Polynucloetide

SEQ ID NO: 4412 - DNA, 1395 bp, Artificial Sequence; identical to SEQ ID NO: 4158
  Synthetic Polynucloetide

SEQ ID NO: 4413 - DNA, 1389 bp, Artificial Sequence; identical to SEQ ID NO: 4159
  Synthetic Polynucloetide

SEQ ID NO: 4414 - DNA, 891 bp, Artificial Sequence; identical to SEQ ID NO: 4160
  Synthetic Polynucloetide

SEQ ID NO: 4415 - DNA, 2343 bp, Artificial Sequence; identical to SEQ ID NO: 4161
  Synthetic Polynucloetide

SEQ ID NO: 4416 - DNA, 2439 bp, Artificial Sequence; identical to SEQ ID NO: 4162
  Synthetic Polynucloetide

SEQ ID NO: 4417 - DNA, 3192 bp, Artificial Sequence
  Synthetic Polynucloetide
atggccttaccagtgaccgccttgctcctgccgctggccttgctgctccacgccgccaggccgcagctccagctgcaagagtctggacctggcctggtcaagcctagcgagacactgagcctgacctgtaccgtgtccggcgatagcatcagcagcggcgattactactggggctggatcagacagcctcctggcaaaggactggaatggatcggccacatctactacagcggcgtgacctactacaaccccagcctgaagtccagagtgaccatcagcgtggacaccagccggaaccagttctccctgaagctgtctagcgtgacagccgccgataccgccgtgtactactgcaccagagaggacagcagcaactggcggagtagaggccagggaacactggtcacagttagctctggtaccggcggaggcggatctggcggcggaggtagcggtggcggaggatctgaattcgacatccagatgacacagagccctagcagcctgtctgccagcgtgggagacagagtgaccatcacatgcaaggccagcgaccacatcaacaactggctggcctggtatcagcagaagcctggacaggcccctaagctgctgatctacggcgctaccacactggaaacaggcgtgcccagcagattttctggcagcggctctggcaccgactacaccctgacaatatccagcctccagcctgaggacttcgccacctactactgtcagcagagctggaacaccccttggacattcggccagggcaccaagctggaaatcaagagactcgagatccagaaccctgatcctgccgtgtaccagctgcgggatagcaagagcagcgacaagagcgtgtgtctgttcaccgacttcgacagccagaccaacgtgtcccagagcaaggactccgacgtgtacatcaccgataagtgcgtgctggacatgcggagcatggacttcaagagcaactccgccgtggcctggtccaacaagtccgatttcgcctgcgccaacgccttcaacaacagcattatccccgaggacacattcttcccaagcagcgacgtgccctgcgacgtgaagctggtggaaaagagcttcgagacagacaccaacctgaacttccagaacctgagcgtgatcggcttcagaatcctgctgctgaaagtggccggctttaacctgctgatgaccctgcggctgtggtccagccgcgccaagagaagcggatctggcgtgaagcagaccctgaatttcgacctgctgaagctggctggcgacgtggaatccaacccaggccctactagtatggactggatttggcgcatccttttccttgtcggcgctgctaccggcgcccattccgggcccatggaccccgacctggaaatcagagccgccttcctgcggcagagaaacacagccctgagaacagaggtggccgagctggaacaagaggtgcagcggctggaaaacgaggtgtcccagtacgagacaagatacggccctctcggaggcggaaaaggatccggcggcggaggatctggcggaggcggatctgggggcggaggctctttcgaacaagttcagcttcaacagcctggcgctgagctggtcaaacctggcgcttctgtgaagatgagctgcaaagccagcggctacgccttcagcagctactggatcaactggatgaagcagaaacccggccagggactcgaatggatcggccaaatctatcccggcgacggcgacaccaactacaacggcaagttcaagggcagagccacactgaccgccgatacctctagcagcacagcctacatgcagctgagcagcctgaccagcgaagatagcgccgtgtacttctgtgcccggtccatcacaacagtcgtgggctgcgctatggactattggggccagggaacaagcgtgaccgtgtctagtacgcgtgaggacctgaagaacgtgttcccacctgaggtggccgtgttcgagcctagcaaggccgagatcgcccacacccagaaagccaccctcgtgtgcctggctaccggcttctaccccgaccatgtggaactgtcttggtgggtcaacggcaaagaggtgcacagcggcgtgtgtaccgacccccagccactgaaagaacagcccgccctgaacgacagccggtactgcctgagcagcagactgagagtgtccgccaccttctggcagaacccccggaaccacttcagatgccaggtgcagttctacggcctgagcgagaacgacgagtggacccaggacagagccaagcccgtgacccagatcgtgtctgccgaagcctggggcagagccgattgcggcatcaccagcgccagctaccaccagggcgtgctgagcgccaccatcctgtacgagatcctgctgggcaaggccaccctgtacgccgtgctggtgtctgccctggtgctgatggctatggtcaagcggaaggacagccggggaagggccaagcgatctggatctggagcaacaaacttctcactactcaaacaagcaggtgacgtggaggagaatcccgggccttctagaggccatatgaccgagtacaagcccacggtgcgcctcgccacccgcgacgacgtccccagggccgtacgcaccctcgccgccgcgttcgccgactaccccgccacgcgccacaccgtcgatccggaccgccacatcgagcgggtcaccgagctgcaagaactcttcctcacgcgcgtcgggctcgacatcggcaaggtgtgggtcgcggacgacggcgccgcggtggcggtctggaccacgccggagagcgtcgaagcgggggcggtgttcgccgagatcggcccgcgcatggccgagttgagcggttcccggctggccgcgcagcaacagatggaaggcctcctggcgccgcaccggcccaaggagcccgcgtggttcctggccaccgtcggcgtctcgcccgaccaccagggcaagggtctgggcagcgccgtcgtgctccccggagtggaggcggccgagcgcgccggggtgcccgccttcctggagacctccgcgccccgcaacctccccttctacgagcggctcggcttcaccgtcaccgccgacgtcgaggtgcccgaaggaccgcgcacctggtgcatgacccgcaagcccggtgcctga

SEQ ID NO: 4418 - DNA, 3189 bp, Artificial Sequence
  Synthetic Polynucloetide
atggccttaccagtgaccgccttgctcctgccgctggccttgctgctccacgccgccaggccgcagctccagctgcaagagtctggacctggcctggtcaagcctagcgagacactgagcctgacctgtaccgtgtccggcgatagcatcagcagcggcgattactactggggctggatcagacagcctcctggcaaaggactggaatggatcggccacatctactacagcggcgtgacctactacaaccccagcctgaagtccagagtgaccatcagcgtggacaccagccggaaccagttctccctgaagctgtctagcgtgacagccgccgataccgccgtgtactactgcaccagagaggacagcagcaactggcggagtagaggccagggaacactggtcacagttagctctggtaccggcggaggcggatctggcggcggaggtagcggtggcggaggatctgaattcgacatccagatgacacagagccctagcagcctgtctgccagcgtgggagacagagtgaccatcacatgcaaggccagcgaccacatcaacaactggctggcctggtatcagcagaagcctggacaggcccctaagctgctgatctacggcgctaccacactggaaacaggcgtgcccagcagattttctggcagcggctctggcaccgactacaccctgacaatatccagcctccagcctgaggacttcgccacctactactgtcagcagagctggaacaccccttggacattcggccagggcaccaagctggaaatcaagagactcgaggacctgaagaacgtgttcccacctgaggtggccgtgttcgagcctagcaaggccgagatcgcccacacccagaaagccaccctcgtgtgcctggctaccggcttctaccccgaccatgtggaactgtcttggtgggtcaacggcaaagaggtgcacagcggcgtgtgtaccgacccccagccactgaaagaacagcccgccctgaacgacagccggtactgcctgagcagcagactgagagtgtccgccaccttctggcagaacccccggaaccacttcagatgccaggtgcagttctacggcctgagcgagaacgacgagtggacccaggacagagccaagcccgtgacccagatcgtgtctgccgaagcctggggcagagccgattgcggcatcaccagcgccagctaccaccagggcgtgctgagcgccaccatcctgtacgagatcctgctgggcaaggccaccctgtacgccgtgctggtgtctgccctggtgctgatggctatggtcaagcggaaggacagccggggaagggccaagcgatctggatctggagcaacaaacttctcactactcaaacaagcaggtgacgtggaggagaatcccgggcctactagtatggactggatttggcgcatccttttccttgtcggcgctgctaccggcgcccattccgggcccatggaccccgacctggaaatcagagccgccttcctgcggcagagaaacacagccctgagaacagaggtggccgagctggaacaagaggtgcagcggctggaaaacgaggtgtcccagtacgagacaagatacggccctctcggaggcggaaaaggatccggcggcggaggatctggcggaggcggatctgggggcggaggctctttcgaacaagttcagcttcaacagcctggcgctgagctggtcaaacctggcgcttctgtgaagatgagctgcaaagccagcggctacgccttcagcagctactggatcaactggatgaagcagaaacccggccagggactcgaatggatcggccaaatctatcccggcgacggcgacaccaactacaacggcaagttcaagggcagagccacactgaccgccgatacctctagcagcacagcctacatgcagctgagcagcctgaccagcgaagatagcgccgtgtacttctgtgcccggtccatcacaacagtcgtgggctgcgctatggactattggggccagggaacaagcgtgaccgtgtctagtacgcgtatccagaaccctgatcctgccgtgtaccagctgcgggatagcaagagcagcgacaagagcgtgtgtctgttcaccgacttcgacagccagaccaacgtgtcccagagcaaggactccgacgtgtacatcaccgataagtgcgtgctggacatgcggagcatggacttcaagagcaactccgccgtggcctggtccaacaagtccgatttcgcctgcgccaacgccttcaacaacagcattatccccgaggacacattcttcccaagcagcgacgtgccctgcgacgtgaagctggtggaaaagagcttcgagacagacaccaacctgaacttccagaacctgagcgtgatcggcttcagaatcctgctgctgaaagtggccggctttaacctgctgatgaccctgcggctgtggtccagccgcgccaagagaagcggatctggcgtgaagcagaccctgaatttcgacctgctgaagctggctggcgacgtggaatccaacccaggcccttctagaggccatatgaccgagtacaagcccacggtgcgcctcgccacccgcgacgacgtccccagggccgtacgcaccctcgccgccgcgttcgccgactaccccgccacgcgccacaccgtcgatccggaccgccacatcgagcgggtcaccgagctgcaagaactcttcctcacgcgcgtcgggctcgacatcggcaaggtgtgggtcgcggacgacggcgccgcggtggcggtctggaccacgccggagagcgtcgaagcgggggcggtgttcgccgagatcggcccgcgcatggccgagttgagcggttcccggctggccgcgcagcaacagatggaaggcctcctggcgccgcaccggcccaaggagcccgcgtggttcctggccaccgtcggcgtctcgcccgaccaccagggcaagggtctgggcagcgccgtcgtgctccccggagtggaggcggccgagcgcgccggggtgcccgccttcctggagacctccgcgccccgcaacctccccttctacgagcggctcggcttcaccgtcaccgccgacgtcgaggtgcccgaaggaccgcgcacctggtgcatgacccgcaagcccggtgcctga

SEQ ID NO: 4419 - DNA, 3189 bp, Artificial Sequence
  Synthetic Polynucloetide
atggccttaccagtgaccgccttgctcctgccgctggccttgctgctccacgccgccaggccgcagctccagctgcaagagtctggacctggcctggtcaagcctagcgagacactgagcctgacctgtaccgtgtccggcgatagcatcagcagcggcgattactactggggctggatcagacagcctcctggcaaaggactggaatggatcggccacatctactacagcggcgtgacctactacaaccccagcctgaagtccagagtgaccatcagcgtggacaccagccggaaccagttctccctgaagctgtctagcgtgacagccgccgataccgccgtgtactactgcaccagagaggacagcagcaactggcggagtagaggccagggaacactggtcacagttagctctggtaccggcggaggcggatctggcggcggaggtagcggtggcggaggatctgaattcgacatccagatgacacagagccctagcagcctgtctgccagcgtgggagacagagtgaccatcacatgcaaggccagcgaccacatcaacaactggctggcctggtatcagcagaagcctggacaggcccctaagctgctgatctacggcgctaccacactggaaacaggcgtgcccagcagattttctggcagcggctctggcaccgactacaccctgacaatatccagcctccagcctgaggacttcgccacctactactgtcagcagagctggaacaccccttggacattcggccagggcaccaagctggaaatcaagagactcgaggacctgaagaacgtgttcccacctgaggtggccgtgttcgagcctagcgaggccgagatcagccacacccagaaagccaccctcgtgtgcctggctaccggcttctaccccgaccatgtggaactgtcttggtgggtcaacggcaaagaggtgcacagcggcgtgtgtaccgacccccagccactgaaagaacagcccgccctgaacgacagccggtactgcctgagcagcagactgagagtgtccgccaccttctggcagaacccccggaaccacttcagatgccaggtgcagttctacggcctgagcgagaacgacgagtggacccaggacagagccaagcccgtgacccagatcgtgtctgccgaagcctggggcagagccgattgcggctttaccagcgagagctaccagcagggcgtgctgagcgccaccatcctgtacgagatcctgctgggcaaggccaccctgtacgccgtgctggtgtctgccctggtgctgatggctatggtcaagcggaaggacagccggggaagggccaagcgatctggatctggagcaacaaacttctcactactcaaacaagcaggtgacgtggaggagaatcccgggcctactagtatggactggatttggcgcatccttttccttgtcggcgctgctaccggcgcccattccgggcccatggaccccgacctggaaatcagagccgccttcctgcggcagagaaacacagccctgagaacagaggtggccgagctggaacaagaggtgcagcggctggaaaacgaggtgtcccagtacgagacaagatacggccctctcggaggcggaaaaggatccggcggcggaggatctggcggaggcggatctgggggcggaggctctttcgaacaagttcagcttcaacagcctggcgctgagctggtcaaacctggcgcttctgtgaagatgagctgcaaagccagcggctacgccttcagcagctactggatcaactggatgaagcagaaacccggccagggactcgaatggatcggccaaatctatcccggcgacggcgacaccaactacaacggcaagttcaagggcagagccacactgaccgccgatacctctagcagcacagcctacatgcagctgagcagcctgaccagcgaagatagcgccgtgtacttctgtgcccggtccatcacaacagtcgtgggctgcgctatggactattggggccagggaacaagcgtgaccgtgtctagtacgcgtatccagaaccctgatcctgccgtgtaccagctgcgggatagcaagagcagcgacaagagcgtgtgtctgttcaccgacttcgacagccagaccaacgtgtcccagagcaaggactccgacgtgtacatcaccgataagtgcgtgctggacatgcggagcatggacttcaagagcaactccgccgtggcctggtccaacaagtccgatttcgcctgcgccaacgccttcaacaacagcattatccccgaggacacattcttcccaagccccgagagcagctgcgacgtgaagctggtggaaaagagcttcgagacagacaccaacctgaacttccagaacctgagcgtgatcggcttcagaatcctgctgctgaaagtggccggctttaacctgctgatgaccctgcggctgtggtccagccgcgccaagagaagcggatctggcgtgaagcagaccctgaatttcgacctgctgaagctggctggcgacgtggaatccaacccaggcccttctagaggccatatgaccgagtacaagcccacggtgcgcctcgccacccgcgacgacgtccccagggccgtacgcaccctcgccgccgcgttcgccgactaccccgccacgcgccacaccgtcgatccggaccgccacatcgagcgggtcaccgagctgcaagaactcttcctcacgcgcgtcgggctcgacatcggcaaggtgtgggtcgcggacgacggcgccgcggtggcggtctggaccacgccggagagcgtcgaagcgggggcggtgttcgccgagatcggcccgcgcatggccgagttgagcggttcccggctggccgcgcagcaacagatggaaggcctcctggcgccgcaccggcccaaggagcccgcgtggttcctggccaccgtcggcgtctcgcccgaccaccagggcaagggtctgggcagcgccgtcgtgctccccggagtggaggcggccgagcgcgccggggtgcccgccttcctggagacctccgcgccccgcaacctccccttctacgagcggctcggcttcaccgtcaccgccgacgtcgaggtgcccgaaggaccgcgcacctggtgcatgacccgcaagcccggtgcctga

SEQ ID NO: 4420 - DNA, 2487 bp, Artificial Sequence
  Synthetic Polynucloetide
atggccttaccagtgaccgccttgctcctgccgctggccttgctgctccacgccgccaggccgcagctccagctgcaagagtctggacctggcctggtcaagcctagcgagacactgagcctgacctgtaccgtgtccggcgatagcatcagcagcggcgattactactggggctggatcagacagcctcctggcaaaggactggaatggatcggccacatctactacagcggcgtgacctactacaaccccagcctgaagtccagagtgaccatcagcgtggacaccagccggaaccagttctccctgaagctgtctagcgtgacagccgccgataccgccgtgtactactgcaccagagaggacagcagcaactggcggagtagaggccagggaacactggtcacagttagctctggtaccggcggaggcggatctggcggcggaggtagcggtggcggaggatctgaattcgacatccagatgacacagagccctagcagcctgtctgccagcgtgggagacagagtgaccatcacatgcaaggccagcgaccacatcaacaactggctggcctggtatcagcagaagcctggacaggcccctaagctgctgatctacggcgctaccacactggaaacaggcgtgcccagcagattttctggcagcggctctggcaccgactacaccctgacaatatccagcctccagcctgaggacttcgccacctactactgtcagcagagctggaacaccccttggacattcggccagggcaccaagctggaaatcaagagactcgaggacctgaagaacgtgttcccacctgaggtggccgtgttcgagcctagcgaggccgagatcagccacacccagaaagccaccctcgtgtgcctggctaccggcttctaccccgaccatgtggaactgtcttggtgggtcaacggcaaagaggtgcacagcggcgtgtgtaccgacccccagccactgaaagaacagcccgccctgaacgacagccggtactgcctgagcagcagactgagagtgtccgccaccttctggcagaacccccggaaccacttcagatgccaggtgcagttctacggcctgagcgagaacgacgagtggacccaggacagagccaagcccgtgacccagatcgtgtctgccgaagcctggggcagagccgattgcggctttaccagcgagagctaccagcagggcgtgctgagcgccaccatcctgtacgagatcctgctgggcaaggccaccctgtacgccgtgctggtgtctgccctggtgctgatggctatggtcaagcggaaggacagccggggaagggccaagcgatctggatctggagcaacaaacttctcactactcaaacaagcaggtgacgtggaggagaatcccgggcctactagtatggactggatttggcgcatccttttccttgtcggcgctgctaccggcgcccattccgggcccatggaccccgacctggaaatcagagccgccttcctgcggcagagaaacacagccctgagaacagaggtggccgagctggaacaagaggtgcagcggctggaaaacgaggtgtcccagtacgagacaagatacggccctctcggaggcggaaaaggatccggcggcggaggatctggcggaggcggatctgggggcggaggctctttcgaacaagttcagcttcaacagcctggcgctgagctggtcaaacctggcgcttctgtgaagatgagctgcaaagccagcggctacgccttcagcagctactggatcaactggatgaagcagaaacccggccagggactcgaatggatcggccaaatctatcccggcgacggcgacaccaactacaacggcaagttcaagggcagagccacactgaccgccgatacctctagcagcacagcctacatgcagctgagcagcctgaccagcgaagatagcgccgtgtacttctgtgcccggtccatcacaacagtcgtgggctgcgctatggactattggggccagggaacaagcgtgaccgtgtctagtacgcgtatccagaaccctgatcctgccgtgtaccagctgcgggatagcaagagcagcgacaagagcgtgtgtctgttcaccgacttcgacagccagaccaacgtgtcccagagcaaggactccgacgtgtacatcaccgataagtgcgtgctggacatgcggagcatggacttcaagagcaactccgccgtggcctggtccaacaagtccgatttcgcctgcgccaacgccttcaacaacagcattatccccgaggacacattcttcccaagccccgagagcagctgcgacgtgaagctggtggaaaagagcttcgagacagacaccaacctgaacttccagaacctgagcgtgatcggcttcagaatcctgctgctgaaagtggccggctttaacctgctgatgaccctgcggctgtggtccagc

SEQ ID NO: 4421 - DNA, 3162 bp, Artificial Sequence
  Synthetic Polynucloetide
atggccttaccagtgaccgccttgctcctgccgctggccttgctgctccacgccgccaggccgcagctccagctgcaagagtctggacctggcctggtcaagcctagcgagacactgagcctgacctgtaccgtgtccggcgatagcatcagcagcggcgattactactggggctggatcagacagcctcctggcaaaggactggaatggatcggccacatctactacagcggcgtgacctactacaaccccagcctgaagtccagagtgaccatcagcgtggacaccagccggaaccagttctccctgaagctgtctagcgtgacagccgccgataccgccgtgtactactgcaccagagaggacagcagcaactggcggagtagaggccagggaacactggtcacagttagctctggtaccggcggaggcggatctggcggcggaggtagcggtggcggaggatctgaattcgacatccagatgacacagagccctagcagcctgtctgccagcgtgggagacagagtgaccatcacatgcaaggccagcgaccacatcaacaactggctggcctggtatcagcagaagcctggacaggcccctaagctgctgatctacggcgctaccacactggaaacaggcgtgcccagcagattttctggcagcggctctggcaccgactacaccctgacaatatccagcctccagcctgaggacttcgccacctactactgtcagcagagctggaacaccccttggacattcggccagggcaccaagctggaaatcaagagactcgaggacctgaagaacgtgttcccacctgaggtggccgtgttcgagcctagcgaggccgagatcagccacacccagaaagccaccctcgtgtgcctggctaccggcttctaccccgaccatgtggaactgtcttggtgggtcaacggcaaagaggtgcacagcggcgtgtgtaccgacccccagccactgaaagaacagcccgccctgaacgacagccggtactgcctgagcagcagactgagagtgtccgccaccttctggcagaacccccggaaccacttcagatgccaggtgcagttctacggcctgagcgagaacgacgagtggacccaggacagagccaagcccgtgacccagatcgtgtctgccgaagcctggggcagagccgattgcggctttaccagcgagagctaccagcagggcgtgctgagcgccaccatcctgtacgagatcctgctgggcaaggccaccctgtacgccgtgctggtgtctgccctggtgctgatggctatggtcaagcggaaggacagccggggaagggccaagcgatctggatctggagcaacaaacttctcactactcaaacaagcaggtgacgtggaggagaatcccgggcctactagtatggactggatttggcgcatccttttccttgtcggcgctgctaccggcgcccattccgggcccatggaccccgacctggaaatcagagccgccttcctgcggcagagaaacacagccctgagaacagaggtggccgagctggaacaagaggtgcagcggctggaaaacgaggtgtcccagtacgagacaagatacggccctctcggaggcggaaaaggatccggcggcggaggatctggcggaggcggatctgggggcggaggctctttcgaacaagttcagcttcaacagcctggcgctgagctggtcaaacctggcgcttctgtgaagatgagctgcaaagccagcggctacgccttcagcagctactggatcaactggatgaagcagaaacccggccagggactcgaatggatcggccaaatctatcccggcgacggcgacaccaactacaacggcaagttcaagggcagagccacactgaccgccgatacctctagcagcacagcctacatgcagctgagcagcctgaccagcgaagatagcgccgtgtacttctgtgcccggtccatcacaacagtcgtgggctgcgctatggactattggggccagggaacaagcgtgaccgtgtctagtacgcgtatccagaaccctgatcctgccgtgtaccagctgcgggatagcaagagcagcgacaagagcgtgtgtctgttcaccgacttcgacagccagaccaacgtgtcccagagcaaggactccgacgtgtacatcaccgataagtgcgtgctggacatgcggagcatggacttcaagagcaactccgccgtggcctggtccaacaagtccgatttcgcctgcgccaacgccttcaacaacagcattatccccgaggacacattcttcccaagccccgagagcagctgcgacgtgaagctggtggaaaagagcttcgagacagacaccaacctgaacttccagaacctgagcgtgatcggcttcagaatcctgctgctgaaagtggccggctttaacctgctgatgaccctgcggctgtggtccagccgcgccaagagaagcggatctggcgtgaagcagaccctgaatttcgacctgctgaagctggctggcgacgtggaatccaacccaggcccttctagaggcgggatccacaccatggctacctacgaggtgctgtgcgaggtggcaagaaagctgggcaccgacgacagagaagtggtgctgttcctgctgaacgtgttcatccctcagcctacactggcccagctgatcggtgcactgagagccctgaaagaggaaggccggctgacctttcctctgctggccgaatgcctgttcagagccggaagaagggatctgctgcgggacctgctgcatctggaccccagatttctggaaagacacctggccggcaccatgagctacttcagcccttaccagctgaccgtgctgcacgttgacggcgaactgtgcgccagagatattcggagcctgatcttcctgagcaaggacaccatcggcagccggtctacccctcagacatttctgcactgggtgtactgcatggaaaacctggacctgctcggccccacagatgtggatgccctgatgtccatgctgagaagcctgagcagagtggacctccagagacaggtgcagacactgatgggactgcacctgagcggacctagccacagccagcactacagacacacccct

SEQ ID NO: 4422 - DNA, 2499 bp, Artificial Sequence
  Synthetic Polynucloetide
atggccttaccagtgaccgccttgctcctgccgctggccttgctgctccacgccgccaggccgcagctccagctgcaagagtctggacctggcctggtcaagcctagcgagacactgagcctgacctgtaccgtgtccggcgatagcatcagcagcggcgattactactggggctggatcagacagcctcctggcaaaggactggaatggatcggccacatctactacagcggcgtgacctactacaaccccagcctgaagtccagagtgaccatcagcgtggacaccagccggaaccagttctccctgaagctgtctagcgtgacagccgccgataccgccgtgtactactgcaccagagaggacagcagcaactggcggagtagaggccagggaacactggtcacagttagctctggtaccggcggaggcggatctggcggcggaggtagcggtggcggaggatctgaattcgacatccagatgacacagagccctagcagcctgtctgccagcgtgggagacagagtgaccatcacatgcaaggccagcgaccacatcaacaactggctggcctggtatcagcagaagcctggacaggcccctaagctgctgatctacggcgctaccacactggaaacaggcgtgcccagcagattttctggcagcggctctggcaccgactacaccctgacaatatccagcctccagcctgaggacttcgccacctactactgtcagcagagctggaacaccccttggacattcggccagggcaccaagctggaaatcaagagactcgagatccagaaccctgatcctgccgtgtaccagctgcgggatagcaagagcagcgacaagagcgtgtgtctgttcaccgacttcgacagccagaccaacgtgtcccagagcaaggactccgacgtgtacatcaccgataagtgcgtgctggacatgcggagcatggacttcaagagcaactccgccgtggcctggtccaacaagtccgatttcgcctgcgccaacgccttcaacaacagcattatccccgaggacacattcttcccaagccccgagagcagctgcgacgtgaagctggtggaaaagagcttcgagacagacaccaacctgaacttccagaacctgagcgtgatcggcttcagaatcctgctgctgaaagtggccggctttaacctgctgatgaccctgcggctgtggtccagccgcgccaagagaagcggatctggcgtgaagcagaccctgaatttcgacctgctgaagctggctggcgacgtggaatccaacccaggccctactagtatggactggatttggcgcatccttttccttgtcggcgctgctaccggcgcccattccgggcccatggaccccgacctggaaatcagagccgccttcctgcggcagagaaacacagccctgagaacagaggtggccgagctggaacaagaggtgcagcggctggaaaacgaggtgtcccagtacgagacaagatacggccctctcggaggcggaaaaggatccggcggcggaggatctggcggaggcggatctgggggcggaggctctttcgaacaagttcagcttcaacagcctggcgctgagctggtcaaacctggcgcttctgtgaagatgagctgcaaagccagcggctacgccttcagcagctactggatcaactggatgaagcagaaacccggccagggactcgaatggatcggccaaatctatcccggcgacggcgacaccaactacaacggcaagttcaagggcagagccacactgaccgccgatacctctagcagcacagcctacatgcagctgagcagcctgaccagcgaagatagcgccgtgtacttctgtgcccggtccatcacaacagtcgtgggctgcgctatggactattggggccagggaacaagcgtgaccgtgtctagtacgcgtgaggacctgaagaacgtgttcccacctgaggtggccgtgttcgagcctagcgaggccgagatcagccacacccagaaagccaccctcgtgtgcctggctaccggcttctaccccgaccatgtggaactgtcttggtgggtcaacggcaaagaggtgcacagcggcgtgtgtaccgacccccagccactgaaagaacagcccgccctgaacgacagccggtactgcctgagcagcagactgagagtgtccgccaccttctggcagaacccccggaaccacttcagatgccaggtgcagttctacggcctgagcgagaacgacgagtggacccaggacagagccaagcccgtgacccagatcgtgtctgccgaagcctggggcagagccgattgcggctttaccagcgagagctaccagcagggcgtgctgagcgccaccatcctgtacgagatcctgctgggcaaggccaccctgtacgccgtgctggtgtctgccctggtgctgatggctatggtcaagcggaaggacagccgggga

SEQ ID NO: 4423 - DNA, 3165 bp, Artificial Sequence
  Synthetic Polynucloetide
atggccttaccagtgaccgccttgctcctgccgctggccttgctgctccacgccgccaggccgcagctccagctgcaagagtctggacctggcctggtcaagcctagcgagacactgagcctgacctgtaccgtgtccggcgatagcatcagcagcggcgattactactggggctggatcagacagcctcctggcaaaggactggaatggatcggccacatctactacagcggcgtgacctactacaaccccagcctgaagtccagagtgaccatcagcgtggacaccagccggaaccagttctccctgaagctgtctagcgtgacagccgccgataccgccgtgtactactgcaccagagaggacagcagcaactggcggagtagaggccagggaacactggtcacagttagctctggtaccggcggaggcggatctggcggcggaggtagcggtggcggaggatctgaattcgacatccagatgacacagagccctagcagcctgtctgccagcgtgggagacagagtgaccatcacatgcaaggccagcgaccacatcaacaactggctggcctggtatcagcagaagcctggacaggcccctaagctgctgatctacggcgctaccacactggaaacaggcgtgcccagcagattttctggcagcggctctggcaccgactacaccctgacaatatccagcctccagcctgaggacttcgccacctactactgtcagcagagctggaacaccccttggacattcggccagggcaccaagctggaaatcaagagactcgagatccagaaccctgatcctgccgtgtaccagctgcgggatagcaagagcagcgacaagagcgtgtgtctgttcaccgacttcgacagccagaccaacgtgtcccagagcaaggactccgacgtgtacatcaccgataagtgcgtgctggacatgcggagcatggacttcaagagcaactccgccgtggcctggtccaacaagtccgatttcgcctgcgccaacgccttcaacaacagcattatccccgaggacacattcttcccaagccccgagagcagctgcgacgtgaagctggtggaaaagagcttcgagacagacaccaacctgaacttccagaacctgagcgtgatcggcttcagaatcctgctgctgaaagtggccggctttaacctgctgatgaccctgcggctgtggtccagccgcgccaagagaagcggatctggcgtgaagcagaccctgaatttcgacctgctgaagctggctggcgacgtggaatccaacccaggccctactagtatggactggatttggcgcatccttttccttgtcggcgctgctaccggcgcccattccgggcccatggaccccgacctggaaatcagagccgccttcctgcggcagagaaacacagccctgagaacagaggtggccgagctggaacaagaggtgcagcggctggaaaacgaggtgtcccagtacgagacaagatacggccctctcggaggcggaaaaggatccggcggcggaggatctggcggaggcggatctgggggcggaggctctttcgaacaagttcagcttcaacagcctggcgctgagctggtcaaacctggcgcttctgtgaagatgagctgcaaagccagcggctacgccttcagcagctactggatcaactggatgaagcagaaacccggccagggactcgaatggatcggccaaatctatcccggcgacggcgacaccaactacaacggcaagttcaagggcagagccacactgaccgccgatacctctagcagcacagcctacatgcagctgagcagcctgaccagcgaagatagcgccgtgtacttctgtgcccggtccatcacaacagtcgtgggctgcgctatggactattggggccagggaacaagcgtgaccgtgtctagtacgcgtgaggacctgaagaacgtgttcccacctgaggtggccgtgttcgagcctagcgaggccgagatcagccacacccagaaagccaccctcgtgtgcctggctaccggcttctaccccgaccatgtggaactgtcttggtgggtcaacggcaaagaggtgcacagcggcgtgtgtaccgacccccagccactgaaagaacagcccgccctgaacgacagccggtactgcctgagcagcagactgagagtgtccgccaccttctggcagaacccccggaaccacttcagatgccaggtgcagttctacggcctgagcgagaacgacgagtggacccaggacagagccaagcccgtgacccagatcgtgtctgccgaagcctggggcagagccgattgcggctttaccagcgagagctaccagcagggcgtgctgagcgccaccatcctgtacgagatcctgctgggcaaggccaccctgtacgccgtgctggtgtctgccctggtgctgatggctatggtcaagcggaaggacagccggggaagggccaagcgatctggatctggagcaacaaacttctcactactcaaacaagcaggtgacgtggaggagaatcccgggccttctagaggcgggatccacaccatggctacctacgaggtgctgtgcgaggtggcaagaaagctgggcaccgacgacagagaagtggtgctgttcctgctgaacgtgttcatccctcagcctacactggcccagctgatcggtgcactgagagccctgaaagaggaaggccggctgacctttcctctgctggccgaatgcctgttcagagccggaagaagggatctgctgcgggacctgctgcatctggaccccagatttctggaaagacacctggccggcaccatgagctacttcagcccttaccagctgaccgtgctgcacgttgacggcgaactgtgcgccagagatattcggagcctgatcttcctgagcaaggacaccatcggcagccggtctacccctcagacatttctgcactgggtgtactgcatggaaaacctggacctgctcggccccacagatgtggatgccctgatgtccatgctgagaagcctgagcagagtggacctccagagacaggtgcagacactgatgggactgcacctgagcggacctagccacagccagcactacagacacacccct

SEQ ID NO: 4424 - DNA, 3189 bp, Artificial Sequence
  Synthetic Polynucloetide
atggccttaccagtgaccgccttgctcctgccgctggccttgctgctccacgccgccaggccgcagctccagctgcaagagtctggacctggcctggtcaagcctagcgagacactgagcctgacctgtaccgtgtccggcgatagcatcagcagcggcgattactactggggctggatcagacagcctcctggcaaaggactggaatggatcggccacatctactacagcggcgtgacctactacaaccccagcctgaagtccagagtgaccatcagcgtggacaccagccggaaccagttctccctgaagctgtctagcgtgacagccgccgataccgccgtgtactactgcaccagagaggacagcagcaactggcggagtagaggccagggaacactggtcacagttagctctggtaccggcggaggcggatctggcggcggaggtagcggtggcggaggatctgaattcgacatccagatgacacagagccctagcagcctgtctgccagcgtgggagacagagtgaccatcacatgcaaggccagcgaccacatcaacaactggctggcctggtatcagcagaagcctggacaggcccctaagctgctgatctacggcgctaccacactggaaacaggcgtgcccagcagattttctggcagcggctctggcaccgactacaccctgacaatatccagcctccagcctgaggacttcgccacctactactgtcagcagagctggaacaccccttggacattcggccagggcaccaagctggaaatcaagagactcgaggacctgaagaacgtgttcccacctgaggtggccgtgttcgagcctagcgaggccgagatcagccacacccagaaagccaccctcgtgtgcctggctaccggcttctaccccgaccatgtggaactgtcttggtgggtcaacggcaaagaggtgcacagcggcgtgtctaccgacccccagccactgaaagaacagcccgccctgaacgacagccggtactgcctgagcagcagactgagagtgtccgccaccttctggcagaacccccggaaccacttcagatgccaggtgcagttctacggcctgagcgagaacgacgagtggacccaggacagagccaagcccgtgacccagatcgtgtctgccgaagcctggggcagagccgattgcggctttaccagcgagagctaccagcagggcgtgctgagcgccaccatcctgtacgagatcctgctgggcaaggccaccctgtacgccgtgctggtgtctgccctggtgctgatggctatggtcaagcggaaggacagccggggaagggccaagcgatctggatctggagcaacaaacttctcactactcaaacaagcaggtgacgtggaggagaatcccgggcctactagtatggactggatttggcgcatccttttccttgtcggcgctgctaccggcgcccattccgggcccatggaccccgacctggaaatcagagccgccttcctgcggcagagaaacacagccctgagaacagaggtggccgagctggaacaagaggtgcagcggctggaaaacgaggtgtcccagtacgagacaagatacggccctctcggaggcggaaaaggatccggcggcggaggatctggcggaggcggatctgggggcggaggctctttcgaacaagttcagcttcaacagcctggcgctgagctggtcaaacctggcgcttctgtgaagatgagctgcaaagccagcggctacgccttcagcagctactggatcaactggatgaagcagaaacccggccagggactcgaatggatcggccaaatctatcccggcgacggcgacaccaactacaacggcaagttcaagggcagagccacactgaccgccgatacctctagcagcacagcctacatgcagctgagcagcctgaccagcgaagatagcgccgtgtacttctgtgcccggtccatcacaacagtcgtgggctgcgctatggactattggggccagggaacaagcgtgaccgtgtctagtacgcgtatccagaaccctgatcctgccgtgtaccagctgcgggatagcaagagcagcgacaagagcgtgtgtctgttcaccgacttcgacagccagaccaacgtgtcccagagcaaggactccgacgtgtacatcaccgataagaccgtgctggacatgcggagcatggacttcaagagcaactccgccgtggcctggtccaacaagtccgatttcgcctgcgccaacgccttcaacaacagcattatccccgaggacacattcttcccaagccccgagagcagctgcgacgtgaagctggtggaaaagagcttcgagacagacaccaacctgaacttccagaacctgagcgtgatcggcttcagaatcctgctgctgaaagtggccggctttaacctgctgatgaccctgcggctgtggtccagccgcgccaagagaagcggatctggcgtgaagcagaccctgaatttcgacctgctgaagctggctggcgacgtggaatccaacccaggcccttctagaggccatatgaccgagtacaagcccacggtgcgcctcgccacccgcgacgacgtccccagggccgtacgcaccctcgccgccgcgttcgccgactaccccgccacgcgccacaccgtcgatccggaccgccacatcgagcgggtcaccgagctgcaagaactcttcctcacgcgcgtcgggctcgacatcggcaaggtgtgggtcgcggacgacggcgccgcggtggcggtctggaccacgccggagagcgtcgaagcgggggcggtgttcgccgagatcggcccgcgcatggccgagttgagcggttcccggctggccgcgcagcaacagatggaaggcctcctggcgccgcaccggcccaaggagcccgcgtggttcctggccaccgtcggcgtctcgcccgaccaccagggcaagggtctgggcagcgccgtcgtgctccccggagtggaggcggccgagcgcgccggggtgcccgccttcctggagacctccgcgccccgcaacctccccttctacgagcggctcggcttcaccgtcaccgccgacgtcgaggtgcccgaaggaccgcgcacctggtgcatgacccgcaagcccggtgcctga

SEQ ID NO: 4425 - DNA, 3435 bp, Artificial Sequence
  Synthetic Polynucloetide
atggccttaccagtgaccgccttgctcctgccgctggccttgctgctccacgccgccaggccgcagctccagctgcaagagtctggacctggcctggtcaagcctagcgagacactgagcctgacctgtaccgtgtccggcgatagcatcagcagcggcgattactactggggctggatcagacagcctcctggcaaaggactggaatggatcggccacatctactacagcggcgtgacctactacaaccccagcctgaagtccagagtgaccatcagcgtggacaccagccggaaccagttctccctgaagctgtctagcgtgacagccgccgataccgccgtgtactactgcaccagagaggacagcagcaactggcggagtagaggccagggaacactggtcacagttagctctggtaccggcggaggcggatctggcggcggaggtagcggtggcggaggatctgaattcgacatccagatgacacagagccctagcagcctgtctgccagcgtgggagacagagtgaccatcacatgcaaggccagcgaccacatcaacaactggctggcctggtatcagcagaagcctggacaggcccctaagctgctgatctacggcgctaccacactggaaacaggcgtgcccagcagattttctggcagcggctctggcaccgactacaccctgacaatatccagcctccagcctgaggacttcgccacctactactgtcagcagagctggaacaccccttggacattcggccagggcaccaagctggaaatcaagagactcgaggacctgaagaacgtgttcccacctgaggtggccgtgttcgagcctagcgaggccgagatcagccacacccagaaagccaccctcgtgtgcctggctaccggcttctaccccgaccatgtggaactgtcttggtgggtcaacggcaaagaggtgcacagcggcgtgtctaccgacccccagccactgaaagaacagcccgccctgaacgacagccggtactgcctgagcagcagactgagagtgtccgccaccttctggcagaacccccggaaccacttcagatgccaggtgcagttctacggcctgagcgagaacgacgagtggacccaggacagagccaagcccgtgacccagatcgtgtctgccgaagcctggggcagagccgattgcggctttaccagcgagagctaccagcagggcgtgctgagcgccaccatcctgtacgagatcctgctgggcaaggccaccctgtacgccgtgctggtgtctgccctggtgctgatggctatggtcaagcggaaggacagccggggaagggccaagcgatctggatctggagcaacaaacttctcactactcaaacaagcaggtgacgtggaggagaatcccgggcctactagtatggactggatttggcgcatccttttccttgtcggcgctgctaccggcgcccattccgggcccatggaccccgacctggaaatcagagccgccttcctgcggcagagaaacacagccctgagaacagaggtggccgagctggaacaagaggtgcagcggctggaaaacgaggtgtcccagtacgagacaagatacggccctctcggaggcggaaaaggatccggcggcggaggatctggcggaggcggatctgggggcggaggctctttcgaacaagttcagcttcaacagcctggcgctgagctggtcaaacctggcgcttctgtgaagatgagctgcaaagccagcggctacgccttcagcagctactggatcaactggatgaagcagaaacccggccagggactcgaatggatcggccaaatctatcccggcgacggcgacaccaactacaacggcaagttcaagggcagagccacactgaccgccgatacctctagcagcacagcctacatgcagctgagcagcctgaccagcgaagatagcgccgtgtacttctgtgcccggtccatcacaacagtcgtgggctgcgctatggactattggggccagggaacaagcgtgaccgtgtctagtacgcgtgagcagaaactgatctcggaagaggatgggagcggcaccccattcccttctctggcccctcccatcatgctgctggtggacggcaagcagcagatggtggtcgtgtgcctggtgctggatgtggccccacctggactggacagccccatctggtttagcgccggcaatggctctgccctggacgcctttacctacggcccaagccctgccaccgatggcacctggacaaatctggcccacctgagcctgcccagcgaggaactggcttcttgggagcctctcgtgtgccacacaggacctggcgctgagggacacagcagatccacccagcctatgcacctgtctggcgaggccagcaccgccagaacctgtcctcaggaacctctgagaggcacccctggcggagcactgtggctgggagtgctgagactgctgctgttcaagctgctgctgtttgacctgctgctgacctgctcctgtctgtgcgatcctgccggccctctgccttctcctgccaccaccacaagactgagagccctgggcagccacagactgcaccctgccacagagacaggcggcagagaggccacaagcagccctagaccccagcccagagacagaagatggggcgataccccccctggcagaaagcctggatctccagtccgcgccaagagaagcggatctggcgtgaagcagaccctgaatttcgacctgctgaagctggctggcgacgtggaatccaacccaggcccttctagaggccatatgaccgagtacaagcccacggtgcgcctcgccacccgcgacgacgtccccagggccgtacgcaccctcgccgccgcgttcgccgactaccccgccacgcgccacaccgtcgatccggaccgccacatcgagcgggtcaccgagctgcaagaactcttcctcacgcgcgtcgggctcgacatcggcaaggtgtgggtcgcggacgacggcgccgcggtggcggtctggaccacgccggagagcgtcgaagcgggggcggtgttcgccgagatcggcccgcgcatggccgagttgagcggttcccggctggccgcgcagcaacagatggaaggcctcctggcgccgcaccggcccaaggagcccgcgtggttcctggccaccgtcggcgtctcgcccgaccaccagggcaagggtctgggcagcgccgtcgtgctccccggagtggaggcggccgagcgcgccggggtgcccgccttcctggagacctccgcgccccgcaacctccccttctacgagcggctcggcttcaccgtcaccgccgacgtcgaggtgcccgaaggaccgcgcacctggtgcatgacccgcaagcccggtgcctga

SEQ ID NO: 4426 - DNA, 3300 bp, Artificial Sequence
  Synthetic Polynucloetide
atggccttaccagtgaccgccttgctcctgccgctggccttgctgctccacgccgccaggccgcagctccagctgcaagagtctggacctggcctggtcaagcctagcgagacactgagcctgacctgtaccgtgtccggcgatagcatcagcagcggcgattactactggggctggatcagacagcctcctggcaaaggactggaatggatcggccacatctactacagcggcgtgacctactacaaccccagcctgaagtccagagtgaccatcagcgtggacaccagccggaaccagttctccctgaagctgtctagcgtgacagccgccgataccgccgtgtactactgcaccagagaggacagcagcaactggcggagtagaggccagggaacactggtcacagttagctctggtaccggcggaggcggatctggcggcggaggtagcggtggcggaggatctgaattcgacatccagatgacacagagccctagcagcctgtctgccagcgtgggagacagagtgaccatcacatgcaaggccagcgaccacatcaacaactggctggcctggtatcagcagaagcctggacaggcccctaagctgctgatctacggcgctaccacactggaaacaggcgtgcccagcagattttctggcagcggctctggcaccgactacaccctgacaatatccagcctccagcctgaggacttcgccacctactactgtcagcagagctggaacaccccttggacattcggccagggcaccaagctggaaatcaagagactcgaggggaaaccaattcccaaccctcttctgggactggattcaaccggcagcggcgacaagcagctggacgccgacgtgtcccccaagcctaccatcttcctgccctctatcgccgagacaaagctccagaaggccggcacctacctgtgcctgctggaaaagttcttcccagatgtgattaagatccactggcaggaaaagaagtccaacaccatcctgggcagccaggaaggcaacaccatgaagaccaacgacacctacatgaagttcagctggctgaccgtgcccgagaagtccctggacaaagaacacagatgcatcgtgcggcacgaaaacaacaagaacggcgtggaccaggaaatcatcttcccacccatcaagaccgatgtgattacaatggaccccaaggacaactgctccaaggacgccaacgataccctgctgctccagctgaccaacaccagcgcctactacatgtacttgttgctgctgctgaagtccgtggtgtacttcgccatcatcacatgctgcctgctgcggagaaccgccttctgctgcaacggcgagaagtctagggccaagcgatctggatctggagcaacaaacttctcactactcaaacaagcaggtgacgtggaggagaatcccgggcctactagtatggactggatttggcgcatccttttccttgtcggcgctgctaccggcgcccattccgggcccatggaccccgacctggaaatcagagccgccttcctgcggcagagaaacacagccctgagaacagaggtggccgagctggaacaagaggtgcagcggctggaaaacgaggtgtcccagtacgagacaagatacggccctctcggaggcggaaaaggatccggcggcggaggatctggcggaggcggatctgggggcggaggctctttcgaacaagttcagcttcaacagcctggcgctgagctggtcaaacctggcgcttctgtgaagatgagctgcaaagccagcggctacgccttcagcagctactggatcaactggatgaagcagaaacccggccagggactcgaatggatcggccaaatctatcccggcgacggcgacaccaactacaacggcaagttcaagggcagagccacactgaccgccgatacctctagcagcacagcctacatgcagctgagcagcctgaccagcgaagatagcgccgtgtacttctgtgcccggtccatcacaacagtcgtgggctgcgctatggactattggggccagggaacaagcgtgaccgtgtctagtacgcgtgagcagaaactgatctcggaagaggatgggagcggcagccagcctcacaccaagcccagcgtgttcgtgatgaagaacggcaccaacgtggcctgcctcgtgaaagagttctaccccaaggacatcaggatcaacctggtgtccagcaagaagatcaccgagttcgaccccgccatcgtgatctcccccagcggcaagtacaacgccgtgaagctggggaagtacgaggacagcaacagcgtgacctgctccgtgcagcacgacaacaagaccgtgcacagcaccgactttgaagtgaaaaccgactccaccgaccacgtgaagcccaaagagacagagaacaccaagcagcccagcaagagctgccacaagcccaaggccatcgtgcacaccgagaaagtgaacatgatgagcctgaccgtgctgggcctgcggatgctgttcgccaaaaccgtggccgtgaacttcctgctgaccgccaagctgttcttcctccgcgccaagagaagcggatctggcgtgaagcagaccctgaatttcgacctgctgaagctggctggcgacgtggaatccaacccaggcccttctagaggccatatgaccgagtacaagcccacggtgcgcctcgccacccgcgacgacgtccccagggccgtacgcaccctcgccgccgcgttcgccgactaccccgccacgcgccacaccgtcgatccggaccgccacatcgagcgggtcaccgagctgcaagaactcttcctcacgcgcgtcgggctcgacatcggcaaggtgtgggtcgcggacgacggcgccgcggtggcggtctggaccacgccggagagcgtcgaagcgggggcggtgttcgccgagatcggcccgcgcatggccgagttgagcggttcccggctggccgcgcagcaacagatggaaggcctcctggcgccgcaccggcccaaggagcccgcgtggttcctggccaccgtcggcgtctcgcccgaccaccagggcaagggtctgggcagcgccgtcgtgctccccggagtggaggcggccgagcgcgccggggtgcccgccttcctggagacctccgcgccccgcaacctccccttctacgagcggctcggcttcaccgtcaccgccgacgtcgaggtgcccgaaggaccgcgcacctggtgcatgacccgcaagcccggtgcctga

SEQ ID NO: 4427 - DNA, 2511 bp, Artificial Sequence
  Synthetic Polynucloetide
atggccttaccagtgaccgccttgctcctgccgctggccttgctgctccacgccgccaggccgcagctccagctgcaagagtctggacctggcctggtcaagcctagcgagacactgagcctgacctgtaccgtgtccggcgatagcatcagcagcggcgattactactggggctggatcagacagcctcctggcaaaggactggaatggatcggccacatctactacagcggcgtgacctactacaaccccagcctgaagtccagagtgaccatcagcgtggacaccagccggaaccagttctccctgaagctgtctagcgtgacagccgccgataccgccgtgtactactgcaccagagaggacagcagcaactggcggagtagaggccagggaacactggtcacagttagctctggtaccggcggaggcggatctggcggcggaggtagcggtggcggaggatctgaattcgacatccagatgacacagagccctagcagcctgtctgccagcgtgggagacagagtgaccatcacatgcaaggccagcgaccacatcaacaactggctggcctggtatcagcagaagcctggacaggcccctaagctgctgatctacggcgctaccacactggaaacaggcgtgcccagcagattttctggcagcggctctggcaccgactacaccctgacaatatccagcctccagcctgaggacttcgccacctactactgtcagcagagctggaacaccccttggacattcggccagggcaccaagctggaaatcaagagactcgagagccagcctcacaccaagcccagcgtgttcgtgatgaagaacggcaccaacgtggcctgcctcgtgaaagagttctaccccaaggacatcaggatcaacctggtgtccagcaagaagatcaccgagttcgaccccgccatcgtgatctcccccagcggcaagtacaacgccgtgaagctggggaagtacgaggacagcaacagcgtgacctgctccgtgcagcacgacaacaagaccgtgcacagcaccgactttgaagtgaaaaccgactccaccgaccacgtgaagcccaaagagacagagaacaccaagcagcccagcaagagctgccacaagcccaaggccatcgtgcacaccgagaaagtgaacatgatgagcctgaccgtgctgggcctgcggatgctgttcgccaaaaccgtggccgtgaacttcctgctgaccgccaagctgttcttcctcagggccaagcgatctggatctggagcaacaaacttctcactactcaaacaagcaggtgacgtggaggagaatcccgggcctactagtatggactggatttggcgcatccttttccttgtcggcgctgctaccggcgcccattccgggcccatggaccccgacctggaaatcagagccgccttcctgcggcagagaaacacagccctgagaacagaggtggccgagctggaacaagaggtgcagcggctggaaaacgaggtgtcccagtacgagacaagatacggccctctcggaggcggaaaaggatccggcggcggaggatctggcggaggcggatctgggggcggaggctctttcgaacaagttcagcttcaacagcctggcgctgagctggtcaaacctggcgcttctgtgaagatgagctgcaaagccagcggctacgccttcagcagctactggatcaactggatgaagcagaaacccggccagggactcgaatggatcggccaaatctatcccggcgacggcgacaccaactacaacggcaagttcaagggcagagccacactgaccgccgatacctctagcagcacagcctacatgcagctgagcagcctgaccagcgaagatagcgccgtgtacttctgtgcccggtccatcacaacagtcgtgggctgcgctatggactattggggccagggaacaagcgtgaccgtgtctagtacgcgtgacaagcagctggacgccgacgtgtcccccaagcctaccatcttcctgccctctatcgccgagacaaagctccagaaggccggcacctacctgtgcctgctggaaaagttcttcccagatgtgattaagatccactggcaggaaaagaagtccaacaccatcctgggcagccaggaaggcaacaccatgaagaccaacgacacctacatgaagttcagctggctgaccgtgcccgagaagtccctggacaaagaacacagatgcatcgtgcggcacgaaaacaacaagaacggcgtggaccaggaaatcatcttcccacccatcaagaccgatgtgattacaatggaccccaaggacaactgctccaaggacgccaacgataccctgctgctccagctgaccaacaccagcgcctactacatgtacttgttgctgctgctgaagtccgtggtgtacttcgccatcatcacatgctgcctgctgcggagaaccgccttctgctgcaacggcgagaagtct

SEQ ID NO: 4428 - DNA, 3720 bp, Artificial Sequence
  Synthetic Polynucloetide
atggccttaccagtgaccgccttgctcctgccgctggccttgctgctccacgccgccaggccgcagctccagctgcaagagtctggacctggcctggtcaagcctagcgagacactgagcctgacctgtaccgtgtccggcgatagcatcagcagcggcgattactactggggctggatcagacagcctcctggcaaaggactggaatggatcggccacatctactacagcggcgtgacctactacaaccccagcctgaagtccagagtgaccatcagcgtggacaccagccggaaccagttctccctgaagctgtctagcgtgacagccgccgataccgccgtgtactactgcaccagagaggacagcagcaactggcggagtagaggccagggaacactggtcacagttagctctggtaccggcggaggcggatctggcggcggaggtagcggtggcggaggatctgaattcgacatccagatgacacagagccctagcagcctgtctgccagcgtgggagacagagtgaccatcacatgcaaggccagcgaccacatcaacaactggctggcctggtatcagcagaagcctggacaggcccctaagctgctgatctacggcgctaccacactggaaacaggcgtgcccagcagattttctggcagcggctctggcaccgactacaccctgacaatatccagcctccagcctgaggacttcgccacctactactgtcagcagagctggaacaccccttggacattcggccagggcaccaagctggaaatcaagagaggacagcctaaggccaatcctaccgtgacactgttccctccaagcagcgaagaactccaggccaacaaggccacacttgtgtgcctgatctccgacttctaccctggggctgtgacagtggcttggaaggccgatggatctcctgtgaaagccggcgtggaaaccaccaagccatccaagcagagcaacaacaaatacgccgccagctcctacctgagcctgacacctgagcagtggaagtcccacagatcctacagctgccaagtgacccacgaaggcagcaccgtggaaaagacagtggcccctacagagtgcagcggatcccagagcttcggcctgctggaccccaagctgtgctacctgctggatggcatcctgttcatctacggcgtgatcctgaccgccctgttcctgagagtgaagttcagcagaagcgccgacgcccctgcctaccagcagggacagaaccaactgtacaacgagctgaacctgggcagacgggaagagtacgacgtgctggacaagcggagaggcagggaccctgagatgggcggaaagccccagcggagaaagaacccccaggaaggactgtataacgaactccagaaagacaagatggccgaagcctacagcgagatcggcatgaagggcgagcggagaagaggcaagggccacgatggcctgtaccagggcctgagcaccgccaccaaggacacctatgacgccctgcacatgcaggccctgcctccaagaagggccaagcgatctggatctggagcaacaaacttctcactactcaaacaagcaggtgacgtggaggagaatcccgggcctactagtatggactggatttggcgcatccttttccttgtcggcgctgctaccggcgcccattccgggcccatggaccccgacctggaaatcagagccgccttcctgcggcagagaaacacagccctgagaacagaggtggccgagctggaacaagaggtgcagcggctggaaaacgaggtgtcccagtacgagacaagatacggccctctcggaggcggaaaaggatccggcggcggaggatctggcggaggcggatctgggggcggaggctctttcgaacaagttcagcttcaacagcctggcgctgagctggtcaaacctggcgcttctgtgaagatgagctgcaaagccagcggctacgccttcagcagctactggatcaactggatgaagcagaaacccggccagggactcgaatggatcggccaaatctatcccggcgacggcgacaccaactacaacggcaagttcaagggcagagccacactgaccgccgatacctctagcagcacagcctacatgcagctgagcagcctgaccagcgaagatagcgccgtgtacttctgtgcccggtccatcacaacagtcgtgggctgcgctatggactattggggccagggaacaagcgtgaccgtgtctagtgcctctacaaagggaccctccgtgtttcctctggctcccagcagcaagtctacaagcggaggaacagccgctctgggctgcctggtcaaggattactttcccgagcctgtgaccgtgtcctggaatagcggagcactgacaagcggcgtgcacacctttccagccgtgctgcaaagcagcggcctgtactctctgagcagcgtggtcacagtgcctagctctagcctgggcacccagacctacatctgcaatgtgaaccacaagcctagcaacaccaaggtggacaagagagtggaacccaagagctgtggtacccagagttttgggttgttggaccctaaattgtgctatctgttggacggaatcctgttcatttacggagtgatcctgaccgcattgttcctgcgggttaagttttccagatccgcagacgcacccgcttaccaacaagggcagaaccaactctacaatgaacttaatttggggcggagggaagagtacgacgttctggacaaaaggaggggacgagatcccgagatgggcggaaagcctcagcgaaggaagaatccgcaagaggggctttataacgaactccagaaagataaaatggcagaagcctatagtgagattgggatgaagggagaaaggaggaggggtaaaggtcacgatgggttgtaccaaggattgagcacagccactaaagatacctatgatgcgctccacatgcaggccctgccgccaagacgcgccaagagaagcggatctggcgtgaagcagaccctgaatttcgacctgctgaagctggctggcgacgtggaatccaacccaggcccttctagaggccatatgaccgagtacaagcccacggtgcgcctcgccacccgcgacgacgtccccagggccgtacgcaccctcgccgccgcgttcgccgactaccccgccacgcgccacaccgtcgatccggaccgccacatcgagcgggtcaccgagctgcaagaactcttcctcacgcgcgtcgggctcgacatcggcaaggtgtgggtcgcggacgacggcgccgcggtggcggtctggaccacgccggagagcgtcgaagcgggggcggtgttcgccgagatcggcccgcgcatggccgagttgagcggttcccggctggccgcgcagcaacagatggaaggcctcctggcgccgcaccggcccaaggagcccgcgtggttcctggccaccgtcggcgtctcgcccgaccaccagggcaagggtctgggcagcgccgtcgtgctccccggagtggaggcggccgagcgcgccggggtgcccgccttcctggagacctccgcgccccgcaacctccccttctacgagcggctcggcttcaccgtcaccgccgacgtcgaggtgcccgaaggaccgcgcacctggtgcatgacccgcaagcccggtgcctga

SEQ ID NO: 4429 - DNA, 3075 bp, Artificial Sequence
  Synthetic Polynucloetide
atggccttaccagtgaccgccttgctcctgccgctggccttgctgctccacgccgccaggccgcagctccagctgcaagagtctggacctggcctggtcaagcctagcgagacactgagcctgacctgtaccgtgtccggcgatagcatcagcagcggcgattactactggggctggatcagacagcctcctggcaaaggactggaatggatcggccacatctactacagcggcgtgacctactacaaccccagcctgaagtccagagtgaccatcagcgtggacaccagccggaaccagttctccctgaagctgtctagcgtgacagccgccgataccgccgtgtactactgcaccagagaggacagcagcaactggcggagtagaggccagggaacactggtcacagttagctctggtaccggcggaggcggatctggcggcggaggtagcggtggcggaggatctgaattcgacatccagatgacacagagccctagcagcctgtctgccagcgtgggagacagagtgaccatcacatgcaaggccagcgaccacatcaacaactggctggcctggtatcagcagaagcctggacaggcccctaagctgctgatctacggcgctaccacactggaaacaggcgtgcccagcagattttctggcagcggctctggcaccgactacaccctgacaatatccagcctccagcctgaggacttcgccacctactactgtcagcagagctggaacaccccttggacattcggccagggcaccaagctggaaatcaagagactcgaggacctgaagaacgtgttcccacctgaggtggccgtgttcgagcctagcgaggccgagatcagccacacccagaaagccaccctcgtgtgcctggctaccggcttctaccccgaccatgtggaactgtcttggtgggtcaacggcaaagaggtgcacagcggcgtgtctaccgacccccagccactgaaagaacagcccgccctgaacgacagccggtactgcctgagcagcagactgagagtgtccgccaccttctggcagaacccccggaaccacttcagatgccaggtgcagttctacggcctgagcgagaacgacgagtggacccaggacagagccaagcccgtgacccagatcgtgtctgccgaagcctggggcagagccgattgcggatcccagagcttcggcctgctggaccccaagctgtgctacctgctggatggcatcctgttcatctacggcgtgatcctgaccgccctgttcctgagagtgaagttcagcagaagcgccgacgcccctgcctaccagcagggacagaaccaactgtacaacgagctgaacctgggcagacgggaagagtacgacgtgctggacaagcggagaggcagggaccctgagatgggcggaaagccccagcggagaaagaacccccaggaaggactgtataacgaactccagaaagacaagatggccgaagcctacagcgagatcggcatgaagggcgagcggagaagaggcaagggccacgatggcctgtaccagggcctgagcaccgccaccaaggacacctatgacgccctgcacatgcaggccctgcctccaagaagggccaagcgatctggatctggagcaacaaacttctcactactcaaacaagcaggtgacgtggaggagaatcccgggcctactagtatggactggatttggcgcatccttttccttgtcggcgctgctaccggcgcccattccgggcccatggaccccgacctggaaatcagagccgccttcctgcggcagagaaacacagccctgagaacagaggtggccgagctggaacaagaggtgcagcggctggaaaacgaggtgtcccagtacgagacaagatacggccctctcggaggcggaaaaggatccggcggcggaggatctggcggaggcggatctgggggcggaggctctttcgaacaagttcagcttcaacagcctggcgctgagctggtcaaacctggcgcttctgtgaagatgagctgcaaagccagcggctacgccttcagcagctactggatcaactggatgaagcagaaacccggccagggactcgaatggatcggccaaatctatcccggcgacggcgacaccaactacaacggcaagttcaagggcagagccacactgaccgccgatacctctagcagcacagcctacatgcagctgagcagcctgaccagcgaagatagcgccgtgtacttctgtgcccggtccatcacaacagtcgtgggctgcgctatggactattggggccagggaacaagcgtgaccgtgtctagtacgcgtatccagaaccctgatcctgccgtgtaccagctgcgggatagcaagagcagcgacaagagcgtgtgtctgttcaccgacttcgacagccagaccaacgtgtcccagagcaaggactccgacgtgtacatcaccgataagaccgtgctggacatgcggagcatggacttcaagagcaactccgccgtggcctggtccaacaagtccgatttcgcctgcgccaacgccttcaacaacagcattatccccgaggacacattcttcccaagccccgagagcagctgcggtacccagagttttgggttgttggaccctaaattgtgctatctgttggacggaatcctgttcatttacggagtgatcctgaccgcattgttcctgcgggttaagttttccagatccgcagacgcacccgcttaccaacaagggcagaaccaactctacaatgaacttaatttggggcggagggaagagtacgacgttctggacaaaaggaggggacgagatcccgagatgggcggaaagcctcagcgaaggaagaatccgcaagaggggctttataacgaactccagaaagataaaatggcagaagcctatagtgagattgggatgaagggagaaaggaggaggggtaaaggtcacgatgggttgtaccaaggattgagcacagccactaaagatacctatgatgcgctccacatgcaggccctgccgccaaga

SEQ ID NO: 4430 - DNA, 3075 bp, Artificial Sequence
  Synthetic Polynucloetide
atggccttaccagtgaccgccttgctcctgccgctggccttgctgctccacgccgccaggccgcagctccagctgcaagagtctggacctggcctggtcaagcctagcgagacactgagcctgacctgtaccgtgtccggcgatagcatcagcagcggcgattactactggggctggatcagacagcctcctggcaaaggactggaatggatcggccacatctactacagcggcgtgacctactacaaccccagcctgaagtccagagtgaccatcagcgtggacaccagccggaaccagttctccctgaagctgtctagcgtgacagccgccgataccgccgtgtactactgcaccagagaggacagcagcaactggcggagtagaggccagggaacactggtcacagttagctctggtaccggcggaggcggatctggcggcggaggtagcggtggcggaggatctgaattcgacatccagatgacacagagccctagcagcctgtctgccagcgtgggagacagagtgaccatcacatgcaaggccagcgaccacatcaacaactggctggcctggtatcagcagaagcctggacaggcccctaagctgctgatctacggcgctaccacactggaaacaggcgtgcccagcagattttctggcagcggctctggcaccgactacaccctgacaatatccagcctccagcctgaggacttcgccacctactactgtcagcagagctggaacaccccttggacattcggccagggcaccaagctggaaatcaagagactcgaggacctgaagaacgtgttcccacctgaggtggccgtgttcgagcctagcaaggccgagatcgcccacacccagaaagccaccctcgtgtgcctggctaccggcttctaccccgaccatgtggaactgtcttggtgggtcaacggcaaagaggtgcacagcggcgtgtgtaccgacccccagccactgaaagaacagcccgccctgaacgacagccggtactgcctgagcagcagactgagagtgtccgccaccttctggcagaacccccggaaccacttcagatgccaggtgcagttctacggcctgagcgagaacgacgagtggacccaggacagagccaagcccgtgacccagatcgtgtctgccgaagcctggggcagagccgattgcggatcccagagcttcggcctgctggaccccaagctgtgctacctgctggatggcatcctgttcatctacggcgtgatcctgaccgccctgttcctgagagtgaagttcagcagaagcgccgacgcccctgcctaccagcagggacagaaccaactgtacaacgagctgaacctgggcagacgggaagagtacgacgtgctggacaagcggagaggcagggaccctgagatgggcggaaagccccagcggagaaagaacccccaggaaggactgtataacgaactccagaaagacaagatggccgaagcctacagcgagatcggcatgaagggcgagcggagaagaggcaagggccacgatggcctgtaccagggcctgagcaccgccaccaaggacacctatgacgccctgcacatgcaggccctgcctccaagaagggccaagcgatctggatctggagcaacaaacttctcactactcaaacaagcaggtgacgtggaggagaatcccgggcctactagtatggactggatttggcgcatccttttccttgtcggcgctgctaccggcgcccattccgggcccatggaccccgacctggaaatcagagccgccttcctgcggcagagaaacacagccctgagaacagaggtggccgagctggaacaagaggtgcagcggctggaaaacgaggtgtcccagtacgagacaagatacggccctctcggaggcggaaaaggatccggcggcggaggatctggcggaggcggatctgggggcggaggctctttcgaacaagttcagcttcaacagcctggcgctgagctggtcaaacctggcgcttctgtgaagatgagctgcaaagccagcggctacgccttcagcagctactggatcaactggatgaagcagaaacccggccagggactcgaatggatcggccaaatctatcccggcgacggcgacaccaactacaacggcaagttcaagggcagagccacactgaccgccgatacctctagcagcacagcctacatgcagctgagcagcctgaccagcgaagatagcgccgtgtacttctgtgcccggtccatcacaacagtcgtgggctgcgctatggactattggggccagggaacaagcgtgaccgtgtctagtacgcgtatccagaaccctgatcctgccgtgtaccagctgcgggatagcaagagcagcgacaagagcgtgtgtctgttcaccgacttcgacagccagaccaacgtgtcccagagcaaggactccgacgtgtacatcaccgataagtgcgtgctggacatgcggagcatggacttcaagagcaactccgccgtggcctggtccaacaagtccgatttcgcctgcgccaacgccttcaacaacagcattatccccgaggacacattcttcccaagcagcgacgtgccctgcggtacccagagttttgggttgttggaccctaaattgtgctatctgttggacggaatcctgttcatttacggagtgatcctgaccgcattgttcctgcgggttaagttttccagatccgcagacgcacccgcttaccaacaagggcagaaccaactctacaatgaacttaatttggggcggagggaagagtacgacgttctggacaaaaggaggggacgagatcccgagatgggcggaaagcctcagcgaaggaagaatccgcaagaggggctttataacgaactccagaaagataaaatggcagaagcctatagtgagattgggatgaagggagaaaggaggaggggtaaaggtcacgatgggttgtaccaaggattgagcacagccactaaagatacctatgatgcgctccacatgcaggccctgccgccaaga

SEQ ID NO: 4431 - DNA, 3288 bp, Artificial Sequence
  Synthetic Polynucloetide
atggccttaccagtgaccgccttgctcctgccgctggccttgctgctccacgccgccaggccgcagctccagctgcaagagtctggacctggcctggtcaagcctagcgagacactgagcctgacctgtaccgtgtccggcgatagcatcagcagcggcgattactactggggctggatcagacagcctcctggcaaaggactggaatggatcggccacatctactacagcggcgtgacctactacaaccccagcctgaagtccagagtgaccatcagcgtggacaccagccggaaccagttctccctgaagctgtctagcgtgacagccgccgataccgccgtgtactactgcaccagagaggacagcagcaactggcggagtagaggccagggaacactggtcacagttagctctggtaccggcggaggcggatctggcggcggaggtagcggtggcggaggatctgaattcgacatccagatgacacagagccctagcagcctgtctgccagcgtgggagacagagtgaccatcacatgcaaggccagcgaccacatcaacaactggctggcctggtatcagcagaagcctggacaggcccctaagctgctgatctacggcgctaccacactggaaacaggcgtgcccagcagattttctggcagcggctctggcaccgactacaccctgacaatatccagcctccagcctgaggacttcgccacctactactgtcagcagagctggaacaccccttggacattcggccagggcaccaagctggaaatcaagagactcgaggggaaaccaattcccaaccctcttctgggactggattcaaccggcagcggcgaggacctgaagaacgtgttcccacctgaggtggccgtgttcgagcctagcgaggccgagatcagccacacccagaaagccaccctcgtgtgcctggctaccggcttctaccccgaccatgtggaactgtcttggtgggtcaacggcaaagaggtgcacagcggcgtgtctaccgacccccagccactgaaagaacagcccgccctgaacgacagccggtactgcctgagcagcagactgagagtgtccgccaccttctggcagaacccccggaaccacttcagatgccaggtgcagttctacggcctgagcgagaacgacgagtggacccaggacagagccaagcccgtgacccagatcgtgtctgccgaagcctggggcagagccgattgcggatcccagagcttcggcctgctggaccccaagctgtgctacctgctggatggcatcctgttcatctacggcgtgatcctgaccgccctgttcctgagagtgaagttcagcagaagcgccgacgcccctgcctaccagcagggacagaaccaactgtacaacgagctgaacctgggcagacgggaagagtacgacgtgctggacaagcggagaggcagggaccctgagatgggcggaaagccccagcggagaaagaacccccaggaaggactgtataacgaactccagaaagacaagatggccgaagcctacagcgagatcggcatgaagggcgagcggagaagaggcaagggccacgatggcctgtaccagggcctgagcaccgccaccaaggacacctatgacgccctgcacatgcaggccctgcctccaagaagggccaagcgatctggatctggagcaacaaacttctcactactcaaacaagcaggtgacgtggaggagaatcccgggcctactagtatggactggatttggcgcatccttttccttgtcggcgctgctaccggcgcccattccgggcccatggaccccgacctggaaatcagagccgccttcctgcggcagagaaacacagccctgagaacagaggtggccgagctggaacaagaggtgcagcggctggaaaacgaggtgtcccagtacgagacaagatacggccctctcggaggcggaaaaggatccggcggcggaggatctggcggaggcggatctgggggcggaggctctttcgaacaagttcagcttcaacagcctggcgctgagctggtcaaacctggcgcttctgtgaagatgagctgcaaagccagcggctacgccttcagcagctactggatcaactggatgaagcagaaacccggccagggactcgaatggatcggccaaatctatcccggcgacggcgacaccaactacaacggcaagttcaagggcagagccacactgaccgccgatacctctagcagcacagcctacatgcagctgagcagcctgaccagcgaagatagcgccgtgtacttctgtgcccggtccatcacaacagtcgtgggctgcgctatggactattggggccagggaacaagcgtgaccgtgtctagtacgcgtgagcagaaactgatctcggaagaggatgggagcggcatccagaaccctgatcctgccgtgtaccagctgcgggatagcaagagcagcgacaagagcgtgtgtctgttcaccgacttcgacagccagaccaacgtgtcccagagcaaggactccgacgtgtacatcaccgataagaccgtgctggacatgcggagcatggacttcaagagcaactccgccgtggcctggtccaacaagtccgatttcgcctgcgccaacgccttcaacaacagcattatccccgaggacacattcttcccaagccccgagagcagctgcggtacccagagttttgggttgttggaccctaaattgtgctatctgttggacggaatcctgttcatttacggagtgatcctgaccgcattgttcctgaggagcaagcggtcacggctgctccacagcgattacatgaatatgacaccacgaagaccgggtcctactcgcaaacactaccaaccctacgcacctccccgcgactttgcagcgtaccgatctcgggttaagttttccagatccgcagacgcacccgcttaccaacaagggcagaaccaactctacaatgaacttaatttggggcggagggaagagtacgacgttctggacaaaaggaggggacgagatcccgagatgggcggaaagcctcagcgaaggaagaatccgcaagaggggctttataacgaactccagaaagataaaatggcagaagcctatagtgagattgggatgaagggagaaaggaggaggggtaaaggtcacgatgggttgtaccaaggattgagcacagccactaaagatacctatgatgcgctccacatgcaggccctgccgccaaga

SEQ ID NO: 4432 - DNA, 3411 bp, Artificial Sequence
  Synthetic Polynucloetide
atggccttaccagtgaccgccttgctcctgccgctggccttgctgctccacgccgccaggccgcagctccagctgcaagagtctggacctggcctggtcaagcctagcgagacactgagcctgacctgtaccgtgtccggcgatagcatcagcagcggcgattactactggggctggatcagacagcctcctggcaaaggactggaatggatcggccacatctactacagcggcgtgacctactacaaccccagcctgaagtccagagtgaccatcagcgtggacaccagccggaaccagttctccctgaagctgtctagcgtgacagccgccgataccgccgtgtactactgcaccagagaggacagcagcaactggcggagtagaggccagggaacactggtcacagttagctctggtaccggcggaggcggatctggcggcggaggtagcggtggcggaggatctgaattcgacatccagatgacacagagccctagcagcctgtctgccagcgtgggagacagagtgaccatcacatgcaaggccagcgaccacatcaacaactggctggcctggtatcagcagaagcctggacaggcccctaagctgctgatctacggcgctaccacactggaaacaggcgtgcccagcagattttctggcagcggctctggcaccgactacaccctgacaatatccagcctccagcctgaggacttcgccacctactactgtcagcagagctggaacaccccttggacattcggccagggcaccaagctggaaatcaagagactcgaggggaaaccaattcccaaccctcttctgggactggattcaaccggcagcggcgaggacctgaagaacgtgttcccacctgaggtggccgtgttcgagcctagcgaggccgagatcagccacacccagaaagccaccctcgtgtgcctggctaccggcttctaccccgaccatgtggaactgtcttggtgggtcaacggcaaagaggtgcacagcggcgtgtctaccgacccccagccactgaaagaacagcccgccctgaacgacagccggtactgcctgagcagcagactgagagtgtccgccaccttctggcagaacccccggaaccacttcagatgccaggtgcagttctacggcctgagcgagaacgacgagtggacccaggacagagccaagcccgtgacccagatcgtgtctgccgaagcctggggcagagccgattgcggatcccagagcttcggcctgctggaccccaagctgtgctacctgctggatggcatcctgttcatctacggcgtgatcctgaccgccctgttcctgaggagtaagaggagcaggctcctgcacagtgactacatgaacatgactccacgccgccccggacccacccgcaagcattaccagccctatgccccaccacgcgacttcgcagcctatcgctccagagtgaagttcagcagaagcgccgacgcccctgcctaccagcagggacagaaccaactgtacaacgagctgaacctgggcagacgggaagagtacgacgtgctggacaagcggagaggcagggaccctgagatgggcggaaagccccagcggagaaagaacccccaggaaggactgtataacgaactccagaaagacaagatggccgaagcctacagcgagatcggcatgaagggcgagcggagaagaggcaagggccacgatggcctgtaccagggcctgagcaccgccaccaaggacacctatgacgccctgcacatgcaggccctgcctccaagaagggccaagcgatctggatctggagcaacaaacttctcactactcaaacaagcaggtgacgtggaggagaatcccgggcctactagtatggactggatttggcgcatccttttccttgtcggcgctgctaccggcgcccattccgggcccatggaccccgacctggaaatcagagccgccttcctgcggcagagaaacacagccctgagaacagaggtggccgagctggaacaagaggtgcagcggctggaaaacgaggtgtcccagtacgagacaagatacggccctctcggaggcggaaaaggatccggcggcggaggatctggcggaggcggatctgggggcggaggctctttcgaacaagttcagcttcaacagcctggcgctgagctggtcaaacctggcgcttctgtgaagatgagctgcaaagccagcggctacgccttcagcagctactggatcaactggatgaagcagaaacccggccagggactcgaatggatcggccaaatctatcccggcgacggcgacaccaactacaacggcaagttcaagggcagagccacactgaccgccgatacctctagcagcacagcctacatgcagctgagcagcctgaccagcgaagatagcgccgtgtacttctgtgcccggtccatcacaacagtcgtgggctgcgctatggactattggggccagggaacaagcgtgaccgtgtctagtacgcgtgagcagaaactgatctcggaagaggatgggagcggcatccagaaccctgatcctgccgtgtaccagctgcgggatagcaagagcagcgacaagagcgtgtgtctgttcaccgacttcgacagccagaccaacgtgtcccagagcaaggactccgacgtgtacatcaccgataagaccgtgctggacatgcggagcatggacttcaagagcaactccgccgtggcctggtccaacaagtccgatttcgcctgcgccaacgccttcaacaacagcattatccccgaggacacattcttcccaagccccgagagcagctgcggtacccagagttttgggttgttggaccctaaattgtgctatctgttggacggaatcctgttcatttacggagtgatcctgaccgcattgttcctgaggagcaagcggtcacggctgctccacagcgattacatgaatatgacaccacgaagaccgggtcctactcgcaaacactaccaaccctacgcacctccccgcgactttgcagcgtaccgatctcgggttaagttttccagatccgcagacgcacccgcttaccaacaagggcagaaccaactctacaatgaacttaatttggggcggagggaagagtacgacgttctggacaaaaggaggggacgagatcccgagatgggcggaaagcctcagcgaaggaagaatccgcaagaggggctttataacgaactccagaaagataaaatggcagaagcctatagtgagattgggatgaagggagaaaggaggaggggtaaaggtcacgatgggttgtaccaaggattgagcacagccactaaagatacctatgatgcgctccacatgcaggccctgccgccaaga

SEQ ID NO: 4433 - DNA, 3294 bp, Artificial Sequence
  Synthetic Polynucloetide
atggccttaccagtgaccgccttgctcctgccgctggccttgctgctccacgccgccaggccgcagctccagctgcaagagtctggacctggcctggtcaagcctagcgagacactgagcctgacctgtaccgtgtccggcgatagcatcagcagcggcgattactactggggctggatcagacagcctcctggcaaaggactggaatggatcggccacatctactacagcggcgtgacctactacaaccccagcctgaagtccagagtgaccatcagcgtggacaccagccggaaccagttctccctgaagctgtctagcgtgacagccgccgataccgccgtgtactactgcaccagagaggacagcagcaactggcggagtagaggccagggaacactggtcacagttagctctggtaccggcggaggcggatctggcggcggaggtagcggtggcggaggatctgaattcgacatccagatgacacagagccctagcagcctgtctgccagcgtgggagacagagtgaccatcacatgcaaggccagcgaccacatcaacaactggctggcctggtatcagcagaagcctggacaggcccctaagctgctgatctacggcgctaccacactggaaacaggcgtgcccagcagattttctggcagcggctctggcaccgactacaccctgacaatatccagcctccagcctgaggacttcgccacctactactgtcagcagagctggaacaccccttggacattcggccagggcaccaagctggaaatcaagagactcgaggggaaaccaattcccaaccctcttctgggactggattcaaccggcagcggcgaggacctgaagaacgtgttcccacctgaggtggccgtgttcgagcctagcgaggccgagatcagccacacccagaaagccaccctcgtgtgcctggctaccggcttctaccccgaccatgtggaactgtcttggtgggtcaacggcaaagaggtgcacagcggcgtgtctaccgacccccagccactgaaagaacagcccgccctgaacgacagccggtactgcctgagcagcagactgagagtgtccgccaccttctggcagaacccccggaaccacttcagatgccaggtgcagttctacggcctgagcgagaacgacgagtggacccaggacagagccaagcccgtgacccagatcgtgtctgccgaagcctggggcagagccgattgcggatcccagagcttcggcctgctggaccccaagctgtgctacctgctggatggcatcctgttcatctacggcgtgatcctgaccgccctgttcctgagagtgaagttcagcagaagcgccgacgcccctgcctaccagcagggacagaaccaactgtacaacgagctgaacctgggcagacgggaagagtacgacgtgctggacaagcggagaggcagggaccctgagatgggcggaaagccccagcggagaaagaacccccaggaaggactgtataacgaactccagaaagacaagatggccgaagcctacagcgagatcggcatgaagggcgagcggagaagaggcaagggccacgatggcctgtaccagggcctgagcaccgccaccaaggacacctatgacgccctgcacatgcaggccctgcctccaagaagggccaagcgatctggatctggagcaacaaacttctcactactcaaacaagcaggtgacgtggaggagaatcccgggcctactagtatggactggatttggcgcatccttttccttgtcggcgctgctaccggcgcccattccgggcccatggaccccgacctggaaatcagagccgccttcctgcggcagagaaacacagccctgagaacagaggtggccgagctggaacaagaggtgcagcggctggaaaacgaggtgtcccagtacgagacaagatacggccctctcggaggcggaaaaggatccggcggcggaggatctggcggaggcggatctgggggcggaggctctttcgaacaagttcagcttcaacagcctggcgctgagctggtcaaacctggcgcttctgtgaagatgagctgcaaagccagcggctacgccttcagcagctactggatcaactggatgaagcagaaacccggccagggactcgaatggatcggccaaatctatcccggcgacggcgacaccaactacaacggcaagttcaagggcagagccacactgaccgccgatacctctagcagcacagcctacatgcagctgagcagcctgaccagcgaagatagcgccgtgtacttctgtgcccggtccatcacaacagtcgtgggctgcgctatggactattggggccagggaacaagcgtgaccgtgtctagtacgcgtgagcagaaactgatctcggaagaggatctggggagcggcatccagaaccctgatcctgccgtgtaccagctgcgggatagcaagagcagcgacaagagcgtgtgtctgttcaccgacttcgacagccagaccaacgtgtcccagagcaaggactccgacgtgtacatcaccgataagaccgtgctggacatgcggagcatggacttcaagagcaactccgccgtggcctggtccaacaagtccgatttcgcctgcgccaacgccttcaacaacagcattatccccgaggacacattcttcccaagccccgagagcagctgcggtacccagagttttgggttgttggaccctaaattgtgctatctgttggacggaatcctgttcatttacggagtgatcctgaccgcattgttcctgaagagaggccggaagaagctgctgtacatcttcaagcagcctttcatgcggcccgtgcagaccacccaggaagaggacggctgctcctgccggttccccgaggaagaagaaggcggctgcgagctgcgggttaagttttccagatccgcagacgcacccgcttaccaacaagggcagaaccaactctacaatgaacttaatttggggcggagggaagagtacgacgttctggacaaaaggaggggacgagatcccgagatgggcggaaagcctcagcgaaggaagaatccgcaagaggggctttataacgaactccagaaagataaaatggcagaagcctatagtgagattgggatgaagggagaaaggaggaggggtaaaggtcacgatgggttgtaccaaggattgagcacagccactaaagatacctatgatgcgctccacatgcaggccctgccgccaaga

SEQ ID NO: 4434 - DNA, 3420 bp, Artificial Sequence
  Synthetic Polynucloetide
atggccttaccagtgaccgccttgctcctgccgctggccttgctgctccacgccgccaggccgcagctccagctgcaagagtctggacctggcctggtcaagcctagcgagacactgagcctgacctgtaccgtgtccggcgatagcatcagcagcggcgattactactggggctggatcagacagcctcctggcaaaggactggaatggatcggccacatctactacagcggcgtgacctactacaaccccagcctgaagtccagagtgaccatcagcgtggacaccagccggaaccagttctccctgaagctgtctagcgtgacagccgccgataccgccgtgtactactgcaccagagaggacagcagcaactggcggagtagaggccagggaacactggtcacagttagctctggtaccggcggaggcggatctggcggcggaggtagcggtggcggaggatctgaattcgacatccagatgacacagagccctagcagcctgtctgccagcgtgggagacagagtgaccatcacatgcaaggccagcgaccacatcaacaactggctggcctggtatcagcagaagcctggacaggcccctaagctgctgatctacggcgctaccacactggaaacaggcgtgcccagcagattttctggcagcggctctggcaccgactacaccctgacaatatccagcctccagcctgaggacttcgccacctactactgtcagcagagctggaacaccccttggacattcggccagggcaccaagctggaaatcaagagactcgaggggaaaccaattcccaaccctcttctgggactggattcaaccggcagcggcgaggacctgaagaacgtgttcccacctgaggtggccgtgttcgagcctagcgaggccgagatcagccacacccagaaagccaccctcgtgtgcctggctaccggcttctaccccgaccatgtggaactgtcttggtgggtcaacggcaaagaggtgcacagcggcgtgtctaccgacccccagccactgaaagaacagcccgccctgaacgacagccggtactgcctgagcagcagactgagagtgtccgccaccttctggcagaacccccggaaccacttcagatgccaggtgcagttctacggcctgagcgagaacgacgagtggacccaggacagagccaagcccgtgacccagatcgtgtctgccgaagcctggggcagagccgattgcggatcccagagcttcggcctgctggaccccaagctgtgctacctgctggatggcatcctgttcatctacggcgtgatcctgaccgccctgttcctgaaacggggcagaaagaaactcctgtatatattcaaacaaccatttatgagaccagtacaaactactcaagaggaagatggctgtagctgccgatttccagaagaagaagaaggaggatgtgaactgagagtgaagttcagcagaagcgccgacgcccctgcctaccagcagggacagaaccaactgtacaacgagctgaacctgggcagacgggaagagtacgacgtgctggacaagcggagaggcagggaccctgagatgggcggaaagccccagcggagaaagaacccccaggaaggactgtataacgaactccagaaagacaagatggccgaagcctacagcgagatcggcatgaagggcgagcggagaagaggcaagggccacgatggcctgtaccagggcctgagcaccgccaccaaggacacctatgacgccctgcacatgcaggccctgcctccaagaagggccaagcgatctggatctggagcaacaaacttctcactactcaaacaagcaggtgacgtggaggagaatcccgggcctactagtatggactggatttggcgcatccttttccttgtcggcgctgctaccggcgcccattccgggcccatggaccccgacctggaaatcagagccgccttcctgcggcagagaaacacagccctgagaacagaggtggccgagctggaacaagaggtgcagcggctggaaaacgaggtgtcccagtacgagacaagatacggccctctcggaggcggaaaaggatccggcggcggaggatctggcggaggcggatctgggggcggaggctctttcgaacaagttcagcttcaacagcctggcgctgagctggtcaaacctggcgcttctgtgaagatgagctgcaaagccagcggctacgccttcagcagctactggatcaactggatgaagcagaaacccggccagggactcgaatggatcggccaaatctatcccggcgacggcgacaccaactacaacggcaagttcaagggcagagccacactgaccgccgatacctctagcagcacagcctacatgcagctgagcagcctgaccagcgaagatagcgccgtgtacttctgtgcccggtccatcacaacagtcgtgggctgcgctatggactattggggccagggaacaagcgtgaccgtgtctagtacgcgtgagcagaaactgatctcggaagaggatctggggagcggcatccagaaccctgatcctgccgtgtaccagctgcgggatagcaagagcagcgacaagagcgtgtgtctgttcaccgacttcgacagccagaccaacgtgtcccagagcaaggactccgacgtgtacatcaccgataagaccgtgctggacatgcggagcatggacttcaagagcaactccgccgtggcctggtccaacaagtccgatttcgcctgcgccaacgccttcaacaacagcattatccccgaggacacattcttcccaagccccgagagcagctgcggtacccagagttttgggttgttggaccctaaattgtgctatctgttggacggaatcctgttcatttacggagtgatcctgaccgcattgttcctgaagagaggccggaagaagctgctgtacatcttcaagcagcctttcatgcggcccgtgcagaccacccaggaagaggacggctgctcctgccggttccccgaggaagaagaaggcggctgcgagctgcgggttaagttttccagatccgcagacgcacccgcttaccaacaagggcagaaccaactctacaatgaacttaatttggggcggagggaagagtacgacgttctggacaaaaggaggggacgagatcccgagatgggcggaaagcctcagcgaaggaagaatccgcaagaggggctttataacgaactccagaaagataaaatggcagaagcctatagtgagattgggatgaagggagaaaggaggaggggtaaaggtcacgatgggttgtaccaaggattgagcacagccactaaagatacctatgatgcgctccacatgcaggccctgccgccaaga

SEQ ID NO: 4435 - DNA, 3093 bp, Artificial Sequence
  Synthetic Polynucloetide
atggccttaccagtgaccgccttgctcctgccgctggccttgctgctccacgccgccaggccgcagctccagctgcaagagtctggacctggcctggtcaagcctagcgagacactgagcctgacctgtaccgtgtccggcgatagcatcagcagcggcgattactactggggctggatcagacagcctcctggcaaaggactggaatggatcggccacatctactacagcggcgtgacctactacaaccccagcctgaagtccagagtgaccatcagcgtggacaccagccggaaccagttctccctgaagctgtctagcgtgacagccgccgataccgccgtgtactactgcaccagagaggacagcagcaactggcggagtagaggccagggaacactggtcacagttagctctggtaccggcggaggcggatctggcggcggaggtagcggtggcggaggatctgaattcgacatccagatgacacagagccctagcagcctgtctgccagcgtgggagacagagtgaccatcacatgcaaggccagcgaccacatcaacaactggctggcctggtatcagcagaagcctggacaggcccctaagctgctgatctacggcgctaccacactggaaacaggcgtgcccagcagattttctggcagcggctctggcaccgactacaccctgacaatatccagcctccagcctgaggacttcgccacctactactgtcagcagagctggaacaccccttggacattcggccagggcaccaagctggaaatcaagagactcgagcagagcttcggcctgctggaccccaagctgtgctacctgctggatggcatcctgttcatctacggcgtgatcctgaccgccctgttcctgagagtgaagttcagcagaagcgccgacgcccctgcctaccagcagggacagaaccaactgtacaacgagctgaacctgggcagacgggaagagtacgacgtgctggacaagcggagaggcagggaccctgagatgggcggaaagccccagcggagaaagaacccccaggaaggactgtataacgaactccagaaagacaagatggccgaagcctacagcgagatcggcatgaagggcgagcggagaagaggcaagggccacgatggcctgtaccagggcctgagcaccgccaccaaggacacctatgacgccctgcacatgcaggccctgcctccaagaagggccaagcgatctggatctggagcaacaaacttctcactactcaaacaagcaggtgacgtggaggagaatcccgggcctactagtatggactggatttggcgcatccttttccttgtcggcgctgctaccggcgcccattccgggcccatggaccccgacctggaaatcagagccgccttcctgcggcagagaaacacagccctgagaacagaggtggccgagctggaacaagaggtgcagcggctggaaaacgaggtgtcccagtacgagacaagatacggccctctcggaggcggaaaaggatccggcggcggaggatctggcggaggcggatctgggggcggaggctctttcgaacaagttcagcttcaacagcctggcgctgagctggtcaaacctggcgcttctgtgaagatgagctgcaaagccagcggctacgccttcagcagctactggatcaactggatgaagcagaaacccggccagggactcgaatggatcggccaaatctatcccggcgacggcgacaccaactacaacggcaagttcaagggcagagccacactgaccgccgatacctctagcagcacagcctacatgcagctgagcagcctgaccagcgaagatagcgccgtgtacttctgtgcccggtccatcacaacagtcgtgggctgcgctatggactattggggccagggaacaagcgtgaccgtgtctagtacgcgtcagagttttgggttgttggaccctaaattgtgctatctgttggacggaatcctgttcatttacggagtgatcctgaccgcattgttcctgcgggttaagttttccagatccgcagacgcacccgcttaccaacaagggcagaaccaactctacaatgaacttaatttggggcggagggaagagtacgacgttctggacaaaaggaggggacgagatcccgagatgggcggaaagcctcagcgaaggaagaatccgcaagaggggctttataacgaactccagaaagataaaatggcagaagcctatagtgagattgggatgaagggagaaaggaggaggggtaaaggtcacgatgggttgtaccaaggattgagcacagccactaaagatacctatgatgcgctccacatgcaggccctgccgccaagacgcgccaagagaagcggatctggcgtgaagcagaccctgaatttcgacctgctgaagctggctggcgacgtggaatccaacccaggcccttctagaggccatatgaccgagtacaagcccacggtgcgcctcgccacccgcgacgacgtccccagggccgtacgcaccctcgccgccgcgttcgccgactaccccgccacgcgccacaccgtcgatccggaccgccacatcgagcgggtcaccgagctgcaagaactcttcctcacgcgcgtcgggctcgacatcggcaaggtgtgggtcgcggacgacggcgccgcggtggcggtctggaccacgccggagagcgtcgaagcgggggcggtgttcgccgagatcggcccgcgcatggccgagttgagcggttcccggctggccgcgcagcaacagatggaaggcctcctggcgccgcaccggcccaaggagcccgcgtggttcctggccaccgtcggcgtctcgcccgaccaccagggcaagggtctgggcagcgccgtcgtgctccccggagtggaggcggccgagcgcgccggggtgcccgccttcctggagacctccgcgccccgcaacctccccttctacgagcggctcggcttcaccgtcaccgccgacgtcgaggtgcccgaaggaccgcgcacctggtgcatgacccgcaagcccggtgcctga

SEQ ID NO: 4436 - DNA, 2565 bp, Artificial Sequence
  Synthetic Polynucloetide
atggccttaccagtgaccgccttgctcctgccgctggccttgctgctccacgccgccaggccgcagctccagctgcaagagtctggacctggcctggtcaagcctagcgagacactgagcctgacctgtaccgtgtccggcgatagcatcagcagcggcgattactactggggctggatcagacagcctcctggcaaaggactggaatggatcggccacatctactacagcggcgtgacctactacaaccccagcctgaagtccagagtgaccatcagcgtggacaccagccggaaccagttctccctgaagctgtctagcgtgacagccgccgataccgccgtgtactactgcaccagagaggacagcagcaactggcggagtagaggccagggaacactggtcacagttagctctggtaccggcggaggcggatctggcggcggaggtagcggtggcggaggatctgaattcgacatccagatgacacagagccctagcagcctgtctgccagcgtgggagacagagtgaccatcacatgcaaggccagcgaccacatcaacaactggctggcctggtatcagcagaagcctggacaggcccctaagctgctgatctacggcgctaccacactggaaacaggcgtgcccagcagattttctggcagcggctctggcaccgactacaccctgacaatatccagcctccagcctgaggacttcgccacctactactgtcagcagagctggaacaccccttggacattcggccagggcaccaagctggaaatcaagagactcgagggacagcctaaggccaatcctaccgtgacactgttccctccaagcagcgaagaactccaggccaacaaggccacacttgtgtgcctgatctccgacttctaccctggggctgtgacagtggcttggaaggccgatggatctcctgtgaaagccggcgtggaaaccaccaagccatccaagcagagcaacaacaaatacgccgccagctcctacctgagcctgacacctgagcagtggaagtcccacagatcctacagctgccaagtgacccacgaaggcagcaccgtggaaaagacagtggcccctacagagtgcagccccatcaagaccgatgtgattacaatggaccccaaggacaactgctccaaggacgccaacgataccctgctgctccagctgaccaacaccagcgcctactacatgtacttgttgctgctgctgaagtccgtggtgtacttcgccatcatcacatgctgcctgctgcggagaaccgccttctgctgcaacggcgagaagtctagggccaagcgatctggatctggagcaacaaacttctcactactcaaacaagcaggtgacgtggaggagaatcccgggcctactagtatggactggatttggcgcatccttttccttgtcggcgctgctaccggcgcccattccgggcccatggaccccgacctggaaatcagagccgccttcctgcggcagagaaacacagccctgagaacagaggtggccgagctggaacaagaggtgcagcggctggaaaacgaggtgtcccagtacgagacaagatacggccctctcggaggcggaaaaggatccggcggcggaggatctggcggaggcggatctgggggcggaggctctttcgaacaagttcagcttcaacagcctggcgctgagctggtcaaacctggcgcttctgtgaagatgagctgcaaagccagcggctacgccttcagcagctactggatcaactggatgaagcagaaacccggccagggactcgaatggatcggccaaatctatcccggcgacggcgacaccaactacaacggcaagttcaagggcagagccacactgaccgccgatacctctagcagcacagcctacatgcagctgagcagcctgaccagcgaagatagcgccgtgtacttctgtgcccggtccatcacaacagtcgtgggctgcgctatggactattggggccagggaacaagcgtgaccgtgtctagtacgcgtgcctctacaaagggaccctccgtgtttcctctggctcccagcagcaagtctacaagcggaggaacagccgctctgggctgcctggtcaaggattactttcccgagcctgtgaccgtgtcctggaatagcggagcactgacaagcggcgtgcacacctttccagccgtgctgcaaagcagcggcctgtactctctgagcagcgtggtcacagtgcctagctctagcctgggcacccagacctacatctgcaatgtgaaccacaagcctagcaacaccaaggtggacaagagagtggaacccaagagctgtgaagtgaaaaccgactccaccgaccacgtgaagcccaaagagacagagaacaccaagcagcccagcaagagctgccacaagcccaaggccatcgtgcacaccgagaaagtgaacatgatgagcctgaccgtgctgggcctgcggatgctgttcgccaaaaccgtggccgtgaacttcctgctgaccgccaagctgttcttcctc

SEQ ID NO: 4437 - DNA, 2499 bp, Artificial Sequence
  Synthetic Polynucloetide
atggccttaccagtgaccgccttgctcctgccgctggccttgctgctccacgccgccaggccgcagctccagctgcaagagtctggacctggcctggtcaagcctagcgagacactgagcctgacctgtaccgtgtccggcgatagcatcagcagcggcgattactactggggctggatcagacagcctcctggcaaaggactggaatggatcggccacatctactacagcggcgtgacctactacaaccccagcctgaagtccagagtgaccatcagcgtggacaccagccggaaccagttctccctgaagctgtctagcgtgacagccgccgataccgccgtgtactactgcaccagagaggacagcagcaactggcggagtagaggccagggaacactggtcacagttagctctggtaccggcggaggcggatctggcggcggaggtagcggtggcggaggatctgaattcgacatccagatgacacagagccctagcagcctgtctgccagcgtgggagacagagtgaccatcacatgcaaggccagcgaccacatcaacaactggctggcctggtatcagcagaagcctggacaggcccctaagctgctgatctacggcgctaccacactggaaacaggcgtgcccagcagattttctggcagcggctctggcaccgactacaccctgacaatatccagcctccagcctgaggacttcgccacctactactgtcagcagagctggaacaccccttggacattcggccagggcaccaagctggaaatcaagagactcgagggacagcctaaggccaatcctaccgtgacactgttccctccaagcagcgaagaactccaggccaacaaggccacacttgtgtgcctgatctccgacttctaccctggggctgtgacagtggcttggaaggccgatggatctcctgtgaaagccggcgtggaaaccaccaagccatccaagcagagcaacaacaaatacgccgccagctcctacctgagcctgacacctgagcagtggaagtcccacagatcctacagctgccaagtgacccacgaaggcagcaccgtggaaaagacagtggcccctacagagtgcagcggcagagccgattgcggcatcaccagcgccagctaccaccagggcgtgctgagcgccaccatcctgtacgagatcctgctgggcaaggccaccctgtacgccgtgctggtgtctgccctggtgctgatggctatggtcaagcggaaggacagccggggaagggccaagcgatctggatctggagcaacaaacttctcactactcaaacaagcaggtgacgtggaggagaatcccgggcctactagtatggactggatttggcgcatccttttccttgtcggcgctgctaccggcgcccattccgggcccatggaccccgacctggaaatcagagccgccttcctgcggcagagaaacacagccctgagaacagaggtggccgagctggaacaagaggtgcagcggctggaaaacgaggtgtcccagtacgagacaagatacggccctctcggaggcggaaaaggatccggcggcggaggatctggcggaggcggatctgggggcggaggctctttcgaacaagttcagcttcaacagcctggcgctgagctggtcaaacctggcgcttctgtgaagatgagctgcaaagccagcggctacgccttcagcagctactggatcaactggatgaagcagaaacccggccagggactcgaatggatcggccaaatctatcccggcgacggcgacaccaactacaacggcaagttcaagggcagagccacactgaccgccgatacctctagcagcacagcctacatgcagctgagcagcctgaccagcgaagatagcgccgtgtacttctgtgcccggtccatcacaacagtcgtgggctgcgctatggactattggggccagggaacaagcgtgaccgtgtctagtacgcgtgcctctacaaagggaccctccgtgtttcctctggctcccagcagcaagtctacaagcggaggaacagccgctctgggctgcctggtcaaggattactttcccgagcctgtgaccgtgtcctggaatagcggagcactgacaagcggcgtgcacacctttccagccgtgctgcaaagcagcggcctgtactctctgagcagcgtggtcacagtgcctagctctagcctgggcacccagacctacatctgcaatgtgaaccacaagcctagcaacaccaaggtggacaagagagtggaacccaagagctgtatccccgaggacacattcttcccaagcagcgacgtgccctgcgacgtgaagctggtggaaaagagcttcgagacagacaccaacctgaacttccagaacctgagcgtgatcggcttcagaatcctgctgctgaaagtggccggctttaacctgctgatgaccctgcggctgtggtccagc

SEQ ID NO: 4438 - DNA, 2499 bp, Artificial Sequence
  Synthetic Polynucloetide
atggccttaccagtgaccgccttgctcctgccgctggccttgctgctccacgccgccaggccgcagctccagctgcaagagtctggacctggcctggtcaagcctagcgagacactgagcctgacctgtaccgtgtccggcgatagcatcagcagcggcgattactactggggctggatcagacagcctcctggcaaaggactggaatggatcggccacatctactacagcggcgtgacctactacaaccccagcctgaagtccagagtgaccatcagcgtggacaccagccggaaccagttctccctgaagctgtctagcgtgacagccgccgataccgccgtgtactactgcaccagagaggacagcagcaactggcggagtagaggccagggaacactggtcacagttagctctggtaccggcggaggcggatctggcggcggaggtagcggtggcggaggatctgaattcgacatccagatgacacagagccctagcagcctgtctgccagcgtgggagacagagtgaccatcacatgcaaggccagcgaccacatcaacaactggctggcctggtatcagcagaagcctggacaggcccctaagctgctgatctacggcgctaccacactggaaacaggcgtgcccagcagattttctggcagcggctctggcaccgactacaccctgacaatatccagcctccagcctgaggacttcgccacctactactgtcagcagagctggaacaccccttggacattcggccagggcaccaagctggaaatcaagagactcgagggacagcctaaggccaatcctaccgtgacactgttccctccaagcagcgaagaactccaggccaacaaggccacacttgtgtgcctgatctccgacttctaccctggggctgtgacagtggcttggaaggccgatggatctcctgtgaaagccggcgtggaaaccaccaagccatccaagcagagcaacaacaaatacgccgccagctcctacctgagcctgacacctgagcagtggaagtcccacagatcctacagctgccaagtgacccacgaaggcagcaccgtggaaaagacagtggcccctacagagtgcagcggcagagccgattgcggctttaccagcgagagctaccagcagggcgtgctgagcgccaccatcctgtacgagatcctgctgggcaaggccaccctgtacgccgtgctggtgtctgccctggtgctgatggctatggtcaagcggaaggacagccggggaagggccaagcgatctggatctggagcaacaaacttctcactactcaaacaagcaggtgacgtggaggagaatcccgggcctactagtatggactggatttggcgcatccttttccttgtcggcgctgctaccggcgcccattccgggcccatggaccccgacctggaaatcagagccgccttcctgcggcagagaaacacagccctgagaacagaggtggccgagctggaacaagaggtgcagcggctggaaaacgaggtgtcccagtacgagacaagatacggccctctcggaggcggaaaaggatccggcggcggaggatctggcggaggcggatctgggggcggaggctctttcgaacaagttcagcttcaacagcctggcgctgagctggtcaaacctggcgcttctgtgaagatgagctgcaaagccagcggctacgccttcagcagctactggatcaactggatgaagcagaaacccggccagggactcgaatggatcggccaaatctatcccggcgacggcgacaccaactacaacggcaagttcaagggcagagccacactgaccgccgatacctctagcagcacagcctacatgcagctgagcagcctgaccagcgaagatagcgccgtgtacttctgtgcccggtccatcacaacagtcgtgggctgcgctatggactattggggccagggaacaagcgtgaccgtgtctagtacgcgtgcctctacaaagggaccctccgtgtttcctctggctcccagcagcaagtctacaagcggaggaacagccgctctgggctgcctggtcaaggattactttcccgagcctgtgaccgtgtcctggaatagcggagcactgacaagcggcgtgcacacctttccagccgtgctgcaaagcagcggcctgtactctctgagcagcgtggtcacagtgcctagctctagcctgggcacccagacctacatctgcaatgtgaaccacaagcctagcaacaccaaggtggacaagagagtggaacccaagagctgtatccccgaggacacattcttcccaagccccgagagcagctgcgacgtgaagctggtggaaaagagcttcgagacagacaccaacctgaacttccagaacctgagcgtgatcggcttcagaatcctgctgctgaaagtggccggctttaacctgctgatgaccctgcggctgtggtccagc

SEQ ID NO: 4439 - DNA, 2400 bp, Artificial Sequence
  Synthetic Polynucloetide
atggccttaccagtgaccgccttgctcctgccgctggccttgctgctccacgccgccaggccgcagctccagctgcaagagtctggacctggcctggtcaagcctagcgagacactgagcctgacctgtaccgtgtccggcgatagcatcagcagcggcgattactactggggctggatcagacagcctcctggcaaaggactggaatggatcggccacatctactacagcggcgtgacctactacaaccccagcctgaagtccagagtgaccatcagcgtggacaccagccggaaccagttctccctgaagctgtctagcgtgacagccgccgataccgccgtgtactactgcaccagagaggacagcagcaactggcggagtagaggccagggaacactggtcacagttagctctctcgagggacagcctaaggccaatcctaccgtgacactgttccctccaagcagcgaagaactccaggccaacaaggccacacttgtgtgcctgatctccgacttctaccctggggctgtgacagtggcttggaaggccgatggatctcctgtgaaagccggcgtggaaaccaccaagccatccaagcagagcaacaacaaatacgccgccagctcctacctgagcctgacacctgagcagtggaagtcccacagatcctacagctgccaagtgacccacgaaggcagcaccgtggaaaagacagtggcccctacagagtgcagcggcagagccgattgcggctttaccagcgagagctaccagcagggcgtgctgagcgccaccatcctgtacgagatcctgctgggcaaggccaccctgtacgccgtgctggtgtctgccctggtgctgatggctatggtcaagcggaaggacagccggggaagggccaagcgatctggatctggagcaacaaacttctcactactcaaacaagcaggtgacgtggaggagaatcccgggcctactagtatggactggatttggcgcatccttttccttgtcggcgctgctaccggcgcgcattccgggcccatggaccccgacctggaaatcagagccgccttcctgcggcagagaaacacagccctgagaacagaggtggccgagctggaacaagaggtgcagcggctggaaaacgaggtgtcccagtacgagacaagatacggccctctcggaggcggaaaaacgcgtgcctctacaaagggaccctccgtgtttcctctggctcccagcagcaagtctacaagcggaggaacagccgctctgggctgcctggtcaaggattactttcccgagcctgtgaccgtgtcctggaatagcggagcactgacaagcggcgtgcacacctttccagccgtgctgcaaagcagcggcctgtactctctgagcagcgtggtcacagtgcctagctctagcctgggcacccagacctacatctgcaatgtgaaccacaagcctagcaacaccaaggtggacaagagagtggaacccaagagctgtatccccgaggacacattcttcccaagccccgagagcagctgcgacgtgaagctggtggaaaagagcttcgagacagacaccaacctgaacttccagaacctgagcgtgatcggcttcagaatcctgctgctgaaagtggccggctttaacctgctgatgaccctgcggctgtggtccagccgcgccaagagaagcggatctggcgtgaagcagaccctgaatttcgacctgctgaagctggctggcgacgtggaatccaacccaggcccttctagaggccatatgaccgagtacaagcccacggtgcgcctcgccacccgcgacgacgtccccagggccgtacgcaccctcgccgccgcgttcgccgactaccccgccacgcgccacaccgtcgatccggaccgccacatcgagcgggtcaccgagctgcaagaactcttcctcacgcgcgtcgggctcgacatcggcaaggtgtgggtcgcggacgacggcgccgcggtggcggtctggaccacgccggagagcgtcgaagcgggggcggtgttcgccgagatcggcccgcgcatggccgagttgagcggttcccggctggccgcgcagcaacagatggaaggcctcctggcgccgcaccggcccaaggagcccgcgtggttcctggccaccgtcggcgtctcgcccgaccaccagggcaagggtctgggcagcgccgtcgtgctccccggagtggaggcggccgagcgcgccggggtgcccgccttcctggagacctccgcgccccgcaacctccccttctacgagcggctcggcttcaccgtcaccgccgacgtcgaggtgcccgaaggaccgcgcacctggtgcatgacccgcaagcccggtgcctga

SEQ ID NO: 4440 - DNA, 1698 bp, Artificial Sequence
  Synthetic Polynucloetide
atggccttaccagtgaccgccttgctcctgccgctggccttgctgctccacgccgccaggccgcagctccagctgcaagagtctggacctggcctggtcaagcctagcgagacactgagcctgacctgtaccgtgtccggcgatagcatcagcagcggcgattactactggggctggatcagacagcctcctggcaaaggactggaatggatcggccacatctactacagcggcgtgacctactacaaccccagcctgaagtccagagtgaccatcagcgtggacaccagccggaaccagttctccctgaagctgtctagcgtgacagccgccgataccgccgtgtactactgcaccagagaggacagcagcaactggcggagtagaggccagggaacactggtcacagttagctctctcgagggacagcctaaggccaatcctaccgtgacactgttccctccaagcagcgaagaactccaggccaacaaggccacacttgtgtgcctgatctccgacttctaccctggggctgtgacagtggcttggaaggccgatggatctcctgtgaaagccggcgtggaaaccaccaagccatccaagcagagcaacaacaaatacgccgccagctcctacctgagcctgacacctgagcagtggaagtcccacagatcctacagctgccaagtgacccacgaaggcagcaccgtggaaaagacagtggcccctacagagtgcagcggcagagccgattgcggctttaccagcgagagctaccagcagggcgtgctgagcgccaccatcctgtacgagatcctgctgggcaaggccaccctgtacgccgtgctggtgtctgccctggtgctgatggctatggtcaagcggaaggacagccggggaagggccaagcgatctggatctggagcaacaaacttctcactactcaaacaagcaggtgacgtggaggagaatcccgggcctactagtatggactggatttggcgcatccttttccttgtcggcgctgctaccggcgcgcattccgggcccatggaccccgacctggaaatcagagccgccttcctgcggcagagaaacacagccctgagaacagaggtggccgagctggaacaagaggtgcagcggctggaaaacgaggtgtcccagtacgagacaagatacggccctctcggaggcggaaaaacgcgtgcctctacaaagggaccctccgtgtttcctctggctcccagcagcaagtctacaagcggaggaacagccgctctgggctgcctggtcaaggattactttcccgagcctgtgaccgtgtcctggaatagcggagcactgacaagcggcgtgcacacctttccagccgtgctgcaaagcagcggcctgtactctctgagcagcgtggtcacagtgcctagctctagcctgggcacccagacctacatctgcaatgtgaaccacaagcctagcaacaccaaggtggacaagagagtggaacccaagagctgtatccccgaggacacattcttcccaagccccgagagcagctgcgacgtgaagctggtggaaaagagcttcgagacagacaccaacctgaacttccagaacctgagcgtgatcggcttcagaatcctgctgctgaaagtggccggctttaacctgctgatgaccctgcggctgtggtccagc

SEQ ID NO: 4441 - DNA, 1785 bp, Artificial Sequence
  Synthetic Polynucloetide
atggccttaccagtgaccgccttgctcctgccgctggccttgctgctccacgccgccaggccgcagctccagctgcaagagtctggacctggcctggtcaagcctagcgagacactgagcctgacctgtaccgtgtccggcgatagcatcagcagcggcgattactactggggctggatcagacagcctcctggcaaaggactggaatggatcggccacatctactacagcggcgtgacctactacaaccccagcctgaagtccagagtgaccatcagcgtggacaccagccggaaccagttctccctgaagctgtctagcgtgacagccgccgataccgccgtgtactactgcaccagagaggacagcagcaactggcggagtagaggccagggaacactggtcacagttagctctctcgagggatctggcagagccgattgcggctttaccagcgagagctaccagcagggcgtgctgagcgccaccatcctgtacgagatcctgctgggcaaggccaccctgtacgccgtgctggtgtctgccctggtgctgatggctatggtcaagcggaaggacagccggggaagggccaagcgatctggatctggagcaacaaacttctcactactcaaacaagcaggtgacgtggaggagaatcccgggcctactagtatggactggatttggcgcatccttttccttgtcggcgctgctaccggcgcgcattccgggcccatggaccccgacctggaaatcagagccgccttcctgcggcagagaaacacagccctgagaacagaggtggccgagctggaacaagaggtgcagcggctggaaaacgaggtgtcccagtacgagacaagatacggccctctcggaggcggaaaaacgcgtggcagcatccccgaggacacattcttcccaagccccgagagcagctgcgacgtgaagctggtggaaaagagcttcgagacagacaccaacctgaacttccagaacctgagcgtgatcggcttcagaatcctgctgctgaaagtggccggctttaacctgctgatgaccctgcggctgtggtccagccgcgccaagagaagcggatctggcgtgaagcagaccctgaatttcgacctgctgaagctggctggcgacgtggaatccaacccaggcccttctagaggccatatgaccgagtacaagcccacggtgcgcctcgccacccgcgacgacgtccccagggccgtacgcaccctcgccgccgcgttcgccgactaccccgccacgcgccacaccgtcgatccggaccgccacatcgagcgggtcaccgagctgcaagaactcttcctcacgcgcgtcgggctcgacatcggcaaggtgtgggtcgcggacgacggcgccgcggtggcggtctggaccacgccggagagcgtcgaagcgggggcggtgttcgccgagatcggcccgcgcatggccgagttgagcggttcccggctggccgcgcagcaacagatggaaggcctcctggcgccgcaccggcccaaggagcccgcgtggttcctggccaccgtcggcgtctcgcccgaccaccagggcaagggtctgggcagcgccgtcgtgctccccggagtggaggcggccgagcgcgccggggtgcccgccttcctggagacctccgcgccccgcaacctccccttctacgagcggctcggcttcaccgtcaccgccgacgtcgaggtgcccgaaggaccgcgcacctggtgcatgacccgcaagcccggtgcctga

SEQ ID NO: 4442 - DNA, 1083 bp, Artificial Sequence
  Synthetic Polynucloetide
atggccttaccagtgaccgccttgctcctgccgctggccttgctgctccacgccgccaggccgcagctccagctgcaagagtctggacctggcctggtcaagcctagcgagacactgagcctgacctgtaccgtgtccggcgatagcatcagcagcggcgattactactggggctggatcagacagcctcctggcaaaggactggaatggatcggccacatctactacagcggcgtgacctactacaaccccagcctgaagtccagagtgaccatcagcgtggacaccagccggaaccagttctccctgaagctgtctagcgtgacagccgccgataccgccgtgtactactgcaccagagaggacagcagcaactggcggagtagaggccagggaacactggtcacagttagctctctcgagggatctggcagagccgattgcggctttaccagcgagagctaccagcagggcgtgctgagcgccaccatcctgtacgagatcctgctgggcaaggccaccctgtacgccgtgctggtgtctgccctggtgctgatggctatggtcaagcggaaggacagccggggaagggccaagcgatctggatctggagcaacaaacttctcactactcaaacaagcaggtgacgtggaggagaatcccgggcctactagtatggactggatttggcgcatccttttccttgtcggcgctgctaccggcgcgcattccgggcccatggaccccgacctggaaatcagagccgccttcctgcggcagagaaacacagccctgagaacagaggtggccgagctggaacaagaggtgcagcggctggaaaacgaggtgtcccagtacgagacaagatacggccctctcggaggcggaaaaacgcgtggcagcatccccgaggacacattcttcccaagccccgagagcagctgcgacgtgaagctggtggaaaagagcttcgagacagacaccaacctgaacttccagaacctgagcgtgatcggcttcagaatcctgctgctgaaagtggccggctttaacctgctgatgaccctgcggctgtggtccagc

SEQ ID NO: 4443 - DNA, 1812 bp, Artificial Sequence
  Synthetic Polynucloetide
atggccttaccagtgaccgccttgctcctgccgctggccttgctgctccacgccgccaggccgcagctccagctgcaagagtctggacctggcctggtcaagcctagcgagacactgagcctgacctgtaccgtgtccggcgatagcatcagcagcggcgattactactggggctggatcagacagcctcctggcaaaggactggaatggatcggccacatctactacagcggcgtgacctactacaaccccagcctgaagtccagagtgaccatcagcgtggacaccagccggaaccagttctccctgaagctgtctagcgtgacagccgccgataccgccgtgtactactgcaccagagaggacagcagcaactggcggagtagaggccagggaacactggtcacagttagctctctcgaggacaaaactcacacatgcccaccgtgcccagcaggcagagccgattgcggctttaccagcgagagctaccagcagggcgtgctgagcgccaccatcctgtacgagatcctgctgggcaaggccaccctgtacgccgtgctggtgtctgccctggtgctgatggctatggtcaagcggaaggacagccggggaagggccaagcgatctggatctggagcaacaaacttctcactactcaaacaagcaggtgacgtggaggagaatcccgggcctactagtatggactggatttggcgcatccttttccttgtcggcgctgctaccggcgcgcattccgggcccatggaccccgacctggaaatcagagccgccttcctgcggcagagaaacacagccctgagaacagaggtggccgagctggaacaagaggtgcagcggctggaaaacgaggtgtcccagtacgagacaagatacggccctctcggaggcggaaaaacgcgtggcagcatccccgaggacacattcttcccaagccccgagagcagctgcgacgtgaagctggtggaaaagagcttcgagacagacaccaacctgaacttccagaacctgagcgtgatcggcttcagaatcctgctgctgaaagtggccggctttaacctgctgatgaccctgcggctgtggtccagccgcgccaagagaagcggatctggcgtgaagcagaccctgaatttcgacctgctgaagctggctggcgacgtggaatccaacccaggcccttctagaggccatatgaccgagtacaagcccacggtgcgcctcgccacccgcgacgacgtccccagggccgtacgcaccctcgccgccgcgttcgccgactaccccgccacgcgccacaccgtcgatccggaccgccacatcgagcgggtcaccgagctgcaagaactcttcctcacgcgcgtcgggctcgacatcggcaaggtgtgggtcgcggacgacggcgccgcggtggcggtctggaccacgccggagagcgtcgaagcgggggcggtgttcgccgagatcggcccgcgcatggccgagttgagcggttcccggctggccgcgcagcaacagatggaaggcctcctggcgccgcaccggcccaaggagcccgcgtggttcctggccaccgtcggcgtctcgcccgaccaccagggcaagggtctgggcagcgccgtcgtgctccccggagtggaggcggccgagcgcgccggggtgcccgccttcctggagacctccgcgccccgcaacctccccttctacgagcggctcggcttcaccgtcaccgccgacgtcgaggtgcccgaaggaccgcgcacctggtgcatgacccgcaagcccggtgcctga

SEQ ID NO: 4444 - DNA, 1812 bp, Artificial Sequence
  Synthetic Polynucloetide
atggccttaccagtgaccgccttgctcctgccgctggccttgctgctccacgccgccaggccgcagctccagctgcaagagtctggacctggcctggtcaagcctagcgagacactgagcctgacctgtaccgtgtccggcgatagcatcagcagcggcgattactactggggctggatcagacagcctcctggcaaaggactggaatggatcggccacatctactacagcggcgtgacctactacaaccccagcctgaagtccagagtgaccatcagcgtggacaccagccggaaccagttctccctgaagctgtctagcgtgacagccgccgataccgccgtgtactactgcaccagagaggacagcagcaactggcggagtagaggccagggaacactggtcacagttagctctctcgagggatctggcagagccgattgcggctttaccagcgagagctaccagcagggcgtgctgagcgccaccatcctgtacgagatcctgctgggcaaggccaccctgtacgccgtgctggtgtctgccctggtgctgatggctatggtcaagcggaaggacagccggggaagggccaagcgatctggatctggagcaacaaacttctcactactcaaacaagcaggtgacgtggaggagaatcccgggcctactagtatggactggatttggcgcatccttttccttgtcggcgctgctaccggcgcgcattccgggcccatggaccccgacctggaaatcagagccgccttcctgcggcagagaaacacagccctgagaacagaggtggccgagctggaacaagaggtgcagcggctggaaaacgaggtgtcccagtacgagacaagatacggccctctcggaggcggaaaaacgcgtgataaaactcatacctgtccgccatgcccggcaatccccgaggacacattcttcccaagccccgagagcagctgcgacgtgaagctggtggaaaagagcttcgagacagacaccaacctgaacttccagaacctgagcgtgatcggcttcagaatcctgctgctgaaagtggccggctttaacctgctgatgaccctgcggctgtggtccagccgcgccaagagaagcggatctggcgtgaagcagaccctgaatttcgacctgctgaagctggctggcgacgtggaatccaacccaggcccttctagaggccatatgaccgagtacaagcccacggtgcgcctcgccacccgcgacgacgtccccagggccgtacgcaccctcgccgccgcgttcgccgactaccccgccacgcgccacaccgtcgatccggaccgccacatcgagcgggtcaccgagctgcaagaactcttcctcacgcgcgtcgggctcgacatcggcaaggtgtgggtcgcggacgacggcgccgcggtggcggtctggaccacgccggagagcgtcgaagcgggggcggtgttcgccgagatcggcccgcgcatggccgagttgagcggttcccggctggccgcgcagcaacagatggaaggcctcctggcgccgcaccggcccaaggagcccgcgtggttcctggccaccgtcggcgtctcgcccgaccaccagggcaagggtctgggcagcgccgtcgtgctccccggagtggaggcggccgagcgcgccggggtgcccgccttcctggagacctccgcgccccgcaacctccccttctacgagcggctcggcttcaccgtcaccgccgacgtcgaggtgcccgaaggaccgcgcacctggtgcatgacccgcaagcccggtgcctga

SEQ ID NO: 4445 - DNA, 1839 bp, Artificial Sequence
  Synthetic Polynucloetide
atggccttaccagtgaccgccttgctcctgccgctggccttgctgctccacgccgccaggccgcagctccagctgcaagagtctggacctggcctggtcaagcctagcgagacactgagcctgacctgtaccgtgtccggcgatagcatcagcagcggcgattactactggggctggatcagacagcctcctggcaaaggactggaatggatcggccacatctactacagcggcgtgacctactacaaccccagcctgaagtccagagtgaccatcagcgtggacaccagccggaaccagttctccctgaagctgtctagcgtgacagccgccgataccgccgtgtactactgcaccagagaggacagcagcaactggcggagtagaggccagggaacactggtcacagttagctctctcgaggacaaaactcacacatgcccaccgtgcccagcaggcagagccgattgcggctttaccagcgagagctaccagcagggcgtgctgagcgccaccatcctgtacgagatcctgctgggcaaggccaccctgtacgccgtgctggtgtctgccctggtgctgatggctatggtcaagcggaaggacagccggggaagggccaagcgatctggatctggagcaacaaacttctcactactcaaacaagcaggtgacgtggaggagaatcccgggcctactagtatggactggatttggcgcatccttttccttgtcggcgctgctaccggcgcgcattccgggcccatggaccccgacctggaaatcagagccgccttcctgcggcagagaaacacagccctgagaacagaggtggccgagctggaacaagaggtgcagcggctggaaaacgaggtgtcccagtacgagacaagatacggccctctcggaggcggaaaaacgcgtgataaaactcatacctgtccgccatgcccggcaatccccgaggacacattcttcccaagccccgagagcagctgcgacgtgaagctggtggaaaagagcttcgagacagacaccaacctgaacttccagaacctgagcgtgatcggcttcagaatcctgctgctgaaagtggccggctttaacctgctgatgaccctgcggctgtggtccagccgcgccaagagaagcggatctggcgtgaagcagaccctgaatttcgacctgctgaagctggctggcgacgtggaatccaacccaggcccttctagaggccatatgaccgagtacaagcccacggtgcgcctcgccacccgcgacgacgtccccagggccgtacgcaccctcgccgccgcgttcgccgactaccccgccacgcgccacaccgtcgatccggaccgccacatcgagcgggtcaccgagctgcaagaactcttcctcacgcgcgtcgggctcgacatcggcaaggtgtgggtcgcggacgacggcgccgcggtggcggtctggaccacgccggagagcgtcgaagcgggggcggtgttcgccgagatcggcccgcgcatggccgagttgagcggttcccggctggccgcgcagcaacagatggaaggcctcctggcgccgcaccggcccaaggagcccgcgtggttcctggccaccgtcggcgtctcgcccgaccaccagggcaagggtctgggcagcgccgtcgtgctccccggagtggaggcggccgagcgcgccggggtgcccgccttcctggagacctccgcgccccgcaacctccccttctacgagcggctcggcttcaccgtcaccgccgacgtcgaggtgcccgaaggaccgcgcacctggtgcatgacccgcaagcccggtgcctga

SEQ ID NO: 4446 - DNA, 1137 bp, Artificial Sequence
  Synthetic Polynucloetide
atggccttaccagtgaccgccttgctcctgccgctggccttgctgctccacgccgccaggccgcagctccagctgcaagagtctggacctggcctggtcaagcctagcgagacactgagcctgacctgtaccgtgtccggcgatagcatcagcagcggcgattactactggggctggatcagacagcctcctggcaaaggactggaatggatcggccacatctactacagcggcgtgacctactacaaccccagcctgaagtccagagtgaccatcagcgtggacaccagccggaaccagttctccctgaagctgtctagcgtgacagccgccgataccgccgtgtactactgcaccagagaggacagcagcaactggcggagtagaggccagggaacactggtcacagttagctctctcgaggacaaaactcacacatgcccaccgtgcccagcaggcagagccgattgcggctttaccagcgagagctaccagcagggcgtgctgagcgccaccatcctgtacgagatcctgctgggcaaggccaccctgtacgccgtgctggtgtctgccctggtgctgatggctatggtcaagcggaaggacagccggggaagggccaagcgatctggatctggagcaacaaacttctcactactcaaacaagcaggtgacgtggaggagaatcccgggcctactagtatggactggatttggcgcatccttttccttgtcggcgctgctaccggcgcgcattccgggcccatggaccccgacctggaaatcagagccgccttcctgcggcagagaaacacagccctgagaacagaggtggccgagctggaacaagaggtgcagcggctggaaaacgaggtgtcccagtacgagacaagatacggccctctcggaggcggaaaaacgcgtgataaaactcatacctgtccgccatgcccggcaatccccgaggacacattcttcccaagccccgagagcagctgcgacgtgaagctggtggaaaagagcttcgagacagacaccaacctgaacttccagaacctgagcgtgatcggcttcagaatcctgctgctgaaagtggccggctttaacctgctgatgaccctgcggctgtggtccagc

SEQ ID NO: 4447 - DNA, 1110 bp, Artificial Sequence
  Synthetic Polynucloetide
atggccttaccagtgaccgccttgctcctgccgctggccttgctgctccacgccgccaggccgcagctccagctgcaagagtctggacctggcctggtcaagcctagcgagacactgagcctgacctgtaccgtgtccggcgatagcatcagcagcggcgattactactggggctggatcagacagcctcctggcaaaggactggaatggatcggccacatctactacagcggcgtgacctactacaaccccagcctgaagtccagagtgaccatcagcgtggacaccagccggaaccagttctccctgaagctgtctagcgtgacagccgccgataccgccgtgtactactgcaccagagaggacagcagcaactggcggagtagaggccagggaacactggtcacagttagctctctcgagggatctggcagagccgattgcggctttaccagcgagagctaccagcagggcgtgctgagcgccaccatcctgtacgagatcctgctgggcaaggccaccctgtacgccgtgctggtgtctgccctggtgctgatggctatggtcaagcggaaggacagccggggaagggccaagcgatctggatctggagcaacaaacttctcactactcaaacaagcaggtgacgtggaggagaatcccgggcctactagtatggactggatttggcgcatccttttccttgtcggcgctgctaccggcgcgcattccgggcccatggaccccgacctggaaatcagagccgccttcctgcggcagagaaacacagccctgagaacagaggtggccgagctggaacaagaggtgcagcggctggaaaacgaggtgtcccagtacgagacaagatacggccctctcggaggcggaaaaacgcgtgataaaactcatacctgtccgccatgcccggcaatccccgaggacacattcttcccaagccccgagagcagctgcgacgtgaagctggtggaaaagagcttcgagacagacaccaacctgaacttccagaacctgagcgtgatcggcttcagaatcctgctgctgaaagtggccggctttaacctgctgatgaccctgcggctgtggtccagc

SEQ ID NO: 4448 - DNA, 2466 bp, Artificial Sequence
  Synthetic Polynucloetide
atggccttaccagtgaccgccttgctcctgccgctggccttgctgctccacgccgccaggccgcagctccagctgcaagagtctggacctggcctggtcaagcctagcgagacactgagcctgacctgtaccgtgtccggcgatagcatcagcagcggcgattactactggggctggatcagacagcctcctggcaaaggactggaatggatcggccacatctactacagcggcgtgacctactacaaccccagcctgaagtccagagtgaccatcagcgtggacaccagccggaaccagttctccctgaagctgtctagcgtgacagccgccgataccgccgtgtactactgcaccagagaggacagcagcaactggcggagtagaggccagggaacactggtcacagttagctctctcgagggacagcctaaggccaatcctaccgtgacactgttccctccaagcagcgaagaactccaggccaacaaggccacacttgtgtgcctgatctccgacttctaccctggggctgtgacagtggcttggaaggccgatggatctcctgtgaaagccggcgtggaaaccaccaagccatccaagcagagcaacaacaaatacgccgccagctcctacctgagcctgacacctgagcagtggaagtcccacagatcctacagctgccaagtgacccacgaaggcagcaccgtggaaaagacagtggcccctacagagtgcagccccatcaagaccgatgtgattacaatggaccccaaggacaactgctccaaggacgccaacgataccctgctgctccagctgaccaacaccagcgcctactacatgtacttgttgctgctgctgaagtccgtggtgtacttcgccatcatcacatgctgcctgctgcggagaaccgccttctgctgcaacggcgagaagtctagggccaagcgatctggatctggagcaacaaacttctcactactcaaacaagcaggtgacgtggaggagaatcccgggcctactagtatggactggatttggcgcatccttttccttgtcggcgctgctaccggcgcgcattccgggcccatggaccccgacctggaaatcagagccgccttcctgcggcagagaaacacagccctgagaacagaggtggccgagctggaacaagaggtgcagcggctggaaaacgaggtgtcccagtacgagacaagatacggccctctcggaggcggaaaaacgcgtgcctctacaaagggaccctccgtgtttcctctggctcccagcagcaagtctacaagcggaggaacagccgctctgggctgcctggtcaaggattactttcccgagcctgtgaccgtgtcctggaatagcggagcactgacaagcggcgtgcacacctttccagccgtgctgcaaagcagcggcctgtactctctgagcagcgtggtcacagtgcctagctctagcctgggcacccagacctacatctgcaatgtgaaccacaagcctagcaacaccaaggtggacaagagagtggaacccaagagctgtgaagtgaaaaccgactccaccgaccacgtgaagcccaaagagacagagaacaccaagcagcccagcaagagctgccacaagcccaaggccatcgtgcacaccgagaaagtgaacatgatgagcctgaccgtgctgggcctgcggatgctgttcgccaaaaccgtggccgtgaacttcctgctgaccgccaagctgttcttcctccgcgccaagagaagcggatctggcgtgaagcagaccctgaatttcgacctgctgaagctggctggcgacgtggaatccaacccaggcccttctagaggccatatgaccgagtacaagcccacggtgcgcctcgccacccgcgacgacgtccccagggccgtacgcaccctcgccgccgcgttcgccgactaccccgccacgcgccacaccgtcgatccggaccgccacatcgagcgggtcaccgagctgcaagaactcttcctcacgcgcgtcgggctcgacatcggcaaggtgtgggtcgcggacgacggcgccgcggtggcggtctggaccacgccggagagcgtcgaagcgggggcggtgttcgccgagatcggcccgcgcatggccgagttgagcggttcccggctggccgcgcagcaacagatggaaggcctcctggcgccgcaccggcccaaggagcccgcgtggttcctggccaccgtcggcgtctcgcccgaccaccagggcaagggtctgggcagcgccgtcgtgctccccggagtggaggcggccgagcgcgccggggtgcccgccttcctggagacctccgcgccccgcaacctccccttctacgagcggctcggcttcaccgtcaccgccgacgtcgaggtgcccgaaggaccgcgcacctggtgcatgacccgcaagcccggtgcctga

SEQ ID NO: 4449 - DNA, 1764 bp, Artificial Sequence
  Synthetic Polynucloetide
atggccttaccagtgaccgccttgctcctgccgctggccttgctgctccacgccgccaggccgcagctccagctgcaagagtctggacctggcctggtcaagcctagcgagacactgagcctgacctgtaccgtgtccggcgatagcatcagcagcggcgattactactggggctggatcagacagcctcctggcaaaggactggaatggatcggccacatctactacagcggcgtgacctactacaaccccagcctgaagtccagagtgaccatcagcgtggacaccagccggaaccagttctccctgaagctgtctagcgtgacagccgccgataccgccgtgtactactgcaccagagaggacagcagcaactggcggagtagaggccagggaacactggtcacagttagctctctcgagggacagcctaaggccaatcctaccgtgacactgttccctccaagcagcgaagaactccaggccaacaaggccacacttgtgtgcctgatctccgacttctaccctggggctgtgacagtggcttggaaggccgatggatctcctgtgaaagccggcgtggaaaccaccaagccatccaagcagagcaacaacaaatacgccgccagctcctacctgagcctgacacctgagcagtggaagtcccacagatcctacagctgccaagtgacccacgaaggcagcaccgtggaaaagacagtggcccctacagagtgcagccccatcaagaccgatgtgattacaatggaccccaaggacaactgctccaaggacgccaacgataccctgctgctccagctgaccaacaccagcgcctactacatgtacttgttgctgctgctgaagtccgtggtgtacttcgccatcatcacatgctgcctgctgcggagaaccgccttctgctgcaacggcgagaagtctagggccaagcgatctggatctggagcaacaaacttctcactactcaaacaagcaggtgacgtggaggagaatcccgggcctactagtatggactggatttggcgcatccttttccttgtcggcgctgctaccggcgcgcattccgggcccatggaccccgacctggaaatcagagccgccttcctgcggcagagaaacacagccctgagaacagaggtggccgagctggaacaagaggtgcagcggctggaaaacgaggtgtcccagtacgagacaagatacggccctctcggaggcggaaaaacgcgtgcctctacaaagggaccctccgtgtttcctctggctcccagcagcaagtctacaagcggaggaacagccgctctgggctgcctggtcaaggattactttcccgagcctgtgaccgtgtcctggaatagcggagcactgacaagcggcgtgcacacctttccagccgtgctgcaaagcagcggcctgtactctctgagcagcgtggtcacagtgcctagctctagcctgggcacccagacctacatctgcaatgtgaaccacaagcctagcaacaccaaggtggacaagagagtggaacccaagagctgtgaagtgaaaaccgactccaccgaccacgtgaagcccaaagagacagagaacaccaagcagcccagcaagagctgccacaagcccaaggccatcgtgcacaccgagaaagtgaacatgatgagcctgaccgtgctgggcctgcggatgctgttcgccaaaaccgtggccgtgaacttcctgctgaccgccaagctgttcttcctc

SEQ ID NO: 4450 - DNA, 1851 bp, Artificial Sequence
  Synthetic Polynucloetide
atggccttaccagtgaccgccttgctcctgccgctggccttgctgctccacgccgccaggccgcagctccagctgcaagagtctggacctggcctggtcaagcctagcgagacactgagcctgacctgtaccgtgtccggcgatagcatcagcagcggcgattactactggggctggatcagacagcctcctggcaaaggactggaatggatcggccacatctactacagcggcgtgacctactacaaccccagcctgaagtccagagtgaccatcagcgtggacaccagccggaaccagttctccctgaagctgtctagcgtgacagccgccgataccgccgtgtactactgcaccagagaggacagcagcaactggcggagtagaggccagggaacactggtcacagttagctctctcgagggatctcccatcaagaccgatgtgattacaatggaccccaaggacaactgctccaaggacgccaacgataccctgctgctccagctgaccaacaccagcgcctactacatgtacttgttgctgctgctgaagtccgtggtgtacttcgccatcatcacatgctgcctgctgcggagaaccgccttctgctgcaacggcgagaagtctagggccaagcgatctggatctggagcaacaaacttctcactactcaaacaagcaggtgacgtggaggagaatcccgggcctactagtatggactggatttggcgcatccttttccttgtcggcgctgctaccggcgcgcattccgggcccatggaccccgacctggaaatcagagccgccttcctgcggcagagaaacacagccctgagaacagaggtggccgagctggaacaagaggtgcagcggctggaaaacgaggtgtcccagtacgagacaagatacggccctctcggaggcggaaaaacgcgtggcagcgaagtgaaaaccgactccaccgaccacgtgaagcccaaagagacagagaacaccaagcagcccagcaagagctgccacaagcccaaggccatcgtgcacaccgagaaagtgaacatgatgagcctgaccgtgctgggcctgcggatgctgttcgccaaaaccgtggccgtgaacttcctgctgaccgccaagctgttcttcctccgcgccaagagaagcggatctggcgtgaagcagaccctgaatttcgacctgctgaagctggctggcgacgtggaatccaacccaggcccttctagaggccatatgaccgagtacaagcccacggtgcgcctcgccacccgcgacgacgtccccagggccgtacgcaccctcgccgccgcgttcgccgactaccccgccacgcgccacaccgtcgatccggaccgccacatcgagcgggtcaccgagctgcaagaactcttcctcacgcgcgtcgggctcgacatcggcaaggtgtgggtcgcggacgacggcgccgcggtggcggtctggaccacgccggagagcgtcgaagcgggggcggtgttcgccgagatcggcccgcgcatggccgagttgagcggttcccggctggccgcgcagcaacagatggaaggcctcctggcgccgcaccggcccaaggagcccgcgtggttcctggccaccgtcggcgtctcgcccgaccaccagggcaagggtctgggcagcgccgtcgtgctccccggagtggaggcggccgagcgcgccggggtgcccgccttcctggagacctccgcgccccgcaacctccccttctacgagcggctcggcttcaccgtcaccgccgacgtcgaggtgcccgaaggaccgcgcacctggtgcatgacccgcaagcccggtgcctga

SEQ ID NO: 4451 - DNA, 1149 bp, Artificial Sequence
  Synthetic Polynucloetide
atggccttaccagtgaccgccttgctcctgccgctggccttgctgctccacgccgccaggccgcagctccagctgcaagagtctggacctggcctggtcaagcctagcgagacactgagcctgacctgtaccgtgtccggcgatagcatcagcagcggcgattactactggggctggatcagacagcctcctggcaaaggactggaatggatcggccacatctactacagcggcgtgacctactacaaccccagcctgaagtccagagtgaccatcagcgtggacaccagccggaaccagttctccctgaagctgtctagcgtgacagccgccgataccgccgtgtactactgcaccagagaggacagcagcaactggcggagtagaggccagggaacactggtcacagttagctctctcgagggatctcccatcaagaccgatgtgattacaatggaccccaaggacaactgctccaaggacgccaacgataccctgctgctccagctgaccaacaccagcgcctactacatgtacttgttgctgctgctgaagtccgtggtgtacttcgccatcatcacatgctgcctgctgcggagaaccgccttctgctgcaacggcgagaagtctagggccaagcgatctggatctggagcaacaaacttctcactactcaaacaagcaggtgacgtggaggagaatcccgggcctactagtatggactggatttggcgcatccttttccttgtcggcgctgctaccggcgcgcattccgggcccatggaccccgacctggaaatcagagccgccttcctgcggcagagaaacacagccctgagaacagaggtggccgagctggaacaagaggtgcagcggctggaaaacgaggtgtcccagtacgagacaagatacggccctctcggaggcggaaaaacgcgtggcagcgaagtgaaaaccgactccaccgaccacgtgaagcccaaagagacagagaacaccaagcagcccagcaagagctgccacaagcccaaggccatcgtgcacaccgagaaagtgaacatgatgagcctgaccgtgctgggcctgcggatgctgttcgccaaaaccgtggccgtgaacttcctgctgaccgccaagctgttcttcctc

SEQ ID NO: 4452 - DNA, 1878 bp, Artificial Sequence
  Synthetic Polynucloetide
atggccttaccagtgaccgccttgctcctgccgctggccttgctgctccacgccgccaggccgcagctccagctgcaagagtctggacctggcctggtcaagcctagcgagacactgagcctgacctgtaccgtgtccggcgatagcatcagcagcggcgattactactggggctggatcagacagcctcctggcaaaggactggaatggatcggccacatctactacagcggcgtgacctactacaaccccagcctgaagtccagagtgaccatcagcgtggacaccagccggaaccagttctccctgaagctgtctagcgtgacagccgccgataccgccgtgtactactgcaccagagaggacagcagcaactggcggagtagaggccagggaacactggtcacagttagctctctcgaggacaaaactcacacatgcccaccgtgcccagcacccatcaagaccgatgtgattacaatggaccccaaggacaactgctccaaggacgccaacgataccctgctgctccagctgaccaacaccagcgcctactacatgtacttgttgctgctgctgaagtccgtggtgtacttcgccatcatcacatgctgcctgctgcggagaaccgccttctgctgcaacggcgagaagtctagggccaagcgatctggatctggagcaacaaacttctcactactcaaacaagcaggtgacgtggaggagaatcccgggcctactagtatggactggatttggcgcatccttttccttgtcggcgctgctaccggcgcgcattccgggcccatggaccccgacctggaaatcagagccgccttcctgcggcagagaaacacagccctgagaacagaggtggccgagctggaacaagaggtgcagcggctggaaaacgaggtgtcccagtacgagacaagatacggccctctcggaggcggaaaaacgcgtggcagcgaagtgaaaaccgactccaccgaccacgtgaagcccaaagagacagagaacaccaagcagcccagcaagagctgccacaagcccaaggccatcgtgcacaccgagaaagtgaacatgatgagcctgaccgtgctgggcctgcggatgctgttcgccaaaaccgtggccgtgaacttcctgctgaccgccaagctgttcttcctccgcgccaagagaagcggatctggcgtgaagcagaccctgaatttcgacctgctgaagctggctggcgacgtggaatccaacccaggcccttctagaggccatatgaccgagtacaagcccacggtgcgcctcgccacccgcgacgacgtccccagggccgtacgcaccctcgccgccgcgttcgccgactaccccgccacgcgccacaccgtcgatccggaccgccacatcgagcgggtcaccgagctgcaagaactcttcctcacgcgcgtcgggctcgacatcggcaaggtgtgggtcgcggacgacggcgccgcggtggcggtctggaccacgccggagagcgtcgaagcgggggcggtgttcgccgagatcggcccgcgcatggccgagttgagcggttcccggctggccgcgcagcaacagatggaaggcctcctggcgccgcaccggcccaaggagcccgcgtggttcctggccaccgtcggcgtctcgcccgaccaccagggcaagggtctgggcagcgccgtcgtgctccccggagtggaggcggccgagcgcgccggggtgcccgccttcctggagacctccgcgccccgcaacctccccttctacgagcggctcggcttcaccgtcaccgccgacgtcgaggtgcccgaaggaccgcgcacctggtgcatgacccgcaagcccggtgcctga

SEQ ID NO: 4453 - DNA, 1878 bp, Artificial Sequence
  Synthetic Polynucloetide
atggccttaccagtgaccgccttgctcctgccgctggccttgctgctccacgccgccaggccgcagctccagctgcaagagtctggacctggcctggtcaagcctagcgagacactgagcctgacctgtaccgtgtccggcgatagcatcagcagcggcgattactactggggctggatcagacagcctcctggcaaaggactggaatggatcggccacatctactacagcggcgtgacctactacaaccccagcctgaagtccagagtgaccatcagcgtggacaccagccggaaccagttctccctgaagctgtctagcgtgacagccgccgataccgccgtgtactactgcaccagagaggacagcagcaactggcggagtagaggccagggaacactggtcacagttagctctctcgagggatctcccatcaagaccgatgtgattacaatggaccccaaggacaactgctccaaggacgccaacgataccctgctgctccagctgaccaacaccagcgcctactacatgtacttgttgctgctgctgaagtccgtggtgtacttcgccatcatcacatgctgcctgctgcggagaaccgccttctgctgcaacggcgagaagtctagggccaagcgatctggatctggagcaacaaacttctcactactcaaacaagcaggtgacgtggaggagaatcccgggcctactagtatggactggatttggcgcatccttttccttgtcggcgctgctaccggcgcgcattccgggcccatggaccccgacctggaaatcagagccgccttcctgcggcagagaaacacagccctgagaacagaggtggccgagctggaacaagaggtgcagcggctggaaaacgaggtgtcccagtacgagacaagatacggccctctcggaggcggaaaaacgcgtgataaaactcatacctgtccgccatgcccggcagaagtgaaaaccgactccaccgaccacgtgaagcccaaagagacagagaacaccaagcagcccagcaagagctgccacaagcccaaggccatcgtgcacaccgagaaagtgaacatgatgagcctgaccgtgctgggcctgcggatgctgttcgccaaaaccgtggccgtgaacttcctgctgaccgccaagctgttcttcctccgcgccaagagaagcggatctggcgtgaagcagaccctgaatttcgacctgctgaagctggctggcgacgtggaatccaacccaggcccttctagaggccatatgaccgagtacaagcccacggtgcgcctcgccacccgcgacgacgtccccagggccgtacgcaccctcgccgccgcgttcgccgactaccccgccacgcgccacaccgtcgatccggaccgccacatcgagcgggtcaccgagctgcaagaactcttcctcacgcgcgtcgggctcgacatcggcaaggtgtgggtcgcggacgacggcgccgcggtggcggtctggaccacgccggagagcgtcgaagcgggggcggtgttcgccgagatcggcccgcgcatggccgagttgagcggttcccggctggccgcgcagcaacagatggaaggcctcctggcgccgcaccggcccaaggagcccgcgtggttcctggccaccgtcggcgtctcgcccgaccaccagggcaagggtctgggcagcgccgtcgtgctccccggagtggaggcggccgagcgcgccggggtgcccgccttcctggagacctccgcgccccgcaacctccccttctacgagcggctcggcttcaccgtcaccgccgacgtcgaggtgcccgaaggaccgcgcacctggtgcatgacccgcaagcccggtgcctga

SEQ ID NO: 4454 - DNA, 1905 bp, Artificial Sequence
  Synthetic Polynucloetide
atggccttaccagtgaccgccttgctcctgccgctggccttgctgctccacgccgccaggccgcagctccagctgcaagagtctggacctggcctggtcaagcctagcgagacactgagcctgacctgtaccgtgtccggcgatagcatcagcagcggcgattactactggggctggatcagacagcctcctggcaaaggactggaatggatcggccacatctactacagcggcgtgacctactacaaccccagcctgaagtccagagtgaccatcagcgtggacaccagccggaaccagttctccctgaagctgtctagcgtgacagccgccgataccgccgtgtactactgcaccagagaggacagcagcaactggcggagtagaggccagggaacactggtcacagttagctctctcgaggacaaaactcacacatgcccaccgtgcccagcacccatcaagaccgatgtgattacaatggaccccaaggacaactgctccaaggacgccaacgataccctgctgctccagctgaccaacaccagcgcctactacatgtacttgttgctgctgctgaagtccgtggtgtacttcgccatcatcacatgctgcctgctgcggagaaccgccttctgctgcaacggcgagaagtctagggccaagcgatctggatctggagcaacaaacttctcactactcaaacaagcaggtgacgtggaggagaatcccgggcctactagtatggactggatttggcgcatccttttccttgtcggcgctgctaccggcgcgcattccgggcccatggaccccgacctggaaatcagagccgccttcctgcggcagagaaacacagccctgagaacagaggtggccgagctggaacaagaggtgcagcggctggaaaacgaggtgtcccagtacgagacaagatacggccctctcggaggcggaaaaacgcgtgataaaactcatacctgtccgccatgcccggcagaagtgaaaaccgactccaccgaccacgtgaagcccaaagagacagagaacaccaagcagcccagcaagagctgccacaagcccaaggccatcgtgcacaccgagaaagtgaacatgatgagcctgaccgtgctgggcctgcggatgctgttcgccaaaaccgtggccgtgaacttcctgctgaccgccaagctgttcttcctccgcgccaagagaagcggatctggcgtgaagcagaccctgaatttcgacctgctgaagctggctggcgacgtggaatccaacccaggcccttctagaggccatatgaccgagtacaagcccacggtgcgcctcgccacccgcgacgacgtccccagggccgtacgcaccctcgccgccgcgttcgccgactaccccgccacgcgccacaccgtcgatccggaccgccacatcgagcgggtcaccgagctgcaagaactcttcctcacgcgcgtcgggctcgacatcggcaaggtgtgggtcgcggacgacggcgccgcggtggcggtctggaccacgccggagagcgtcgaagcgggggcggtgttcgccgagatcggcccgcgcatggccgagttgagcggttcccggctggccgcgcagcaacagatggaaggcctcctggcgccgcaccggcccaaggagcccgcgtggttcctggccaccgtcggcgtctcgcccgaccaccagggcaagggtctgggcagcgccgtcgtgctccccggagtggaggcggccgagcgcgccggggtgcccgccttcctggagacctccgcgccccgcaacctccccttctacgagcggctcggcttcaccgtcaccgccgacgtcgaggtgcccgaaggaccgcgcacctggtgcatgacccgcaagcccggtgcctga

SEQ ID NO: 4455 - DNA, 1203 bp, Artificial Sequence
  Synthetic Polynucloetide
atggccttaccagtgaccgccttgctcctgccgctggccttgctgctccacgccgccaggccgcagctccagctgcaagagtctggacctggcctggtcaagcctagcgagacactgagcctgacctgtaccgtgtccggcgatagcatcagcagcggcgattactactggggctggatcagacagcctcctggcaaaggactggaatggatcggccacatctactacagcggcgtgacctactacaaccccagcctgaagtccagagtgaccatcagcgtggacaccagccggaaccagttctccctgaagctgtctagcgtgacagccgccgataccgccgtgtactactgcaccagagaggacagcagcaactggcggagtagaggccagggaacactggtcacagttagctctctcgaggacaaaactcacacatgcccaccgtgcccagcacccatcaagaccgatgtgattacaatggaccccaaggacaactgctccaaggacgccaacgataccctgctgctccagctgaccaacaccagcgcctactacatgtacttgttgctgctgctgaagtccgtggtgtacttcgccatcatcacatgctgcctgctgcggagaaccgccttctgctgcaacggcgagaagtctagggccaagcgatctggatctggagcaacaaacttctcactactcaaacaagcaggtgacgtggaggagaatcccgggcctactagtatggactggatttggcgcatccttttccttgtcggcgctgctaccggcgcgcattccgggcccatggaccccgacctggaaatcagagccgccttcctgcggcagagaaacacagccctgagaacagaggtggccgagctggaacaagaggtgcagcggctggaaaacgaggtgtcccagtacgagacaagatacggccctctcggaggcggaaaaacgcgtgataaaactcatacctgtccgccatgcccggcagaagtgaaaaccgactccaccgaccacgtgaagcccaaagagacagagaacaccaagcagcccagcaagagctgccacaagcccaaggccatcgtgcacaccgagaaagtgaacatgatgagcctgaccgtgctgggcctgcggatgctgttcgccaaaaccgtggccgtgaacttcctgctgaccgccaagctgttcttcctc

SEQ ID NO: 4456 - DNA, 1176 bp, Artificial Sequence
  Synthetic Polynucloetide
atggccttaccagtgaccgccttgctcctgccgctggccttgctgctccacgccgccaggccgcagctccagctgcaagagtctggacctggcctggtcaagcctagcgagacactgagcctgacctgtaccgtgtccggcgatagcatcagcagcggcgattactactggggctggatcagacagcctcctggcaaaggactggaatggatcggccacatctactacagcggcgtgacctactacaaccccagcctgaagtccagagtgaccatcagcgtggacaccagccggaaccagttctccctgaagctgtctagcgtgacagccgccgataccgccgtgtactactgcaccagagaggacagcagcaactggcggagtagaggccagggaacactggtcacagttagctctctcgagggatctcccatcaagaccgatgtgattacaatggaccccaaggacaactgctccaaggacgccaacgataccctgctgctccagctgaccaacaccagcgcctactacatgtacttgttgctgctgctgaagtccgtggtgtacttcgccatcatcacatgctgcctgctgcggagaaccgccttctgctgcaacggcgagaagtctagggccaagcgatctggatctggagcaacaaacttctcactactcaaacaagcaggtgacgtggaggagaatcccgggcctactagtatggactggatttggcgcatccttttccttgtcggcgctgctaccggcgcgcattccgggcccatggaccccgacctggaaatcagagccgccttcctgcggcagagaaacacagccctgagaacagaggtggccgagctggaacaagaggtgcagcggctggaaaacgaggtgtcccagtacgagacaagatacggccctctcggaggcggaaaaacgcgtgataaaactcatacctgtccgccatgcccggcagaagtgaaaaccgactccaccgaccacgtgaagcccaaagagacagagaacaccaagcagcccagcaagagctgccacaagcccaaggccatcgtgcacaccgagaaagtgaacatgatgagcctgaccgtgctgggcctgcggatgctgttcgccaaaaccgtggccgtgaacttcctgctgaccgccaagctgttcttcctc

SEQ ID NO: 4457 - DNA, 1827 bp, Artificial Sequence
  Synthetic Polynucloetide
atggccttaccagtgaccgccttgctcctgccgctggccttgctgctccacgccgccaggccgcagctccagctgcaagagtctggacctggcctggtcaagcctagcgagacactgagcctgacctgtaccgtgtccggcgatagcatcagcagcggcgattactactggggctggatcagacagcctcctggcaaaggactggaatggatcggccacatctactacagcggcgtgacctactacaaccccagcctgaagtccagagtgaccatcagcgtggacaccagccggaaccagttctccctgaagctgtctagcgtgacagccgccgataccgccgtgtactactgcaccagagaggacagcagcaactggcggagtagaggccagggaacactggtcacagttagctctctcgagggatctatggaccccaaggacaactgctccaaggacgccaacgataccctgctgctccagctgaccaacaccagcgcctactacatgtacttgttgctgctgctgaagtccgtggtgtacttcgccatcatcacatgctgcctgctgcggagaaccgccttctgctgcaacggcgagaagtctagggccaagcgatctggatctggagcaacaaacttctcactactcaaacaagcaggtgacgtggaggagaatcccgggcctactagtatggactggatttggcgcatccttttccttgtcggcgctgctaccggcgcgcattccgggcccatggaccccgacctggaaatcagagccgccttcctgcggcagagaaacacagccctgagaacagaggtggccgagctggaacaagaggtgcagcggctggaaaacgaggtgtcccagtacgagacaagatacggccctctcggaggcggaaaaacgcgtggcagcgaagtgaaaaccgactccaccgaccacgtgaagcccaaagagacagagaacaccaagcagcccagcaagagctgccacaagcccaaggccatcgtgcacaccgagaaagtgaacatgatgagcctgaccgtgctgggcctgcggatgctgttcgccaaaaccgtggccgtgaacttcctgctgaccgccaagctgttcttcctccgcgccaagagaagcggatctggcgtgaagcagaccctgaatttcgacctgctgaagctggctggcgacgtggaatccaacccaggcccttctagaggccatatgaccgagtacaagcccacggtgcgcctcgccacccgcgacgacgtccccagggccgtacgcaccctcgccgccgcgttcgccgactaccccgccacgcgccacaccgtcgatccggaccgccacatcgagcgggtcaccgagctgcaagaactcttcctcacgcgcgtcgggctcgacatcggcaaggtgtgggtcgcggacgacggcgccgcggtggcggtctggaccacgccggagagcgtcgaagcgggggcggtgttcgccgagatcggcccgcgcatggccgagttgagcggttcccggctggccgcgcagcaacagatggaaggcctcctggcgccgcaccggcccaaggagcccgcgtggttcctggccaccgtcggcgtctcgcccgaccaccagggcaagggtctgggcagcgccgtcgtgctccccggagtggaggcggccgagcgcgccggggtgcccgccttcctggagacctccgcgccccgcaacctccccttctacgagcggctcggcttcaccgtcaccgccgacgtcgaggtgcccgaaggaccgcgcacctggtgcatgacccgcaagcccggtgcctga

SEQ ID NO: 4458 - DNA, 1830 bp, Artificial Sequence
  Synthetic Polynucloetide
atggccttaccagtgaccgccttgctcctgccgctggccttgctgctccacgccgccaggccgcagctccagctgcaagagtctggacctggcctggtcaagcctagcgagacactgagcctgacctgtaccgtgtccggcgatagcatcagcagcggcgattactactggggctggatcagacagcctcctggcaaaggactggaatggatcggccacatctactacagcggcgtgacctactacaaccccagcctgaagtccagagtgaccatcagcgtggacaccagccggaaccagttctccctgaagctgtctagcgtgacagccgccgataccgccgtgtactactgcaccagagaggacagcagcaactggcggagtagaggccagggaacactggtcacagttagctctctcgagggatctcccatcaagaccgatgtgattacaatggaccccaaggacaactgctccaaggacgccaacgataccctgctgctccagctgaccaacaccagcgcctactacatgtacttgttgctgctgctgaagtccgtggtgtacttcgccatcatcacatgctgcctgctgcggagaaccgccttctgctgcaacggcgagaagtctagggccaagcgatctggatctggagcaacaaacttctcactactcaaacaagcaggtgacgtggaggagaatcccgggcctactagtatggactggatttggcgcatccttttccttgtcggcgctgctaccggcgcgcattccgggcccatggaccccgacctggaaatcagagccgccttcctgcggcagagaaacacagccctgagaacagaggtggccgagctggaacaagaggtgcagcggctggaaaacgaggtgtcccagtacgagacaagatacggccctctcggaggcggaaaaacgcgtggcagcgaccacgtgaagcccaaagagacagagaacaccaagcagcccagcaagagctgccacaagcccaaggccatcgtgcacaccgagaaagtgaacatgatgagcctgaccgtgctgggcctgcggatgctgttcgccaaaaccgtggccgtgaacttcctgctgaccgccaagctgttcttcctccgcgccaagagaagcggatctggcgtgaagcagaccctgaatttcgacctgctgaagctggctggcgacgtggaatccaacccaggcccttctagaggccatatgaccgagtacaagcccacggtgcgcctcgccacccgcgacgacgtccccagggccgtacgcaccctcgccgccgcgttcgccgactaccccgccacgcgccacaccgtcgatccggaccgccacatcgagcgggtcaccgagctgcaagaactcttcctcacgcgcgtcgggctcgacatcggcaaggtgtgggtcgcggacgacggcgccgcggtggcggtctggaccacgccggagagcgtcgaagcgggggcggtgttcgccgagatcggcccgcgcatggccgagttgagcggttcccggctggccgcgcagcaacagatggaaggcctcctggcgccgcaccggcccaaggagcccgcgtggttcctggccaccgtcggcgtctcgcccgaccaccagggcaagggtctgggcagcgccgtcgtgctccccggagtggaggcggccgagcgcgccggggtgcccgccttcctggagacctccgcgccccgcaacctccccttctacgagcggctcggcttcaccgtcaccgccgacgtcgaggtgcccgaaggaccgcgcacctggtgcatgacccgcaagcccggtgcctga

SEQ ID NO: 4459 - DNA, 1806 bp, Artificial Sequence
  Synthetic Polynucloetide
atggccttaccagtgaccgccttgctcctgccgctggccttgctgctccacgccgccaggccgcagctccagctgcaagagtctggacctggcctggtcaagcctagcgagacactgagcctgacctgtaccgtgtccggcgatagcatcagcagcggcgattactactggggctggatcagacagcctcctggcaaaggactggaatggatcggccacatctactacagcggcgtgacctactacaaccccagcctgaagtccagagtgaccatcagcgtggacaccagccggaaccagttctccctgaagctgtctagcgtgacagccgccgataccgccgtgtactactgcaccagagaggacagcagcaactggcggagtagaggccagggaacactggtcacagttagctctctcgagggatctatggaccccaaggacaactgctccaaggacgccaacgataccctgctgctccagctgaccaacaccagcgcctactacatgtacttgttgctgctgctgaagtccgtggtgtacttcgccatcatcacatgctgcctgctgcggagaaccgccttctgctgcaacggcgagaagtctagggccaagcgatctggatctggagcaacaaacttctcactactcaaacaagcaggtgacgtggaggagaatcccgggcctactagtatggactggatttggcgcatccttttccttgtcggcgctgctaccggcgcgcattccgggcccatggaccccgacctggaaatcagagccgccttcctgcggcagagaaacacagccctgagaacagaggtggccgagctggaacaagaggtgcagcggctggaaaacgaggtgtcccagtacgagacaagatacggccctctcggaggcggaaaaacgcgtggcagcgaccacgtgaagcccaaagagacagagaacaccaagcagcccagcaagagctgccacaagcccaaggccatcgtgcacaccgagaaagtgaacatgatgagcctgaccgtgctgggcctgcggatgctgttcgccaaaaccgtggccgtgaacttcctgctgaccgccaagctgttcttcctccgcgccaagagaagcggatctggcgtgaagcagaccctgaatttcgacctgctgaagctggctggcgacgtggaatccaacccaggcccttctagaggccatatgaccgagtacaagcccacggtgcgcctcgccacccgcgacgacgtccccagggccgtacgcaccctcgccgccgcgttcgccgactaccccgccacgcgccacaccgtcgatccggaccgccacatcgagcgggtcaccgagctgcaagaactcttcctcacgcgcgtcgggctcgacatcggcaaggtgtgggtcgcggacgacggcgccgcggtggcggtctggaccacgccggagagcgtcgaagcgggggcggtgttcgccgagatcggcccgcgcatggccgagttgagcggttcccggctggccgcgcagcaacagatggaaggcctcctggcgccgcaccggcccaaggagcccgcgtggttcctggccaccgtcggcgtctcgcccgaccaccagggcaagggtctgggcagcgccgtcgtgctccccggagtggaggcggccgagcgcgccggggtgcccgccttcctggagacctccgcgccccgcaacctccccttctacgagcggctcggcttcaccgtcaccgccgacgtcgaggtgcccgaaggaccgcgcacctggtgcatgacccgcaagcccggtgcctga

SEQ ID NO: 4460 - DNA, 1104 bp, Artificial Sequence
  Synthetic Polynucloetide
atggccttaccagtgaccgccttgctcctgccgctggccttgctgctccacgccgccaggccgcagctccagctgcaagagtctggacctggcctggtcaagcctagcgagacactgagcctgacctgtaccgtgtccggcgatagcatcagcagcggcgattactactggggctggatcagacagcctcctggcaaaggactggaatggatcggccacatctactacagcggcgtgacctactacaaccccagcctgaagtccagagtgaccatcagcgtggacaccagccggaaccagttctccctgaagctgtctagcgtgacagccgccgataccgccgtgtactactgcaccagagaggacagcagcaactggcggagtagaggccagggaacactggtcacagttagctctctcgagggatctatggaccccaaggacaactgctccaaggacgccaacgataccctgctgctccagctgaccaacaccagcgcctactacatgtacttgttgctgctgctgaagtccgtggtgtacttcgccatcatcacatgctgcctgctgcggagaaccgccttctgctgcaacggcgagaagtctagggccaagcgatctggatctggagcaacaaacttctcactactcaaacaagcaggtgacgtggaggagaatcccgggcctactagtatggactggatttggcgcatccttttccttgtcggcgctgctaccggcgcgcattccgggcccatggaccccgacctggaaatcagagccgccttcctgcggcagagaaacacagccctgagaacagaggtggccgagctggaacaagaggtgcagcggctggaaaacgaggtgtcccagtacgagacaagatacggccctctcggaggcggaaaaacgcgtggcagcgaccacgtgaagcccaaagagacagagaacaccaagcagcccagcaagagctgccacaagcccaaggccatcgtgcacaccgagaaagtgaacatgatgagcctgaccgtgctgggcctgcggatgctgttcgccaaaaccgtggccgtgaacttcctgctgaccgccaagctgttcttcctc

SEQ ID NO: 4461 - DNA, 1833 bp, Artificial Sequence
  Synthetic Polynucloetide
atggccttaccagtgaccgccttgctcctgccgctggccttgctgctccacgccgccaggccgcagctccagctgcaagagtctggacctggcctggtcaagcctagcgagacactgagcctgacctgtaccgtgtccggcgatagcatcagcagcggcgattactactggggctggatcagacagcctcctggcaaaggactggaatggatcggccacatctactacagcggcgtgacctactacaaccccagcctgaagtccagagtgaccatcagcgtggacaccagccggaaccagttctccctgaagctgtctagcgtgacagccgccgataccgccgtgtactactgcaccagagaggacagcagcaactggcggagtagaggccagggaacactggtcacagttagctctctcgaggacaaaactcacacatgcccaccgtgcccagcaatggaccccaaggacaactgctccaaggacgccaacgataccctgctgctccagctgaccaacaccagcgcctactacatgtacttgttgctgctgctgaagtccgtggtgtacttcgccatcatcacatgctgcctgctgcggagaaccgccttctgctgcaacggcgagaagtctagggccaagcgatctggatctggagcaacaaacttctcactactcaaacaagcaggtgacgtggaggagaatcccgggcctactagtatggactggatttggcgcatccttttccttgtcggcgctgctaccggcgcgcattccgggcccatggaccccgacctggaaatcagagccgccttcctgcggcagagaaacacagccctgagaacagaggtggccgagctggaacaagaggtgcagcggctggaaaacgaggtgtcccagtacgagacaagatacggccctctcggaggcggaaaaacgcgtggcagcgaccacgtgaagcccaaagagacagagaacaccaagcagcccagcaagagctgccacaagcccaaggccatcgtgcacaccgagaaagtgaacatgatgagcctgaccgtgctgggcctgcggatgctgttcgccaaaaccgtggccgtgaacttcctgctgaccgccaagctgttcttcctccgcgccaagagaagcggatctggcgtgaagcagaccctgaatttcgacctgctgaagctggctggcgacgtggaatccaacccaggcccttctagaggccatatgaccgagtacaagcccacggtgcgcctcgccacccgcgacgacgtccccagggccgtacgcaccctcgccgccgcgttcgccgactaccccgccacgcgccacaccgtcgatccggaccgccacatcgagcgggtcaccgagctgcaagaactcttcctcacgcgcgtcgggctcgacatcggcaaggtgtgggtcgcggacgacggcgccgcggtggcggtctggaccacgccggagagcgtcgaagcgggggcggtgttcgccgagatcggcccgcgcatggccgagttgagcggttcccggctggccgcgcagcaacagatggaaggcctcctggcgccgcaccggcccaaggagcccgcgtggttcctggccaccgtcggcgtctcgcccgaccaccagggcaagggtctgggcagcgccgtcgtgctccccggagtggaggcggccgagcgcgccggggtgcccgccttcctggagacctccgcgccccgcaacctccccttctacgagcggctcggcttcaccgtcaccgccgacgtcgaggtgcccgaaggaccgcgcacctggtgcatgacccgcaagcccggtgcctga

SEQ ID NO: 4462 - DNA, 1860 bp, Artificial Sequence
  Synthetic Polynucloetide
atggccttaccagtgaccgccttgctcctgccgctggccttgctgctccacgccgccaggccgcagctccagctgcaagagtctggacctggcctggtcaagcctagcgagacactgagcctgacctgtaccgtgtccggcgatagcatcagcagcggcgattactactggggctggatcagacagcctcctggcaaaggactggaatggatcggccacatctactacagcggcgtgacctactacaaccccagcctgaagtccagagtgaccatcagcgtggacaccagccggaaccagttctccctgaagctgtctagcgtgacagccgccgataccgccgtgtactactgcaccagagaggacagcagcaactggcggagtagaggccagggaacactggtcacagttagctctctcgaggacaaaactcacacatgcccaccgtgcccagcaatggaccccaaggacaactgctccaaggacgccaacgataccctgctgctccagctgaccaacaccagcgcctactacatgtacttgttgctgctgctgaagtccgtggtgtacttcgccatcatcacatgctgcctgctgcggagaaccgccttctgctgcaacggcgagaagtctagggccaagcgatctggatctggagcaacaaacttctcactactcaaacaagcaggtgacgtggaggagaatcccgggcctactagtatggactggatttggcgcatccttttccttgtcggcgctgctaccggcgcgcattccgggcccatggaccccgacctggaaatcagagccgccttcctgcggcagagaaacacagccctgagaacagaggtggccgagctggaacaagaggtgcagcggctggaaaacgaggtgtcccagtacgagacaagatacggccctctcggaggcggaaaaacgcgtgataaaactcatacctgtccgccatgcccggcagaccacgtgaagcccaaagagacagagaacaccaagcagcccagcaagagctgccacaagcccaaggccatcgtgcacaccgagaaagtgaacatgatgagcctgaccgtgctgggcctgcggatgctgttcgccaaaaccgtggccgtgaacttcctgctgaccgccaagctgttcttcctccgcgccaagagaagcggatctggcgtgaagcagaccctgaatttcgacctgctgaagctggctggcgacgtggaatccaacccaggcccttctagaggccatatgaccgagtacaagcccacggtgcgcctcgccacccgcgacgacgtccccagggccgtacgcaccctcgccgccgcgttcgccgactaccccgccacgcgccacaccgtcgatccggaccgccacatcgagcgggtcaccgagctgcaagaactcttcctcacgcgcgtcgggctcgacatcggcaaggtgtgggtcgcggacgacggcgccgcggtggcggtctggaccacgccggagagcgtcgaagcgggggcggtgttcgccgagatcggcccgcgcatggccgagttgagcggttcccggctggccgcgcagcaacagatggaaggcctcctggcgccgcaccggcccaaggagcccgcgtggttcctggccaccgtcggcgtctcgcccgaccaccagggcaagggtctgggcagcgccgtcgtgctccccggagtggaggcggccgagcgcgccggggtgcccgccttcctggagacctccgcgccccgcaacctccccttctacgagcggctcggcttcaccgtcaccgccgacgtcgaggtgcccgaaggaccgcgcacctggtgcatgacccgcaagcccggtgcctga

SEQ ID NO: 4463 - DNA, 1158 bp, Artificial Sequence
  Synthetic Polynucloetide
atggccttaccagtgaccgccttgctcctgccgctggccttgctgctccacgccgccaggccgcagctccagctgcaagagtctggacctggcctggtcaagcctagcgagacactgagcctgacctgtaccgtgtccggcgatagcatcagcagcggcgattactactggggctggatcagacagcctcctggcaaaggactggaatggatcggccacatctactacagcggcgtgacctactacaaccccagcctgaagtccagagtgaccatcagcgtggacaccagccggaaccagttctccctgaagctgtctagcgtgacagccgccgataccgccgtgtactactgcaccagagaggacagcagcaactggcggagtagaggccagggaacactggtcacagttagctctctcgaggacaaaactcacacatgcccaccgtgcccagcaatggaccccaaggacaactgctccaaggacgccaacgataccctgctgctccagctgaccaacaccagcgcctactacatgtacttgttgctgctgctgaagtccgtggtgtacttcgccatcatcacatgctgcctgctgcggagaaccgccttctgctgcaacggcgagaagtctagggccaagcgatctggatctggagcaacaaacttctcactactcaaacaagcaggtgacgtggaggagaatcccgggcctactagtatggactggatttggcgcatccttttccttgtcggcgctgctaccggcgcgcattccgggcccatggaccccgacctggaaatcagagccgccttcctgcggcagagaaacacagccctgagaacagaggtggccgagctggaacaagaggtgcagcggctggaaaacgaggtgtcccagtacgagacaagatacggccctctcggaggcggaaaaacgcgtgataaaactcatacctgtccgccatgcccggcagaccacgtgaagcccaaagagacagagaacaccaagcagcccagcaagagctgccacaagcccaaggccatcgtgcacaccgagaaagtgaacatgatgagcctgaccgtgctgggcctgcggatgctgttcgccaaaaccgtggccgtgaacttcctgctgaccgccaagctgttcttcctc

SEQ ID NO: 4464 - DNA, 900 bp, Artificial Sequence; identical to SEQ ID NO: 4210
  Synthetic Polynucloetide

SEQ ID NO: 4465 - DNA, 711 bp, Artificial Sequence
  Synthetic Polynucloetide
atggactggatttggcgcatccttttccttgtcggcgctgctaccggcgcgcattccgggcccatggaccccgacctggaaatcagagccgccttcctgcggcagagaaacacagccctgagaacagaggtggccgagctggaacaagaggtgcagcggctggaaaacgaggtgtcccagtacgagacaagatacggccctctcggaggcggaaaaacgcgtgcctctacaaagggaccctccgtgtttcctctggctcccagcagcaagtctacaagcggaggaacagccgctctgggctgcctggtcaaggattactttcccgagcctgtgaccgtgtcctggaatagcggagcactgacaagcggcgtgcacacctttccagccgtgctgcaaagcagcggcctgtactctctgagcagcgtggtcacagtgcctagctctagcctgggcacccagacctacatctgcaatgtgaaccacaagcctagcaacaccaaggtggacaagagagtggaacccaagagctgtatccccgaggacacattcttcccaagccccgagagcagctgcgacgtgaagctggtggaaaagagcttcgagacagacaccaacctgaacttccagaacctgagcgtgatcggcttcagaatcctgctgctgaaagtggccggctttaacctgctgatgaccctgcggctgtggtccagc

SEQ ID NO: 4466 - DNA, 942 bp, Artificial Sequence; identical to SEQ ID NO: 4212
  Synthetic Polynucloetide

SEQ ID NO: 4467 - DNA, 735 bp, Artificial Sequence
  Synthetic Polynucloetide
atggactggatttggcgcatccttttccttgtcggcgctgctaccggcgcgcattccgggcccatggaccccgacctggaaatcagagccgccttcctgcggcagagaaacacagccctgagaacagaggtggccgagctggaacaagaggtgcagcggctggaaaacgaggtgtcccagtacgagacaagatacggccctctcggaggcggaaaaacgcgtgcctctacaaagggaccctccgtgtttcctctggctcccagcagcaagtctacaagcggaggaacagccgctctgggctgcctggtcaaggattactttcccgagcctgtgaccgtgtcctggaatagcggagcactgacaagcggcgtgcacacctttccagccgtgctgcaaagcagcggcctgtactctctgagcagcgtggtcacagtgcctagctctagcctgggcacccagacctacatctgcaatgtgaaccacaagcctagcaacaccaaggtggacaagagagtggaacccaagagctgtgaagtgaaaaccgactccaccgaccacgtgaagcccaaagagacagagaacaccaagcagcccagcaagagctgccacaagcccaaggccatcgtgcacaccgagaaagtgaacatgatgagcctgaccgtgctgggcctgcggatgctgttcgccaaaaccgtggccgtgaacttcctgctgaccgccaagctgttcttcctc

SEQ ID NO: 4468 - DNA, 1653 bp, Artificial Sequence
  Synthetic Polynucloetide
atggactggatttggcgcatccttttccttgtcggcgctgctaccggcgcccattccgggcccgaagttgctgccctcgagaaggaggtagcagctttggaaaaagaagtcgcagcccttgagaaagaagttgcggctctggagaagggatccggcggcggaggatctggcggaggcggatctgggggcggaggctctttcgaacaagttcagcttcaacagcctggcgctgagctggtcaaacctggcgcttctgtgaagatgagctgcaaagccagcggctacgccttcagcagctactggatcaactggatgaagcagaaacccggccagggactcgaatggatcggccaaatctatcccggcgacggcgacaccaactacaacggcaagttcaagggcagagccacactgaccgccgatacctctagcagcacagcctacatgcagctgagcagcctgaccagcgaagatagcgccgtgtacttctgtgcccggtccatcacaacagtcgtgggctgcgctatggactattggggccagggaacaagcgtgaccgtgtctagtggcggaggcggaagtggaggcggaggatctggcggcggaggctctgacatccagatgacacagagccctagcagcctgtctgccagcgtgggagacagagtgaccatcacatgcaaggccagcgaccacatcaacaactggctggcctggtatcagcagaagcctggacaggcccctaagctgctgatctacggcgctaccacactggaaacaggcgtgcccagcagattttctggcagcggctctggcaccgactacaccctgacaatatccagcctccagcctgaggacttcgccacctactactgtcagcagagctggaacaccccttggacattcggccagggcaccaagctggaaatcaagagaacgcgtgagcagaaactgatctcggaagaggatctggcgaagcccaccacgacgccagcgccgcgaccaccaacaccggcgcccaccatcgcgtcgcagcccctgtccctgcgcccagaggcgtgccggccagcggcggggggcgcagtgcacacgagggggctggacttcgcctgtgacatctacatctgggcgcccttggccgggacttgtggggtccttctcctgtcactggttatcaccctttactgcaaacggggcagaaagaaactcctgtatatattcaaacaaccatttatgagaccagtacaaactactcaagaggaagatggctgtagctgccgatttccagaagaagaagaaggaggatgtgaactgagagtgaagttcagcaggagcgcagacgcccccgcgtaccagcagggccagaaccagctctataacgagctgaatctaggacgaagagaggagtacgatgttttggacaagagacgtggccgggaccctgagatggggggaaagccgagaaggaagaaccctcaggaaggcctgtacaatgaactgcagaaagataagatggcggaggcctacagtgagattgggatgaaaggcgagcgccggaggggcaaggggcacgatggcctttaccagggtctcagtacagccaccaaggacacctacgacgcccttcacatgcaggccctgccccctcgctga

SEQ ID NO: 4469 - DNA, 2712 bp, Artificial Sequence
  Synthetic Polynucloetide
atggccttaccagtgaccgccttgctcctgccgctggccttgctgctccacgccgccaggccggacatccagatgacacagagccctagcagcctgtctgccagcgtgggagacagagtgaccatcacatgcaaggccagcgaccacatcaacaactggctggcctggtatcagcagaagcctggacaggcccctaagctgctgatctacggcgctaccacactggaaacaggcgtgcccagcagattttctggcagcggctctggcaccgactacaccctgacaatatccagcctccagcctgaggacttcgccacctactactgtcagcagagctggaacaccccttggacattcggccagggcaccaagctggaaatcaagagactcgagatccagaaccctgatcctgccgtgtaccagctgcgggatagcaagagcagcgacaagagcgtgtgtctgttcaccgacttcgacagccagaccaacgtgtcccagagcaaggactccgacgtgtacatcaccgataagtgcgtgctggacatgcggagcatggacttcaagagcaactccgccgtggcctggtccaacaagtccgatttcgcctgcgccaacgccttcaacaacagcattatccccgaggacacattcttcccaagcagcgacgtgccctgcgacgtgaagctggtggaaaagagcttcgagacagacaccaacctgaacttccagaacctgagcgtgatcggcttcagaatcctgctgctgaaagtggccggctttaacctgctgatgaccctgcggctgtggtccagccgcgccaagagaagcggatctggcgtgaagcagaccctgaatttcgacctgctgaagctggctggcgacgtggaatccaacccaggccctactagtatggactggatttggcgcatccttttccttgtcggcgctgctaccggcgcccattccgggcccgaagttgctgccctcgagaaggaggtagcagctttggaaaaagaagtcgcagcccttgagaaagaagttgcggctctggagaagggatccggcggcggaggatctggcggaggcggatctgggggcggaggctctttcgaacaagttcagcttcaacagcctggcgctgagctggtcaaacctggcgcttctgtgaagatgagctgcaaagccagcggctacgccttcagcagctactggatcaactggatgaagcagaaacccggccagggactcgaatggatcggccaaatctatcccggcgacggcgacaccaactacaacggcaagttcaagggcagagccacactgaccgccgatacctctagcagcacagcctacatgcagctgagcagcctgaccagcgaagatagcgccgtgtacttctgtgcccggtccatcacaacagtcgtgggctgcgctatggactattggggccagggaacaagcgtgaccgtgtctagtacgcgtgaggacctgaagaacgtgttcccacctgaggtggccgtgttcgagcctagcaaggccgagatcgcccacacccagaaagccaccctcgtgtgcctggctaccggcttctaccccgaccatgtggaactgtcttggtgggtcaacggcaaagaggtgcacagcggcgtgtgtaccgacccccagccactgaaagaacagcccgccctgaacgacagccggtactgcctgagcagcagactgagagtgtccgccaccttctggcagaacccccggaaccacttcagatgccaggtgcagttctacggcctgagcgagaacgacgagtggacccaggacagagccaagcccgtgacccagatcgtgtctgccgaagcctggggcagagccgattgcggcatcaccagcgccagctaccaccagggcgtgctgagcgccaccatcctgtacgagatcctgctgggcaaggccaccctgtacgccgtgctggtgtctgccctggtgctgatggctatggtcaagcggaaggacagccggggaagggccaagcgatctggatctggagcaacaaacttctcactactcaaacaagcaggtgacgtggaggagaatcccgggccttctagaggccatatgaccgagtacaagcccacggtgcgcctcgccacccgcgacgacgtccccagggccgtacgcaccctcgccgccgcgttcgccgactaccccgccacgcgccacaccgtcgatccggaccgccacatcgagcgggtcaccgagctgcaagaactcttcctcacgcgcgtcgggctcgacatcggcaaggtgtgggtcgcggacgacggcgccgcggtggcggtctggaccacgccggagagcgtcgaagcgggggcggtgttcgccgagatcggcccgcgcatggccgagttgagcggttcccggctggccgcgcagcaacagatggaaggcctcctggcgccgcaccggcccaaggagcccgcgtggttcctggccaccgtcggcgtctcgcccgaccaccagggcaagggtctgggcagcgccgtcgtgctccccggagtggaggcggccgagcgcgccggggtgcccgccttcctggagacctccgcgccccgcaacctccccttctacgagcggctcggcttcaccgtcaccgccgacgtcgaggtgcccgaaggaccgcgcacctggtgcatgacccgcaagcccggtgcctga

SEQ ID NO: 4470 - DNA, 2709 bp, Artificial Sequence
  Synthetic Polynucloetide
atggccttaccagtgaccgccttgctcctgccgctggccttgctgctccacgccgccaggccggacatccagatgacacagagccctagcagcctgtctgccagcgtgggagacagagtgaccatcacatgcaaggccagcgaccacatcaacaactggctggcctggtatcagcagaagcctggacaggcccctaagctgctgatctacggcgctaccacactggaaacaggcgtgcccagcagattttctggcagcggctctggcaccgactacaccctgacaatatccagcctccagcctgaggacttcgccacctactactgtcagcagagctggaacaccccttggacattcggccagggcaccaagctggaaatcaagagactcgaggacctgaagaacgtgttcccacctgaggtggccgtgttcgagcctagcaaggccgagatcgcccacacccagaaagccaccctcgtgtgcctggctaccggcttctaccccgaccatgtggaactgtcttggtgggtcaacggcaaagaggtgcacagcggcgtgtgtaccgacccccagccactgaaagaacagcccgccctgaacgacagccggtactgcctgagcagcagactgagagtgtccgccaccttctggcagaacccccggaaccacttcagatgccaggtgcagttctacggcctgagcgagaacgacgagtggacccaggacagagccaagcccgtgacccagatcgtgtctgccgaagcctggggcagagccgattgcggcatcaccagcgccagctaccaccagggcgtgctgagcgccaccatcctgtacgagatcctgctgggcaaggccaccctgtacgccgtgctggtgtctgccctggtgctgatggctatggtcaagcggaaggacagccggggaagggccaagcgatctggatctggagcaacaaacttctcactactcaaacaagcaggtgacgtggaggagaatcccgggcctactagtatggactggatttggcgcatccttttccttgtcggcgctgctaccggcgcccattccgggcccgaagttgctgccctcgagaaggaggtagcagctttggaaaaagaagtcgcagcccttgagaaagaagttgcggctctggagaagggatccggcggcggaggatctggcggaggcggatctgggggcggaggctctttcgaacaagttcagcttcaacagcctggcgctgagctggtcaaacctggcgcttctgtgaagatgagctgcaaagccagcggctacgccttcagcagctactggatcaactggatgaagcagaaacccggccagggactcgaatggatcggccaaatctatcccggcgacggcgacaccaactacaacggcaagttcaagggcagagccacactgaccgccgatacctctagcagcacagcctacatgcagctgagcagcctgaccagcgaagatagcgccgtgtacttctgtgcccggtccatcacaacagtcgtgggctgcgctatggactattggggccagggaacaagcgtgaccgtgtctagtacgcgtatccagaaccctgatcctgccgtgtaccagctgcgggatagcaagagcagcgacaagagcgtgtgtctgttcaccgacttcgacagccagaccaacgtgtcccagagcaaggactccgacgtgtacatcaccgataagtgcgtgctggacatgcggagcatggacttcaagagcaactccgccgtggcctggtccaacaagtccgatttcgcctgcgccaacgccttcaacaacagcattatccccgaggacacattcttcccaagcagcgacgtgccctgcgacgtgaagctggtggaaaagagcttcgagacagacaccaacctgaacttccagaacctgagcgtgatcggcttcagaatcctgctgctgaaagtggccggctttaacctgctgatgaccctgcggctgtggtccagccgcgccaagagaagcggatctggcgtgaagcagaccctgaatttcgacctgctgaagctggctggcgacgtggaatccaacccaggcccttctagaggccatatgaccgagtacaagcccacggtgcgcctcgccacccgcgacgacgtccccagggccgtacgcaccctcgccgccgcgttcgccgactaccccgccacgcgccacaccgtcgatccggaccgccacatcgagcgggtcaccgagctgcaagaactcttcctcacgcgcgtcgggctcgacatcggcaaggtgtgggtcgcggacgacggcgccgcggtggcggtctggaccacgccggagagcgtcgaagcgggggcggtgttcgccgagatcggcccgcgcatggccgagttgagcggttcccggctggccgcgcagcaacagatggaaggcctcctggcgccgcaccggcccaaggagcccgcgtggttcctggccaccgtcggcgtctcgcccgaccaccagggcaagggtctgggcagcgccgtcgtgctccccggagtggaggcggccgagcgcgccggggtgcccgccttcctggagacctccgcgccccgcaacctccccttctacgagcggctcggcttcaccgtcaccgccgacgtcgaggtgcccgaaggaccgcgcacctggtgcatgacccgcaagcccggtgcctga

SEQ ID NO: 4471 - DNA, 2709 bp, Artificial Sequence
  Synthetic Polynucloetide
atggccttaccagtgaccgccttgctcctgccgctggccttgctgctccacgccgccaggccggacatccagatgacacagagccctagcagcctgtctgccagcgtgggagacagagtgaccatcacatgcaaggccagcgaccacatcaacaactggctggcctggtatcagcagaagcctggacaggcccctaagctgctgatctacggcgctaccacactggaaacaggcgtgcccagcagattttctggcagcggctctggcaccgactacaccctgacaatatccagcctccagcctgaggacttcgccacctactactgtcagcagagctggaacaccccttggacattcggccagggcaccaagctggaaatcaagagactcgaggacctgaagaacgtgttcccacctgaggtggccgtgttcgagcctagcgaggccgagatcagccacacccagaaagccaccctcgtgtgcctggctaccggcttctaccccgaccatgtggaactgtcttggtgggtcaacggcaaagaggtgcacagcggcgtgtgtaccgacccccagccactgaaagaacagcccgccctgaacgacagccggtactgcctgagcagcagactgagagtgtccgccaccttctggcagaacccccggaaccacttcagatgccaggtgcagttctacggcctgagcgagaacgacgagtggacccaggacagagccaagcccgtgacccagatcgtgtctgccgaagcctggggcagagccgattgcggctttaccagcgagagctaccagcagggcgtgctgagcgccaccatcctgtacgagatcctgctgggcaaggccaccctgtacgccgtgctggtgtctgccctggtgctgatggctatggtcaagcggaaggacagccggggaagggccaagcgatctggatctggagcaacaaacttctcactactcaaacaagcaggtgacgtggaggagaatcccgggcctactagtatggactggatttggcgcatccttttccttgtcggcgctgctaccggcgcccattccgggcccgaagttgctgccctcgagaaggaggtagcagctttggaaaaagaagtcgcagcccttgagaaagaagttgcggctctggagaagggatccggcggcggaggatctggcggaggcggatctgggggcggaggctctttcgaacaagttcagcttcaacagcctggcgctgagctggtcaaacctggcgcttctgtgaagatgagctgcaaagccagcggctacgccttcagcagctactggatcaactggatgaagcagaaacccggccagggactcgaatggatcggccaaatctatcccggcgacggcgacaccaactacaacggcaagttcaagggcagagccacactgaccgccgatacctctagcagcacagcctacatgcagctgagcagcctgaccagcgaagatagcgccgtgtacttctgtgcccggtccatcacaacagtcgtgggctgcgctatggactattggggccagggaacaagcgtgaccgtgtctagtacgcgtatccagaaccctgatcctgccgtgtaccagctgcgggatagcaagagcagcgacaagagcgtgtgtctgttcaccgacttcgacagccagaccaacgtgtcccagagcaaggactccgacgtgtacatcaccgataagtgcgtgctggacatgcggagcatggacttcaagagcaactccgccgtggcctggtccaacaagtccgatttcgcctgcgccaacgccttcaacaacagcattatccccgaggacacattcttcccaagccccgagagcagctgcgacgtgaagctggtggaaaagagcttcgagacagacaccaacctgaacttccagaacctgagcgtgatcggcttcagaatcctgctgctgaaagtggccggctttaacctgctgatgaccctgcggctgtggtccagccgcgccaagagaagcggatctggcgtgaagcagaccctgaatttcgacctgctgaagctggctggcgacgtggaatccaacccaggcccttctagaggccatatgaccgagtacaagcccacggtgcgcctcgccacccgcgacgacgtccccagggccgtacgcaccctcgccgccgcgttcgccgactaccccgccacgcgccacaccgtcgatccggaccgccacatcgagcgggtcaccgagctgcaagaactcttcctcacgcgcgtcgggctcgacatcggcaaggtgtgggtcgcggacgacggcgccgcggtggcggtctggaccacgccggagagcgtcgaagcgggggcggtgttcgccgagatcggcccgcgcatggccgagttgagcggttcccggctggccgcgcagcaacagatggaaggcctcctggcgccgcaccggcccaaggagcccgcgtggttcctggccaccgtcggcgtctcgcccgaccaccagggcaagggtctgggcagcgccgtcgtgctccccggagtggaggcggccgagcgcgccggggtgcccgccttcctggagacctccgcgccccgcaacctccccttctacgagcggctcggcttcaccgtcaccgccgacgtcgaggtgcccgaaggaccgcgcacctggtgcatgacccgcaagcccggtgcctga

SEQ ID NO: 4472 - DNA, 2007 bp, Artificial Sequence
  Synthetic Polynucloetide
atggccttaccagtgaccgccttgctcctgccgctggccttgctgctccacgccgccaggccggacatccagatgacacagagccctagcagcctgtctgccagcgtgggagacagagtgaccatcacatgcaaggccagcgaccacatcaacaactggctggcctggtatcagcagaagcctggacaggcccctaagctgctgatctacggcgctaccacactggaaacaggcgtgcccagcagattttctggcagcggctctggcaccgactacaccctgacaatatccagcctccagcctgaggacttcgccacctactactgtcagcagagctggaacaccccttggacattcggccagggcaccaagctggaaatcaagagactcgaggacctgaagaacgtgttcccacctgaggtggccgtgttcgagcctagcgaggccgagatcagccacacccagaaagccaccctcgtgtgcctggctaccggcttctaccccgaccatgtggaactgtcttggtgggtcaacggcaaagaggtgcacagcggcgtgtgtaccgacccccagccactgaaagaacagcccgccctgaacgacagccggtactgcctgagcagcagactgagagtgtccgccaccttctggcagaacccccggaaccacttcagatgccaggtgcagttctacggcctgagcgagaacgacgagtggacccaggacagagccaagcccgtgacccagatcgtgtctgccgaagcctggggcagagccgattgcggctttaccagcgagagctaccagcagggcgtgctgagcgccaccatcctgtacgagatcctgctgggcaaggccaccctgtacgccgtgctggtgtctgccctggtgctgatggctatggtcaagcggaaggacagccggggaagggccaagcgatctggatctggagcaacaaacttctcactactcaaacaagcaggtgacgtggaggagaatcccgggcctactagtatggactggatttggcgcatccttttccttgtcggcgctgctaccggcgcccattccgggcccgaagttgctgccctcgagaaggaggtagcagctttggaaaaagaagtcgcagcccttgagaaagaagttgcggctctggagaagggatccggcggcggaggatctggcggaggcggatctgggggcggaggctctttcgaacaagttcagcttcaacagcctggcgctgagctggtcaaacctggcgcttctgtgaagatgagctgcaaagccagcggctacgccttcagcagctactggatcaactggatgaagcagaaacccggccagggactcgaatggatcggccaaatctatcccggcgacggcgacaccaactacaacggcaagttcaagggcagagccacactgaccgccgatacctctagcagcacagcctacatgcagctgagcagcctgaccagcgaagatagcgccgtgtacttctgtgcccggtccatcacaacagtcgtgggctgcgctatggactattggggccagggaacaagcgtgaccgtgtctagtacgcgtatccagaaccctgatcctgccgtgtaccagctgcgggatagcaagagcagcgacaagagcgtgtgtctgttcaccgacttcgacagccagaccaacgtgtcccagagcaaggactccgacgtgtacatcaccgataagtgcgtgctggacatgcggagcatggacttcaagagcaactccgccgtggcctggtccaacaagtccgatttcgcctgcgccaacgccttcaacaacagcattatccccgaggacacattcttcccaagccccgagagcagctgcgacgtgaagctggtggaaaagagcttcgagacagacaccaacctgaacttccagaacctgagcgtgatcggcttcagaatcctgctgctgaaagtggccggctttaacctgctgatgaccctgcggctgtggtccagc

SEQ ID NO: 4473 - DNA, 2682 bp, Artificial Sequence
  Synthetic Polynucloetide
atggccttaccagtgaccgccttgctcctgccgctggccttgctgctccacgccgccaggccggacatccagatgacacagagccctagcagcctgtctgccagcgtgggagacagagtgaccatcacatgcaaggccagcgaccacatcaacaactggctggcctggtatcagcagaagcctggacaggcccctaagctgctgatctacggcgctaccacactggaaacaggcgtgcccagcagattttctggcagcggctctggcaccgactacaccctgacaatatccagcctccagcctgaggacttcgccacctactactgtcagcagagctggaacaccccttggacattcggccagggcaccaagctggaaatcaagagactcgaggacctgaagaacgtgttcccacctgaggtggccgtgttcgagcctagcgaggccgagatcagccacacccagaaagccaccctcgtgtgcctggctaccggcttctaccccgaccatgtggaactgtcttggtgggtcaacggcaaagaggtgcacagcggcgtgtgtaccgacccccagccactgaaagaacagcccgccctgaacgacagccggtactgcctgagcagcagactgagagtgtccgccaccttctggcagaacccccggaaccacttcagatgccaggtgcagttctacggcctgagcgagaacgacgagtggacccaggacagagccaagcccgtgacccagatcgtgtctgccgaagcctggggcagagccgattgcggctttaccagcgagagctaccagcagggcgtgctgagcgccaccatcctgtacgagatcctgctgggcaaggccaccctgtacgccgtgctggtgtctgccctggtgctgatggctatggtcaagcggaaggacagccggggaagggccaagcgatctggatctggagcaacaaacttctcactactcaaacaagcaggtgacgtggaggagaatcccgggcctactagtatggactggatttggcgcatccttttccttgtcggcgctgctaccggcgcccattccgggcccgaagttgctgccctcgagaaggaggtagcagctttggaaaaagaagtcgcagcccttgagaaagaagttgcggctctggagaagggatccggcggcggaggatctggcggaggcggatctgggggcggaggctctttcgaacaagttcagcttcaacagcctggcgctgagctggtcaaacctggcgcttctgtgaagatgagctgcaaagccagcggctacgccttcagcagctactggatcaactggatgaagcagaaacccggccagggactcgaatggatcggccaaatctatcccggcgacggcgacaccaactacaacggcaagttcaagggcagagccacactgaccgccgatacctctagcagcacagcctacatgcagctgagcagcctgaccagcgaagatagcgccgtgtacttctgtgcccggtccatcacaacagtcgtgggctgcgctatggactattggggccagggaacaagcgtgaccgtgtctagtacgcgtatccagaaccctgatcctgccgtgtaccagctgcgggatagcaagagcagcgacaagagcgtgtgtctgttcaccgacttcgacagccagaccaacgtgtcccagagcaaggactccgacgtgtacatcaccgataagtgcgtgctggacatgcggagcatggacttcaagagcaactccgccgtggcctggtccaacaagtccgatttcgcctgcgccaacgccttcaacaacagcattatccccgaggacacattcttcccaagccccgagagcagctgcgacgtgaagctggtggaaaagagcttcgagacagacaccaacctgaacttccagaacctgagcgtgatcggcttcagaatcctgctgctgaaagtggccggctttaacctgctgatgaccctgcggctgtggtccagccgcgccaagagaagcggatctggcgtgaagcagaccctgaatttcgacctgctgaagctggctggcgacgtggaatccaacccaggcccttctagaggcgggatccacaccatggctacctacgaggtgctgtgcgaggtggcaagaaagctgggcaccgacgacagagaagtggtgctgttcctgctgaacgtgttcatccctcagcctacactggcccagctgatcggtgcactgagagccctgaaagaggaaggccggctgacctttcctctgctggccgaatgcctgttcagagccggaagaagggatctgctgcgggacctgctgcatctggaccccagatttctggaaagacacctggccggcaccatgagctacttcagcccttaccagctgaccgtgctgcacgttgacggcgaactgtgcgccagagatattcggagcctgatcttcctgagcaaggacaccatcggcagccggtctacccctcagacatttctgcactgggtgtactgcatggaaaacctggacctgctcggccccacagatgtggatgccctgatgtccatgctgagaagcctgagcagagtggacctccagagacaggtgcagacactgatgggactgcacctgagcggacctagccacagccagcactacagacacacccct

SEQ ID NO: 4474 - DNA, 2019 bp, Artificial Sequence
  Synthetic Polynucloetide
atggccttaccagtgaccgccttgctcctgccgctggccttgctgctccacgccgccaggccggacatccagatgacacagagccctagcagcctgtctgccagcgtgggagacagagtgaccatcacatgcaaggccagcgaccacatcaacaactggctggcctggtatcagcagaagcctggacaggcccctaagctgctgatctacggcgctaccacactggaaacaggcgtgcccagcagattttctggcagcggctctggcaccgactacaccctgacaatatccagcctccagcctgaggacttcgccacctactactgtcagcagagctggaacaccccttggacattcggccagggcaccaagctggaaatcaagagactcgagatccagaaccctgatcctgccgtgtaccagctgcgggatagcaagagcagcgacaagagcgtgtgtctgttcaccgacttcgacagccagaccaacgtgtcccagagcaaggactccgacgtgtacatcaccgataagtgcgtgctggacatgcggagcatggacttcaagagcaactccgccgtggcctggtccaacaagtccgatttcgcctgcgccaacgccttcaacaacagcattatccccgaggacacattcttcccaagccccgagagcagctgcgacgtgaagctggtggaaaagagcttcgagacagacaccaacctgaacttccagaacctgagcgtgatcggcttcagaatcctgctgctgaaagtggccggctttaacctgctgatgaccctgcggctgtggtccagccgcgccaagagaagcggatctggcgtgaagcagaccctgaatttcgacctgctgaagctggctggcgacgtggaatccaacccaggccctactagtatggactggatttggcgcatccttttccttgtcggcgctgctaccggcgcccattccgggcccgaagttgctgccctcgagaaggaggtagcagctttggaaaaagaagtcgcagcccttgagaaagaagttgcggctctggagaagggatccggcggcggaggatctggcggaggcggatctgggggcggaggctctttcgaacaagttcagcttcaacagcctggcgctgagctggtcaaacctggcgcttctgtgaagatgagctgcaaagccagcggctacgccttcagcagctactggatcaactggatgaagcagaaacccggccagggactcgaatggatcggccaaatctatcccggcgacggcgacaccaactacaacggcaagttcaagggcagagccacactgaccgccgatacctctagcagcacagcctacatgcagctgagcagcctgaccagcgaagatagcgccgtgtacttctgtgcccggtccatcacaacagtcgtgggctgcgctatggactattggggccagggaacaagcgtgaccgtgtctagtacgcgtgaggacctgaagaacgtgttcccacctgaggtggccgtgttcgagcctagcgaggccgagatcagccacacccagaaagccaccctcgtgtgcctggctaccggcttctaccccgaccatgtggaactgtcttggtgggtcaacggcaaagaggtgcacagcggcgtgtgtaccgacccccagccactgaaagaacagcccgccctgaacgacagccggtactgcctgagcagcagactgagagtgtccgccaccttctggcagaacccccggaaccacttcagatgccaggtgcagttctacggcctgagcgagaacgacgagtggacccaggacagagccaagcccgtgacccagatcgtgtctgccgaagcctggggcagagccgattgcggctttaccagcgagagctaccagcagggcgtgctgagcgccaccatcctgtacgagatcctgctgggcaaggccaccctgtacgccgtgctggtgtctgccctggtgctgatggctatggtcaagcggaaggacagccgggga

SEQ ID NO: 4475 - DNA, 2685 bp, Artificial Sequence
  Synthetic Polynucloetide
atggccttaccagtgaccgccttgctcctgccgctggccttgctgctccacgccgccaggccggacatccagatgacacagagccctagcagcctgtctgccagcgtgggagacagagtgaccatcacatgcaaggccagcgaccacatcaacaactggctggcctggtatcagcagaagcctggacaggcccctaagctgctgatctacggcgctaccacactggaaacaggcgtgcccagcagattttctggcagcggctctggcaccgactacaccctgacaatatccagcctccagcctgaggacttcgccacctactactgtcagcagagctggaacaccccttggacattcggccagggcaccaagctggaaatcaagagactcgagatccagaaccctgatcctgccgtgtaccagctgcgggatagcaagagcagcgacaagagcgtgtgtctgttcaccgacttcgacagccagaccaacgtgtcccagagcaaggactccgacgtgtacatcaccgataagtgcgtgctggacatgcggagcatggacttcaagagcaactccgccgtggcctggtccaacaagtccgatttcgcctgcgccaacgccttcaacaacagcattatccccgaggacacattcttcccaagccccgagagcagctgcgacgtgaagctggtggaaaagagcttcgagacagacaccaacctgaacttccagaacctgagcgtgatcggcttcagaatcctgctgctgaaagtggccggctttaacctgctgatgaccctgcggctgtggtccagccgcgccaagagaagcggatctggcgtgaagcagaccctgaatttcgacctgctgaagctggctggcgacgtggaatccaacccaggccctactagtatggactggatttggcgcatccttttccttgtcggcgctgctaccggcgcccattccgggcccgaagttgctgccctcgagaaggaggtagcagctttggaaaaagaagtcgcagcccttgagaaagaagttgcggctctggagaagggatccggcggcggaggatctggcggaggcggatctgggggcggaggctctttcgaacaagttcagcttcaacagcctggcgctgagctggtcaaacctggcgcttctgtgaagatgagctgcaaagccagcggctacgccttcagcagctactggatcaactggatgaagcagaaacccggccagggactcgaatggatcggccaaatctatcccggcgacggcgacaccaactacaacggcaagttcaagggcagagccacactgaccgccgatacctctagcagcacagcctacatgcagctgagcagcctgaccagcgaagatagcgccgtgtacttctgtgcccggtccatcacaacagtcgtgggctgcgctatggactattggggccagggaacaagcgtgaccgtgtctagtacgcgtgaggacctgaagaacgtgttcccacctgaggtggccgtgttcgagcctagcgaggccgagatcagccacacccagaaagccaccctcgtgtgcctggctaccggcttctaccccgaccatgtggaactgtcttggtgggtcaacggcaaagaggtgcacagcggcgtgtgtaccgacccccagccactgaaagaacagcccgccctgaacgacagccggtactgcctgagcagcagactgagagtgtccgccaccttctggcagaacccccggaaccacttcagatgccaggtgcagttctacggcctgagcgagaacgacgagtggacccaggacagagccaagcccgtgacccagatcgtgtctgccgaagcctggggcagagccgattgcggctttaccagcgagagctaccagcagggcgtgctgagcgccaccatcctgtacgagatcctgctgggcaaggccaccctgtacgccgtgctggtgtctgccctggtgctgatggctatggtcaagcggaaggacagccggggaagggccaagcgatctggatctggagcaacaaacttctcactactcaaacaagcaggtgacgtggaggagaatcccgggccttctagaggcgggatccacaccatggctacctacgaggtgctgtgcgaggtggcaagaaagctgggcaccgacgacagagaagtggtgctgttcctgctgaacgtgttcatccctcagcctacactggcccagctgatcggtgcactgagagccctgaaagaggaaggccggctgacctttcctctgctggccgaatgcctgttcagagccggaagaagggatctgctgcgggacctgctgcatctggaccccagatttctggaaagacacctggccggcaccatgagctacttcagcccttaccagctgaccgtgctgcacgttgacggcgaactgtgcgccagagatattcggagcctgatcttcctgagcaaggacaccatcggcagccggtctacccctcagacatttctgcactgggtgtactgcatggaaaacctggacctgctcggccccacagatgtggatgccctgatgtccatgctgagaagcctgagcagagtggacctccagagacaggtgcagacactgatgggactgcacctgagcggacctagccacagccagcactacagacacacccct

SEQ ID NO: 4476 - DNA, 2709 bp, Artificial Sequence
  Synthetic Polynucloetide
atggccttaccagtgaccgccttgctcctgccgctggccttgctgctccacgccgccaggccggacatccagatgacacagagccctagcagcctgtctgccagcgtgggagacagagtgaccatcacatgcaaggccagcgaccacatcaacaactggctggcctggtatcagcagaagcctggacaggcccctaagctgctgatctacggcgctaccacactggaaacaggcgtgcccagcagattttctggcagcggctctggcaccgactacaccctgacaatatccagcctccagcctgaggacttcgccacctactactgtcagcagagctggaacaccccttggacattcggccagggcaccaagctggaaatcaagagactcgaggacctgaagaacgtgttcccacctgaggtggccgtgttcgagcctagcgaggccgagatcagccacacccagaaagccaccctcgtgtgcctggctaccggcttctaccccgaccatgtggaactgtcttggtgggtcaacggcaaagaggtgcacagcggcgtgtctaccgacccccagccactgaaagaacagcccgccctgaacgacagccggtactgcctgagcagcagactgagagtgtccgccaccttctggcagaacccccggaaccacttcagatgccaggtgcagttctacggcctgagcgagaacgacgagtggacccaggacagagccaagcccgtgacccagatcgtgtctgccgaagcctggggcagagccgattgcggctttaccagcgagagctaccagcagggcgtgctgagcgccaccatcctgtacgagatcctgctgggcaaggccaccctgtacgccgtgctggtgtctgccctggtgctgatggctatggtcaagcggaaggacagccggggaagggccaagcgatctggatctggagcaacaaacttctcactactcaaacaagcaggtgacgtggaggagaatcccgggcctactagtatggactggatttggcgcatccttttccttgtcggcgctgctaccggcgcccattccgggcccgaagttgctgccctcgagaaggaggtagcagctttggaaaaagaagtcgcagcccttgagaaagaagttgcggctctggagaagggatccggcggcggaggatctggcggaggcggatctgggggcggaggctctttcgaacaagttcagcttcaacagcctggcgctgagctggtcaaacctggcgcttctgtgaagatgagctgcaaagccagcggctacgccttcagcagctactggatcaactggatgaagcagaaacccggccagggactcgaatggatcggccaaatctatcccggcgacggcgacaccaactacaacggcaagttcaagggcagagccacactgaccgccgatacctctagcagcacagcctacatgcagctgagcagcctgaccagcgaagatagcgccgtgtacttctgtgcccggtccatcacaacagtcgtgggctgcgctatggactattggggccagggaacaagcgtgaccgtgtctagtacgcgtatccagaaccctgatcctgccgtgtaccagctgcgggatagcaagagcagcgacaagagcgtgtgtctgttcaccgacttcgacagccagaccaacgtgtcccagagcaaggactccgacgtgtacatcaccgataagaccgtgctggacatgcggagcatggacttcaagagcaactccgccgtggcctggtccaacaagtccgatttcgcctgcgccaacgccttcaacaacagcattatccccgaggacacattcttcccaagccccgagagcagctgcgacgtgaagctggtggaaaagagcttcgagacagacaccaacctgaacttccagaacctgagcgtgatcggcttcagaatcctgctgctgaaagtggccggctttaacctgctgatgaccctgcggctgtggtccagccgcgccaagagaagcggatctggcgtgaagcagaccctgaatttcgacctgctgaagctggctggcgacgtggaatccaacccaggcccttctagaggccatatgaccgagtacaagcccacggtgcgcctcgccacccgcgacgacgtccccagggccgtacgcaccctcgccgccgcgttcgccgactaccccgccacgcgccacaccgtcgatccggaccgccacatcgagcgggtcaccgagctgcaagaactcttcctcacgcgcgtcgggctcgacatcggcaaggtgtgggtcgcggacgacggcgccgcggtggcggtctggaccacgccggagagcgtcgaagcgggggcggtgttcgccgagatcggcccgcgcatggccgagttgagcggttcccggctggccgcgcagcaacagatggaaggcctcctggcgccgcaccggcccaaggagcccgcgtggttcctggccaccgtcggcgtctcgcccgaccaccagggcaagggtctgggcagcgccgtcgtgctccccggagtggaggcggccgagcgcgccggggtgcccgccttcctggagacctccgcgccccgcaacctccccttctacgagcggctcggcttcaccgtcaccgccgacgtcgaggtgcccgaaggaccgcgcacctggtgcatgacccgcaagcccggtgcctga

SEQ ID NO: 4477 - DNA, 2955 bp, Artificial Sequence
  Synthetic Polynucloetide
atggccttaccagtgaccgccttgctcctgccgctggccttgctgctccacgccgccaggccggacatccagatgacacagagccctagcagcctgtctgccagcgtgggagacagagtgaccatcacatgcaaggccagcgaccacatcaacaactggctggcctggtatcagcagaagcctggacaggcccctaagctgctgatctacggcgctaccacactggaaacaggcgtgcccagcagattttctggcagcggctctggcaccgactacaccctgacaatatccagcctccagcctgaggacttcgccacctactactgtcagcagagctggaacaccccttggacattcggccagggcaccaagctggaaatcaagagactcgaggacctgaagaacgtgttcccacctgaggtggccgtgttcgagcctagcgaggccgagatcagccacacccagaaagccaccctcgtgtgcctggctaccggcttctaccccgaccatgtggaactgtcttggtgggtcaacggcaaagaggtgcacagcggcgtgtctaccgacccccagccactgaaagaacagcccgccctgaacgacagccggtactgcctgagcagcagactgagagtgtccgccaccttctggcagaacccccggaaccacttcagatgccaggtgcagttctacggcctgagcgagaacgacgagtggacccaggacagagccaagcccgtgacccagatcgtgtctgccgaagcctggggcagagccgattgcggctttaccagcgagagctaccagcagggcgtgctgagcgccaccatcctgtacgagatcctgctgggcaaggccaccctgtacgccgtgctggtgtctgccctggtgctgatggctatggtcaagcggaaggacagccggggaagggccaagcgatctggatctggagcaacaaacttctcactactcaaacaagcaggtgacgtggaggagaatcccgggcctactagtatggactggatttggcgcatccttttccttgtcggcgctgctaccggcgcccattccgggcccgaagttgctgccctcgagaaggaggtagcagctttggaaaaagaagtcgcagcccttgagaaagaagttgcggctctggagaagggatccggcggcggaggatctggcggaggcggatctgggggcggaggctctttcgaacaagttcagcttcaacagcctggcgctgagctggtcaaacctggcgcttctgtgaagatgagctgcaaagccagcggctacgccttcagcagctactggatcaactggatgaagcagaaacccggccagggactcgaatggatcggccaaatctatcccggcgacggcgacaccaactacaacggcaagttcaagggcagagccacactgaccgccgatacctctagcagcacagcctacatgcagctgagcagcctgaccagcgaagatagcgccgtgtacttctgtgcccggtccatcacaacagtcgtgggctgcgctatggactattggggccagggaacaagcgtgaccgtgtctagtacgcgtgagcagaaactgatctcggaagaggatgggagcggcaccccattcccttctctggcccctcccatcatgctgctggtggacggcaagcagcagatggtggtcgtgtgcctggtgctggatgtggccccacctggactggacagccccatctggtttagcgccggcaatggctctgccctggacgcctttacctacggcccaagccctgccaccgatggcacctggacaaatctggcccacctgagcctgcccagcgaggaactggcttcttgggagcctctcgtgtgccacacaggacctggcgctgagggacacagcagatccacccagcctatgcacctgtctggcgaggccagcaccgccagaacctgtcctcaggaacctctgagaggcacccctggcggagcactgtggctgggagtgctgagactgctgctgttcaagctgctgctgtttgacctgctgctgacctgctcctgtctgtgcgatcctgccggccctctgccttctcctgccaccaccacaagactgagagccctgggcagccacagactgcaccctgccacagagacaggcggcagagaggccacaagcagccctagaccccagcccagagacagaagatggggcgataccccccctggcagaaagcctggatctccagtccgcgccaagagaagcggatctggcgtgaagcagaccctgaatttcgacctgctgaagctggctggcgacgtggaatccaacccaggcccttctagaggccatatgaccgagtacaagcccacggtgcgcctcgccacccgcgacgacgtccccagggccgtacgcaccctcgccgccgcgttcgccgactaccccgccacgcgccacaccgtcgatccggaccgccacatcgagcgggtcaccgagctgcaagaactcttcctcacgcgcgtcgggctcgacatcggcaaggtgtgggtcgcggacgacggcgccgcggtggcggtctggaccacgccggagagcgtcgaagcgggggcggtgttcgccgagatcggcccgcgcatggccgagttgagcggttcccggctggccgcgcagcaacagatggaaggcctcctggcgccgcaccggcccaaggagcccgcgtggttcctggccaccgtcggcgtctcgcccgaccaccagggcaagggtctgggcagcgccgtcgtgctccccggagtggaggcggccgagcgcgccggggtgcccgccttcctggagacctccgcgccccgcaacctccccttctacgagcggctcggcttcaccgtcaccgccgacgtcgaggtgcccgaaggaccgcgcacctggtgcatgacccgcaagcccggtgcctga

SEQ ID NO: 4478 - DNA, 2820 bp, Artificial Sequence
  Synthetic Polynucloetide
atggccttaccagtgaccgccttgctcctgccgctggccttgctgctccacgccgccaggccggacatccagatgacacagagccctagcagcctgtctgccagcgtgggagacagagtgaccatcacatgcaaggccagcgaccacatcaacaactggctggcctggtatcagcagaagcctggacaggcccctaagctgctgatctacggcgctaccacactggaaacaggcgtgcccagcagattttctggcagcggctctggcaccgactacaccctgacaatatccagcctccagcctgaggacttcgccacctactactgtcagcagagctggaacaccccttggacattcggccagggcaccaagctggaaatcaagagactcgaggggaaaccaattcccaaccctcttctgggactggattcaaccggcagcggcgacaagcagctggacgccgacgtgtcccccaagcctaccatcttcctgccctctatcgccgagacaaagctccagaaggccggcacctacctgtgcctgctggaaaagttcttcccagatgtgattaagatccactggcaggaaaagaagtccaacaccatcctgggcagccaggaaggcaacaccatgaagaccaacgacacctacatgaagttcagctggctgaccgtgcccgagaagtccctggacaaagaacacagatgcatcgtgcggcacgaaaacaacaagaacggcgtggaccaggaaatcatcttcccacccatcaagaccgatgtgattacaatggaccccaaggacaactgctccaaggacgccaacgataccctgctgctccagctgaccaacaccagcgcctactacatgtacttgttgctgctgctgaagtccgtggtgtacttcgccatcatcacatgctgcctgctgcggagaaccgccttctgctgcaacggcgagaagtctagggccaagcgatctggatctggagcaacaaacttctcactactcaaacaagcaggtgacgtggaggagaatcccgggcctactagtatggactggatttggcgcatccttttccttgtcggcgctgctaccggcgcccattccgggcccgaagttgctgccctcgagaaggaggtagcagctttggaaaaagaagtcgcagcccttgagaaagaagttgcggctctggagaagggatccggcggcggaggatctggcggaggcggatctgggggcggaggctctttcgaacaagttcagcttcaacagcctggcgctgagctggtcaaacctggcgcttctgtgaagatgagctgcaaagccagcggctacgccttcagcagctactggatcaactggatgaagcagaaacccggccagggactcgaatggatcggccaaatctatcccggcgacggcgacaccaactacaacggcaagttcaagggcagagccacactgaccgccgatacctctagcagcacagcctacatgcagctgagcagcctgaccagcgaagatagcgccgtgtacttctgtgcccggtccatcacaacagtcgtgggctgcgctatggactattggggccagggaacaagcgtgaccgtgtctagtacgcgtgagcagaaactgatctcggaagaggatgggagcggcagccagcctcacaccaagcccagcgtgttcgtgatgaagaacggcaccaacgtggcctgcctcgtgaaagagttctaccccaaggacatcaggatcaacctggtgtccagcaagaagatcaccgagttcgaccccgccatcgtgatctcccccagcggcaagtacaacgccgtgaagctggggaagtacgaggacagcaacagcgtgacctgctccgtgcagcacgacaacaagaccgtgcacagcaccgactttgaagtgaaaaccgactccaccgaccacgtgaagcccaaagagacagagaacaccaagcagcccagcaagagctgccacaagcccaaggccatcgtgcacaccgagaaagtgaacatgatgagcctgaccgtgctgggcctgcggatgctgttcgccaaaaccgtggccgtgaacttcctgctgaccgccaagctgttcttcctccgcgccaagagaagcggatctggcgtgaagcagaccctgaatttcgacctgctgaagctggctggcgacgtggaatccaacccaggcccttctagaggccatatgaccgagtacaagcccacggtgcgcctcgccacccgcgacgacgtccccagggccgtacgcaccctcgccgccgcgttcgccgactaccccgccacgcgccacaccgtcgatccggaccgccacatcgagcgggtcaccgagctgcaagaactcttcctcacgcgcgtcgggctcgacatcggcaaggtgtgggtcgcggacgacggcgccgcggtggcggtctggaccacgccggagagcgtcgaagcgggggcggtgttcgccgagatcggcccgcgcatggccgagttgagcggttcccggctggccgcgcagcaacagatggaaggcctcctggcgccgcaccggcccaaggagcccgcgtggttcctggccaccgtcggcgtctcgcccgaccaccagggcaagggtctgggcagcgccgtcgtgctccccggagtggaggcggccgagcgcgccggggtgcccgccttcctggagacctccgcgccccgcaacctccccttctacgagcggctcggcttcaccgtcaccgccgacgtcgaggtgcccgaaggaccgcgcacctggtgcatgacccgcaagcccggtgcctga

SEQ ID NO: 4479 - DNA, 2031 bp, Artificial Sequence
  Synthetic Polynucloetide
atggccttaccagtgaccgccttgctcctgccgctggccttgctgctccacgccgccaggccggacatccagatgacacagagccctagcagcctgtctgccagcgtgggagacagagtgaccatcacatgcaaggccagcgaccacatcaacaactggctggcctggtatcagcagaagcctggacaggcccctaagctgctgatctacggcgctaccacactggaaacaggcgtgcccagcagattttctggcagcggctctggcaccgactacaccctgacaatatccagcctccagcctgaggacttcgccacctactactgtcagcagagctggaacaccccttggacattcggccagggcaccaagctggaaatcaagagactcgagagccagcctcacaccaagcccagcgtgttcgtgatgaagaacggcaccaacgtggcctgcctcgtgaaagagttctaccccaaggacatcaggatcaacctggtgtccagcaagaagatcaccgagttcgaccccgccatcgtgatctcccccagcggcaagtacaacgccgtgaagctggggaagtacgaggacagcaacagcgtgacctgctccgtgcagcacgacaacaagaccgtgcacagcaccgactttgaagtgaaaaccgactccaccgaccacgtgaagcccaaagagacagagaacaccaagcagcccagcaagagctgccacaagcccaaggccatcgtgcacaccgagaaagtgaacatgatgagcctgaccgtgctgggcctgcggatgctgttcgccaaaaccgtggccgtgaacttcctgctgaccgccaagctgttcttcctcagggccaagcgatctggatctggagcaacaaacttctcactactcaaacaagcaggtgacgtggaggagaatcccgggcctactagtatggactggatttggcgcatccttttccttgtcggcgctgctaccggcgcccattccgggcccgaagttgctgccctcgagaaggaggtagcagctttggaaaaagaagtcgcagcccttgagaaagaagttgcggctctggagaagggatccggcggcggaggatctggcggaggcggatctgggggcggaggctctttcgaacaagttcagcttcaacagcctggcgctgagctggtcaaacctggcgcttctgtgaagatgagctgcaaagccagcggctacgccttcagcagctactggatcaactggatgaagcagaaacccggccagggactcgaatggatcggccaaatctatcccggcgacggcgacaccaactacaacggcaagttcaagggcagagccacactgaccgccgatacctctagcagcacagcctacatgcagctgagcagcctgaccagcgaagatagcgccgtgtacttctgtgcccggtccatcacaacagtcgtgggctgcgctatggactattggggccagggaacaagcgtgaccgtgtctagtacgcgtgacaagcagctggacgccgacgtgtcccccaagcctaccatcttcctgccctctatcgccgagacaaagctccagaaggccggcacctacctgtgcctgctggaaaagttcttcccagatgtgattaagatccactggcaggaaaagaagtccaacaccatcctgggcagccaggaaggcaacaccatgaagaccaacgacacctacatgaagttcagctggctgaccgtgcccgagaagtccctggacaaagaacacagatgcatcgtgcggcacgaaaacaacaagaacggcgtggaccaggaaatcatcttcccacccatcaagaccgatgtgattacaatggaccccaaggacaactgctccaaggacgccaacgataccctgctgctccagctgaccaacaccagcgcctactacatgtacttgttgctgctgctgaagtccgtggtgtacttcgccatcatcacatgctgcctgctgcggagaaccgccttctgctgcaacggcgagaagtct

SEQ ID NO: 4480 - DNA, 3240 bp, Artificial Sequence
  Synthetic Polynucloetide
atggccttaccagtgaccgccttgctcctgccgctggccttgctgctccacgccgccaggccggacatccagatgacacagagccctagcagcctgtctgccagcgtgggagacagagtgaccatcacatgcaaggccagcgaccacatcaacaactggctggcctggtatcagcagaagcctggacaggcccctaagctgctgatctacggcgctaccacactggaaacaggcgtgcccagcagattttctggcagcggctctggcaccgactacaccctgacaatatccagcctccagcctgaggacttcgccacctactactgtcagcagagctggaacaccccttggacattcggccagggcaccaagctggaaatcaagagaggacagcctaaggccaatcctaccgtgacactgttccctccaagcagcgaagaactccaggccaacaaggccacacttgtgtgcctgatctccgacttctaccctggggctgtgacagtggcttggaaggccgatggatctcctgtgaaagccggcgtggaaaccaccaagccatccaagcagagcaacaacaaatacgccgccagctcctacctgagcctgacacctgagcagtggaagtcccacagatcctacagctgccaagtgacccacgaaggcagcaccgtggaaaagacagtggcccctacagagtgcagcggatcccagagcttcggcctgctggaccccaagctgtgctacctgctggatggcatcctgttcatctacggcgtgatcctgaccgccctgttcctgagagtgaagttcagcagaagcgccgacgcccctgcctaccagcagggacagaaccaactgtacaacgagctgaacctgggcagacgggaagagtacgacgtgctggacaagcggagaggcagggaccctgagatgggcggaaagccccagcggagaaagaacccccaggaaggactgtataacgaactccagaaagacaagatggccgaagcctacagcgagatcggcatgaagggcgagcggagaagaggcaagggccacgatggcctgtaccagggcctgagcaccgccaccaaggacacctatgacgccctgcacatgcaggccctgcctccaagaagggccaagcgatctggatctggagcaacaaacttctcactactcaaacaagcaggtgacgtggaggagaatcccgggcctactagtatggactggatttggcgcatccttttccttgtcggcgctgctaccggcgcccattccgggcccgaagttgctgccctcgagaaggaggtagcagctttggaaaaagaagtcgcagcccttgagaaagaagttgcggctctggagaagggatccggcggcggaggatctggcggaggcggatctgggggcggaggctctttcgaacaagttcagcttcaacagcctggcgctgagctggtcaaacctggcgcttctgtgaagatgagctgcaaagccagcggctacgccttcagcagctactggatcaactggatgaagcagaaacccggccagggactcgaatggatcggccaaatctatcccggcgacggcgacaccaactacaacggcaagttcaagggcagagccacactgaccgccgatacctctagcagcacagcctacatgcagctgagcagcctgaccagcgaagatagcgccgtgtacttctgtgcccggtccatcacaacagtcgtgggctgcgctatggactattggggccagggaacaagcgtgaccgtgtctagtgcctctacaaagggaccctccgtgtttcctctggctcccagcagcaagtctacaagcggaggaacagccgctctgggctgcctggtcaaggattactttcccgagcctgtgaccgtgtcctggaatagcggagcactgacaagcggcgtgcacacctttccagccgtgctgcaaagcagcggcctgtactctctgagcagcgtggtcacagtgcctagctctagcctgggcacccagacctacatctgcaatgtgaaccacaagcctagcaacaccaaggtggacaagagagtggaacccaagagctgtggtacccagagttttgggttgttggaccctaaattgtgctatctgttggacggaatcctgttcatttacggagtgatcctgaccgcattgttcctgcgggttaagttttccagatccgcagacgcacccgcttaccaacaagggcagaaccaactctacaatgaacttaatttggggcggagggaagagtacgacgttctggacaaaaggaggggacgagatcccgagatgggcggaaagcctcagcgaaggaagaatccgcaagaggggctttataacgaactccagaaagataaaatggcagaagcctatagtgagattgggatgaagggagaaaggaggaggggtaaaggtcacgatgggttgtaccaaggattgagcacagccactaaagatacctatgatgcgctccacatgcaggccctgccgccaagacgcgccaagagaagcggatctggcgtgaagcagaccctgaatttcgacctgctgaagctggctggcgacgtggaatccaacccaggcccttctagaggccatatgaccgagtacaagcccacggtgcgcctcgccacccgcgacgacgtccccagggccgtacgcaccctcgccgccgcgttcgccgactaccccgccacgcgccacaccgtcgatccggaccgccacatcgagcgggtcaccgagctgcaagaactcttcctcacgcgcgtcgggctcgacatcggcaaggtgtgggtcgcggacgacggcgccgcggtggcggtctggaccacgccggagagcgtcgaagcgggggcggtgttcgccgagatcggcccgcgcatggccgagttgagcggttcccggctggccgcgcagcaacagatggaaggcctcctggcgccgcaccggcccaaggagcccgcgtggttcctggccaccgtcggcgtctcgcccgaccaccagggcaagggtctgggcagcgccgtcgtgctccccggagtggaggcggccgagcgcgccggggtgcccgccttcctggagacctccgcgccccgcaacctccccttctacgagcggctcggcttcaccgtcaccgccgacgtcgaggtgcccgaaggaccgcgcacctggtgcatgacccgcaagcccggtgcctga

SEQ ID NO: 4481 - DNA, 2595 bp, Artificial Sequence
  Synthetic Polynucloetide
atggccttaccagtgaccgccttgctcctgccgctggccttgctgctccacgccgccaggccggacatccagatgacacagagccctagcagcctgtctgccagcgtgggagacagagtgaccatcacatgcaaggccagcgaccacatcaacaactggctggcctggtatcagcagaagcctggacaggcccctaagctgctgatctacggcgctaccacactggaaacaggcgtgcccagcagattttctggcagcggctctggcaccgactacaccctgacaatatccagcctccagcctgaggacttcgccacctactactgtcagcagagctggaacaccccttggacattcggccagggcaccaagctggaaatcaagagactcgaggacctgaagaacgtgttcccacctgaggtggccgtgttcgagcctagcgaggccgagatcagccacacccagaaagccaccctcgtgtgcctggctaccggcttctaccccgaccatgtggaactgtcttggtgggtcaacggcaaagaggtgcacagcggcgtgtctaccgacccccagccactgaaagaacagcccgccctgaacgacagccggtactgcctgagcagcagactgagagtgtccgccaccttctggcagaacccccggaaccacttcagatgccaggtgcagttctacggcctgagcgagaacgacgagtggacccaggacagagccaagcccgtgacccagatcgtgtctgccgaagcctggggcagagccgattgcggatcccagagcttcggcctgctggaccccaagctgtgctacctgctggatggcatcctgttcatctacggcgtgatcctgaccgccctgttcctgagagtgaagttcagcagaagcgccgacgcccctgcctaccagcagggacagaaccaactgtacaacgagctgaacctgggcagacgggaagagtacgacgtgctggacaagcggagaggcagggaccctgagatgggcggaaagccccagcggagaaagaacccccaggaaggactgtataacgaactccagaaagacaagatggccgaagcctacagcgagatcggcatgaagggcgagcggagaagaggcaagggccacgatggcctgtaccagggcctgagcaccgccaccaaggacacctatgacgccctgcacatgcaggccctgcctccaagaagggccaagcgatctggatctggagcaacaaacttctcactactcaaacaagcaggtgacgtggaggagaatcccgggcctactagtatggactggatttggcgcatccttttccttgtcggcgctgctaccggcgcccattccgggcccgaagttgctgccctcgagaaggaggtagcagctttggaaaaagaagtcgcagcccttgagaaagaagttgcggctctggagaagggatccggcggcggaggatctggcggaggcggatctgggggcggaggctctttcgaacaagttcagcttcaacagcctggcgctgagctggtcaaacctggcgcttctgtgaagatgagctgcaaagccagcggctacgccttcagcagctactggatcaactggatgaagcagaaacccggccagggactcgaatggatcggccaaatctatcccggcgacggcgacaccaactacaacggcaagttcaagggcagagccacactgaccgccgatacctctagcagcacagcctacatgcagctgagcagcctgaccagcgaagatagcgccgtgtacttctgtgcccggtccatcacaacagtcgtgggctgcgctatggactattggggccagggaacaagcgtgaccgtgtctagtacgcgtatccagaaccctgatcctgccgtgtaccagctgcgggatagcaagagcagcgacaagagcgtgtgtctgttcaccgacttcgacagccagaccaacgtgtcccagagcaaggactccgacgtgtacatcaccgataagaccgtgctggacatgcggagcatggacttcaagagcaactccgccgtggcctggtccaacaagtccgatttcgcctgcgccaacgccttcaacaacagcattatccccgaggacacattcttcccaagccccgagagcagctgcggtacccagagttttgggttgttggaccctaaattgtgctatctgttggacggaatcctgttcatttacggagtgatcctgaccgcattgttcctgcgggttaagttttccagatccgcagacgcacccgcttaccaacaagggcagaaccaactctacaatgaacttaatttggggcggagggaagagtacgacgttctggacaaaaggaggggacgagatcccgagatgggcggaaagcctcagcgaaggaagaatccgcaagaggggctttataacgaactccagaaagataaaatggcagaagcctatagtgagattgggatgaagggagaaaggaggaggggtaaaggtcacgatgggttgtaccaaggattgagcacagccactaaagatacctatgatgcgctccacatgcaggccctgccgccaaga

SEQ ID NO: 4482 - DNA, 2595 bp, Artificial Sequence
  Synthetic Polynucloetide
atggccttaccagtgaccgccttgctcctgccgctggccttgctgctccacgccgccaggccggacatccagatgacacagagccctagcagcctgtctgccagcgtgggagacagagtgaccatcacatgcaaggccagcgaccacatcaacaactggctggcctggtatcagcagaagcctggacaggcccctaagctgctgatctacggcgctaccacactggaaacaggcgtgcccagcagattttctggcagcggctctggcaccgactacaccctgacaatatccagcctccagcctgaggacttcgccacctactactgtcagcagagctggaacaccccttggacattcggccagggcaccaagctggaaatcaagagactcgaggacctgaagaacgtgttcccacctgaggtggccgtgttcgagcctagcaaggccgagatcgcccacacccagaaagccaccctcgtgtgcctggctaccggcttctaccccgaccatgtggaactgtcttggtgggtcaacggcaaagaggtgcacagcggcgtgtgtaccgacccccagccactgaaagaacagcccgccctgaacgacagccggtactgcctgagcagcagactgagagtgtccgccaccttctggcagaacccccggaaccacttcagatgccaggtgcagttctacggcctgagcgagaacgacgagtggacccaggacagagccaagcccgtgacccagatcgtgtctgccgaagcctggggcagagccgattgcggatcccagagcttcggcctgctggaccccaagctgtgctacctgctggatggcatcctgttcatctacggcgtgatcctgaccgccctgttcctgagagtgaagttcagcagaagcgccgacgcccctgcctaccagcagggacagaaccaactgtacaacgagctgaacctgggcagacgggaagagtacgacgtgctggacaagcggagaggcagggaccctgagatgggcggaaagccccagcggagaaagaacccccaggaaggactgtataacgaactccagaaagacaagatggccgaagcctacagcgagatcggcatgaagggcgagcggagaagaggcaagggccacgatggcctgtaccagggcctgagcaccgccaccaaggacacctatgacgccctgcacatgcaggccctgcctccaagaagggccaagcgatctggatctggagcaacaaacttctcactactcaaacaagcaggtgacgtggaggagaatcccgggcctactagtatggactggatttggcgcatccttttccttgtcggcgctgctaccggcgcccattccgggcccgaagttgctgccctcgagaaggaggtagcagctttggaaaaagaagtcgcagcccttgagaaagaagttgcggctctggagaagggatccggcggcggaggatctggcggaggcggatctgggggcggaggctctttcgaacaagttcagcttcaacagcctggcgctgagctggtcaaacctggcgcttctgtgaagatgagctgcaaagccagcggctacgccttcagcagctactggatcaactggatgaagcagaaacccggccagggactcgaatggatcggccaaatctatcccggcgacggcgacaccaactacaacggcaagttcaagggcagagccacactgaccgccgatacctctagcagcacagcctacatgcagctgagcagcctgaccagcgaagatagcgccgtgtacttctgtgcccggtccatcacaacagtcgtgggctgcgctatggactattggggccagggaacaagcgtgaccgtgtctagtacgcgtatccagaaccctgatcctgccgtgtaccagctgcgggatagcaagagcagcgacaagagcgtgtgtctgttcaccgacttcgacagccagaccaacgtgtcccagagcaaggactccgacgtgtacatcaccgataagtgcgtgctggacatgcggagcatggacttcaagagcaactccgccgtggcctggtccaacaagtccgatttcgcctgcgccaacgccttcaacaacagcattatccccgaggacacattcttcccaagcagcgacgtgccctgcggtacccagagttttgggttgttggaccctaaattgtgctatctgttggacggaatcctgttcatttacggagtgatcctgaccgcattgttcctgcgggttaagttttccagatccgcagacgcacccgcttaccaacaagggcagaaccaactctacaatgaacttaatttggggcggagggaagagtacgacgttctggacaaaaggaggggacgagatcccgagatgggcggaaagcctcagcgaaggaagaatccgcaagaggggctttataacgaactccagaaagataaaatggcagaagcctatagtgagattgggatgaagggagaaaggaggaggggtaaaggtcacgatgggttgtaccaaggattgagcacagccactaaagatacctatgatgcgctccacatgcaggccctgccgccaaga

SEQ ID NO: 4483 - DNA, 2808 bp, Artificial Sequence
  Synthetic Polynucloetide
atggccttaccagtgaccgccttgctcctgccgctggccttgctgctccacgccgccaggccggacatccagatgacacagagccctagcagcctgtctgccagcgtgggagacagagtgaccatcacatgcaaggccagcgaccacatcaacaactggctggcctggtatcagcagaagcctggacaggcccctaagctgctgatctacggcgctaccacactggaaacaggcgtgcccagcagattttctggcagcggctctggcaccgactacaccctgacaatatccagcctccagcctgaggacttcgccacctactactgtcagcagagctggaacaccccttggacattcggccagggcaccaagctggaaatcaagagactcgaggggaaaccaattcccaaccctcttctgggactggattcaaccggcagcggcgaggacctgaagaacgtgttcccacctgaggtggccgtgttcgagcctagcgaggccgagatcagccacacccagaaagccaccctcgtgtgcctggctaccggcttctaccccgaccatgtggaactgtcttggtgggtcaacggcaaagaggtgcacagcggcgtgtctaccgacccccagccactgaaagaacagcccgccctgaacgacagccggtactgcctgagcagcagactgagagtgtccgccaccttctggcagaacccccggaaccacttcagatgccaggtgcagttctacggcctgagcgagaacgacgagtggacccaggacagagccaagcccgtgacccagatcgtgtctgccgaagcctggggcagagccgattgcggatcccagagcttcggcctgctggaccccaagctgtgctacctgctggatggcatcctgttcatctacggcgtgatcctgaccgccctgttcctgagagtgaagttcagcagaagcgccgacgcccctgcctaccagcagggacagaaccaactgtacaacgagctgaacctgggcagacgggaagagtacgacgtgctggacaagcggagaggcagggaccctgagatgggcggaaagccccagcggagaaagaacccccaggaaggactgtataacgaactccagaaagacaagatggccgaagcctacagcgagatcggcatgaagggcgagcggagaagaggcaagggccacgatggcctgtaccagggcctgagcaccgccaccaaggacacctatgacgccctgcacatgcaggccctgcctccaagaagggccaagcgatctggatctggagcaacaaacttctcactactcaaacaagcaggtgacgtggaggagaatcccgggcctactagtatggactggatttggcgcatccttttccttgtcggcgctgctaccggcgcccattccgggcccgaagttgctgccctcgagaaggaggtagcagctttggaaaaagaagtcgcagcccttgagaaagaagttgcggctctggagaagggatccggcggcggaggatctggcggaggcggatctgggggcggaggctctttcgaacaagttcagcttcaacagcctggcgctgagctggtcaaacctggcgcttctgtgaagatgagctgcaaagccagcggctacgccttcagcagctactggatcaactggatgaagcagaaacccggccagggactcgaatggatcggccaaatctatcccggcgacggcgacaccaactacaacggcaagttcaagggcagagccacactgaccgccgatacctctagcagcacagcctacatgcagctgagcagcctgaccagcgaagatagcgccgtgtacttctgtgcccggtccatcacaacagtcgtgggctgcgctatggactattggggccagggaacaagcgtgaccgtgtctagtacgcgtgagcagaaactgatctcggaagaggatgggagcggcatccagaaccctgatcctgccgtgtaccagctgcgggatagcaagagcagcgacaagagcgtgtgtctgttcaccgacttcgacagccagaccaacgtgtcccagagcaaggactccgacgtgtacatcaccgataagaccgtgctggacatgcggagcatggacttcaagagcaactccgccgtggcctggtccaacaagtccgatttcgcctgcgccaacgccttcaacaacagcattatccccgaggacacattcttcccaagccccgagagcagctgcggtacccagagttttgggttgttggaccctaaattgtgctatctgttggacggaatcctgttcatttacggagtgatcctgaccgcattgttcctgaggagcaagcggtcacggctgctccacagcgattacatgaatatgacaccacgaagaccgggtcctactcgcaaacactaccaaccctacgcacctccccgcgactttgcagcgtaccgatctcgggttaagttttccagatccgcagacgcacccgcttaccaacaagggcagaaccaactctacaatgaacttaatttggggcggagggaagagtacgacgttctggacaaaaggaggggacgagatcccgagatgggcggaaagcctcagcgaaggaagaatccgcaagaggggctttataacgaactccagaaagataaaatggcagaagcctatagtgagattgggatgaagggagaaaggaggaggggtaaaggtcacgatgggttgtaccaaggattgagcacagccactaaagatacctatgatgcgctccacatgcaggccctgccgccaaga

SEQ ID NO: 4484 - DNA, 2931 bp, Artificial Sequence
  Synthetic Polynucloetide
atggccttaccagtgaccgccttgctcctgccgctggccttgctgctccacgccgccaggccggacatccagatgacacagagccctagcagcctgtctgccagcgtgggagacagagtgaccatcacatgcaaggccagcgaccacatcaacaactggctggcctggtatcagcagaagcctggacaggcccctaagctgctgatctacggcgctaccacactggaaacaggcgtgcccagcagattttctggcagcggctctggcaccgactacaccctgacaatatccagcctccagcctgaggacttcgccacctactactgtcagcagagctggaacaccccttggacattcggccagggcaccaagctggaaatcaagagactcgaggggaaaccaattcccaaccctcttctgggactggattcaaccggcagcggcgaggacctgaagaacgtgttcccacctgaggtggccgtgttcgagcctagcgaggccgagatcagccacacccagaaagccaccctcgtgtgcctggctaccggcttctaccccgaccatgtggaactgtcttggtgggtcaacggcaaagaggtgcacagcggcgtgtctaccgacccccagccactgaaagaacagcccgccctgaacgacagccggtactgcctgagcagcagactgagagtgtccgccaccttctggcagaacccccggaaccacttcagatgccaggtgcagttctacggcctgagcgagaacgacgagtggacccaggacagagccaagcccgtgacccagatcgtgtctgccgaagcctggggcagagccgattgcggatcccagagcttcggcctgctggaccccaagctgtgctacctgctggatggcatcctgttcatctacggcgtgatcctgaccgccctgttcctgaggagtaagaggagcaggctcctgcacagtgactacatgaacatgactccacgccgccccggacccacccgcaagcattaccagccctatgccccaccacgcgacttcgcagcctatcgctccagagtgaagttcagcagaagcgccgacgcccctgcctaccagcagggacagaaccaactgtacaacgagctgaacctgggcagacgggaagagtacgacgtgctggacaagcggagaggcagggaccctgagatgggcggaaagccccagcggagaaagaacccccaggaaggactgtataacgaactccagaaagacaagatggccgaagcctacagcgagatcggcatgaagggcgagcggagaagaggcaagggccacgatggcctgtaccagggcctgagcaccgccaccaaggacacctatgacgccctgcacatgcaggccctgcctccaagaagggccaagcgatctggatctggagcaacaaacttctcactactcaaacaagcaggtgacgtggaggagaatcccgggcctactagtatggactggatttggcgcatccttttccttgtcggcgctgctaccggcgcccattccgggcccgaagttgctgccctcgagaaggaggtagcagctttggaaaaagaagtcgcagcccttgagaaagaagttgcggctctggagaagggatccggcggcggaggatctggcggaggcggatctgggggcggaggctctttcgaacaagttcagcttcaacagcctggcgctgagctggtcaaacctggcgcttctgtgaagatgagctgcaaagccagcggctacgccttcagcagctactggatcaactggatgaagcagaaacccggccagggactcgaatggatcggccaaatctatcccggcgacggcgacaccaactacaacggcaagttcaagggcagagccacactgaccgccgatacctctagcagcacagcctacatgcagctgagcagcctgaccagcgaagatagcgccgtgtacttctgtgcccggtccatcacaacagtcgtgggctgcgctatggactattggggccagggaacaagcgtgaccgtgtctagtacgcgtgagcagaaactgatctcggaagaggatgggagcggcatccagaaccctgatcctgccgtgtaccagctgcgggatagcaagagcagcgacaagagcgtgtgtctgttcaccgacttcgacagccagaccaacgtgtcccagagcaaggactccgacgtgtacatcaccgataagaccgtgctggacatgcggagcatggacttcaagagcaactccgccgtggcctggtccaacaagtccgatttcgcctgcgccaacgccttcaacaacagcattatccccgaggacacattcttcccaagccccgagagcagctgcggtacccagagttttgggttgttggaccctaaattgtgctatctgttggacggaatcctgttcatttacggagtgatcctgaccgcattgttcctgaggagcaagcggtcacggctgctccacagcgattacatgaatatgacaccacgaagaccgggtcctactcgcaaacactaccaaccctacgcacctccccgcgactttgcagcgtaccgatctcgggttaagttttccagatccgcagacgcacccgcttaccaacaagggcagaaccaactctacaatgaacttaatttggggcggagggaagagtacgacgttctggacaaaaggaggggacgagatcccgagatgggcggaaagcctcagcgaaggaagaatccgcaagaggggctttataacgaactccagaaagataaaatggcagaagcctatagtgagattgggatgaagggagaaaggaggaggggtaaaggtcacgatgggttgtaccaaggattgagcacagccactaaagatacctatgatgcgctccacatgcaggccctgccgccaaga

SEQ ID NO: 4485 - DNA, 2814 bp, Artificial Sequence
  Synthetic Polynucloetide
atggccttaccagtgaccgccttgctcctgccgctggccttgctgctccacgccgccaggccggacatccagatgacacagagccctagcagcctgtctgccagcgtgggagacagagtgaccatcacatgcaaggccagcgaccacatcaacaactggctggcctggtatcagcagaagcctggacaggcccctaagctgctgatctacggcgctaccacactggaaacaggcgtgcccagcagattttctggcagcggctctggcaccgactacaccctgacaatatccagcctccagcctgaggacttcgccacctactactgtcagcagagctggaacaccccttggacattcggccagggcaccaagctggaaatcaagagactcgaggggaaaccaattcccaaccctcttctgggactggattcaaccggcagcggcgaggacctgaagaacgtgttcccacctgaggtggccgtgttcgagcctagcgaggccgagatcagccacacccagaaagccaccctcgtgtgcctggctaccggcttctaccccgaccatgtggaactgtcttggtgggtcaacggcaaagaggtgcacagcggcgtgtctaccgacccccagccactgaaagaacagcccgccctgaacgacagccggtactgcctgagcagcagactgagagtgtccgccaccttctggcagaacccccggaaccacttcagatgccaggtgcagttctacggcctgagcgagaacgacgagtggacccaggacagagccaagcccgtgacccagatcgtgtctgccgaagcctggggcagagccgattgcggatcccagagcttcggcctgctggaccccaagctgtgctacctgctggatggcatcctgttcatctacggcgtgatcctgaccgccctgttcctgagagtgaagttcagcagaagcgccgacgcccctgcctaccagcagggacagaaccaactgtacaacgagctgaacctgggcagacgggaagagtacgacgtgctggacaagcggagaggcagggaccctgagatgggcggaaagccccagcggagaaagaacccccaggaaggactgtataacgaactccagaaagacaagatggccgaagcctacagcgagatcggcatgaagggcgagcggagaagaggcaagggccacgatggcctgtaccagggcctgagcaccgccaccaaggacacctatgacgccctgcacatgcaggccctgcctccaagaagggccaagcgatctggatctggagcaacaaacttctcactactcaaacaagcaggtgacgtggaggagaatcccgggcctactagtatggactggatttggcgcatccttttccttgtcggcgctgctaccggcgcccattccgggcccgaagttgctgccctcgagaaggaggtagcagctttggaaaaagaagtcgcagcccttgagaaagaagttgcggctctggagaagggatccggcggcggaggatctggcggaggcggatctgggggcggaggctctttcgaacaagttcagcttcaacagcctggcgctgagctggtcaaacctggcgcttctgtgaagatgagctgcaaagccagcggctacgccttcagcagctactggatcaactggatgaagcagaaacccggccagggactcgaatggatcggccaaatctatcccggcgacggcgacaccaactacaacggcaagttcaagggcagagccacactgaccgccgatacctctagcagcacagcctacatgcagctgagcagcctgaccagcgaagatagcgccgtgtacttctgtgcccggtccatcacaacagtcgtgggctgcgctatggactattggggccagggaacaagcgtgaccgtgtctagtacgcgtgagcagaaactgatctcggaagaggatctggggagcggcatccagaaccctgatcctgccgtgtaccagctgcgggatagcaagagcagcgacaagagcgtgtgtctgttcaccgacttcgacagccagaccaacgtgtcccagagcaaggactccgacgtgtacatcaccgataagaccgtgctggacatgcggagcatggacttcaagagcaactccgccgtggcctggtccaacaagtccgatttcgcctgcgccaacgccttcaacaacagcattatccccgaggacacattcttcccaagccccgagagcagctgcggtacccagagttttgggttgttggaccctaaattgtgctatctgttggacggaatcctgttcatttacggagtgatcctgaccgcattgttcctgaagagaggccggaagaagctgctgtacatcttcaagcagcctttcatgcggcccgtgcagaccacccaggaagaggacggctgctcctgccggttccccgaggaagaagaaggcggctgcgagctgcgggttaagttttccagatccgcagacgcacccgcttaccaacaagggcagaaccaactctacaatgaacttaatttggggcggagggaagagtacgacgttctggacaaaaggaggggacgagatcccgagatgggcggaaagcctcagcgaaggaagaatccgcaagaggggctttataacgaactccagaaagataaaatggcagaagcctatagtgagattgggatgaagggagaaaggaggaggggtaaaggtcacgatgggttgtaccaaggattgagcacagccactaaagatacctatgatgcgctccacatgcaggccctgccgccaaga

SEQ ID NO: 4486 - DNA, 2940 bp, Artificial Sequence
  Synthetic Polynucloetide
atggccttaccagtgaccgccttgctcctgccgctggccttgctgctccacgccgccaggccggacatccagatgacacagagccctagcagcctgtctgccagcgtgggagacagagtgaccatcacatgcaaggccagcgaccacatcaacaactggctggcctggtatcagcagaagcctggacaggcccctaagctgctgatctacggcgctaccacactggaaacaggcgtgcccagcagattttctggcagcggctctggcaccgactacaccctgacaatatccagcctccagcctgaggacttcgccacctactactgtcagcagagctggaacaccccttggacattcggccagggcaccaagctggaaatcaagagactcgaggggaaaccaattcccaaccctcttctgggactggattcaaccggcagcggcgaggacctgaagaacgtgttcccacctgaggtggccgtgttcgagcctagcgaggccgagatcagccacacccagaaagccaccctcgtgtgcctggctaccggcttctaccccgaccatgtggaactgtcttggtgggtcaacggcaaagaggtgcacagcggcgtgtctaccgacccccagccactgaaagaacagcccgccctgaacgacagccggtactgcctgagcagcagactgagagtgtccgccaccttctggcagaacccccggaaccacttcagatgccaggtgcagttctacggcctgagcgagaacgacgagtggacccaggacagagccaagcccgtgacccagatcgtgtctgccgaagcctggggcagagccgattgcggatcccagagcttcggcctgctggaccccaagctgtgctacctgctggatggcatcctgttcatctacggcgtgatcctgaccgccctgttcctgaaacggggcagaaagaaactcctgtatatattcaaacaaccatttatgagaccagtacaaactactcaagaggaagatggctgtagctgccgatttccagaagaagaagaaggaggatgtgaactgagagtgaagttcagcagaagcgccgacgcccctgcctaccagcagggacagaaccaactgtacaacgagctgaacctgggcagacgggaagagtacgacgtgctggacaagcggagaggcagggaccctgagatgggcggaaagccccagcggagaaagaacccccaggaaggactgtataacgaactccagaaagacaagatggccgaagcctacagcgagatcggcatgaagggcgagcggagaagaggcaagggccacgatggcctgtaccagggcctgagcaccgccaccaaggacacctatgacgccctgcacatgcaggccctgcctccaagaagggccaagcgatctggatctggagcaacaaacttctcactactcaaacaagcaggtgacgtggaggagaatcccgggcctactagtatggactggatttggcgcatccttttccttgtcggcgctgctaccggcgcccattccgggcccgaagttgctgccctcgagaaggaggtagcagctttggaaaaagaagtcgcagcccttgagaaagaagttgcggctctggagaagggatccggcggcggaggatctggcggaggcggatctgggggcggaggctctttcgaacaagttcagcttcaacagcctggcgctgagctggtcaaacctggcgcttctgtgaagatgagctgcaaagccagcggctacgccttcagcagctactggatcaactggatgaagcagaaacccggccagggactcgaatggatcggccaaatctatcccggcgacggcgacaccaactacaacggcaagttcaagggcagagccacactgaccgccgatacctctagcagcacagcctacatgcagctgagcagcctgaccagcgaagatagcgccgtgtacttctgtgcccggtccatcacaacagtcgtgggctgcgctatggactattggggccagggaacaagcgtgaccgtgtctagtacgcgtgagcagaaactgatctcggaagaggatctggggagcggcatccagaaccctgatcctgccgtgtaccagctgcgggatagcaagagcagcgacaagagcgtgtgtctgttcaccgacttcgacagccagaccaacgtgtcccagagcaaggactccgacgtgtacatcaccgataagaccgtgctggacatgcggagcatggacttcaagagcaactccgccgtggcctggtccaacaagtccgatttcgcctgcgccaacgccttcaacaacagcattatccccgaggacacattcttcccaagccccgagagcagctgcggtacccagagttttgggttgttggaccctaaattgtgctatctgttggacggaatcctgttcatttacggagtgatcctgaccgcattgttcctgaagagaggccggaagaagctgctgtacatcttcaagcagcctttcatgcggcccgtgcagaccacccaggaagaggacggctgctcctgccggttccccgaggaagaagaaggcggctgcgagctgcgggttaagttttccagatccgcagacgcacccgcttaccaacaagggcagaaccaactctacaatgaacttaatttggggcggagggaagagtacgacgttctggacaaaaggaggggacgagatcccgagatgggcggaaagcctcagcgaaggaagaatccgcaagaggggctttataacgaactccagaaagataaaatggcagaagcctatagtgagattgggatgaagggagaaaggaggaggggtaaaggtcacgatgggttgtaccaaggattgagcacagccactaaagatacctatgatgcgctccacatgcaggccctgccgccaaga

SEQ ID NO: 4487 - DNA, 2613 bp, Artificial Sequence
  Synthetic Polynucloetide
atggccttaccagtgaccgccttgctcctgccgctggccttgctgctccacgccgccaggccggacatccagatgacacagagccctagcagcctgtctgccagcgtgggagacagagtgaccatcacatgcaaggccagcgaccacatcaacaactggctggcctggtatcagcagaagcctggacaggcccctaagctgctgatctacggcgctaccacactggaaacaggcgtgcccagcagattttctggcagcggctctggcaccgactacaccctgacaatatccagcctccagcctgaggacttcgccacctactactgtcagcagagctggaacaccccttggacattcggccagggcaccaagctggaaatcaagagactcgagcagagcttcggcctgctggaccccaagctgtgctacctgctggatggcatcctgttcatctacggcgtgatcctgaccgccctgttcctgagagtgaagttcagcagaagcgccgacgcccctgcctaccagcagggacagaaccaactgtacaacgagctgaacctgggcagacgggaagagtacgacgtgctggacaagcggagaggcagggaccctgagatgggcggaaagccccagcggagaaagaacccccaggaaggactgtataacgaactccagaaagacaagatggccgaagcctacagcgagatcggcatgaagggcgagcggagaagaggcaagggccacgatggcctgtaccagggcctgagcaccgccaccaaggacacctatgacgccctgcacatgcaggccctgcctccaagaagggccaagcgatctggatctggagcaacaaacttctcactactcaaacaagcaggtgacgtggaggagaatcccgggcctactagtatggactggatttggcgcatccttttccttgtcggcgctgctaccggcgcccattccgggcccgaagttgctgccctcgagaaggaggtagcagctttggaaaaagaagtcgcagcccttgagaaagaagttgcggctctggagaagggatccggcggcggaggatctggcggaggcggatctgggggcggaggctctttcgaacaagttcagcttcaacagcctggcgctgagctggtcaaacctggcgcttctgtgaagatgagctgcaaagccagcggctacgccttcagcagctactggatcaactggatgaagcagaaacccggccagggactcgaatggatcggccaaatctatcccggcgacggcgacaccaactacaacggcaagttcaagggcagagccacactgaccgccgatacctctagcagcacagcctacatgcagctgagcagcctgaccagcgaagatagcgccgtgtacttctgtgcccggtccatcacaacagtcgtgggctgcgctatggactattggggccagggaacaagcgtgaccgtgtctagtacgcgtcagagttttgggttgttggaccctaaattgtgctatctgttggacggaatcctgttcatttacggagtgatcctgaccgcattgttcctgcgggttaagttttccagatccgcagacgcacccgcttaccaacaagggcagaaccaactctacaatgaacttaatttggggcggagggaagagtacgacgttctggacaaaaggaggggacgagatcccgagatgggcggaaagcctcagcgaaggaagaatccgcaagaggggctttataacgaactccagaaagataaaatggcagaagcctatagtgagattgggatgaagggagaaaggaggaggggtaaaggtcacgatgggttgtaccaaggattgagcacagccactaaagatacctatgatgcgctccacatgcaggccctgccgccaagacgcgccaagagaagcggatctggcgtgaagcagaccctgaatttcgacctgctgaagctggctggcgacgtggaatccaacccaggcccttctagaggccatatgaccgagtacaagcccacggtgcgcctcgccacccgcgacgacgtccccagggccgtacgcaccctcgccgccgcgttcgccgactaccccgccacgcgccacaccgtcgatccggaccgccacatcgagcgggtcaccgagctgcaagaactcttcctcacgcgcgtcgggctcgacatcggcaaggtgtgggtcgcggacgacggcgccgcggtggcggtctggaccacgccggagagcgtcgaagcgggggcggtgttcgccgagatcggcccgcgcatggccgagttgagcggttcccggctggccgcgcagcaacagatggaaggcctcctggcgccgcaccggcccaaggagcccgcgtggttcctggccaccgtcggcgtctcgcccgaccaccagggcaagggtctgggcagcgccgtcgtgctccccggagtggaggcggccgagcgcgccggggtgcccgccttcctggagacctccgcgccccgcaacctccccttctacgagcggctcggcttcaccgtcaccgccgacgtcgaggtgcccgaaggaccgcgcacctggtgcatgacccgcaagcccggtgcctga

SEQ ID NO: 4488 - DNA, 2085 bp, Artificial Sequence
  Synthetic Polynucloetide
atggccttaccagtgaccgccttgctcctgccgctggccttgctgctccacgccgccaggccggacatccagatgacacagagccctagcagcctgtctgccagcgtgggagacagagtgaccatcacatgcaaggccagcgaccacatcaacaactggctggcctggtatcagcagaagcctggacaggcccctaagctgctgatctacggcgctaccacactggaaacaggcgtgcccagcagattttctggcagcggctctggcaccgactacaccctgacaatatccagcctccagcctgaggacttcgccacctactactgtcagcagagctggaacaccccttggacattcggccagggcaccaagctggaaatcaagagactcgagggacagcctaaggccaatcctaccgtgacactgttccctccaagcagcgaagaactccaggccaacaaggccacacttgtgtgcctgatctccgacttctaccctggggctgtgacagtggcttggaaggccgatggatctcctgtgaaagccggcgtggaaaccaccaagccatccaagcagagcaacaacaaatacgccgccagctcctacctgagcctgacacctgagcagtggaagtcccacagatcctacagctgccaagtgacccacgaaggcagcaccgtggaaaagacagtggcccctacagagtgcagccccatcaagaccgatgtgattacaatggaccccaaggacaactgctccaaggacgccaacgataccctgctgctccagctgaccaacaccagcgcctactacatgtacttgttgctgctgctgaagtccgtggtgtacttcgccatcatcacatgctgcctgctgcggagaaccgccttctgctgcaacggcgagaagtctagggccaagcgatctggatctggagcaacaaacttctcactactcaaacaagcaggtgacgtggaggagaatcccgggcctactagtatggactggatttggcgcatccttttccttgtcggcgctgctaccggcgcccattccgggcccgaagttgctgccctcgagaaggaggtagcagctttggaaaaagaagtcgcagcccttgagaaagaagttgcggctctggagaagggatccggcggcggaggatctggcggaggcggatctgggggcggaggctctttcgaacaagttcagcttcaacagcctggcgctgagctggtcaaacctggcgcttctgtgaagatgagctgcaaagccagcggctacgccttcagcagctactggatcaactggatgaagcagaaacccggccagggactcgaatggatcggccaaatctatcccggcgacggcgacaccaactacaacggcaagttcaagggcagagccacactgaccgccgatacctctagcagcacagcctacatgcagctgagcagcctgaccagcgaagatagcgccgtgtacttctgtgcccggtccatcacaacagtcgtgggctgcgctatggactattggggccagggaacaagcgtgaccgtgtctagtacgcgtgcctctacaaagggaccctccgtgtttcctctggctcccagcagcaagtctacaagcggaggaacagccgctctgggctgcctggtcaaggattactttcccgagcctgtgaccgtgtcctggaatagcggagcactgacaagcggcgtgcacacctttccagccgtgctgcaaagcagcggcctgtactctctgagcagcgtggtcacagtgcctagctctagcctgggcacccagacctacatctgcaatgtgaaccacaagcctagcaacaccaaggtggacaagagagtggaacccaagagctgtgaagtgaaaaccgactccaccgaccacgtgaagcccaaagagacagagaacaccaagcagcccagcaagagctgccacaagcccaaggccatcgtgcacaccgagaaagtgaacatgatgagcctgaccgtgctgggcctgcggatgctgttcgccaaaaccgtggccgtgaacttcctgctgaccgccaagctgttcttcctc

SEQ ID NO: 4489 - DNA, 2019 bp, Artificial Sequence
  Synthetic Polynucloetide
atggccttaccagtgaccgccttgctcctgccgctggccttgctgctccacgccgccaggccggacatccagatgacacagagccctagcagcctgtctgccagcgtgggagacagagtgaccatcacatgcaaggccagcgaccacatcaacaactggctggcctggtatcagcagaagcctggacaggcccctaagctgctgatctacggcgctaccacactggaaacaggcgtgcccagcagattttctggcagcggctctggcaccgactacaccctgacaatatccagcctccagcctgaggacttcgccacctactactgtcagcagagctggaacaccccttggacattcggccagggcaccaagctggaaatcaagagactcgagggacagcctaaggccaatcctaccgtgacactgttccctccaagcagcgaagaactccaggccaacaaggccacacttgtgtgcctgatctccgacttctaccctggggctgtgacagtggcttggaaggccgatggatctcctgtgaaagccggcgtggaaaccaccaagccatccaagcagagcaacaacaaatacgccgccagctcctacctgagcctgacacctgagcagtggaagtcccacagatcctacagctgccaagtgacccacgaaggcagcaccgtggaaaagacagtggcccctacagagtgcagcggcagagccgattgcggcatcaccagcgccagctaccaccagggcgtgctgagcgccaccatcctgtacgagatcctgctgggcaaggccaccctgtacgccgtgctggtgtctgccctggtgctgatggctatggtcaagcggaaggacagccggggaagggccaagcgatctggatctggagcaacaaacttctcactactcaaacaagcaggtgacgtggaggagaatcccgggcctactagtatggactggatttggcgcatccttttccttgtcggcgctgctaccggcgcccattccgggcccgaagttgctgccctcgagaaggaggtagcagctttggaaaaagaagtcgcagcccttgagaaagaagttgcggctctggagaagggatccggcggcggaggatctggcggaggcggatctgggggcggaggctctttcgaacaagttcagcttcaacagcctggcgctgagctggtcaaacctggcgcttctgtgaagatgagctgcaaagccagcggctacgccttcagcagctactggatcaactggatgaagcagaaacccggccagggactcgaatggatcggccaaatctatcccggcgacggcgacaccaactacaacggcaagttcaagggcagagccacactgaccgccgatacctctagcagcacagcctacatgcagctgagcagcctgaccagcgaagatagcgccgtgtacttctgtgcccggtccatcacaacagtcgtgggctgcgctatggactattggggccagggaacaagcgtgaccgtgtctagtacgcgtgcctctacaaagggaccctccgtgtttcctctggctcccagcagcaagtctacaagcggaggaacagccgctctgggctgcctggtcaaggattactttcccgagcctgtgaccgtgtcctggaatagcggagcactgacaagcggcgtgcacacctttccagccgtgctgcaaagcagcggcctgtactctctgagcagcgtggtcacagtgcctagctctagcctgggcacccagacctacatctgcaatgtgaaccacaagcctagcaacaccaaggtggacaagagagtggaacccaagagctgtatccccgaggacacattcttcccaagcagcgacgtgccctgcgacgtgaagctggtggaaaagagcttcgagacagacaccaacctgaacttccagaacctgagcgtgatcggcttcagaatcctgctgctgaaagtggccggctttaacctgctgatgaccctgcggctgtggtccagc

SEQ ID NO: 4490 - DNA, 2019 bp, Artificial Sequence
  Synthetic Polynucloetide
atggccttaccagtgaccgccttgctcctgccgctggccttgctgctccacgccgccaggccggacatccagatgacacagagccctagcagcctgtctgccagcgtgggagacagagtgaccatcacatgcaaggccagcgaccacatcaacaactggctggcctggtatcagcagaagcctggacaggcccctaagctgctgatctacggcgctaccacactggaaacaggcgtgcccagcagattttctggcagcggctctggcaccgactacaccctgacaatatccagcctccagcctgaggacttcgccacctactactgtcagcagagctggaacaccccttggacattcggccagggcaccaagctggaaatcaagagactcgagggacagcctaaggccaatcctaccgtgacactgttccctccaagcagcgaagaactccaggccaacaaggccacacttgtgtgcctgatctccgacttctaccctggggctgtgacagtggcttggaaggccgatggatctcctgtgaaagccggcgtggaaaccaccaagccatccaagcagagcaacaacaaatacgccgccagctcctacctgagcctgacacctgagcagtggaagtcccacagatcctacagctgccaagtgacccacgaaggcagcaccgtggaaaagacagtggcccctacagagtgcagcggcagagccgattgcggctttaccagcgagagctaccagcagggcgtgctgagcgccaccatcctgtacgagatcctgctgggcaaggccaccctgtacgccgtgctggtgtctgccctggtgctgatggctatggtcaagcggaaggacagccggggaagggccaagcgatctggatctggagcaacaaacttctcactactcaaacaagcaggtgacgtggaggagaatcccgggcctactagtatggactggatttggcgcatccttttccttgtcggcgctgctaccggcgcccattccgggcccgaagttgctgccctcgagaaggaggtagcagctttggaaaaagaagtcgcagcccttgagaaagaagttgcggctctggagaagggatccggcggcggaggatctggcggaggcggatctgggggcggaggctctttcgaacaagttcagcttcaacagcctggcgctgagctggtcaaacctggcgcttctgtgaagatgagctgcaaagccagcggctacgccttcagcagctactggatcaactggatgaagcagaaacccggccagggactcgaatggatcggccaaatctatcccggcgacggcgacaccaactacaacggcaagttcaagggcagagccacactgaccgccgatacctctagcagcacagcctacatgcagctgagcagcctgaccagcgaagatagcgccgtgtacttctgtgcccggtccatcacaacagtcgtgggctgcgctatggactattggggccagggaacaagcgtgaccgtgtctagtacgcgtgcctctacaaagggaccctccgtgtttcctctggctcccagcagcaagtctacaagcggaggaacagccgctctgggctgcctggtcaaggattactttcccgagcctgtgaccgtgtcctggaatagcggagcactgacaagcggcgtgcacacctttccagccgtgctgcaaagcagcggcctgtactctctgagcagcgtggtcacagtgcctagctctagcctgggcacccagacctacatctgcaatgtgaaccacaagcctagcaacaccaaggtggacaagagagtggaacccaagagctgtatccccgaggacacattcttcccaagccccgagagcagctgcgacgtgaagctggtggaaaagagcttcgagacagacaccaacctgaacttccagaacctgagcgtgatcggcttcagaatcctgctgctgaaagtggccggctttaacctgctgatgaccctgcggctgtggtccagc

SEQ ID NO: 4491 - DNA, 1509 bp, Artificial Sequence
  Synthetic Polynucloetide
atggactggatttggcgcatccttttccttgtcggcgctgctaccggcgcccattccgggcccgaagttgctgccctcgagaaggaggtagcagctttggaaaaagaagtcgcagcccttgagaaagaagttgcggctctggagaagggatccggcggcggaggatctggcggaggcggatctgggggcggaggctctttcgaacaagttcagcttcaacagcctggcgctgagctggtcaaacctggcgcttctgtgaagatgagctgcaaagccagcggctacgccttcagcagctactggatcaactggatgaagcagaaacccggccagggactcgaatggatcggccaaatctatcccggcgacggcgacaccaactacaacggcaagttcaagggcagagccacactgaccgccgatacctctagcagcacagcctacatgcagctgagcagcctgaccagcgaagatagcgccgtgtacttctgtgcccggtccatcacaacagtcgtgggctgcgctatggactattggggccagggaacaagcgtgaccgtgtctagtggcggaggcggaagtggaggcggaggatctggcggcggaggctctgacatccagatgacacagagccctagcagcctgtctgccagcgtgggagacagagtgaccatcacatgcaaggccagcgaccacatcaacaactggctggcctggtatcagcagaagcctggacaggcccctaagctgctgatctacggcgctaccacactggaaacaggcgtgcccagcagattttctggcagcggctctggcaccgactacaccctgacaatatccagcctccagcctgaggacttcgccacctactactgtcagcagagctggaacaccccttggacattcggccagggcaccaagctggaaatcaagagaacgcgtggcggaggcagcgacggtaacgaggagatgggaggaatcactcaaaccccttacaaagtctcaatttcaggaacaactgttatccttacatgtccccagtatcctggcagcgagatcctttggcagcataacgacaagaatatagggggagatgaagacgataagaatatcggatctgacgaggatcacttgagcctgaaagagttctccgagcttgaacaaagcggatattatgtgtgctatccgcgcgggtcaaagccggaagacgctaacttttacctttatctccgagccagagtgtgcgaaaattgcatggaaatggacgttatgtccgttgctacaatagttatcgtagatatatgcatcacgggtggactgcttctgctggtttattattggtccaagaatagaaaggccaaagctaaacccgtgaccagaggcgctggcgcaggcggaaggcaaaggggacaaaacaaagaacggccaccaccagtgccaaatccagattatgagcctattcggaaaggacagagggacctgtactctggcctgaatcagagaagaatc

SEQ ID NO: 4492 - DNA, 1404 bp, Artificial Sequence
  Synthetic Polynucloetide
atggactggatttggcgcatccttttccttgtcggcgctgctaccggcgcccattccgggcccgaagttgctgccctcgagaaggaggtagcagctttggaaaaagaagtcgcagcccttgagaaagaagttgcggctctggagaagggatccggcggcggaggatctggcggaggcggatctgggggcggaggctctttcgaacaagttcagcttcaacagcctggcgctgagctggtcaaacctggcgcttctgtgaagatgagctgcaaagccagcggctacgccttcagcagctactggatcaactggatgaagcagaaacccggccagggactcgaatggatcggccaaatctatcccggcgacggcgacaccaactacaacggcaagttcaagggcagagccacactgaccgccgatacctctagcagcacagcctacatgcagctgagcagcctgaccagcgaagatagcgccgtgtacttctgtgcccggtccatcacaacagtcgtgggctgcgctatggactattggggccagggaacaagcgtgaccgtgtctagtggcggaggcggaagtggaggcggaggatctggcggcggaggctctgacatccagatgacacagagccctagcagcctgtctgccagcgtgggagacagagtgaccatcacatgcaaggccagcgaccacatcaacaactggctggcctggtatcagcagaagcctggacaggcccctaagctgctgatctacggcgctaccacactggaaacaggcgtgcccagcagattttctggcagcggctctggcaccgactacaccctgacaatatccagcctccagcctgaggacttcgccacctactactgtcagcagagctggaacaccccttggacattcggccagggcaccaagctggaaatcaagagaacgcgtggcggaggcagcttcaagatccccatcgaggaactggaagatcgggtgttcgtgaactgcaacacctctatcacctgggtggaaggcaccgtgggaacactgctgagcgacatcaccagactggacctcggcaagcggattctggaccctcggggcatctacagatgcaacggcaccgacatctacaaggacaaagaaagcaccgtgcaggtccactacagaatgtgccagtcctgcgtggaactggaccctgctacagtggccggcatcatcgtgaccgatgtgatcgctactctgctgctggctctgggagtgttctgcttcgccggacacgaaacaggcagactgtctggcgctgccgatacacaggccctgctgagaaacgaccaagtgtatcagcccctgcgcgacagagatgatgcccagtattctcacctcggcggcaactgggctagaaacaag

SEQ ID NO: 4493 - DNA, 1434 bp, Artificial Sequence
  Synthetic Polynucloetide
atggactggatttggcgcatccttttccttgtcggcgctgctaccggcgcccattccgggcccgaagttgctgccctcgagaaggaggtagcagctttggaaaaagaagtcgcagcccttgagaaagaagttgcggctctggagaagggatccggcggcggaggatctggcggaggcggatctgggggcggaggctctttcgaacaagttcagcttcaacagcctggcgctgagctggtcaaacctggcgcttctgtgaagatgagctgcaaagccagcggctacgccttcagcagctactggatcaactggatgaagcagaaacccggccagggactcgaatggatcggccaaatctatcccggcgacggcgacaccaactacaacggcaagttcaagggcagagccacactgaccgccgatacctctagcagcacagcctacatgcagctgagcagcctgaccagcgaagatagcgccgtgtacttctgtgcccggtccatcacaacagtcgtgggctgcgctatggactattggggccagggaacaagcgtgaccgtgtctagtggcggaggcggaagtggaggcggaggatctggcggcggaggctctgacatccagatgacacagagccctagcagcctgtctgccagcgtgggagacagagtgaccatcacatgcaaggccagcgaccacatcaacaactggctggcctggtatcagcagaagcctggacaggcccctaagctgctgatctacggcgctaccacactggaaacaggcgtgcccagcagattttctggcagcggctctggcaccgactacaccctgacaatatccagcctccagcctgaggacttcgccacctactactgtcagcagagctggaacaccccttggacattcggccagggcaccaagctggaaatcaagagaacgcgtggcggaggcagccagagcatcaagggcaaccacctggtcaaggtgtacgactaccaagaggacggcagcgtgctgctgacatgtgatgccgaggccaagaacatcacctggtttaaggacggcaagatgatcggcttcctgaccgaggacaagaagaagtggaacctgggcagcaacgctaaggaccccagaggcatgtatcagtgcaagggcagccagaacaagagcaagcccctccaggtgtactaccggatgtgccagaactgcatcgagctgaacgccgctaccatcagcggctttctgttcgccgagatcgtgtccatcttcgtgctggccgtgggcgtgtactttatcgctggacaggatggcgtgcggcagagcagagcttccgataagcaaaccctgctgcctaacgaccagctgtaccagcctctgaaggacagagaggacgaccagtacagccacctccagggcaatcagctgagaagaaac

SEQ ID NO: 4494 - DNA, 1383 bp, Artificial Sequence
  Synthetic Polynucloetide
atggactggatttggcgcatccttttccttgtcggcgctgctaccggcgcccattccgggcccgaagttgctgccctcgagaaggaggtagcagctttggaaaaagaagtcgcagcccttgagaaagaagttgcggctctggagaagggatccggcggcggaggatctggcggaggcggatctgggggcggaggctctttcgaacaagttcagcttcaacagcctggcgctgagctggtcaaacctggcgcttctgtgaagatgagctgcaaagccagcggctacgccttcagcagctactggatcaactggatgaagcagaaacccggccagggactcgaatggatcggccaaatctatcccggcgacggcgacaccaactacaacggcaagttcaagggcagagccacactgaccgccgatacctctagcagcacagcctacatgcagctgagcagcctgaccagcgaagatagcgccgtgtacttctgtgcccggtccatcacaacagtcgtgggctgcgctatggactattggggccagggaacaagcgtgaccgtgtctagtggcggaggcggaagtggaggcggaggatctggcggcggaggctctgacatccagatgacacagagccctagcagcctgtctgccagcgtgggagacagagtgaccatcacatgcaaggccagcgaccacatcaacaactggctggcctggtatcagcagaagcctggacaggcccctaagctgctgatctacggcgctaccacactggaaacaggcgtgcccagcagattttctggcagcggctctggcaccgactacaccctgacaatatccagcctccagcctgaggacttcgccacctactactgtcagcagagctggaacaccccttggacattcggccagggcaccaagctggaaatcaagagaacgcgtggcggaggcagccagagttttgggttgttggaccctaaattgtgctatctgttggacggaatcctgttcatttacggagtgatcctgaccgcattgttcctgcgggttaagttttccagatccgcagacgcacccgcttaccaacaagggcagaaccaactctacaatgaacttaatttggggcggagggaagagtacgacgttctggacaaaaggaggggacgagatcccgagatgggcggaaagcctcagcgaaggaagaatccgcaagaggggctttataacgaactccagaaagataaaatggcagaagcctatagtgagattgggatgaagggagaaaggaggaggggtaaaggtcacgatgggttgtaccaaggattgagcacagccactaaagatacctatgatgcgctccacatgcaggccctgccgccaaga

SEQ ID NO: 4495 - DNA, 1494 bp, Artificial Sequence
  Synthetic Polynucloetide
atggactggatttggcgcatccttttccttgtcggcgctgctaccggcgcccattccgggcccgaagttgctgccctcgagaaggaggtagcagctttggaaaaagaagtcgcagcccttgagaaagaagttgcggctctggagaagggatccggcggcggaggatctggcggaggcggatctgggggcggaggctctttcgaacaagttcagcttcaacagcctggcgctgagctggtcaaacctggcgcttctgtgaagatgagctgcaaagccagcggctacgccttcagcagctactggatcaactggatgaagcagaaacccggccagggactcgaatggatcggccaaatctatcccggcgacggcgacaccaactacaacggcaagttcaagggcagagccacactgaccgccgatacctctagcagcacagcctacatgcagctgagcagcctgaccagcgaagatagcgccgtgtacttctgtgcccggtccatcacaacagtcgtgggctgcgctatggactattggggccagggaacaagcgtgaccgtgtctagtacgcgtatccagaaccctgatcctgccgtgtaccagctgcgggatagcaagagcagcgacaagagcgtgtgtctgttcaccgacttcgacagccagaccaacgtgtcccagagcaaggactccgacgtgtacatcaccgataagaccgtgctggacatgcggagcatggacttcaagagcaactccgccgtggcctggtccaacaagtccgatttcgcctgcgccaacgccttcaacaacagcattatccccgaggacacattcttcccaagccccgagagcagctgcgacgtgaagctggtggaaaagagcttcgagacagacaccaacctgaacttccagaacctgagcgtgatcggcttcagaatcctgctgctgaaagtggccggctttaacctgctgatgaccctgcggctgtggtccagccgcgccaagagaagcggatctggcgtgaagcagaccctgaatttcgacctgctgaagctggctggcgacgtggaatccaacccaggcccttctagaggccatatggccaagcctttgtctcaagaagaatccaccctcattgaaagagcaacggctacaatcaacagcatccccatctctgaagactacagcgtcgccagcgcagctctctctagcgacggccgcatcttcactggtgtcaatgtatatcattttactgggggaccttgtgcagaactcgtggtgctgggcactgctgctgctgcggcagctggcaacctgacttgtatcgtcgcgatcggaaatgagaacaggggcatcttgagcccctgcggacggtgccgacaggtgcttctcgatctgcatcctgggatcaaagccatagtgaaggacagtgatggacagccgacggcagttgggattcgtgaattgctgccctctggttatgtgtgggagggctga

SEQ ID NO: 4496 - DNA, 993 bp, Artificial Sequence
  Synthetic Polynucloetide
atggactggatttggcgcatccttttccttgtcggcgctgctaccggcgcccattccgggcccgaagttgctgccctcgagaaggaggtagcagctttggaaaaagaagtcgcagcccttgagaaagaagttgcggctctggagaagggatccggcggcggaggatctggcggaggcggatctgggggcggaggctctttcgaacaagttcagcttcaacagcctggcgctgagctggtcaaacctggcgcttctgtgaagatgagctgcaaagccagcggctacgccttcagcagctactggatcaactggatgaagcagaaacccggccagggactcgaatggatcggccaaatctatcccggcgacggcgacaccaactacaacggcaagttcaagggcagagccacactgaccgccgatacctctagcagcacagcctacatgcagctgagcagcctgaccagcgaagatagcgccgtgtacttctgtgcccggtccatcacaacagtcgtgggctgcgctatggactattggggccagggaacaagcgtgaccgtgtctagtacgcgtatccagaaccctgatcctgccgtgtaccagctgcgggatagcaagagcagcgacaagagcgtgtgtctgttcaccgacttcgacagccagaccaacgtgtcccagagcaaggactccgacgtgtacatcaccgataagaccgtgctggacatgcggagcatggacttcaagagcaactccgccgtggcctggtccaacaagtccgatttcgcctgcgccaacgccttcaacaacagcattatccccgaggacacattcttcccaagccccgagagcagctgcgacgtgaagctggtggaaaagagcttcgagacagacaccaacctgaacttccagaacctgagcgtgatcggcttcagaatcctgctgctgaaagtggccggctttaacctgctgatgaccctgcggctgtggtccagc

SEQ ID NO: 4497 - DNA, 1530 bp, Artificial Sequence
  Synthetic Polynucloetide
atggactggatttggcgcatccttttccttgtcggcgctgctaccggcgcccattccgggcccgaagttgctgccctcgagaaggaggtagcagctttggaaaaagaagtcgcagcccttgagaaagaagttgcggctctggagaagggatccggcggcggaggatctggcggaggcggatctgggggcggaggctctttcgaacaagttcagcttcaacagcctggcgctgagctggtcaaacctggcgcttctgtgaagatgagctgcaaagccagcggctacgccttcagcagctactggatcaactggatgaagcagaaacccggccagggactcgaatggatcggccaaatctatcccggcgacggcgacaccaactacaacggcaagttcaagggcagagccacactgaccgccgatacctctagcagcacagcctacatgcagctgagcagcctgaccagcgaagatagcgccgtgtacttctgtgcccggtccatcacaacagtcgtgggctgcgctatggactattggggccagggaacaagcgtgaccgtgtctagtacgcgtgagcagaaactgatctcggaagaggatgggagcggcatccagaaccctgatcctgccgtgtaccagctgcgggatagcaagagcagcgacaagagcgtgtgtctgttcaccgacttcgacagccagaccaacgtgtcccagagcaaggactccgacgtgtacatcaccgataagtgcgtgctggacatgcggagcatggacttcaagagcaactccgccgtggcctggtccaacaagtccgatttcgcctgcgccaacgccttcaacaacagcattatccccgaggacacattcttcccaagccccgagagcagctgcgacgtgaagctggtggaaaagagcttcgagacagacaccaacctgaacttccagaacctgagcgtgatcggcttcagaatcctgctgctgaaagtggccggctttaacctgctgatgaccctgcggctgtggtccagccgcgccaagagaagcggatctggcgtgaagcagaccctgaatttcgacctgctgaagctggctggcgacgtggaatccaacccaggcccttctagaggccatatggccaagcctttgtctcaagaagaatccaccctcattgaaagagcaacggctacaatcaacagcatccccatctctgaagactacagcgtcgccagcgcagctctctctagcgacggccgcatcttcactggtgtcaatgtatatcattttactgggggaccttgtgcagaactcgtggtgctgggcactgctgctgctgcggcagctggcaacctgacttgtatcgtcgcgatcggaaatgagaacaggggcatcttgagcccctgcggacggtgccgacaggtgcttctcgatctgcatcctgggatcaaagccatagtgaaggacagtgatggacagccgacggcagttgggattcgtgaattgctgccctctggttatgtgtgggagggctga

SEQ ID NO: 4498 - DNA, 1032 bp, Artificial Sequence
  Synthetic Polynucloetide
atggactggatttggcgcatccttttccttgtcggcgctgctaccggcgcccattccgggcccgaagttgctgccctcgagaaggaggtagcagctttggaaaaagaagtcgcagcccttgagaaagaagttgcggctctggagaagggatccggcggcggaggatctggcggaggcggatctgggggcggaggctctttcgaacaagttcagcttcaacagcctggcgctgagctggtcaaacctggcgcttctgtgaagatgagctgcaaagccagcggctacgccttcagcagctactggatcaactggatgaagcagaaacccggccagggactcgaatggatcggccaaatctatcccggcgacggcgacaccaactacaacggcaagttcaagggcagagccacactgaccgccgatacctctagcagcacagcctacatgcagctgagcagcctgaccagcgaagatagcgccgtgtacttctgtgcccggtccatcacaacagtcgtgggctgcgctatggactattggggccagggaacaagcgtgaccgtgtctagtacgcgtgagcagaaactgatctcggaagaggatgggagcggcatccagaaccctgatcctgccgtgtaccagctgcgggatagcaagagcagcgacaagagcgtgtgtctgttcaccgacttcgacagccagaccaacgtgtcccagagcaaggactccgacgtgtacatcaccgataagtgcgtgctggacatgcggagcatggacttcaagagcaactccgccgtggcctggtccaacaagtccgatttcgcctgcgccaacgccttcaacaacagcattatccccgaggacacattcttcccaagccccgagagcagctgcgacgtgaagctggtggaaaagagcttcgagacagacaccaacctgaacttccagaacctgagcgtgatcggcttcagaatcctgctgctgaaagtggccggctttaacctgctgatgaccctgcggctgtggtccagctga

SEQ ID NO: 4499 - DNA, 1923 bp, Artificial Sequence; identical to SEQ ID NO: 4245
  Synthetic Polynucloetide

SEQ ID NO: 4500 - DNA, 1944 bp, Artificial Sequence; identical to SEQ ID NO: 4246
  Synthetic Polynucloetide

SEQ ID NO: 4501 - DNA, 3183 bp, Artificial Sequence; identical to SEQ ID NO: 4247
  Synthetic Polynucloetide

SEQ ID NO: 4502 - DNA, 3003 bp, Artificial Sequence; identical to SEQ ID NO: 4248
  Synthetic Polynucloetide

SEQ ID NO: 4503 - DNA, 3000 bp, Artificial Sequence; identical to SEQ ID NO: 4249
  Synthetic Polynucloetide

SEQ ID NO: 4504 - DNA, 2298 bp, Artificial Sequence; identical to SEQ ID NO: 4250
  Synthetic Polynucloetide

SEQ ID NO: 4505 - DNA, 2973 bp, Artificial Sequence; identical to SEQ ID NO: 4251
  Synthetic Polynucloetide

SEQ ID NO: 4506 - DNA, 2310 bp, Artificial Sequence; identical to SEQ ID NO: 4252
  Synthetic Polynucloetide

SEQ ID NO: 4507 - DNA, 2976 bp, Artificial Sequence; identical to SEQ ID NO: 4253
  Synthetic Polynucloetide

SEQ ID NO: 4508 - DNA, 3135 bp, Artificial Sequence; identical to SEQ ID NO: 4254
  Synthetic Polynucloetide

SEQ ID NO: 4509 - DNA, 3138 bp, Artificial Sequence; identical to SEQ ID NO: 4255
  Synthetic Polynucloetide

SEQ ID NO: 4510 - DNA, 3000 bp, Artificial Sequence; identical to SEQ ID NO: 4256
  Synthetic Polynucloetide

SEQ ID NO: 4511 - DNA, 3246 bp, Artificial Sequence; identical to SEQ ID NO: 4257
  Synthetic Polynucloetide

SEQ ID NO: 4512 - DNA, 3300 bp, Artificial Sequence; identical to SEQ ID NO: 4258
  Synthetic Polynucloetide

SEQ ID NO: 4513 - DNA, 3111 bp, Artificial Sequence; identical to SEQ ID NO: 4259
  Synthetic Polynucloetide

SEQ ID NO: 4514 - DNA, 2322 bp, Artificial Sequence; identical to SEQ ID NO: 4260
  Synthetic Polynucloetide

SEQ ID NO: 4515 - DNA, 3156 bp, Artificial Sequence; identical to SEQ ID NO: 4261
  Synthetic Polynucloetide

SEQ ID NO: 4516 - DNA, 3531 bp, Artificial Sequence; identical to SEQ ID NO: 4262
  Synthetic Polynucloetide

SEQ ID NO: 4517 - DNA, 2886 bp, Artificial Sequence; identical to SEQ ID NO: 4263
  Synthetic Polynucloetide

SEQ ID NO: 4518 - DNA, 2886 bp, Artificial Sequence; identical to SEQ ID NO: 4264
  Synthetic Polynucloetide

SEQ ID NO: 4519 - DNA, 3099 bp, Artificial Sequence; identical to SEQ ID NO: 4265
  Synthetic Polynucloetide

SEQ ID NO: 4520 - DNA, 3222 bp, Artificial Sequence; identical to SEQ ID NO: 4266
  Synthetic Polynucloetide

SEQ ID NO: 4521 - DNA, 3105 bp, Artificial Sequence; identical to SEQ ID NO: 4267
  Synthetic Polynucloetide

SEQ ID NO: 4522 - DNA, 3231 bp, Artificial Sequence; identical to SEQ ID NO: 4268
  Synthetic Polynucloetide

SEQ ID NO: 4523 - DNA, 2904 bp, Artificial Sequence; identical to SEQ ID NO: 4269
  Synthetic Polynucloetide

SEQ ID NO: 4524 - DNA, 2376 bp, Artificial Sequence; identical to SEQ ID NO: 4270
  Synthetic Polynucloetide

SEQ ID NO: 4525 - DNA, 2310 bp, Artificial Sequence; identical to SEQ ID NO: 4271
  Synthetic Polynucloetide

SEQ ID NO: 4526 - DNA, 2310 bp, Artificial Sequence; identical to SEQ ID NO: 4272
  Synthetic Polynucloetide

SEQ ID NO: 4527 - DNA, 1788 bp, Artificial Sequence; identical to SEQ ID NO: 4273
  Synthetic Polynucloetide

SEQ ID NO: 4528 - DNA, 1683 bp, Artificial Sequence; identical to SEQ ID NO: 4274
  Synthetic Polynucloetide

SEQ ID NO: 4529 - DNA, 1713 bp, Artificial Sequence; identical to SEQ ID NO: 4275
  Synthetic Polynucloetide

SEQ ID NO: 4530 - DNA, 1662 bp, Artificial Sequence; identical to SEQ ID NO: 4276
  Synthetic Polynucloetide

SEQ ID NO: 4531 - DNA, 2364 bp, Artificial Sequence; identical to SEQ ID NO: 4277
  Synthetic Polynucloetide

SEQ ID NO: 4532 - DNA, 2460 bp, Artificial Sequence; identical to SEQ ID NO: 4278
  Synthetic Polynucloetide

SEQ ID NO: 4533 - DNA, 2610 bp, Artificial Sequence; identical to SEQ ID NO: 4279
  Synthetic Polynucloetide

SEQ ID NO: 4534 - DNA, 2052 bp, Artificial Sequence; identical to SEQ ID NO: 4280
  Synthetic Polynucloetide

SEQ ID NO: 4535 - DNA, 1359 bp, Artificial Sequence; identical to SEQ ID NO: 4281
  Synthetic Polynucloetide

SEQ ID NO: 4536 - DNA, 1353 bp, Artificial Sequence; identical to SEQ ID NO: 4155
  Synthetic Polynucloetide

SEQ ID NO: 4537 - DNA, 852 bp, Artificial Sequence; identical to SEQ ID NO: 4156
  Synthetic Polynucloetide

SEQ ID NO: 4538 - DNA, 2106 bp, Artificial Sequence; identical to SEQ ID NO: 4284
  Synthetic Polynucloetide

SEQ ID NO: 4539 - DNA, 1416 bp, Artificial Sequence; identical to SEQ ID NO: 4285
  Synthetic Polynucloetide

SEQ ID NO: 4540 - DNA, 1389 bp, Artificial Sequence; identical to SEQ ID NO: 4159
  Synthetic Polynucloetide

SEQ ID NO: 4541 - DNA, 891 bp, Artificial Sequence; identical to SEQ ID NO: 4160
  Synthetic Polynucloetide

SEQ ID NO: 4542 - DNA, 2364 bp, Artificial Sequence; identical to SEQ ID NO: 4288
  Synthetic Polynucloetide

SEQ ID NO: 4543 - DNA, 2460 bp, Artificial Sequence; identical to SEQ ID NO: 4289
  Synthetic Polynucloetide

SEQ ID NO: 4544 - DNA, 3144 bp, Artificial Sequence
  Synthetic Polynucloetide
atggccttaccagtgaccgccttgctcctgccgctggccttgctgctccacgccgccaggccggcatgccaggtccagctcgtcgagtccggcggcggcctcgtccaggccggcgactccgtcaccctctcctgcaccgcctccggccgcaccttctcctcctacgccctcgcctggttccgccagcgccccggcaaggagcgcgagttcgtcgccggcctccgctggggcggccccaccaactacgccgactccgtcaaggaccgcttcaccatctccggcgactccgccaagcacaccatgtacctccagatgaactccctcaagcccgaggacaccgccgtctactactgcggctacaaccccggcggctgggccgtcccctcccagtacgagtacgactcctggggccagggcacccaggtcaccgtctcctccggtaccggcggaggcggatctggcggcggaggtagcggtggcggaggatctgaattcgacatccagatgacacagagccctagcagcctgtctgccagcgtgggagacagagtgaccatcacatgcaaggccagcgaccacatcaacaactggctggcctggtatcagcagaagcctggacaggcccctaagctgctgatctacggcgctaccacactggaaacaggcgtgcccagcagattttctggcagcggctctggcaccgactacaccctgacaatatccagcctccagcctgaggacttcgccacctactactgtcagcagagctggaacaccccttggacattcggccagggcaccaagctggaaatcaagagactcgagatccagaaccctgatcctgccgtgtaccagctgcgggatagcaagagcagcgacaagagcgtgtgtctgttcaccgacttcgacagccagaccaacgtgtcccagagcaaggactccgacgtgtacatcaccgataagtgcgtgctggacatgcggagcatggacttcaagagcaactccgccgtggcctggtccaacaagtccgatttcgcctgcgccaacgccttcaacaacagcattatccccgaggacacattcttcccaagcagcgacgtgccctgcgacgtgaagctggtggaaaagagcttcgagacagacaccaacctgaacttccagaacctgagcgtgatcggcttcagaatcctgctgctgaaagtggccggctttaacctgctgatgaccctgcggctgtggtccagccgcgccaagagaagcggatctggcgtgaagcagaccctgaatttcgacctgctgaagctggctggcgacgtggaatccaacccaggccctactagtatggactggatttggcgcatccttttccttgtcggcgctgctaccggcgcccattccgggcccgaagttgctgccctcgagaaggaggtagcagctttggaaaaagaagtcgcagcccttgagaaagaagttgcggctctggagaagggatccggcggcggaggatctggcggaggcggatctgggggcggaggctctttcgaacaagttcagcttcaacagcctggcgctgagctggtcaaacctggcgcttctgtgaagatgagctgcaaagccagcggctacgccttcagcagctactggatcaactggatgaagcagaaacccggccagggactcgaatggatcggccaaatctatcccggcgacggcgacaccaactacaacggcaagttcaagggcagagccacactgaccgccgatacctctagcagcacagcctacatgcagctgagcagcctgaccagcgaagatagcgccgtgtacttctgtgcccggtccatcacaacagtcgtgggctgcgctatggactattggggccagggaacaagcgtgaccgtgtctagtacgcgtgaggacctgaagaacgtgttcccacctgaggtggccgtgttcgagcctagcaaggccgagatcgcccacacccagaaagccaccctcgtgtgcctggctaccggcttctaccccgaccatgtggaactgtcttggtgggtcaacggcaaagaggtgcacagcggcgtgtgtaccgacccccagccactgaaagaacagcccgccctgaacgacagccggtactgcctgagcagcagactgagagtgtccgccaccttctggcagaacccccggaaccacttcagatgccaggtgcagttctacggcctgagcgagaacgacgagtggacccaggacagagccaagcccgtgacccagatcgtgtctgccgaagcctggggcagagccgattgcggcatcaccagcgccagctaccaccagggcgtgctgagcgccaccatcctgtacgagatcctgctgggcaaggccaccctgtacgccgtgctggtgtctgccctggtgctgatggctatggtcaagcggaaggacagccggggaagggccaagcgatctggatctggagcaacaaacttctcactactcaaacaagcaggtgacgtggaggagaatcccgggccttctagaggccatatgaccgagtacaagcccacggtgcgcctcgccacccgcgacgacgtccccagggccgtacgcaccctcgccgccgcgttcgccgactaccccgccacgcgccacaccgtcgatccggaccgccacatcgagcgggtcaccgagctgcaagaactcttcctcacgcgcgtcgggctcgacatcggcaaggtgtgggtcgcggacgacggcgccgcggtggcggtctggaccacgccggagagcgtcgaagcgggggcggtgttcgccgagatcggcccgcgcatggccgagttgagcggttcccggctggccgcgcagcaacagatggaaggcctcctggcgccgcaccggcccaaggagcccgcgtggttcctggccaccgtcggcgtctcgcccgaccaccagggcaagggtctgggcagcgccgtcgtgctccccggagtggaggcggccgagcgcgccggggtgcccgccttcctggagacctccgcgccccgcaacctccccttctacgagcggctcggcttcaccgtcaccgccgacgtcgaggtgcccgaaggaccgcgcacctggtgcatgacccgcaagcccggtgcctga

SEQ ID NO: 4545 - DNA, 3141 bp, Artificial Sequence
  Synthetic Polynucloetide
atggccttaccagtgaccgccttgctcctgccgctggccttgctgctccacgccgccaggccggcatgccaggtccagctcgtcgagtccggcggcggcctcgtccaggccggcgactccgtcaccctctcctgcaccgcctccggccgcaccttctcctcctacgccctcgcctggttccgccagcgccccggcaaggagcgcgagttcgtcgccggcctccgctggggcggccccaccaactacgccgactccgtcaaggaccgcttcaccatctccggcgactccgccaagcacaccatgtacctccagatgaactccctcaagcccgaggacaccgccgtctactactgcggctacaaccccggcggctgggccgtcccctcccagtacgagtacgactcctggggccagggcacccaggtcaccgtctcctccggtaccggcggaggcggatctggcggcggaggtagcggtggcggaggatctgaattcgacatccagatgacacagagccctagcagcctgtctgccagcgtgggagacagagtgaccatcacatgcaaggccagcgaccacatcaacaactggctggcctggtatcagcagaagcctggacaggcccctaagctgctgatctacggcgctaccacactggaaacaggcgtgcccagcagattttctggcagcggctctggcaccgactacaccctgacaatatccagcctccagcctgaggacttcgccacctactactgtcagcagagctggaacaccccttggacattcggccagggcaccaagctggaaatcaagagactcgaggacctgaagaacgtgttcccacctgaggtggccgtgttcgagcctagcaaggccgagatcgcccacacccagaaagccaccctcgtgtgcctggctaccggcttctaccccgaccatgtggaactgtcttggtgggtcaacggcaaagaggtgcacagcggcgtgtgtaccgacccccagccactgaaagaacagcccgccctgaacgacagccggtactgcctgagcagcagactgagagtgtccgccaccttctggcagaacccccggaaccacttcagatgccaggtgcagttctacggcctgagcgagaacgacgagtggacccaggacagagccaagcccgtgacccagatcgtgtctgccgaagcctggggcagagccgattgcggcatcaccagcgccagctaccaccagggcgtgctgagcgccaccatcctgtacgagatcctgctgggcaaggccaccctgtacgccgtgctggtgtctgccctggtgctgatggctatggtcaagcggaaggacagccggggaagggccaagcgatctggatctggagcaacaaacttctcactactcaaacaagcaggtgacgtggaggagaatcccgggcctactagtatggactggatttggcgcatccttttccttgtcggcgctgctaccggcgcccattccgggcccgaagttgctgccctcgagaaggaggtagcagctttggaaaaagaagtcgcagcccttgagaaagaagttgcggctctggagaagggatccggcggcggaggatctggcggaggcggatctgggggcggaggctctttcgaacaagttcagcttcaacagcctggcgctgagctggtcaaacctggcgcttctgtgaagatgagctgcaaagccagcggctacgccttcagcagctactggatcaactggatgaagcagaaacccggccagggactcgaatggatcggccaaatctatcccggcgacggcgacaccaactacaacggcaagttcaagggcagagccacactgaccgccgatacctctagcagcacagcctacatgcagctgagcagcctgaccagcgaagatagcgccgtgtacttctgtgcccggtccatcacaacagtcgtgggctgcgctatggactattggggccagggaacaagcgtgaccgtgtctagtacgcgtatccagaaccctgatcctgccgtgtaccagctgcgggatagcaagagcagcgacaagagcgtgtgtctgttcaccgacttcgacagccagaccaacgtgtcccagagcaaggactccgacgtgtacatcaccgataagtgcgtgctggacatgcggagcatggacttcaagagcaactccgccgtggcctggtccaacaagtccgatttcgcctgcgccaacgccttcaacaacagcattatccccgaggacacattcttcccaagcagcgacgtgccctgcgacgtgaagctggtggaaaagagcttcgagacagacaccaacctgaacttccagaacctgagcgtgatcggcttcagaatcctgctgctgaaagtggccggctttaacctgctgatgaccctgcggctgtggtccagccgcgccaagagaagcggatctggcgtgaagcagaccctgaatttcgacctgctgaagctggctggcgacgtggaatccaacccaggcccttctagaggccatatgaccgagtacaagcccacggtgcgcctcgccacccgcgacgacgtccccagggccgtacgcaccctcgccgccgcgttcgccgactaccccgccacgcgccacaccgtcgatccggaccgccacatcgagcgggtcaccgagctgcaagaactcttcctcacgcgcgtcgggctcgacatcggcaaggtgtgggtcgcggacgacggcgccgcggtggcggtctggaccacgccggagagcgtcgaagcgggggcggtgttcgccgagatcggcccgcgcatggccgagttgagcggttcccggctggccgcgcagcaacagatggaaggcctcctggcgccgcaccggcccaaggagcccgcgtggttcctggccaccgtcggcgtctcgcccgaccaccagggcaagggtctgggcagcgccgtcgtgctccccggagtggaggcggccgagcgcgccggggtgcccgccttcctggagacctccgcgccccgcaacctccccttctacgagcggctcggcttcaccgtcaccgccgacgtcgaggtgcccgaaggaccgcgcacctggtgcatgacccgcaagcccggtgcctga

SEQ ID NO: 4546 - DNA, 3141 bp, Artificial Sequence
  Synthetic Polynucloetide
atggccttaccagtgaccgccttgctcctgccgctggccttgctgctccacgccgccaggccggcatgccaggtccagctcgtcgagtccggcggcggcctcgtccaggccggcgactccgtcaccctctcctgcaccgcctccggccgcaccttctcctcctacgccctcgcctggttccgccagcgccccggcaaggagcgcgagttcgtcgccggcctccgctggggcggccccaccaactacgccgactccgtcaaggaccgcttcaccatctccggcgactccgccaagcacaccatgtacctccagatgaactccctcaagcccgaggacaccgccgtctactactgcggctacaaccccggcggctgggccgtcccctcccagtacgagtacgactcctggggccagggcacccaggtcaccgtctcctccggtaccggcggaggcggatctggcggcggaggtagcggtggcggaggatctgaattcgacatccagatgacacagagccctagcagcctgtctgccagcgtgggagacagagtgaccatcacatgcaaggccagcgaccacatcaacaactggctggcctggtatcagcagaagcctggacaggcccctaagctgctgatctacggcgctaccacactggaaacaggcgtgcccagcagattttctggcagcggctctggcaccgactacaccctgacaatatccagcctccagcctgaggacttcgccacctactactgtcagcagagctggaacaccccttggacattcggccagggcaccaagctggaaatcaagagactcgaggacctgaagaacgtgttcccacctgaggtggccgtgttcgagcctagcgaggccgagatcagccacacccagaaagccaccctcgtgtgcctggctaccggcttctaccccgaccatgtggaactgtcttggtgggtcaacggcaaagaggtgcacagcggcgtgtgtaccgacccccagccactgaaagaacagcccgccctgaacgacagccggtactgcctgagcagcagactgagagtgtccgccaccttctggcagaacccccggaaccacttcagatgccaggtgcagttctacggcctgagcgagaacgacgagtggacccaggacagagccaagcccgtgacccagatcgtgtctgccgaagcctggggcagagccgattgcggctttaccagcgagagctaccagcagggcgtgctgagcgccaccatcctgtacgagatcctgctgggcaaggccaccctgtacgccgtgctggtgtctgccctggtgctgatggctatggtcaagcggaaggacagccggggaagggccaagcgatctggatctggagcaacaaacttctcactactcaaacaagcaggtgacgtggaggagaatcccgggcctactagtatggactggatttggcgcatccttttccttgtcggcgctgctaccggcgcccattccgggcccgaagttgctgccctcgagaaggaggtagcagctttggaaaaagaagtcgcagcccttgagaaagaagttgcggctctggagaagggatccggcggcggaggatctggcggaggcggatctgggggcggaggctctttcgaacaagttcagcttcaacagcctggcgctgagctggtcaaacctggcgcttctgtgaagatgagctgcaaagccagcggctacgccttcagcagctactggatcaactggatgaagcagaaacccggccagggactcgaatggatcggccaaatctatcccggcgacggcgacaccaactacaacggcaagttcaagggcagagccacactgaccgccgatacctctagcagcacagcctacatgcagctgagcagcctgaccagcgaagatagcgccgtgtacttctgtgcccggtccatcacaacagtcgtgggctgcgctatggactattggggccagggaacaagcgtgaccgtgtctagtacgcgtatccagaaccctgatcctgccgtgtaccagctgcgggatagcaagagcagcgacaagagcgtgtgtctgttcaccgacttcgacagccagaccaacgtgtcccagagcaaggactccgacgtgtacatcaccgataagtgcgtgctggacatgcggagcatggacttcaagagcaactccgccgtggcctggtccaacaagtccgatttcgcctgcgccaacgccttcaacaacagcattatccccgaggacacattcttcccaagccccgagagcagctgcgacgtgaagctggtggaaaagagcttcgagacagacaccaacctgaacttccagaacctgagcgtgatcggcttcagaatcctgctgctgaaagtggccggctttaacctgctgatgaccctgcggctgtggtccagccgcgccaagagaagcggatctggcgtgaagcagaccctgaatttcgacctgctgaagctggctggcgacgtggaatccaacccaggcccttctagaggccatatgaccgagtacaagcccacggtgcgcctcgccacccgcgacgacgtccccagggccgtacgcaccctcgccgccgcgttcgccgactaccccgccacgcgccacaccgtcgatccggaccgccacatcgagcgggtcaccgagctgcaagaactcttcctcacgcgcgtcgggctcgacatcggcaaggtgtgggtcgcggacgacggcgccgcggtggcggtctggaccacgccggagagcgtcgaagcgggggcggtgttcgccgagatcggcccgcgcatggccgagttgagcggttcccggctggccgcgcagcaacagatggaaggcctcctggcgccgcaccggcccaaggagcccgcgtggttcctggccaccgtcggcgtctcgcccgaccaccagggcaagggtctgggcagcgccgtcgtgctccccggagtggaggcggccgagcgcgccggggtgcccgccttcctggagacctccgcgccccgcaacctccccttctacgagcggctcggcttcaccgtcaccgccgacgtcgaggtgcccgaaggaccgcgcacctggtgcatgacccgcaagcccggtgcctga

SEQ ID NO: 4547 - DNA, 2439 bp, Artificial Sequence
  Synthetic Polynucloetide
atggccttaccagtgaccgccttgctcctgccgctggccttgctgctccacgccgccaggccggcatgccaggtccagctcgtcgagtccggcggcggcctcgtccaggccggcgactccgtcaccctctcctgcaccgcctccggccgcaccttctcctcctacgccctcgcctggttccgccagcgccccggcaaggagcgcgagttcgtcgccggcctccgctggggcggccccaccaactacgccgactccgtcaaggaccgcttcaccatctccggcgactccgccaagcacaccatgtacctccagatgaactccctcaagcccgaggacaccgccgtctactactgcggctacaaccccggcggctgggccgtcccctcccagtacgagtacgactcctggggccagggcacccaggtcaccgtctcctccggtaccggcggaggcggatctggcggcggaggtagcggtggcggaggatctgaattcgacatccagatgacacagagccctagcagcctgtctgccagcgtgggagacagagtgaccatcacatgcaaggccagcgaccacatcaacaactggctggcctggtatcagcagaagcctggacaggcccctaagctgctgatctacggcgctaccacactggaaacaggcgtgcccagcagattttctggcagcggctctggcaccgactacaccctgacaatatccagcctccagcctgaggacttcgccacctactactgtcagcagagctggaacaccccttggacattcggccagggcaccaagctggaaatcaagagactcgaggacctgaagaacgtgttcccacctgaggtggccgtgttcgagcctagcgaggccgagatcagccacacccagaaagccaccctcgtgtgcctggctaccggcttctaccccgaccatgtggaactgtcttggtgggtcaacggcaaagaggtgcacagcggcgtgtgtaccgacccccagccactgaaagaacagcccgccctgaacgacagccggtactgcctgagcagcagactgagagtgtccgccaccttctggcagaacccccggaaccacttcagatgccaggtgcagttctacggcctgagcgagaacgacgagtggacccaggacagagccaagcccgtgacccagatcgtgtctgccgaagcctggggcagagccgattgcggctttaccagcgagagctaccagcagggcgtgctgagcgccaccatcctgtacgagatcctgctgggcaaggccaccctgtacgccgtgctggtgtctgccctggtgctgatggctatggtcaagcggaaggacagccggggaagggccaagcgatctggatctggagcaacaaacttctcactactcaaacaagcaggtgacgtggaggagaatcccgggcctactagtatggactggatttggcgcatccttttccttgtcggcgctgctaccggcgcccattccgggcccgaagttgctgccctcgagaaggaggtagcagctttggaaaaagaagtcgcagcccttgagaaagaagttgcggctctggagaagggatccggcggcggaggatctggcggaggcggatctgggggcggaggctctttcgaacaagttcagcttcaacagcctggcgctgagctggtcaaacctggcgcttctgtgaagatgagctgcaaagccagcggctacgccttcagcagctactggatcaactggatgaagcagaaacccggccagggactcgaatggatcggccaaatctatcccggcgacggcgacaccaactacaacggcaagttcaagggcagagccacactgaccgccgatacctctagcagcacagcctacatgcagctgagcagcctgaccagcgaagatagcgccgtgtacttctgtgcccggtccatcacaacagtcgtgggctgcgctatggactattggggccagggaacaagcgtgaccgtgtctagtacgcgtatccagaaccctgatcctgccgtgtaccagctgcgggatagcaagagcagcgacaagagcgtgtgtctgttcaccgacttcgacagccagaccaacgtgtcccagagcaaggactccgacgtgtacatcaccgataagtgcgtgctggacatgcggagcatggacttcaagagcaactccgccgtggcctggtccaacaagtccgatttcgcctgcgccaacgccttcaacaacagcattatccccgaggacacattcttcccaagccccgagagcagctgcgacgtgaagctggtggaaaagagcttcgagacagacaccaacctgaacttccagaacctgagcgtgatcggcttcagaatcctgctgctgaaagtggccggctttaacctgctgatgaccctgcggctgtggtccagc

SEQ ID NO: 4548 - DNA, 3114 bp, Artificial Sequence
  Synthetic Polynucloetide
atggccttaccagtgaccgccttgctcctgccgctggccttgctgctccacgccgccaggccggcatgccaggtccagctcgtcgagtccggcggcggcctcgtccaggccggcgactccgtcaccctctcctgcaccgcctccggccgcaccttctcctcctacgccctcgcctggttccgccagcgccccggcaaggagcgcgagttcgtcgccggcctccgctggggcggccccaccaactacgccgactccgtcaaggaccgcttcaccatctccggcgactccgccaagcacaccatgtacctccagatgaactccctcaagcccgaggacaccgccgtctactactgcggctacaaccccggcggctgggccgtcccctcccagtacgagtacgactcctggggccagggcacccaggtcaccgtctcctccggtaccggcggaggcggatctggcggcggaggtagcggtggcggaggatctgaattcgacatccagatgacacagagccctagcagcctgtctgccagcgtgggagacagagtgaccatcacatgcaaggccagcgaccacatcaacaactggctggcctggtatcagcagaagcctggacaggcccctaagctgctgatctacggcgctaccacactggaaacaggcgtgcccagcagattttctggcagcggctctggcaccgactacaccctgacaatatccagcctccagcctgaggacttcgccacctactactgtcagcagagctggaacaccccttggacattcggccagggcaccaagctggaaatcaagagactcgaggacctgaagaacgtgttcccacctgaggtggccgtgttcgagcctagcgaggccgagatcagccacacccagaaagccaccctcgtgtgcctggctaccggcttctaccccgaccatgtggaactgtcttggtgggtcaacggcaaagaggtgcacagcggcgtgtgtaccgacccccagccactgaaagaacagcccgccctgaacgacagccggtactgcctgagcagcagactgagagtgtccgccaccttctggcagaacccccggaaccacttcagatgccaggtgcagttctacggcctgagcgagaacgacgagtggacccaggacagagccaagcccgtgacccagatcgtgtctgccgaagcctggggcagagccgattgcggctttaccagcgagagctaccagcagggcgtgctgagcgccaccatcctgtacgagatcctgctgggcaaggccaccctgtacgccgtgctggtgtctgccctggtgctgatggctatggtcaagcggaaggacagccggggaagggccaagcgatctggatctggagcaacaaacttctcactactcaaacaagcaggtgacgtggaggagaatcccgggcctactagtatggactggatttggcgcatccttttccttgtcggcgctgctaccggcgcccattccgggcccgaagttgctgccctcgagaaggaggtagcagctttggaaaaagaagtcgcagcccttgagaaagaagttgcggctctggagaagggatccggcggcggaggatctggcggaggcggatctgggggcggaggctctttcgaacaagttcagcttcaacagcctggcgctgagctggtcaaacctggcgcttctgtgaagatgagctgcaaagccagcggctacgccttcagcagctactggatcaactggatgaagcagaaacccggccagggactcgaatggatcggccaaatctatcccggcgacggcgacaccaactacaacggcaagttcaagggcagagccacactgaccgccgatacctctagcagcacagcctacatgcagctgagcagcctgaccagcgaagatagcgccgtgtacttctgtgcccggtccatcacaacagtcgtgggctgcgctatggactattggggccagggaacaagcgtgaccgtgtctagtacgcgtatccagaaccctgatcctgccgtgtaccagctgcgggatagcaagagcagcgacaagagcgtgtgtctgttcaccgacttcgacagccagaccaacgtgtcccagagcaaggactccgacgtgtacatcaccgataagtgcgtgctggacatgcggagcatggacttcaagagcaactccgccgtggcctggtccaacaagtccgatttcgcctgcgccaacgccttcaacaacagcattatccccgaggacacattcttcccaagccccgagagcagctgcgacgtgaagctggtggaaaagagcttcgagacagacaccaacctgaacttccagaacctgagcgtgatcggcttcagaatcctgctgctgaaagtggccggctttaacctgctgatgaccctgcggctgtggtccagccgcgccaagagaagcggatctggcgtgaagcagaccctgaatttcgacctgctgaagctggctggcgacgtggaatccaacccaggcccttctagaggcgggatccacaccatggctacctacgaggtgctgtgcgaggtggcaagaaagctgggcaccgacgacagagaagtggtgctgttcctgctgaacgtgttcatccctcagcctacactggcccagctgatcggtgcactgagagccctgaaagaggaaggccggctgacctttcctctgctggccgaatgcctgttcagagccggaagaagggatctgctgcgggacctgctgcatctggaccccagatttctggaaagacacctggccggcaccatgagctacttcagcccttaccagctgaccgtgctgcacgttgacggcgaactgtgcgccagagatattcggagcctgatcttcctgagcaaggacaccatcggcagccggtctacccctcagacatttctgcactgggtgtactgcatggaaaacctggacctgctcggccccacagatgtggatgccctgatgtccatgctgagaagcctgagcagagtggacctccagagacaggtgcagacactgatgggactgcacctgagcggacctagccacagccagcactacagacacacccct

SEQ ID NO: 4549 - DNA, 2451 bp, Artificial Sequence
  Synthetic Polynucloetide
atggccttaccagtgaccgccttgctcctgccgctggccttgctgctccacgccgccaggccggcatgccaggtccagctcgtcgagtccggcggcggcctcgtccaggccggcgactccgtcaccctctcctgcaccgcctccggccgcaccttctcctcctacgccctcgcctggttccgccagcgccccggcaaggagcgcgagttcgtcgccggcctccgctggggcggccccaccaactacgccgactccgtcaaggaccgcttcaccatctccggcgactccgccaagcacaccatgtacctccagatgaactccctcaagcccgaggacaccgccgtctactactgcggctacaaccccggcggctgggccgtcccctcccagtacgagtacgactcctggggccagggcacccaggtcaccgtctcctccggtaccggcggaggcggatctggcggcggaggtagcggtggcggaggatctgaattcgacatccagatgacacagagccctagcagcctgtctgccagcgtgggagacagagtgaccatcacatgcaaggccagcgaccacatcaacaactggctggcctggtatcagcagaagcctggacaggcccctaagctgctgatctacggcgctaccacactggaaacaggcgtgcccagcagattttctggcagcggctctggcaccgactacaccctgacaatatccagcctccagcctgaggacttcgccacctactactgtcagcagagctggaacaccccttggacattcggccagggcaccaagctggaaatcaagagactcgagatccagaaccctgatcctgccgtgtaccagctgcgggatagcaagagcagcgacaagagcgtgtgtctgttcaccgacttcgacagccagaccaacgtgtcccagagcaaggactccgacgtgtacatcaccgataagtgcgtgctggacatgcggagcatggacttcaagagcaactccgccgtggcctggtccaacaagtccgatttcgcctgcgccaacgccttcaacaacagcattatccccgaggacacattcttcccaagccccgagagcagctgcgacgtgaagctggtggaaaagagcttcgagacagacaccaacctgaacttccagaacctgagcgtgatcggcttcagaatcctgctgctgaaagtggccggctttaacctgctgatgaccctgcggctgtggtccagccgcgccaagagaagcggatctggcgtgaagcagaccctgaatttcgacctgctgaagctggctggcgacgtggaatccaacccaggccctactagtatggactggatttggcgcatccttttccttgtcggcgctgctaccggcgcccattccgggcccgaagttgctgccctcgagaaggaggtagcagctttggaaaaagaagtcgcagcccttgagaaagaagttgcggctctggagaagggatccggcggcggaggatctggcggaggcggatctgggggcggaggctctttcgaacaagttcagcttcaacagcctggcgctgagctggtcaaacctggcgcttctgtgaagatgagctgcaaagccagcggctacgccttcagcagctactggatcaactggatgaagcagaaacccggccagggactcgaatggatcggccaaatctatcccggcgacggcgacaccaactacaacggcaagttcaagggcagagccacactgaccgccgatacctctagcagcacagcctacatgcagctgagcagcctgaccagcgaagatagcgccgtgtacttctgtgcccggtccatcacaacagtcgtgggctgcgctatggactattggggccagggaacaagcgtgaccgtgtctagtacgcgtgaggacctgaagaacgtgttcccacctgaggtggccgtgttcgagcctagcgaggccgagatcagccacacccagaaagccaccctcgtgtgcctggctaccggcttctaccccgaccatgtggaactgtcttggtgggtcaacggcaaagaggtgcacagcggcgtgtgtaccgacccccagccactgaaagaacagcccgccctgaacgacagccggtactgcctgagcagcagactgagagtgtccgccaccttctggcagaacccccggaaccacttcagatgccaggtgcagttctacggcctgagcgagaacgacgagtggacccaggacagagccaagcccgtgacccagatcgtgtctgccgaagcctggggcagagccgattgcggctttaccagcgagagctaccagcagggcgtgctgagcgccaccatcctgtacgagatcctgctgggcaaggccaccctgtacgccgtgctggtgtctgccctggtgctgatggctatggtcaagcggaaggacagccgggga

SEQ ID NO: 4550 - DNA, 3117 bp, Artificial Sequence
  Synthetic Polynucloetide
atggccttaccagtgaccgccttgctcctgccgctggccttgctgctccacgccgccaggccggcatgccaggtccagctcgtcgagtccggcggcggcctcgtccaggccggcgactccgtcaccctctcctgcaccgcctccggccgcaccttctcctcctacgccctcgcctggttccgccagcgccccggcaaggagcgcgagttcgtcgccggcctccgctggggcggccccaccaactacgccgactccgtcaaggaccgcttcaccatctccggcgactccgccaagcacaccatgtacctccagatgaactccctcaagcccgaggacaccgccgtctactactgcggctacaaccccggcggctgggccgtcccctcccagtacgagtacgactcctggggccagggcacccaggtcaccgtctcctccggtaccggcggaggcggatctggcggcggaggtagcggtggcggaggatctgaattcgacatccagatgacacagagccctagcagcctgtctgccagcgtgggagacagagtgaccatcacatgcaaggccagcgaccacatcaacaactggctggcctggtatcagcagaagcctggacaggcccctaagctgctgatctacggcgctaccacactggaaacaggcgtgcccagcagattttctggcagcggctctggcaccgactacaccctgacaatatccagcctccagcctgaggacttcgccacctactactgtcagcagagctggaacaccccttggacattcggccagggcaccaagctggaaatcaagagactcgagatccagaaccctgatcctgccgtgtaccagctgcgggatagcaagagcagcgacaagagcgtgtgtctgttcaccgacttcgacagccagaccaacgtgtcccagagcaaggactccgacgtgtacatcaccgataagtgcgtgctggacatgcggagcatggacttcaagagcaactccgccgtggcctggtccaacaagtccgatttcgcctgcgccaacgccttcaacaacagcattatccccgaggacacattcttcccaagccccgagagcagctgcgacgtgaagctggtggaaaagagcttcgagacagacaccaacctgaacttccagaacctgagcgtgatcggcttcagaatcctgctgctgaaagtggccggctttaacctgctgatgaccctgcggctgtggtccagccgcgccaagagaagcggatctggcgtgaagcagaccctgaatttcgacctgctgaagctggctggcgacgtggaatccaacccaggccctactagtatggactggatttggcgcatccttttccttgtcggcgctgctaccggcgcccattccgggcccgaagttgctgccctcgagaaggaggtagcagctttggaaaaagaagtcgcagcccttgagaaagaagttgcggctctggagaagggatccggcggcggaggatctggcggaggcggatctgggggcggaggctctttcgaacaagttcagcttcaacagcctggcgctgagctggtcaaacctggcgcttctgtgaagatgagctgcaaagccagcggctacgccttcagcagctactggatcaactggatgaagcagaaacccggccagggactcgaatggatcggccaaatctatcccggcgacggcgacaccaactacaacggcaagttcaagggcagagccacactgaccgccgatacctctagcagcacagcctacatgcagctgagcagcctgaccagcgaagatagcgccgtgtacttctgtgcccggtccatcacaacagtcgtgggctgcgctatggactattggggccagggaacaagcgtgaccgtgtctagtacgcgtgaggacctgaagaacgtgttcccacctgaggtggccgtgttcgagcctagcgaggccgagatcagccacacccagaaagccaccctcgtgtgcctggctaccggcttctaccccgaccatgtggaactgtcttggtgggtcaacggcaaagaggtgcacagcggcgtgtgtaccgacccccagccactgaaagaacagcccgccctgaacgacagccggtactgcctgagcagcagactgagagtgtccgccaccttctggcagaacccccggaaccacttcagatgccaggtgcagttctacggcctgagcgagaacgacgagtggacccaggacagagccaagcccgtgacccagatcgtgtctgccgaagcctggggcagagccgattgcggctttaccagcgagagctaccagcagggcgtgctgagcgccaccatcctgtacgagatcctgctgggcaaggccaccctgtacgccgtgctggtgtctgccctggtgctgatggctatggtcaagcggaaggacagccggggaagggccaagcgatctggatctggagcaacaaacttctcactactcaaacaagcaggtgacgtggaggagaatcccgggccttctagaggcgggatccacaccatggctacctacgaggtgctgtgcgaggtggcaagaaagctgggcaccgacgacagagaagtggtgctgttcctgctgaacgtgttcatccctcagcctacactggcccagctgatcggtgcactgagagccctgaaagaggaaggccggctgacctttcctctgctggccgaatgcctgttcagagccggaagaagggatctgctgcgggacctgctgcatctggaccccagatttctggaaagacacctggccggcaccatgagctacttcagcccttaccagctgaccgtgctgcacgttgacggcgaactgtgcgccagagatattcggagcctgatcttcctgagcaaggacaccatcggcagccggtctacccctcagacatttctgcactgggtgtactgcatggaaaacctggacctgctcggccccacagatgtggatgccctgatgtccatgctgagaagcctgagcagagtggacctccagagacaggtgcagacactgatgggactgcacctgagcggacctagccacagccagcactacagacacacccct

SEQ ID NO: 4551 - DNA, 3141 bp, Artificial Sequence
  Synthetic Polynucloetide
atggccttaccagtgaccgccttgctcctgccgctggccttgctgctccacgccgccaggccggcatgccaggtccagctcgtcgagtccggcggcggcctcgtccaggccggcgactccgtcaccctctcctgcaccgcctccggccgcaccttctcctcctacgccctcgcctggttccgccagcgccccggcaaggagcgcgagttcgtcgccggcctccgctggggcggccccaccaactacgccgactccgtcaaggaccgcttcaccatctccggcgactccgccaagcacaccatgtacctccagatgaactccctcaagcccgaggacaccgccgtctactactgcggctacaaccccggcggctgggccgtcccctcccagtacgagtacgactcctggggccagggcacccaggtcaccgtctcctccggtaccggcggaggcggatctggcggcggaggtagcggtggcggaggatctgaattcgacatccagatgacacagagccctagcagcctgtctgccagcgtgggagacagagtgaccatcacatgcaaggccagcgaccacatcaacaactggctggcctggtatcagcagaagcctggacaggcccctaagctgctgatctacggcgctaccacactggaaacaggcgtgcccagcagattttctggcagcggctctggcaccgactacaccctgacaatatccagcctccagcctgaggacttcgccacctactactgtcagcagagctggaacaccccttggacattcggccagggcaccaagctggaaatcaagagactcgaggacctgaagaacgtgttcccacctgaggtggccgtgttcgagcctagcgaggccgagatcagccacacccagaaagccaccctcgtgtgcctggctaccggcttctaccccgaccatgtggaactgtcttggtgggtcaacggcaaagaggtgcacagcggcgtgtctaccgacccccagccactgaaagaacagcccgccctgaacgacagccggtactgcctgagcagcagactgagagtgtccgccaccttctggcagaacccccggaaccacttcagatgccaggtgcagttctacggcctgagcgagaacgacgagtggacccaggacagagccaagcccgtgacccagatcgtgtctgccgaagcctggggcagagccgattgcggctttaccagcgagagctaccagcagggcgtgctgagcgccaccatcctgtacgagatcctgctgggcaaggccaccctgtacgccgtgctggtgtctgccctggtgctgatggctatggtcaagcggaaggacagccggggaagggccaagcgatctggatctggagcaacaaacttctcactactcaaacaagcaggtgacgtggaggagaatcccgggcctactagtatggactggatttggcgcatccttttccttgtcggcgctgctaccggcgcccattccgggcccgaagttgctgccctcgagaaggaggtagcagctttggaaaaagaagtcgcagcccttgagaaagaagttgcggctctggagaagggatccggcggcggaggatctggcggaggcggatctgggggcggaggctctttcgaacaagttcagcttcaacagcctggcgctgagctggtcaaacctggcgcttctgtgaagatgagctgcaaagccagcggctacgccttcagcagctactggatcaactggatgaagcagaaacccggccagggactcgaatggatcggccaaatctatcccggcgacggcgacaccaactacaacggcaagttcaagggcagagccacactgaccgccgatacctctagcagcacagcctacatgcagctgagcagcctgaccagcgaagatagcgccgtgtacttctgtgcccggtccatcacaacagtcgtgggctgcgctatggactattggggccagggaacaagcgtgaccgtgtctagtacgcgtatccagaaccctgatcctgccgtgtaccagctgcgggatagcaagagcagcgacaagagcgtgtgtctgttcaccgacttcgacagccagaccaacgtgtcccagagcaaggactccgacgtgtacatcaccgataagaccgtgctggacatgcggagcatggacttcaagagcaactccgccgtggcctggtccaacaagtccgatttcgcctgcgccaacgccttcaacaacagcattatccccgaggacacattcttcccaagccccgagagcagctgcgacgtgaagctggtggaaaagagcttcgagacagacaccaacctgaacttccagaacctgagcgtgatcggcttcagaatcctgctgctgaaagtggccggctttaacctgctgatgaccctgcggctgtggtccagccgcgccaagagaagcggatctggcgtgaagcagaccctgaatttcgacctgctgaagctggctggcgacgtggaatccaacccaggcccttctagaggccatatgaccgagtacaagcccacggtgcgcctcgccacccgcgacgacgtccccagggccgtacgcaccctcgccgccgcgttcgccgactaccccgccacgcgccacaccgtcgatccggaccgccacatcgagcgggtcaccgagctgcaagaactcttcctcacgcgcgtcgggctcgacatcggcaaggtgtgggtcgcggacgacggcgccgcggtggcggtctggaccacgccggagagcgtcgaagcgggggcggtgttcgccgagatcggcccgcgcatggccgagttgagcggttcccggctggccgcgcagcaacagatggaaggcctcctggcgccgcaccggcccaaggagcccgcgtggttcctggccaccgtcggcgtctcgcccgaccaccagggcaagggtctgggcagcgccgtcgtgctccccggagtggaggcggccgagcgcgccggggtgcccgccttcctggagacctccgcgccccgcaacctccccttctacgagcggctcggcttcaccgtcaccgccgacgtcgaggtgcccgaaggaccgcgcacctggtgcatgacccgcaagcccggtgcctga

SEQ ID NO: 4552 - DNA, 3387 bp, Artificial Sequence
  Synthetic Polynucloetide
atggccttaccagtgaccgccttgctcctgccgctggccttgctgctccacgccgccaggccggcatgccaggtccagctcgtcgagtccggcggcggcctcgtccaggccggcgactccgtcaccctctcctgcaccgcctccggccgcaccttctcctcctacgccctcgcctggttccgccagcgccccggcaaggagcgcgagttcgtcgccggcctccgctggggcggccccaccaactacgccgactccgtcaaggaccgcttcaccatctccggcgactccgccaagcacaccatgtacctccagatgaactccctcaagcccgaggacaccgccgtctactactgcggctacaaccccggcggctgggccgtcccctcccagtacgagtacgactcctggggccagggcacccaggtcaccgtctcctccggtaccggcggaggcggatctggcggcggaggtagcggtggcggaggatctgaattcgacatccagatgacacagagccctagcagcctgtctgccagcgtgggagacagagtgaccatcacatgcaaggccagcgaccacatcaacaactggctggcctggtatcagcagaagcctggacaggcccctaagctgctgatctacggcgctaccacactggaaacaggcgtgcccagcagattttctggcagcggctctggcaccgactacaccctgacaatatccagcctccagcctgaggacttcgccacctactactgtcagcagagctggaacaccccttggacattcggccagggcaccaagctggaaatcaagagactcgaggacctgaagaacgtgttcccacctgaggtggccgtgttcgagcctagcgaggccgagatcagccacacccagaaagccaccctcgtgtgcctggctaccggcttctaccccgaccatgtggaactgtcttggtgggtcaacggcaaagaggtgcacagcggcgtgtctaccgacccccagccactgaaagaacagcccgccctgaacgacagccggtactgcctgagcagcagactgagagtgtccgccaccttctggcagaacccccggaaccacttcagatgccaggtgcagttctacggcctgagcgagaacgacgagtggacccaggacagagccaagcccgtgacccagatcgtgtctgccgaagcctggggcagagccgattgcggctttaccagcgagagctaccagcagggcgtgctgagcgccaccatcctgtacgagatcctgctgggcaaggccaccctgtacgccgtgctggtgtctgccctggtgctgatggctatggtcaagcggaaggacagccggggaagggccaagcgatctggatctggagcaacaaacttctcactactcaaacaagcaggtgacgtggaggagaatcccgggcctactagtatggactggatttggcgcatccttttccttgtcggcgctgctaccggcgcccattccgggcccgaagttgctgccctcgagaaggaggtagcagctttggaaaaagaagtcgcagcccttgagaaagaagttgcggctctggagaagggatccggcggcggaggatctggcggaggcggatctgggggcggaggctctttcgaacaagttcagcttcaacagcctggcgctgagctggtcaaacctggcgcttctgtgaagatgagctgcaaagccagcggctacgccttcagcagctactggatcaactggatgaagcagaaacccggccagggactcgaatggatcggccaaatctatcccggcgacggcgacaccaactacaacggcaagttcaagggcagagccacactgaccgccgatacctctagcagcacagcctacatgcagctgagcagcctgaccagcgaagatagcgccgtgtacttctgtgcccggtccatcacaacagtcgtgggctgcgctatggactattggggccagggaacaagcgtgaccgtgtctagtacgcgtgagcagaaactgatctcggaagaggatgggagcggcaccccattcccttctctggcccctcccatcatgctgctggtggacggcaagcagcagatggtggtcgtgtgcctggtgctggatgtggccccacctggactggacagccccatctggtttagcgccggcaatggctctgccctggacgcctttacctacggcccaagccctgccaccgatggcacctggacaaatctggcccacctgagcctgcccagcgaggaactggcttcttgggagcctctcgtgtgccacacaggacctggcgctgagggacacagcagatccacccagcctatgcacctgtctggcgaggccagcaccgccagaacctgtcctcaggaacctctgagaggcacccctggcggagcactgtggctgggagtgctgagactgctgctgttcaagctgctgctgtttgacctgctgctgacctgctcctgtctgtgcgatcctgccggccctctgccttctcctgccaccaccacaagactgagagccctgggcagccacagactgcaccctgccacagagacaggcggcagagaggccacaagcagccctagaccccagcccagagacagaagatggggcgataccccccctggcagaaagcctggatctccagtccgcgccaagagaagcggatctggcgtgaagcagaccctgaatttcgacctgctgaagctggctggcgacgtggaatccaacccaggcccttctagaggccatatgaccgagtacaagcccacggtgcgcctcgccacccgcgacgacgtccccagggccgtacgcaccctcgccgccgcgttcgccgactaccccgccacgcgccacaccgtcgatccggaccgccacatcgagcgggtcaccgagctgcaagaactcttcctcacgcgcgtcgggctcgacatcggcaaggtgtgggtcgcggacgacggcgccgcggtggcggtctggaccacgccggagagcgtcgaagcgggggcggtgttcgccgagatcggcccgcgcatggccgagttgagcggttcccggctggccgcgcagcaacagatggaaggcctcctggcgccgcaccggcccaaggagcccgcgtggttcctggccaccgtcggcgtctcgcccgaccaccagggcaagggtctgggcagcgccgtcgtgctccccggagtggaggcggccgagcgcgccggggtgcccgccttcctggagacctccgcgccccgcaacctccccttctacgagcggctcggcttcaccgtcaccgccgacgtcgaggtgcccgaaggaccgcgcacctggtgcatgacccgcaagcccggtgcctga

SEQ ID NO: 4553 - DNA, 3252 bp, Artificial Sequence
  Synthetic Polynucloetide
atggccttaccagtgaccgccttgctcctgccgctggccttgctgctccacgccgccaggccggcatgccaggtccagctcgtcgagtccggcggcggcctcgtccaggccggcgactccgtcaccctctcctgcaccgcctccggccgcaccttctcctcctacgccctcgcctggttccgccagcgccccggcaaggagcgcgagttcgtcgccggcctccgctggggcggccccaccaactacgccgactccgtcaaggaccgcttcaccatctccggcgactccgccaagcacaccatgtacctccagatgaactccctcaagcccgaggacaccgccgtctactactgcggctacaaccccggcggctgggccgtcccctcccagtacgagtacgactcctggggccagggcacccaggtcaccgtctcctccggtaccggcggaggcggatctggcggcggaggtagcggtggcggaggatctgaattcgacatccagatgacacagagccctagcagcctgtctgccagcgtgggagacagagtgaccatcacatgcaaggccagcgaccacatcaacaactggctggcctggtatcagcagaagcctggacaggcccctaagctgctgatctacggcgctaccacactggaaacaggcgtgcccagcagattttctggcagcggctctggcaccgactacaccctgacaatatccagcctccagcctgaggacttcgccacctactactgtcagcagagctggaacaccccttggacattcggccagggcaccaagctggaaatcaagagactcgaggggaaaccaattcccaaccctcttctgggactggattcaaccggcagcggcgacaagcagctggacgccgacgtgtcccccaagcctaccatcttcctgccctctatcgccgagacaaagctccagaaggccggcacctacctgtgcctgctggaaaagttcttcccagatgtgattaagatccactggcaggaaaagaagtccaacaccatcctgggcagccaggaaggcaacaccatgaagaccaacgacacctacatgaagttcagctggctgaccgtgcccgagaagtccctggacaaagaacacagatgcatcgtgcggcacgaaaacaacaagaacggcgtggaccaggaaatcatcttcccacccatcaagaccgatgtgattacaatggaccccaaggacaactgctccaaggacgccaacgataccctgctgctccagctgaccaacaccagcgcctactacatgtacttgttgctgctgctgaagtccgtggtgtacttcgccatcatcacatgctgcctgctgcggagaaccgccttctgctgcaacggcgagaagtctagggccaagcgatctggatctggagcaacaaacttctcactactcaaacaagcaggtgacgtggaggagaatcccgggcctactagtatggactggatttggcgcatccttttccttgtcggcgctgctaccggcgcccattccgggcccgaagttgctgccctcgagaaggaggtagcagctttggaaaaagaagtcgcagcccttgagaaagaagttgcggctctggagaagggatccggcggcggaggatctggcggaggcggatctgggggcggaggctctttcgaacaagttcagcttcaacagcctggcgctgagctggtcaaacctggcgcttctgtgaagatgagctgcaaagccagcggctacgccttcagcagctactggatcaactggatgaagcagaaacccggccagggactcgaatggatcggccaaatctatcccggcgacggcgacaccaactacaacggcaagttcaagggcagagccacactgaccgccgatacctctagcagcacagcctacatgcagctgagcagcctgaccagcgaagatagcgccgtgtacttctgtgcccggtccatcacaacagtcgtgggctgcgctatggactattggggccagggaacaagcgtgaccgtgtctagtacgcgtgagcagaaactgatctcggaagaggatgggagcggcagccagcctcacaccaagcccagcgtgttcgtgatgaagaacggcaccaacgtggcctgcctcgtgaaagagttctaccccaaggacatcaggatcaacctggtgtccagcaagaagatcaccgagttcgaccccgccatcgtgatctcccccagcggcaagtacaacgccgtgaagctggggaagtacgaggacagcaacagcgtgacctgctccgtgcagcacgacaacaagaccgtgcacagcaccgactttgaagtgaaaaccgactccaccgaccacgtgaagcccaaagagacagagaacaccaagcagcccagcaagagctgccacaagcccaaggccatcgtgcacaccgagaaagtgaacatgatgagcctgaccgtgctgggcctgcggatgctgttcgccaaaaccgtggccgtgaacttcctgctgaccgccaagctgttcttcctccgcgccaagagaagcggatctggcgtgaagcagaccctgaatttcgacctgctgaagctggctggcgacgtggaatccaacccaggcccttctagaggccatatgaccgagtacaagcccacggtgcgcctcgccacccgcgacgacgtccccagggccgtacgcaccctcgccgccgcgttcgccgactaccccgccacgcgccacaccgtcgatccggaccgccacatcgagcgggtcaccgagctgcaagaactcttcctcacgcgcgtcgggctcgacatcggcaaggtgtgggtcgcggacgacggcgccgcggtggcggtctggaccacgccggagagcgtcgaagcgggggcggtgttcgccgagatcggcccgcgcatggccgagttgagcggttcccggctggccgcgcagcaacagatggaaggcctcctggcgccgcaccggcccaaggagcccgcgtggttcctggccaccgtcggcgtctcgcccgaccaccagggcaagggtctgggcagcgccgtcgtgctccccggagtggaggcggccgagcgcgccggggtgcccgccttcctggagacctccgcgccccgcaacctccccttctacgagcggctcggcttcaccgtcaccgccgacgtcgaggtgcccgaaggaccgcgcacctggtgcatgacccgcaagcccggtgcctga

SEQ ID NO: 4554 - DNA, 2463 bp, Artificial Sequence
  Synthetic Polynucloetide
atggccttaccagtgaccgccttgctcctgccgctggccttgctgctccacgccgccaggccggcatgccaggtccagctcgtcgagtccggcggcggcctcgtccaggccggcgactccgtcaccctctcctgcaccgcctccggccgcaccttctcctcctacgccctcgcctggttccgccagcgccccggcaaggagcgcgagttcgtcgccggcctccgctggggcggccccaccaactacgccgactccgtcaaggaccgcttcaccatctccggcgactccgccaagcacaccatgtacctccagatgaactccctcaagcccgaggacaccgccgtctactactgcggctacaaccccggcggctgggccgtcccctcccagtacgagtacgactcctggggccagggcacccaggtcaccgtctcctccggtaccggcggaggcggatctggcggcggaggtagcggtggcggaggatctgaattcgacatccagatgacacagagccctagcagcctgtctgccagcgtgggagacagagtgaccatcacatgcaaggccagcgaccacatcaacaactggctggcctggtatcagcagaagcctggacaggcccctaagctgctgatctacggcgctaccacactggaaacaggcgtgcccagcagattttctggcagcggctctggcaccgactacaccctgacaatatccagcctccagcctgaggacttcgccacctactactgtcagcagagctggaacaccccttggacattcggccagggcaccaagctggaaatcaagagactcgagagccagcctcacaccaagcccagcgtgttcgtgatgaagaacggcaccaacgtggcctgcctcgtgaaagagttctaccccaaggacatcaggatcaacctggtgtccagcaagaagatcaccgagttcgaccccgccatcgtgatctcccccagcggcaagtacaacgccgtgaagctggggaagtacgaggacagcaacagcgtgacctgctccgtgcagcacgacaacaagaccgtgcacagcaccgactttgaagtgaaaaccgactccaccgaccacgtgaagcccaaagagacagagaacaccaagcagcccagcaagagctgccacaagcccaaggccatcgtgcacaccgagaaagtgaacatgatgagcctgaccgtgctgggcctgcggatgctgttcgccaaaaccgtggccgtgaacttcctgctgaccgccaagctgttcttcctcagggccaagcgatctggatctggagcaacaaacttctcactactcaaacaagcaggtgacgtggaggagaatcccgggcctactagtatggactggatttggcgcatccttttccttgtcggcgctgctaccggcgcccattccgggcccgaagttgctgccctcgagaaggaggtagcagctttggaaaaagaagtcgcagcccttgagaaagaagttgcggctctggagaagggatccggcggcggaggatctggcggaggcggatctgggggcggaggctctttcgaacaagttcagcttcaacagcctggcgctgagctggtcaaacctggcgcttctgtgaagatgagctgcaaagccagcggctacgccttcagcagctactggatcaactggatgaagcagaaacccggccagggactcgaatggatcggccaaatctatcccggcgacggcgacaccaactacaacggcaagttcaagggcagagccacactgaccgccgatacctctagcagcacagcctacatgcagctgagcagcctgaccagcgaagatagcgccgtgtacttctgtgcccggtccatcacaacagtcgtgggctgcgctatggactattggggccagggaacaagcgtgaccgtgtctagtacgcgtgacaagcagctggacgccgacgtgtcccccaagcctaccatcttcctgccctctatcgccgagacaaagctccagaaggccggcacctacctgtgcctgctggaaaagttcttcccagatgtgattaagatccactggcaggaaaagaagtccaacaccatcctgggcagccaggaaggcaacaccatgaagaccaacgacacctacatgaagttcagctggctgaccgtgcccgagaagtccctggacaaagaacacagatgcatcgtgcggcacgaaaacaacaagaacggcgtggaccaggaaatcatcttcccacccatcaagaccgatgtgattacaatggaccccaaggacaactgctccaaggacgccaacgataccctgctgctccagctgaccaacaccagcgcctactacatgtacttgttgctgctgctgaagtccgtggtgtacttcgccatcatcacatgctgcctgctgcggagaaccgccttctgctgcaacggcgagaagtct

SEQ ID NO: 4555 - DNA, 3672 bp, Artificial Sequence
  Synthetic Polynucloetide
atggccttaccagtgaccgccttgctcctgccgctggccttgctgctccacgccgccaggccggcatgccaggtccagctcgtcgagtccggcggcggcctcgtccaggccggcgactccgtcaccctctcctgcaccgcctccggccgcaccttctcctcctacgccctcgcctggttccgccagcgccccggcaaggagcgcgagttcgtcgccggcctccgctggggcggccccaccaactacgccgactccgtcaaggaccgcttcaccatctccggcgactccgccaagcacaccatgtacctccagatgaactccctcaagcccgaggacaccgccgtctactactgcggctacaaccccggcggctgggccgtcccctcccagtacgagtacgactcctggggccagggcacccaggtcaccgtctcctccggtaccggcggaggcggatctggcggcggaggtagcggtggcggaggatctgaattcgacatccagatgacacagagccctagcagcctgtctgccagcgtgggagacagagtgaccatcacatgcaaggccagcgaccacatcaacaactggctggcctggtatcagcagaagcctggacaggcccctaagctgctgatctacggcgctaccacactggaaacaggcgtgcccagcagattttctggcagcggctctggcaccgactacaccctgacaatatccagcctccagcctgaggacttcgccacctactactgtcagcagagctggaacaccccttggacattcggccagggcaccaagctggaaatcaagagaggacagcctaaggccaatcctaccgtgacactgttccctccaagcagcgaagaactccaggccaacaaggccacacttgtgtgcctgatctccgacttctaccctggggctgtgacagtggcttggaaggccgatggatctcctgtgaaagccggcgtggaaaccaccaagccatccaagcagagcaacaacaaatacgccgccagctcctacctgagcctgacacctgagcagtggaagtcccacagatcctacagctgccaagtgacccacgaaggcagcaccgtggaaaagacagtggcccctacagagtgcagcggatcccagagcttcggcctgctggaccccaagctgtgctacctgctggatggcatcctgttcatctacggcgtgatcctgaccgccctgttcctgagagtgaagttcagcagaagcgccgacgcccctgcctaccagcagggacagaaccaactgtacaacgagctgaacctgggcagacgggaagagtacgacgtgctggacaagcggagaggcagggaccctgagatgggcggaaagccccagcggagaaagaacccccaggaaggactgtataacgaactccagaaagacaagatggccgaagcctacagcgagatcggcatgaagggcgagcggagaagaggcaagggccacgatggcctgtaccagggcctgagcaccgccaccaaggacacctatgacgccctgcacatgcaggccctgcctccaagaagggccaagcgatctggatctggagcaacaaacttctcactactcaaacaagcaggtgacgtggaggagaatcccgggcctactagtatggactggatttggcgcatccttttccttgtcggcgctgctaccggcgcccattccgggcccgaagttgctgccctcgagaaggaggtagcagctttggaaaaagaagtcgcagcccttgagaaagaagttgcggctctggagaagggatccggcggcggaggatctggcggaggcggatctgggggcggaggctctttcgaacaagttcagcttcaacagcctggcgctgagctggtcaaacctggcgcttctgtgaagatgagctgcaaagccagcggctacgccttcagcagctactggatcaactggatgaagcagaaacccggccagggactcgaatggatcggccaaatctatcccggcgacggcgacaccaactacaacggcaagttcaagggcagagccacactgaccgccgatacctctagcagcacagcctacatgcagctgagcagcctgaccagcgaagatagcgccgtgtacttctgtgcccggtccatcacaacagtcgtgggctgcgctatggactattggggccagggaacaagcgtgaccgtgtctagtgcctctacaaagggaccctccgtgtttcctctggctcccagcagcaagtctacaagcggaggaacagccgctctgggctgcctggtcaaggattactttcccgagcctgtgaccgtgtcctggaatagcggagcactgacaagcggcgtgcacacctttccagccgtgctgcaaagcagcggcctgtactctctgagcagcgtggtcacagtgcctagctctagcctgggcacccagacctacatctgcaatgtgaaccacaagcctagcaacaccaaggtggacaagagagtggaacccaagagctgtggtacccagagttttgggttgttggaccctaaattgtgctatctgttggacggaatcctgttcatttacggagtgatcctgaccgcattgttcctgcgggttaagttttccagatccgcagacgcacccgcttaccaacaagggcagaaccaactctacaatgaacttaatttggggcggagggaagagtacgacgttctggacaaaaggaggggacgagatcccgagatgggcggaaagcctcagcgaaggaagaatccgcaagaggggctttataacgaactccagaaagataaaatggcagaagcctatagtgagattgggatgaagggagaaaggaggaggggtaaaggtcacgatgggttgtaccaaggattgagcacagccactaaagatacctatgatgcgctccacatgcaggccctgccgccaagacgcgccaagagaagcggatctggcgtgaagcagaccctgaatttcgacctgctgaagctggctggcgacgtggaatccaacccaggcccttctagaggccatatgaccgagtacaagcccacggtgcgcctcgccacccgcgacgacgtccccagggccgtacgcaccctcgccgccgcgttcgccgactaccccgccacgcgccacaccgtcgatccggaccgccacatcgagcgggtcaccgagctgcaagaactcttcctcacgcgcgtcgggctcgacatcggcaaggtgtgggtcgcggacgacggcgccgcggtggcggtctggaccacgccggagagcgtcgaagcgggggcggtgttcgccgagatcggcccgcgcatggccgagttgagcggttcccggctggccgcgcagcaacagatggaaggcctcctggcgccgcaccggcccaaggagcccgcgtggttcctggccaccgtcggcgtctcgcccgaccaccagggcaagggtctgggcagcgccgtcgtgctccccggagtggaggcggccgagcgcgccggggtgcccgccttcctggagacctccgcgccccgcaacctccccttctacgagcggctcggcttcaccgtcaccgccgacgtcgaggtgcccgaaggaccgcgcacctggtgcatgacccgcaagcccggtgcctga

SEQ ID NO: 4556 - DNA, 3027 bp, Artificial Sequence
  Synthetic Polynucloetide
atggccttaccagtgaccgccttgctcctgccgctggccttgctgctccacgccgccaggccggcatgccaggtccagctcgtcgagtccggcggcggcctcgtccaggccggcgactccgtcaccctctcctgcaccgcctccggccgcaccttctcctcctacgccctcgcctggttccgccagcgccccggcaaggagcgcgagttcgtcgccggcctccgctggggcggccccaccaactacgccgactccgtcaaggaccgcttcaccatctccggcgactccgccaagcacaccatgtacctccagatgaactccctcaagcccgaggacaccgccgtctactactgcggctacaaccccggcggctgggccgtcccctcccagtacgagtacgactcctggggccagggcacccaggtcaccgtctcctccggtaccggcggaggcggatctggcggcggaggtagcggtggcggaggatctgaattcgacatccagatgacacagagccctagcagcctgtctgccagcgtgggagacagagtgaccatcacatgcaaggccagcgaccacatcaacaactggctggcctggtatcagcagaagcctggacaggcccctaagctgctgatctacggcgctaccacactggaaacaggcgtgcccagcagattttctggcagcggctctggcaccgactacaccctgacaatatccagcctccagcctgaggacttcgccacctactactgtcagcagagctggaacaccccttggacattcggccagggcaccaagctggaaatcaagagactcgaggacctgaagaacgtgttcccacctgaggtggccgtgttcgagcctagcgaggccgagatcagccacacccagaaagccaccctcgtgtgcctggctaccggcttctaccccgaccatgtggaactgtcttggtgggtcaacggcaaagaggtgcacagcggcgtgtctaccgacccccagccactgaaagaacagcccgccctgaacgacagccggtactgcctgagcagcagactgagagtgtccgccaccttctggcagaacccccggaaccacttcagatgccaggtgcagttctacggcctgagcgagaacgacgagtggacccaggacagagccaagcccgtgacccagatcgtgtctgccgaagcctggggcagagccgattgcggatcccagagcttcggcctgctggaccccaagctgtgctacctgctggatggcatcctgttcatctacggcgtgatcctgaccgccctgttcctgagagtgaagttcagcagaagcgccgacgcccctgcctaccagcagggacagaaccaactgtacaacgagctgaacctgggcagacgggaagagtacgacgtgctggacaagcggagaggcagggaccctgagatgggcggaaagccccagcggagaaagaacccccaggaaggactgtataacgaactccagaaagacaagatggccgaagcctacagcgagatcggcatgaagggcgagcggagaagaggcaagggccacgatggcctgtaccagggcctgagcaccgccaccaaggacacctatgacgccctgcacatgcaggccctgcctccaagaagggccaagcgatctggatctggagcaacaaacttctcactactcaaacaagcaggtgacgtggaggagaatcccgggcctactagtatggactggatttggcgcatccttttccttgtcggcgctgctaccggcgcccattccgggcccgaagttgctgccctcgagaaggaggtagcagctttggaaaaagaagtcgcagcccttgagaaagaagttgcggctctggagaagggatccggcggcggaggatctggcggaggcggatctgggggcggaggctctttcgaacaagttcagcttcaacagcctggcgctgagctggtcaaacctggcgcttctgtgaagatgagctgcaaagccagcggctacgccttcagcagctactggatcaactggatgaagcagaaacccggccagggactcgaatggatcggccaaatctatcccggcgacggcgacaccaactacaacggcaagttcaagggcagagccacactgaccgccgatacctctagcagcacagcctacatgcagctgagcagcctgaccagcgaagatagcgccgtgtacttctgtgcccggtccatcacaacagtcgtgggctgcgctatggactattggggccagggaacaagcgtgaccgtgtctagtacgcgtatccagaaccctgatcctgccgtgtaccagctgcgggatagcaagagcagcgacaagagcgtgtgtctgttcaccgacttcgacagccagaccaacgtgtcccagagcaaggactccgacgtgtacatcaccgataagaccgtgctggacatgcggagcatggacttcaagagcaactccgccgtggcctggtccaacaagtccgatttcgcctgcgccaacgccttcaacaacagcattatccccgaggacacattcttcccaagccccgagagcagctgcggtacccagagttttgggttgttggaccctaaattgtgctatctgttggacggaatcctgttcatttacggagtgatcctgaccgcattgttcctgcgggttaagttttccagatccgcagacgcacccgcttaccaacaagggcagaaccaactctacaatgaacttaatttggggcggagggaagagtacgacgttctggacaaaaggaggggacgagatcccgagatgggcggaaagcctcagcgaaggaagaatccgcaagaggggctttataacgaactccagaaagataaaatggcagaagcctatagtgagattgggatgaagggagaaaggaggaggggtaaaggtcacgatgggttgtaccaaggattgagcacagccactaaagatacctatgatgcgctccacatgcaggccctgccgccaaga

SEQ ID NO: 4557 - DNA, 3027 bp, Artificial Sequence
  Synthetic Polynucloetide
atggccttaccagtgaccgccttgctcctgccgctggccttgctgctccacgccgccaggccggcatgccaggtccagctcgtcgagtccggcggcggcctcgtccaggccggcgactccgtcaccctctcctgcaccgcctccggccgcaccttctcctcctacgccctcgcctggttccgccagcgccccggcaaggagcgcgagttcgtcgccggcctccgctggggcggccccaccaactacgccgactccgtcaaggaccgcttcaccatctccggcgactccgccaagcacaccatgtacctccagatgaactccctcaagcccgaggacaccgccgtctactactgcggctacaaccccggcggctgggccgtcccctcccagtacgagtacgactcctggggccagggcacccaggtcaccgtctcctccggtaccggcggaggcggatctggcggcggaggtagcggtggcggaggatctgaattcgacatccagatgacacagagccctagcagcctgtctgccagcgtgggagacagagtgaccatcacatgcaaggccagcgaccacatcaacaactggctggcctggtatcagcagaagcctggacaggcccctaagctgctgatctacggcgctaccacactggaaacaggcgtgcccagcagattttctggcagcggctctggcaccgactacaccctgacaatatccagcctccagcctgaggacttcgccacctactactgtcagcagagctggaacaccccttggacattcggccagggcaccaagctggaaatcaagagactcgaggacctgaagaacgtgttcccacctgaggtggccgtgttcgagcctagcaaggccgagatcgcccacacccagaaagccaccctcgtgtgcctggctaccggcttctaccccgaccatgtggaactgtcttggtgggtcaacggcaaagaggtgcacagcggcgtgtgtaccgacccccagccactgaaagaacagcccgccctgaacgacagccggtactgcctgagcagcagactgagagtgtccgccaccttctggcagaacccccggaaccacttcagatgccaggtgcagttctacggcctgagcgagaacgacgagtggacccaggacagagccaagcccgtgacccagatcgtgtctgccgaagcctggggcagagccgattgcggatcccagagcttcggcctgctggaccccaagctgtgctacctgctggatggcatcctgttcatctacggcgtgatcctgaccgccctgttcctgagagtgaagttcagcagaagcgccgacgcccctgcctaccagcagggacagaaccaactgtacaacgagctgaacctgggcagacgggaagagtacgacgtgctggacaagcggagaggcagggaccctgagatgggcggaaagccccagcggagaaagaacccccaggaaggactgtataacgaactccagaaagacaagatggccgaagcctacagcgagatcggcatgaagggcgagcggagaagaggcaagggccacgatggcctgtaccagggcctgagcaccgccaccaaggacacctatgacgccctgcacatgcaggccctgcctccaagaagggccaagcgatctggatctggagcaacaaacttctcactactcaaacaagcaggtgacgtggaggagaatcccgggcctactagtatggactggatttggcgcatccttttccttgtcggcgctgctaccggcgcccattccgggcccgaagttgctgccctcgagaaggaggtagcagctttggaaaaagaagtcgcagcccttgagaaagaagttgcggctctggagaagggatccggcggcggaggatctggcggaggcggatctgggggcggaggctctttcgaacaagttcagcttcaacagcctggcgctgagctggtcaaacctggcgcttctgtgaagatgagctgcaaagccagcggctacgccttcagcagctactggatcaactggatgaagcagaaacccggccagggactcgaatggatcggccaaatctatcccggcgacggcgacaccaactacaacggcaagttcaagggcagagccacactgaccgccgatacctctagcagcacagcctacatgcagctgagcagcctgaccagcgaagatagcgccgtgtacttctgtgcccggtccatcacaacagtcgtgggctgcgctatggactattggggccagggaacaagcgtgaccgtgtctagtacgcgtatccagaaccctgatcctgccgtgtaccagctgcgggatagcaagagcagcgacaagagcgtgtgtctgttcaccgacttcgacagccagaccaacgtgtcccagagcaaggactccgacgtgtacatcaccgataagtgcgtgctggacatgcggagcatggacttcaagagcaactccgccgtggcctggtccaacaagtccgatttcgcctgcgccaacgccttcaacaacagcattatccccgaggacacattcttcccaagcagcgacgtgccctgcggtacccagagttttgggttgttggaccctaaattgtgctatctgttggacggaatcctgttcatttacggagtgatcctgaccgcattgttcctgcgggttaagttttccagatccgcagacgcacccgcttaccaacaagggcagaaccaactctacaatgaacttaatttggggcggagggaagagtacgacgttctggacaaaaggaggggacgagatcccgagatgggcggaaagcctcagcgaaggaagaatccgcaagaggggctttataacgaactccagaaagataaaatggcagaagcctatagtgagattgggatgaagggagaaaggaggaggggtaaaggtcacgatgggttgtaccaaggattgagcacagccactaaagatacctatgatgcgctccacatgcaggccctgccgccaaga

SEQ ID NO: 4558 - DNA, 3240 bp, Artificial Sequence
  Synthetic Polynucloetide
atggccttaccagtgaccgccttgctcctgccgctggccttgctgctccacgccgccaggccggcatgccaggtccagctcgtcgagtccggcggcggcctcgtccaggccggcgactccgtcaccctctcctgcaccgcctccggccgcaccttctcctcctacgccctcgcctggttccgccagcgccccggcaaggagcgcgagttcgtcgccggcctccgctggggcggccccaccaactacgccgactccgtcaaggaccgcttcaccatctccggcgactccgccaagcacaccatgtacctccagatgaactccctcaagcccgaggacaccgccgtctactactgcggctacaaccccggcggctgggccgtcccctcccagtacgagtacgactcctggggccagggcacccaggtcaccgtctcctccggtaccggcggaggcggatctggcggcggaggtagcggtggcggaggatctgaattcgacatccagatgacacagagccctagcagcctgtctgccagcgtgggagacagagtgaccatcacatgcaaggccagcgaccacatcaacaactggctggcctggtatcagcagaagcctggacaggcccctaagctgctgatctacggcgctaccacactggaaacaggcgtgcccagcagattttctggcagcggctctggcaccgactacaccctgacaatatccagcctccagcctgaggacttcgccacctactactgtcagcagagctggaacaccccttggacattcggccagggcaccaagctggaaatcaagagactcgaggggaaaccaattcccaaccctcttctgggactggattcaaccggcagcggcgaggacctgaagaacgtgttcccacctgaggtggccgtgttcgagcctagcgaggccgagatcagccacacccagaaagccaccctcgtgtgcctggctaccggcttctaccccgaccatgtggaactgtcttggtgggtcaacggcaaagaggtgcacagcggcgtgtctaccgacccccagccactgaaagaacagcccgccctgaacgacagccggtactgcctgagcagcagactgagagtgtccgccaccttctggcagaacccccggaaccacttcagatgccaggtgcagttctacggcctgagcgagaacgacgagtggacccaggacagagccaagcccgtgacccagatcgtgtctgccgaagcctggggcagagccgattgcggatcccagagcttcggcctgctggaccccaagctgtgctacctgctggatggcatcctgttcatctacggcgtgatcctgaccgccctgttcctgagagtgaagttcagcagaagcgccgacgcccctgcctaccagcagggacagaaccaactgtacaacgagctgaacctgggcagacgggaagagtacgacgtgctggacaagcggagaggcagggaccctgagatgggcggaaagccccagcggagaaagaacccccaggaaggactgtataacgaactccagaaagacaagatggccgaagcctacagcgagatcggcatgaagggcgagcggagaagaggcaagggccacgatggcctgtaccagggcctgagcaccgccaccaaggacacctatgacgccctgcacatgcaggccctgcctccaagaagggccaagcgatctggatctggagcaacaaacttctcactactcaaacaagcaggtgacgtggaggagaatcccgggcctactagtatggactggatttggcgcatccttttccttgtcggcgctgctaccggcgcccattccgggcccgaagttgctgccctcgagaaggaggtagcagctttggaaaaagaagtcgcagcccttgagaaagaagttgcggctctggagaagggatccggcggcggaggatctggcggaggcggatctgggggcggaggctctttcgaacaagttcagcttcaacagcctggcgctgagctggtcaaacctggcgcttctgtgaagatgagctgcaaagccagcggctacgccttcagcagctactggatcaactggatgaagcagaaacccggccagggactcgaatggatcggccaaatctatcccggcgacggcgacaccaactacaacggcaagttcaagggcagagccacactgaccgccgatacctctagcagcacagcctacatgcagctgagcagcctgaccagcgaagatagcgccgtgtacttctgtgcccggtccatcacaacagtcgtgggctgcgctatggactattggggccagggaacaagcgtgaccgtgtctagtacgcgtgagcagaaactgatctcggaagaggatgggagcggcatccagaaccctgatcctgccgtgtaccagctgcgggatagcaagagcagcgacaagagcgtgtgtctgttcaccgacttcgacagccagaccaacgtgtcccagagcaaggactccgacgtgtacatcaccgataagaccgtgctggacatgcggagcatggacttcaagagcaactccgccgtggcctggtccaacaagtccgatttcgcctgcgccaacgccttcaacaacagcattatccccgaggacacattcttcccaagccccgagagcagctgcggtacccagagttttgggttgttggaccctaaattgtgctatctgttggacggaatcctgttcatttacggagtgatcctgaccgcattgttcctgaggagcaagcggtcacggctgctccacagcgattacatgaatatgacaccacgaagaccgggtcctactcgcaaacactaccaaccctacgcacctccccgcgactttgcagcgtaccgatctcgggttaagttttccagatccgcagacgcacccgcttaccaacaagggcagaaccaactctacaatgaacttaatttggggcggagggaagagtacgacgttctggacaaaaggaggggacgagatcccgagatgggcggaaagcctcagcgaaggaagaatccgcaagaggggctttataacgaactccagaaagataaaatggcagaagcctatagtgagattgggatgaagggagaaaggaggaggggtaaaggtcacgatgggttgtaccaaggattgagcacagccactaaagatacctatgatgcgctccacatgcaggccctgccgccaaga

SEQ ID NO: 4559 - DNA, 3363 bp, Artificial Sequence
  Synthetic Polynucloetide
atggccttaccagtgaccgccttgctcctgccgctggccttgctgctccacgccgccaggccggcatgccaggtccagctcgtcgagtccggcggcggcctcgtccaggccggcgactccgtcaccctctcctgcaccgcctccggccgcaccttctcctcctacgccctcgcctggttccgccagcgccccggcaaggagcgcgagttcgtcgccggcctccgctggggcggccccaccaactacgccgactccgtcaaggaccgcttcaccatctccggcgactccgccaagcacaccatgtacctccagatgaactccctcaagcccgaggacaccgccgtctactactgcggctacaaccccggcggctgggccgtcccctcccagtacgagtacgactcctggggccagggcacccaggtcaccgtctcctccggtaccggcggaggcggatctggcggcggaggtagcggtggcggaggatctgaattcgacatccagatgacacagagccctagcagcctgtctgccagcgtgggagacagagtgaccatcacatgcaaggccagcgaccacatcaacaactggctggcctggtatcagcagaagcctggacaggcccctaagctgctgatctacggcgctaccacactggaaacaggcgtgcccagcagattttctggcagcggctctggcaccgactacaccctgacaatatccagcctccagcctgaggacttcgccacctactactgtcagcagagctggaacaccccttggacattcggccagggcaccaagctggaaatcaagagactcgaggggaaaccaattcccaaccctcttctgggactggattcaaccggcagcggcgaggacctgaagaacgtgttcccacctgaggtggccgtgttcgagcctagcgaggccgagatcagccacacccagaaagccaccctcgtgtgcctggctaccggcttctaccccgaccatgtggaactgtcttggtgggtcaacggcaaagaggtgcacagcggcgtgtctaccgacccccagccactgaaagaacagcccgccctgaacgacagccggtactgcctgagcagcagactgagagtgtccgccaccttctggcagaacccccggaaccacttcagatgccaggtgcagttctacggcctgagcgagaacgacgagtggacccaggacagagccaagcccgtgacccagatcgtgtctgccgaagcctggggcagagccgattgcggatcccagagcttcggcctgctggaccccaagctgtgctacctgctggatggcatcctgttcatctacggcgtgatcctgaccgccctgttcctgaggagtaagaggagcaggctcctgcacagtgactacatgaacatgactccacgccgccccggacccacccgcaagcattaccagccctatgccccaccacgcgacttcgcagcctatcgctccagagtgaagttcagcagaagcgccgacgcccctgcctaccagcagggacagaaccaactgtacaacgagctgaacctgggcagacgggaagagtacgacgtgctggacaagcggagaggcagggaccctgagatgggcggaaagccccagcggagaaagaacccccaggaaggactgtataacgaactccagaaagacaagatggccgaagcctacagcgagatcggcatgaagggcgagcggagaagaggcaagggccacgatggcctgtaccagggcctgagcaccgccaccaaggacacctatgacgccctgcacatgcaggccctgcctccaagaagggccaagcgatctggatctggagcaacaaacttctcactactcaaacaagcaggtgacgtggaggagaatcccgggcctactagtatggactggatttggcgcatccttttccttgtcggcgctgctaccggcgcccattccgggcccgaagttgctgccctcgagaaggaggtagcagctttggaaaaagaagtcgcagcccttgagaaagaagttgcggctctggagaagggatccggcggcggaggatctggcggaggcggatctgggggcggaggctctttcgaacaagttcagcttcaacagcctggcgctgagctggtcaaacctggcgcttctgtgaagatgagctgcaaagccagcggctacgccttcagcagctactggatcaactggatgaagcagaaacccggccagggactcgaatggatcggccaaatctatcccggcgacggcgacaccaactacaacggcaagttcaagggcagagccacactgaccgccgatacctctagcagcacagcctacatgcagctgagcagcctgaccagcgaagatagcgccgtgtacttctgtgcccggtccatcacaacagtcgtgggctgcgctatggactattggggccagggaacaagcgtgaccgtgtctagtacgcgtgagcagaaactgatctcggaagaggatgggagcggcatccagaaccctgatcctgccgtgtaccagctgcgggatagcaagagcagcgacaagagcgtgtgtctgttcaccgacttcgacagccagaccaacgtgtcccagagcaaggactccgacgtgtacatcaccgataagaccgtgctggacatgcggagcatggacttcaagagcaactccgccgtggcctggtccaacaagtccgatttcgcctgcgccaacgccttcaacaacagcattatccccgaggacacattcttcccaagccccgagagcagctgcggtacccagagttttgggttgttggaccctaaattgtgctatctgttggacggaatcctgttcatttacggagtgatcctgaccgcattgttcctgaggagcaagcggtcacggctgctccacagcgattacatgaatatgacaccacgaagaccgggtcctactcgcaaacactaccaaccctacgcacctccccgcgactttgcagcgtaccgatctcgggttaagttttccagatccgcagacgcacccgcttaccaacaagggcagaaccaactctacaatgaacttaatttggggcggagggaagagtacgacgttctggacaaaaggaggggacgagatcccgagatgggcggaaagcctcagcgaaggaagaatccgcaagaggggctttataacgaactccagaaagataaaatggcagaagcctatagtgagattgggatgaagggagaaaggaggaggggtaaaggtcacgatgggttgtaccaaggattgagcacagccactaaagatacctatgatgcgctccacatgcaggccctgccgccaaga

SEQ ID NO: 4560 - DNA, 3246 bp, Artificial Sequence
  Synthetic Polynucloetide
atggccttaccagtgaccgccttgctcctgccgctggccttgctgctccacgccgccaggccggcatgccaggtccagctcgtcgagtccggcggcggcctcgtccaggccggcgactccgtcaccctctcctgcaccgcctccggccgcaccttctcctcctacgccctcgcctggttccgccagcgccccggcaaggagcgcgagttcgtcgccggcctccgctggggcggccccaccaactacgccgactccgtcaaggaccgcttcaccatctccggcgactccgccaagcacaccatgtacctccagatgaactccctcaagcccgaggacaccgccgtctactactgcggctacaaccccggcggctgggccgtcccctcccagtacgagtacgactcctggggccagggcacccaggtcaccgtctcctccggtaccggcggaggcggatctggcggcggaggtagcggtggcggaggatctgaattcgacatccagatgacacagagccctagcagcctgtctgccagcgtgggagacagagtgaccatcacatgcaaggccagcgaccacatcaacaactggctggcctggtatcagcagaagcctggacaggcccctaagctgctgatctacggcgctaccacactggaaacaggcgtgcccagcagattttctggcagcggctctggcaccgactacaccctgacaatatccagcctccagcctgaggacttcgccacctactactgtcagcagagctggaacaccccttggacattcggccagggcaccaagctggaaatcaagagactcgaggggaaaccaattcccaaccctcttctgggactggattcaaccggcagcggcgaggacctgaagaacgtgttcccacctgaggtggccgtgttcgagcctagcgaggccgagatcagccacacccagaaagccaccctcgtgtgcctggctaccggcttctaccccgaccatgtggaactgtcttggtgggtcaacggcaaagaggtgcacagcggcgtgtctaccgacccccagccactgaaagaacagcccgccctgaacgacagccggtactgcctgagcagcagactgagagtgtccgccaccttctggcagaacccccggaaccacttcagatgccaggtgcagttctacggcctgagcgagaacgacgagtggacccaggacagagccaagcccgtgacccagatcgtgtctgccgaagcctggggcagagccgattgcggatcccagagcttcggcctgctggaccccaagctgtgctacctgctggatggcatcctgttcatctacggcgtgatcctgaccgccctgttcctgagagtgaagttcagcagaagcgccgacgcccctgcctaccagcagggacagaaccaactgtacaacgagctgaacctgggcagacgggaagagtacgacgtgctggacaagcggagaggcagggaccctgagatgggcggaaagccccagcggagaaagaacccccaggaaggactgtataacgaactccagaaagacaagatggccgaagcctacagcgagatcggcatgaagggcgagcggagaagaggcaagggccacgatggcctgtaccagggcctgagcaccgccaccaaggacacctatgacgccctgcacatgcaggccctgcctccaagaagggccaagcgatctggatctggagcaacaaacttctcactactcaaacaagcaggtgacgtggaggagaatcccgggcctactagtatggactggatttggcgcatccttttccttgtcggcgctgctaccggcgcccattccgggcccgaagttgctgccctcgagaaggaggtagcagctttggaaaaagaagtcgcagcccttgagaaagaagttgcggctctggagaagggatccggcggcggaggatctggcggaggcggatctgggggcggaggctctttcgaacaagttcagcttcaacagcctggcgctgagctggtcaaacctggcgcttctgtgaagatgagctgcaaagccagcggctacgccttcagcagctactggatcaactggatgaagcagaaacccggccagggactcgaatggatcggccaaatctatcccggcgacggcgacaccaactacaacggcaagttcaagggcagagccacactgaccgccgatacctctagcagcacagcctacatgcagctgagcagcctgaccagcgaagatagcgccgtgtacttctgtgcccggtccatcacaacagtcgtgggctgcgctatggactattggggccagggaacaagcgtgaccgtgtctagtacgcgtgagcagaaactgatctcggaagaggatctggggagcggcatccagaaccctgatcctgccgtgtaccagctgcgggatagcaagagcagcgacaagagcgtgtgtctgttcaccgacttcgacagccagaccaacgtgtcccagagcaaggactccgacgtgtacatcaccgataagaccgtgctggacatgcggagcatggacttcaagagcaactccgccgtggcctggtccaacaagtccgatttcgcctgcgccaacgccttcaacaacagcattatccccgaggacacattcttcccaagccccgagagcagctgcggtacccagagttttgggttgttggaccctaaattgtgctatctgttggacggaatcctgttcatttacggagtgatcctgaccgcattgttcctgaagagaggccggaagaagctgctgtacatcttcaagcagcctttcatgcggcccgtgcagaccacccaggaagaggacggctgctcctgccggttccccgaggaagaagaaggcggctgcgagctgcgggttaagttttccagatccgcagacgcacccgcttaccaacaagggcagaaccaactctacaatgaacttaatttggggcggagggaagagtacgacgttctggacaaaaggaggggacgagatcccgagatgggcggaaagcctcagcgaaggaagaatccgcaagaggggctttataacgaactccagaaagataaaatggcagaagcctatagtgagattgggatgaagggagaaaggaggaggggtaaaggtcacgatgggttgtaccaaggattgagcacagccactaaagatacctatgatgcgctccacatgcaggccctgccgccaaga

SEQ ID NO: 4561 - DNA, 3372 bp, Artificial Sequence
  Synthetic Polynucloetide
atggccttaccagtgaccgccttgctcctgccgctggccttgctgctccacgccgccaggccggcatgccaggtccagctcgtcgagtccggcggcggcctcgtccaggccggcgactccgtcaccctctcctgcaccgcctccggccgcaccttctcctcctacgccctcgcctggttccgccagcgccccggcaaggagcgcgagttcgtcgccggcctccgctggggcggccccaccaactacgccgactccgtcaaggaccgcttcaccatctccggcgactccgccaagcacaccatgtacctccagatgaactccctcaagcccgaggacaccgccgtctactactgcggctacaaccccggcggctgggccgtcccctcccagtacgagtacgactcctggggccagggcacccaggtcaccgtctcctccggtaccggcggaggcggatctggcggcggaggtagcggtggcggaggatctgaattcgacatccagatgacacagagccctagcagcctgtctgccagcgtgggagacagagtgaccatcacatgcaaggccagcgaccacatcaacaactggctggcctggtatcagcagaagcctggacaggcccctaagctgctgatctacggcgctaccacactggaaacaggcgtgcccagcagattttctggcagcggctctggcaccgactacaccctgacaatatccagcctccagcctgaggacttcgccacctactactgtcagcagagctggaacaccccttggacattcggccagggcaccaagctggaaatcaagagactcgaggggaaaccaattcccaaccctcttctgggactggattcaaccggcagcggcgaggacctgaagaacgtgttcccacctgaggtggccgtgttcgagcctagcgaggccgagatcagccacacccagaaagccaccctcgtgtgcctggctaccggcttctaccccgaccatgtggaactgtcttggtgggtcaacggcaaagaggtgcacagcggcgtgtctaccgacccccagccactgaaagaacagcccgccctgaacgacagccggtactgcctgagcagcagactgagagtgtccgccaccttctggcagaacccccggaaccacttcagatgccaggtgcagttctacggcctgagcgagaacgacgagtggacccaggacagagccaagcccgtgacccagatcgtgtctgccgaagcctggggcagagccgattgcggatcccagagcttcggcctgctggaccccaagctgtgctacctgctggatggcatcctgttcatctacggcgtgatcctgaccgccctgttcctgaaacggggcagaaagaaactcctgtatatattcaaacaaccatttatgagaccagtacaaactactcaagaggaagatggctgtagctgccgatttccagaagaagaagaaggaggatgtgaactgagagtgaagttcagcagaagcgccgacgcccctgcctaccagcagggacagaaccaactgtacaacgagctgaacctgggcagacgggaagagtacgacgtgctggacaagcggagaggcagggaccctgagatgggcggaaagccccagcggagaaagaacccccaggaaggactgtataacgaactccagaaagacaagatggccgaagcctacagcgagatcggcatgaagggcgagcggagaagaggcaagggccacgatggcctgtaccagggcctgagcaccgccaccaaggacacctatgacgccctgcacatgcaggccctgcctccaagaagggccaagcgatctggatctggagcaacaaacttctcactactcaaacaagcaggtgacgtggaggagaatcccgggcctactagtatggactggatttggcgcatccttttccttgtcggcgctgctaccggcgcccattccgggcccgaagttgctgccctcgagaaggaggtagcagctttggaaaaagaagtcgcagcccttgagaaagaagttgcggctctggagaagggatccggcggcggaggatctggcggaggcggatctgggggcggaggctctttcgaacaagttcagcttcaacagcctggcgctgagctggtcaaacctggcgcttctgtgaagatgagctgcaaagccagcggctacgccttcagcagctactggatcaactggatgaagcagaaacccggccagggactcgaatggatcggccaaatctatcccggcgacggcgacaccaactacaacggcaagttcaagggcagagccacactgaccgccgatacctctagcagcacagcctacatgcagctgagcagcctgaccagcgaagatagcgccgtgtacttctgtgcccggtccatcacaacagtcgtgggctgcgctatggactattggggccagggaacaagcgtgaccgtgtctagtacgcgtgagcagaaactgatctcggaagaggatctggggagcggcatccagaaccctgatcctgccgtgtaccagctgcgggatagcaagagcagcgacaagagcgtgtgtctgttcaccgacttcgacagccagaccaacgtgtcccagagcaaggactccgacgtgtacatcaccgataagaccgtgctggacatgcggagcatggacttcaagagcaactccgccgtggcctggtccaacaagtccgatttcgcctgcgccaacgccttcaacaacagcattatccccgaggacacattcttcccaagccccgagagcagctgcggtacccagagttttgggttgttggaccctaaattgtgctatctgttggacggaatcctgttcatttacggagtgatcctgaccgcattgttcctgaagagaggccggaagaagctgctgtacatcttcaagcagcctttcatgcggcccgtgcagaccacccaggaagaggacggctgctcctgccggttccccgaggaagaagaaggcggctgcgagctgcgggttaagttttccagatccgcagacgcacccgcttaccaacaagggcagaaccaactctacaatgaacttaatttggggcggagggaagagtacgacgttctggacaaaaggaggggacgagatcccgagatgggcggaaagcctcagcgaaggaagaatccgcaagaggggctttataacgaactccagaaagataaaatggcagaagcctatagtgagattgggatgaagggagaaaggaggaggggtaaaggtcacgatgggttgtaccaaggattgagcacagccactaaagatacctatgatgcgctccacatgcaggccctgccgccaaga

SEQ ID NO: 4562 - DNA, 3045 bp, Artificial Sequence
  Synthetic Polynucloetide
atggccttaccagtgaccgccttgctcctgccgctggccttgctgctccacgccgccaggccggcatgccaggtccagctcgtcgagtccggcggcggcctcgtccaggccggcgactccgtcaccctctcctgcaccgcctccggccgcaccttctcctcctacgccctcgcctggttccgccagcgccccggcaaggagcgcgagttcgtcgccggcctccgctggggcggccccaccaactacgccgactccgtcaaggaccgcttcaccatctccggcgactccgccaagcacaccatgtacctccagatgaactccctcaagcccgaggacaccgccgtctactactgcggctacaaccccggcggctgggccgtcccctcccagtacgagtacgactcctggggccagggcacccaggtcaccgtctcctccggtaccggcggaggcggatctggcggcggaggtagcggtggcggaggatctgaattcgacatccagatgacacagagccctagcagcctgtctgccagcgtgggagacagagtgaccatcacatgcaaggccagcgaccacatcaacaactggctggcctggtatcagcagaagcctggacaggcccctaagctgctgatctacggcgctaccacactggaaacaggcgtgcccagcagattttctggcagcggctctggcaccgactacaccctgacaatatccagcctccagcctgaggacttcgccacctactactgtcagcagagctggaacaccccttggacattcggccagggcaccaagctggaaatcaagagactcgagcagagcttcggcctgctggaccccaagctgtgctacctgctggatggcatcctgttcatctacggcgtgatcctgaccgccctgttcctgagagtgaagttcagcagaagcgccgacgcccctgcctaccagcagggacagaaccaactgtacaacgagctgaacctgggcagacgggaagagtacgacgtgctggacaagcggagaggcagggaccctgagatgggcggaaagccccagcggagaaagaacccccaggaaggactgtataacgaactccagaaagacaagatggccgaagcctacagcgagatcggcatgaagggcgagcggagaagaggcaagggccacgatggcctgtaccagggcctgagcaccgccaccaaggacacctatgacgccctgcacatgcaggccctgcctccaagaagggccaagcgatctggatctggagcaacaaacttctcactactcaaacaagcaggtgacgtggaggagaatcccgggcctactagtatggactggatttggcgcatccttttccttgtcggcgctgctaccggcgcccattccgggcccgaagttgctgccctcgagaaggaggtagcagctttggaaaaagaagtcgcagcccttgagaaagaagttgcggctctggagaagggatccggcggcggaggatctggcggaggcggatctgggggcggaggctctttcgaacaagttcagcttcaacagcctggcgctgagctggtcaaacctggcgcttctgtgaagatgagctgcaaagccagcggctacgccttcagcagctactggatcaactggatgaagcagaaacccggccagggactcgaatggatcggccaaatctatcccggcgacggcgacaccaactacaacggcaagttcaagggcagagccacactgaccgccgatacctctagcagcacagcctacatgcagctgagcagcctgaccagcgaagatagcgccgtgtacttctgtgcccggtccatcacaacagtcgtgggctgcgctatggactattggggccagggaacaagcgtgaccgtgtctagtacgcgtcagagttttgggttgttggaccctaaattgtgctatctgttggacggaatcctgttcatttacggagtgatcctgaccgcattgttcctgcgggttaagttttccagatccgcagacgcacccgcttaccaacaagggcagaaccaactctacaatgaacttaatttggggcggagggaagagtacgacgttctggacaaaaggaggggacgagatcccgagatgggcggaaagcctcagcgaaggaagaatccgcaagaggggctttataacgaactccagaaagataaaatggcagaagcctatagtgagattgggatgaagggagaaaggaggaggggtaaaggtcacgatgggttgtaccaaggattgagcacagccactaaagatacctatgatgcgctccacatgcaggccctgccgccaagacgcgccaagagaagcggatctggcgtgaagcagaccctgaatttcgacctgctgaagctggctggcgacgtggaatccaacccaggcccttctagaggccatatgaccgagtacaagcccacggtgcgcctcgccacccgcgacgacgtccccagggccgtacgcaccctcgccgccgcgttcgccgactaccccgccacgcgccacaccgtcgatccggaccgccacatcgagcgggtcaccgagctgcaagaactcttcctcacgcgcgtcgggctcgacatcggcaaggtgtgggtcgcggacgacggcgccgcggtggcggtctggaccacgccggagagcgtcgaagcgggggcggtgttcgccgagatcggcccgcgcatggccgagttgagcggttcccggctggccgcgcagcaacagatggaaggcctcctggcgccgcaccggcccaaggagcccgcgtggttcctggccaccgtcggcgtctcgcccgaccaccagggcaagggtctgggcagcgccgtcgtgctccccggagtggaggcggccgagcgcgccggggtgcccgccttcctggagacctccgcgccccgcaacctccccttctacgagcggctcggcttcaccgtcaccgccgacgtcgaggtgcccgaaggaccgcgcacctggtgcatgacccgcaagcccggtgcctga

SEQ ID NO: 4563 - DNA, 2517 bp, Artificial Sequence
  Synthetic Polynucloetide
atggccttaccagtgaccgccttgctcctgccgctggccttgctgctccacgccgccaggccggcatgccaggtccagctcgtcgagtccggcggcggcctcgtccaggccggcgactccgtcaccctctcctgcaccgcctccggccgcaccttctcctcctacgccctcgcctggttccgccagcgccccggcaaggagcgcgagttcgtcgccggcctccgctggggcggccccaccaactacgccgactccgtcaaggaccgcttcaccatctccggcgactccgccaagcacaccatgtacctccagatgaactccctcaagcccgaggacaccgccgtctactactgcggctacaaccccggcggctgggccgtcccctcccagtacgagtacgactcctggggccagggcacccaggtcaccgtctcctccggtaccggcggaggcggatctggcggcggaggtagcggtggcggaggatctgaattcgacatccagatgacacagagccctagcagcctgtctgccagcgtgggagacagagtgaccatcacatgcaaggccagcgaccacatcaacaactggctggcctggtatcagcagaagcctggacaggcccctaagctgctgatctacggcgctaccacactggaaacaggcgtgcccagcagattttctggcagcggctctggcaccgactacaccctgacaatatccagcctccagcctgaggacttcgccacctactactgtcagcagagctggaacaccccttggacattcggccagggcaccaagctggaaatcaagagactcgagggacagcctaaggccaatcctaccgtgacactgttccctccaagcagcgaagaactccaggccaacaaggccacacttgtgtgcctgatctccgacttctaccctggggctgtgacagtggcttggaaggccgatggatctcctgtgaaagccggcgtggaaaccaccaagccatccaagcagagcaacaacaaatacgccgccagctcctacctgagcctgacacctgagcagtggaagtcccacagatcctacagctgccaagtgacccacgaaggcagcaccgtggaaaagacagtggcccctacagagtgcagccccatcaagaccgatgtgattacaatggaccccaaggacaactgctccaaggacgccaacgataccctgctgctccagctgaccaacaccagcgcctactacatgtacttgttgctgctgctgaagtccgtggtgtacttcgccatcatcacatgctgcctgctgcggagaaccgccttctgctgcaacggcgagaagtctagggccaagcgatctggatctggagcaacaaacttctcactactcaaacaagcaggtgacgtggaggagaatcccgggcctactagtatggactggatttggcgcatccttttccttgtcggcgctgctaccggcgcccattccgggcccgaagttgctgccctcgagaaggaggtagcagctttggaaaaagaagtcgcagcccttgagaaagaagttgcggctctggagaagggatccggcggcggaggatctggcggaggcggatctgggggcggaggctctttcgaacaagttcagcttcaacagcctggcgctgagctggtcaaacctggcgcttctgtgaagatgagctgcaaagccagcggctacgccttcagcagctactggatcaactggatgaagcagaaacccggccagggactcgaatggatcggccaaatctatcccggcgacggcgacaccaactacaacggcaagttcaagggcagagccacactgaccgccgatacctctagcagcacagcctacatgcagctgagcagcctgaccagcgaagatagcgccgtgtacttctgtgcccggtccatcacaacagtcgtgggctgcgctatggactattggggccagggaacaagcgtgaccgtgtctagtacgcgtgcctctacaaagggaccctccgtgtttcctctggctcccagcagcaagtctacaagcggaggaacagccgctctgggctgcctggtcaaggattactttcccgagcctgtgaccgtgtcctggaatagcggagcactgacaagcggcgtgcacacctttccagccgtgctgcaaagcagcggcctgtactctctgagcagcgtggtcacagtgcctagctctagcctgggcacccagacctacatctgcaatgtgaaccacaagcctagcaacaccaaggtggacaagagagtggaacccaagagctgtgaagtgaaaaccgactccaccgaccacgtgaagcccaaagagacagagaacaccaagcagcccagcaagagctgccacaagcccaaggccatcgtgcacaccgagaaagtgaacatgatgagcctgaccgtgctgggcctgcggatgctgttcgccaaaaccgtggccgtgaacttcctgctgaccgccaagctgttcttcctc

SEQ ID NO: 4564 - DNA, 2451 bp, Artificial Sequence
  Synthetic Polynucloetide
atggccttaccagtgaccgccttgctcctgccgctggccttgctgctccacgccgccaggccggcatgccaggtccagctcgtcgagtccggcggcggcctcgtccaggccggcgactccgtcaccctctcctgcaccgcctccggccgcaccttctcctcctacgccctcgcctggttccgccagcgccccggcaaggagcgcgagttcgtcgccggcctccgctggggcggccccaccaactacgccgactccgtcaaggaccgcttcaccatctccggcgactccgccaagcacaccatgtacctccagatgaactccctcaagcccgaggacaccgccgtctactactgcggctacaaccccggcggctgggccgtcccctcccagtacgagtacgactcctggggccagggcacccaggtcaccgtctcctccggtaccggcggaggcggatctggcggcggaggtagcggtggcggaggatctgaattcgacatccagatgacacagagccctagcagcctgtctgccagcgtgggagacagagtgaccatcacatgcaaggccagcgaccacatcaacaactggctggcctggtatcagcagaagcctggacaggcccctaagctgctgatctacggcgctaccacactggaaacaggcgtgcccagcagattttctggcagcggctctggcaccgactacaccctgacaatatccagcctccagcctgaggacttcgccacctactactgtcagcagagctggaacaccccttggacattcggccagggcaccaagctggaaatcaagagactcgagggacagcctaaggccaatcctaccgtgacactgttccctccaagcagcgaagaactccaggccaacaaggccacacttgtgtgcctgatctccgacttctaccctggggctgtgacagtggcttggaaggccgatggatctcctgtgaaagccggcgtggaaaccaccaagccatccaagcagagcaacaacaaatacgccgccagctcctacctgagcctgacacctgagcagtggaagtcccacagatcctacagctgccaagtgacccacgaaggcagcaccgtggaaaagacagtggcccctacagagtgcagcggcagagccgattgcggcatcaccagcgccagctaccaccagggcgtgctgagcgccaccatcctgtacgagatcctgctgggcaaggccaccctgtacgccgtgctggtgtctgccctggtgctgatggctatggtcaagcggaaggacagccggggaagggccaagcgatctggatctggagcaacaaacttctcactactcaaacaagcaggtgacgtggaggagaatcccgggcctactagtatggactggatttggcgcatccttttccttgtcggcgctgctaccggcgcccattccgggcccgaagttgctgccctcgagaaggaggtagcagctttggaaaaagaagtcgcagcccttgagaaagaagttgcggctctggagaagggatccggcggcggaggatctggcggaggcggatctgggggcggaggctctttcgaacaagttcagcttcaacagcctggcgctgagctggtcaaacctggcgcttctgtgaagatgagctgcaaagccagcggctacgccttcagcagctactggatcaactggatgaagcagaaacccggccagggactcgaatggatcggccaaatctatcccggcgacggcgacaccaactacaacggcaagttcaagggcagagccacactgaccgccgatacctctagcagcacagcctacatgcagctgagcagcctgaccagcgaagatagcgccgtgtacttctgtgcccggtccatcacaacagtcgtgggctgcgctatggactattggggccagggaacaagcgtgaccgtgtctagtacgcgtgcctctacaaagggaccctccgtgtttcctctggctcccagcagcaagtctacaagcggaggaacagccgctctgggctgcctggtcaaggattactttcccgagcctgtgaccgtgtcctggaatagcggagcactgacaagcggcgtgcacacctttccagccgtgctgcaaagcagcggcctgtactctctgagcagcgtggtcacagtgcctagctctagcctgggcacccagacctacatctgcaatgtgaaccacaagcctagcaacaccaaggtggacaagagagtggaacccaagagctgtatccccgaggacacattcttcccaagcagcgacgtgccctgcgacgtgaagctggtggaaaagagcttcgagacagacaccaacctgaacttccagaacctgagcgtgatcggcttcagaatcctgctgctgaaagtggccggctttaacctgctgatgaccctgcggctgtggtccagc

SEQ ID NO: 4565 - DNA, 2451 bp, Artificial Sequence
  Synthetic Polynucloetide
atggccttaccagtgaccgccttgctcctgccgctggccttgctgctccacgccgccaggccggcatgccaggtccagctcgtcgagtccggcggcggcctcgtccaggccggcgactccgtcaccctctcctgcaccgcctccggccgcaccttctcctcctacgccctcgcctggttccgccagcgccccggcaaggagcgcgagttcgtcgccggcctccgctggggcggccccaccaactacgccgactccgtcaaggaccgcttcaccatctccggcgactccgccaagcacaccatgtacctccagatgaactccctcaagcccgaggacaccgccgtctactactgcggctacaaccccggcggctgggccgtcccctcccagtacgagtacgactcctggggccagggcacccaggtcaccgtctcctccggtaccggcggaggcggatctggcggcggaggtagcggtggcggaggatctgaattcgacatccagatgacacagagccctagcagcctgtctgccagcgtgggagacagagtgaccatcacatgcaaggccagcgaccacatcaacaactggctggcctggtatcagcagaagcctggacaggcccctaagctgctgatctacggcgctaccacactggaaacaggcgtgcccagcagattttctggcagcggctctggcaccgactacaccctgacaatatccagcctccagcctgaggacttcgccacctactactgtcagcagagctggaacaccccttggacattcggccagggcaccaagctggaaatcaagagactcgagggacagcctaaggccaatcctaccgtgacactgttccctccaagcagcgaagaactccaggccaacaaggccacacttgtgtgcctgatctccgacttctaccctggggctgtgacagtggcttggaaggccgatggatctcctgtgaaagccggcgtggaaaccaccaagccatccaagcagagcaacaacaaatacgccgccagctcctacctgagcctgacacctgagcagtggaagtcccacagatcctacagctgccaagtgacccacgaaggcagcaccgtggaaaagacagtggcccctacagagtgcagcggcagagccgattgcggctttaccagcgagagctaccagcagggcgtgctgagcgccaccatcctgtacgagatcctgctgggcaaggccaccctgtacgccgtgctggtgtctgccctggtgctgatggctatggtcaagcggaaggacagccggggaagggccaagcgatctggatctggagcaacaaacttctcactactcaaacaagcaggtgacgtggaggagaatcccgggcctactagtatggactggatttggcgcatccttttccttgtcggcgctgctaccggcgcccattccgggcccgaagttgctgccctcgagaaggaggtagcagctttggaaaaagaagtcgcagcccttgagaaagaagttgcggctctggagaagggatccggcggcggaggatctggcggaggcggatctgggggcggaggctctttcgaacaagttcagcttcaacagcctggcgctgagctggtcaaacctggcgcttctgtgaagatgagctgcaaagccagcggctacgccttcagcagctactggatcaactggatgaagcagaaacccggccagggactcgaatggatcggccaaatctatcccggcgacggcgacaccaactacaacggcaagttcaagggcagagccacactgaccgccgatacctctagcagcacagcctacatgcagctgagcagcctgaccagcgaagatagcgccgtgtacttctgtgcccggtccatcacaacagtcgtgggctgcgctatggactattggggccagggaacaagcgtgaccgtgtctagtacgcgtgcctctacaaagggaccctccgtgtttcctctggctcccagcagcaagtctacaagcggaggaacagccgctctgggctgcctggtcaaggattactttcccgagcctgtgaccgtgtcctggaatagcggagcactgacaagcggcgtgcacacctttccagccgtgctgcaaagcagcggcctgtactctctgagcagcgtggtcacagtgcctagctctagcctgggcacccagacctacatctgcaatgtgaaccacaagcctagcaacaccaaggtggacaagagagtggaacccaagagctgtatccccgaggacacattcttcccaagccccgagagcagctgcgacgtgaagctggtggaaaagagcttcgagacagacaccaacctgaacttccagaacctgagcgtgatcggcttcagaatcctgctgctgaaagtggccggctttaacctgctgatgaccctgcggctgtggtccagc

SEQ ID NO: 4566 - DNA, 2352 bp, Artificial Sequence
  Synthetic Polynucloetide
atggccttaccagtgaccgccttgctcctgccgctggccttgctgctccacgccgccaggccgcagctccagctgcaagagtctggacctggcctggtcaagcctagcgagacactgagcctgacctgtaccgtgtccggcgatagcatcagcagcggcgattactactggggctggatcagacagcctcctggcaaaggactggaatggatcggccacatctactggggcggccccaccaactacgccgactccgtcaaggaccgcttcaccatctccggcgactccgccaagcacaccatgtacctccagatgaactccctcaagcccgaggacaccgccgtctactactgcggctacaaccccggcggctgggccgtcccctcccagtacgagtacgactcctggggccagggcacccaggtcaccgtctcctccctcgagggacagcctaaggccaatcctaccgtgacactgttccctccaagcagcgaagaactccaggccaacaaggccacacttgtgtgcctgatctccgacttctaccctggggctgtgacagtggcttggaaggccgatggatctcctgtgaaagccggcgtggaaaccaccaagccatccaagcagagcaacaacaaatacgccgccagctcctacctgagcctgacacctgagcagtggaagtcccacagatcctacagctgccaagtgacccacgaaggcagcaccgtggaaaagacagtggcccctacagagtgcagcggcagagccgattgcggctttaccagcgagagctaccagcagggcgtgctgagcgccaccatcctgtacgagatcctgctgggcaaggccaccctgtacgccgtgctggtgtctgccctggtgctgatggctatggtcaagcggaaggacagccggggaagggccaagcgatctggatctggagcaacaaacttctcactactcaaacaagcaggtgacgtggaggagaatcccgggcctactagtatggactggatttggcgcatccttttccttgtcggcgctgctaccggcgcgcattccgggcccgaagttgctgccctcgagaaggaggtagcagctttggaaaaagaagtcgcagcccttgagaaagaagttgcggctctggagaagacgcgtgcctctacaaagggaccctccgtgtttcctctggctcccagcagcaagtctacaagcggaggaacagccgctctgggctgcctggtcaaggattactttcccgagcctgtgaccgtgtcctggaatagcggagcactgacaagcggcgtgcacacctttccagccgtgctgcaaagcagcggcctgtactctctgagcagcgtggtcacagtgcctagctctagcctgggcacccagacctacatctgcaatgtgaaccacaagcctagcaacaccaaggtggacaagagagtggaacccaagagctgtatccccgaggacacattcttcccaagccccgagagcagctgcgacgtgaagctggtggaaaagagcttcgagacagacaccaacctgaacttccagaacctgagcgtgatcggcttcagaatcctgctgctgaaagtggccggctttaacctgctgatgaccctgcggctgtggtccagccgcgccaagagaagcggatctggcgtgaagcagaccctgaatttcgacctgctgaagctggctggcgacgtggaatccaacccaggcccttctagaggccatatgaccgagtacaagcccacggtgcgcctcgccacccgcgacgacgtccccagggccgtacgcaccctcgccgccgcgttcgccgactaccccgccacgcgccacaccgtcgatccggaccgccacatcgagcgggtcaccgagctgcaagaactcttcctcacgcgcgtcgggctcgacatcggcaaggtgtgggtcgcggacgacggcgccgcggtggcggtctggaccacgccggagagcgtcgaagcgggggcggtgttcgccgagatcggcccgcgcatggccgagttgagcggttcccggctggccgcgcagcaacagatggaaggcctcctggcgccgcaccggcccaaggagcccgcgtggttcctggccaccgtcggcgtctcgcccgaccaccagggcaagggtctgggcagcgccgtcgtgctccccggagtggaggcggccgagcgcgccggggtgcccgccttcctggagacctccgcgccccgcaacctccccttctacgagcggctcggcttcaccgtcaccgccgacgtcgaggtgcccgaaggaccgcgcacctggtgcatgacccgcaagcccggtgcctga

SEQ ID NO: 4567 - DNA, 1650 bp, Artificial Sequence
  Synthetic Polynucloetide
atggccttaccagtgaccgccttgctcctgccgctggccttgctgctccacgccgccaggccgcagctccagctgcaagagtctggacctggcctggtcaagcctagcgagacactgagcctgacctgtaccgtgtccggcgatagcatcagcagcggcgattactactggggctggatcagacagcctcctggcaaaggactggaatggatcggccacatctactggggcggccccaccaactacgccgactccgtcaaggaccgcttcaccatctccggcgactccgccaagcacaccatgtacctccagatgaactccctcaagcccgaggacaccgccgtctactactgcggctacaaccccggcggctgggccgtcccctcccagtacgagtacgactcctggggccagggcacccaggtcaccgtctcctccctcgagggacagcctaaggccaatcctaccgtgacactgttccctccaagcagcgaagaactccaggccaacaaggccacacttgtgtgcctgatctccgacttctaccctggggctgtgacagtggcttggaaggccgatggatctcctgtgaaagccggcgtggaaaccaccaagccatccaagcagagcaacaacaaatacgccgccagctcctacctgagcctgacacctgagcagtggaagtcccacagatcctacagctgccaagtgacccacgaaggcagcaccgtggaaaagacagtggcccctacagagtgcagcggcagagccgattgcggctttaccagcgagagctaccagcagggcgtgctgagcgccaccatcctgtacgagatcctgctgggcaaggccaccctgtacgccgtgctggtgtctgccctggtgctgatggctatggtcaagcggaaggacagccggggaagggccaagcgatctggatctggagcaacaaacttctcactactcaaacaagcaggtgacgtggaggagaatcccgggcctactagtatggactggatttggcgcatccttttccttgtcggcgctgctaccggcgcgcattccgggcccgaagttgctgccctcgagaaggaggtagcagctttggaaaaagaagtcgcagcccttgagaaagaagttgcggctctggagaagacgcgtgcctctacaaagggaccctccgtgtttcctctggctcccagcagcaagtctacaagcggaggaacagccgctctgggctgcctggtcaaggattactttcccgagcctgtgaccgtgtcctggaatagcggagcactgacaagcggcgtgcacacctttccagccgtgctgcaaagcagcggcctgtactctctgagcagcgtggtcacagtgcctagctctagcctgggcacccagacctacatctgcaatgtgaaccacaagcctagcaacaccaaggtggacaagagagtggaacccaagagctgtatccccgaggacacattcttcccaagccccgagagcagctgcgacgtgaagctggtggaaaagagcttcgagacagacaccaacctgaacttccagaacctgagcgtgatcggcttcagaatcctgctgctgaaagtggccggctttaacctgctgatgaccctgcggctgtggtccagc

SEQ ID NO: 4568 - DNA, 1737 bp, Artificial Sequence
  Synthetic Polynucloetide
atggccttaccagtgaccgccttgctcctgccgctggccttgctgctccacgccgccaggccgcagctccagctgcaagagtctggacctggcctggtcaagcctagcgagacactgagcctgacctgtaccgtgtccggcgatagcatcagcagcggcgattactactggggctggatcagacagcctcctggcaaaggactggaatggatcggccacatctactggggcggccccaccaactacgccgactccgtcaaggaccgcttcaccatctccggcgactccgccaagcacaccatgtacctccagatgaactccctcaagcccgaggacaccgccgtctactactgcggctacaaccccggcggctgggccgtcccctcccagtacgagtacgactcctggggccagggcacccaggtcaccgtctcctccctcgagggatctggcagagccgattgcggctttaccagcgagagctaccagcagggcgtgctgagcgccaccatcctgtacgagatcctgctgggcaaggccaccctgtacgccgtgctggtgtctgccctggtgctgatggctatggtcaagcggaaggacagccggggaagggccaagcgatctggatctggagcaacaaacttctcactactcaaacaagcaggtgacgtggaggagaatcccgggcctactagtatggactggatttggcgcatccttttccttgtcggcgctgctaccggcgcgcattccgggcccgaagttgctgccctcgagaaggaggtagcagctttggaaaaagaagtcgcagcccttgagaaagaagttgcggctctggagaagacgcgtggcagcatccccgaggacacattcttcccaagccccgagagcagctgcgacgtgaagctggtggaaaagagcttcgagacagacaccaacctgaacttccagaacctgagcgtgatcggcttcagaatcctgctgctgaaagtggccggctttaacctgctgatgaccctgcggctgtggtccagccgcgccaagagaagcggatctggcgtgaagcagaccctgaatttcgacctgctgaagctggctggcgacgtggaatccaacccaggcccttctagaggccatatgaccgagtacaagcccacggtgcgcctcgccacccgcgacgacgtccccagggccgtacgcaccctcgccgccgcgttcgccgactaccccgccacgcgccacaccgtcgatccggaccgccacatcgagcgggtcaccgagctgcaagaactcttcctcacgcgcgtcgggctcgacatcggcaaggtgtgggtcgcggacgacggcgccgcggtggcggtctggaccacgccggagagcgtcgaagcgggggcggtgttcgccgagatcggcccgcgcatggccgagttgagcggttcccggctggccgcgcagcaacagatggaaggcctcctggcgccgcaccggcccaaggagcccgcgtggttcctggccaccgtcggcgtctcgcccgaccaccagggcaagggtctgggcagcgccgtcgtgctccccggagtggaggcggccgagcgcgccggggtgcccgccttcctggagacctccgcgccccgcaacctccccttctacgagcggctcggcttcaccgtcaccgccgacgtcgaggtgcccgaaggaccgcgcacctggtgcatgacccgcaagcccggtgcctga

SEQ ID NO: 4569 - DNA, 1035 bp, Artificial Sequence
  Synthetic Polynucloetide
atggccttaccagtgaccgccttgctcctgccgctggccttgctgctccacgccgccaggccgcagctccagctgcaagagtctggacctggcctggtcaagcctagcgagacactgagcctgacctgtaccgtgtccggcgatagcatcagcagcggcgattactactggggctggatcagacagcctcctggcaaaggactggaatggatcggccacatctactggggcggccccaccaactacgccgactccgtcaaggaccgcttcaccatctccggcgactccgccaagcacaccatgtacctccagatgaactccctcaagcccgaggacaccgccgtctactactgcggctacaaccccggcggctgggccgtcccctcccagtacgagtacgactcctggggccagggcacccaggtcaccgtctcctccctcgagggatctggcagagccgattgcggctttaccagcgagagctaccagcagggcgtgctgagcgccaccatcctgtacgagatcctgctgggcaaggccaccctgtacgccgtgctggtgtctgccctggtgctgatggctatggtcaagcggaaggacagccggggaagggccaagcgatctggatctggagcaacaaacttctcactactcaaacaagcaggtgacgtggaggagaatcccgggcctactagtatggactggatttggcgcatccttttccttgtcggcgctgctaccggcgcgcattccgggcccgaagttgctgccctcgagaaggaggtagcagctttggaaaaagaagtcgcagcccttgagaaagaagttgcggctctggagaagacgcgtggcagcatccccgaggacacattcttcccaagccccgagagcagctgcgacgtgaagctggtggaaaagagcttcgagacagacaccaacctgaacttccagaacctgagcgtgatcggcttcagaatcctgctgctgaaagtggccggctttaacctgctgatgaccctgcggctgtggtccagc

SEQ ID NO: 4570 - DNA, 1764 bp, Artificial Sequence
  Synthetic Polynucloetide
atggccttaccagtgaccgccttgctcctgccgctggccttgctgctccacgccgccaggccgcagctccagctgcaagagtctggacctggcctggtcaagcctagcgagacactgagcctgacctgtaccgtgtccggcgatagcatcagcagcggcgattactactggggctggatcagacagcctcctggcaaaggactggaatggatcggccacatctactggggcggccccaccaactacgccgactccgtcaaggaccgcttcaccatctccggcgactccgccaagcacaccatgtacctccagatgaactccctcaagcccgaggacaccgccgtctactactgcggctacaaccccggcggctgggccgtcccctcccagtacgagtacgactcctggggccagggcacccaggtcaccgtctcctccctcgaggacaaaactcacacatgcccaccgtgcccagcaggcagagccgattgcggctttaccagcgagagctaccagcagggcgtgctgagcgccaccatcctgtacgagatcctgctgggcaaggccaccctgtacgccgtgctggtgtctgccctggtgctgatggctatggtcaagcggaaggacagccggggaagggccaagcgatctggatctggagcaacaaacttctcactactcaaacaagcaggtgacgtggaggagaatcccgggcctactagtatggactggatttggcgcatccttttccttgtcggcgctgctaccggcgcgcattccgggcccgaagttgctgccctcgagaaggaggtagcagctttggaaaaagaagtcgcagcccttgagaaagaagttgcggctctggagaagacgcgtggcagcatccccgaggacacattcttcccaagccccgagagcagctgcgacgtgaagctggtggaaaagagcttcgagacagacaccaacctgaacttccagaacctgagcgtgatcggcttcagaatcctgctgctgaaagtggccggctttaacctgctgatgaccctgcggctgtggtccagccgcgccaagagaagcggatctggcgtgaagcagaccctgaatttcgacctgctgaagctggctggcgacgtggaatccaacccaggcccttctagaggccatatgaccgagtacaagcccacggtgcgcctcgccacccgcgacgacgtccccagggccgtacgcaccctcgccgccgcgttcgccgactaccccgccacgcgccacaccgtcgatccggaccgccacatcgagcgggtcaccgagctgcaagaactcttcctcacgcgcgtcgggctcgacatcggcaaggtgtgggtcgcggacgacggcgccgcggtggcggtctggaccacgccggagagcgtcgaagcgggggcggtgttcgccgagatcggcccgcgcatggccgagttgagcggttcccggctggccgcgcagcaacagatggaaggcctcctggcgccgcaccggcccaaggagcccgcgtggttcctggccaccgtcggcgtctcgcccgaccaccagggcaagggtctgggcagcgccgtcgtgctccccggagtggaggcggccgagcgcgccggggtgcccgccttcctggagacctccgcgccccgcaacctccccttctacgagcggctcggcttcaccgtcaccgccgacgtcgaggtgcccgaaggaccgcgcacctggtgcatgacccgcaagcccggtgcctga

SEQ ID NO: 4571 - DNA, 1764 bp, Artificial Sequence
  Synthetic Polynucloetide
atggccttaccagtgaccgccttgctcctgccgctggccttgctgctccacgccgccaggccgcagctccagctgcaagagtctggacctggcctggtcaagcctagcgagacactgagcctgacctgtaccgtgtccggcgatagcatcagcagcggcgattactactggggctggatcagacagcctcctggcaaaggactggaatggatcggccacatctactggggcggccccaccaactacgccgactccgtcaaggaccgcttcaccatctccggcgactccgccaagcacaccatgtacctccagatgaactccctcaagcccgaggacaccgccgtctactactgcggctacaaccccggcggctgggccgtcccctcccagtacgagtacgactcctggggccagggcacccaggtcaccgtctcctccctcgagggatctggcagagccgattgcggctttaccagcgagagctaccagcagggcgtgctgagcgccaccatcctgtacgagatcctgctgggcaaggccaccctgtacgccgtgctggtgtctgccctggtgctgatggctatggtcaagcggaaggacagccggggaagggccaagcgatctggatctggagcaacaaacttctcactactcaaacaagcaggtgacgtggaggagaatcccgggcctactagtatggactggatttggcgcatccttttccttgtcggcgctgctaccggcgcgcattccgggcccgaagttgctgccctcgagaaggaggtagcagctttggaaaaagaagtcgcagcccttgagaaagaagttgcggctctggagaagacgcgtgataaaactcatacctgtccgccatgcccggcaatccccgaggacacattcttcccaagccccgagagcagctgcgacgtgaagctggtggaaaagagcttcgagacagacaccaacctgaacttccagaacctgagcgtgatcggcttcagaatcctgctgctgaaagtggccggctttaacctgctgatgaccctgcggctgtggtccagccgcgccaagagaagcggatctggcgtgaagcagaccctgaatttcgacctgctgaagctggctggcgacgtggaatccaacccaggcccttctagaggccatatgaccgagtacaagcccacggtgcgcctcgccacccgcgacgacgtccccagggccgtacgcaccctcgccgccgcgttcgccgactaccccgccacgcgccacaccgtcgatccggaccgccacatcgagcgggtcaccgagctgcaagaactcttcctcacgcgcgtcgggctcgacatcggcaaggtgtgggtcgcggacgacggcgccgcggtggcggtctggaccacgccggagagcgtcgaagcgggggcggtgttcgccgagatcggcccgcgcatggccgagttgagcggttcccggctggccgcgcagcaacagatggaaggcctcctggcgccgcaccggcccaaggagcccgcgtggttcctggccaccgtcggcgtctcgcccgaccaccagggcaagggtctgggcagcgccgtcgtgctccccggagtggaggcggccgagcgcgccggggtgcccgccttcctggagacctccgcgccccgcaacctccccttctacgagcggctcggcttcaccgtcaccgccgacgtcgaggtgcccgaaggaccgcgcacctggtgcatgacccgcaagcccggtgcctga

SEQ ID NO: 4572 - DNA, 1791 bp, Artificial Sequence
  Synthetic Polynucloetide
atggccttaccagtgaccgccttgctcctgccgctggccttgctgctccacgccgccaggccgcagctccagctgcaagagtctggacctggcctggtcaagcctagcgagacactgagcctgacctgtaccgtgtccggcgatagcatcagcagcggcgattactactggggctggatcagacagcctcctggcaaaggactggaatggatcggccacatctactggggcggccccaccaactacgccgactccgtcaaggaccgcttcaccatctccggcgactccgccaagcacaccatgtacctccagatgaactccctcaagcccgaggacaccgccgtctactactgcggctacaaccccggcggctgggccgtcccctcccagtacgagtacgactcctggggccagggcacccaggtcaccgtctcctccctcgaggacaaaactcacacatgcccaccgtgcccagcaggcagagccgattgcggctttaccagcgagagctaccagcagggcgtgctgagcgccaccatcctgtacgagatcctgctgggcaaggccaccctgtacgccgtgctggtgtctgccctggtgctgatggctatggtcaagcggaaggacagccggggaagggccaagcgatctggatctggagcaacaaacttctcactactcaaacaagcaggtgacgtggaggagaatcccgggcctactagtatggactggatttggcgcatccttttccttgtcggcgctgctaccggcgcgcattccgggcccgaagttgctgccctcgagaaggaggtagcagctttggaaaaagaagtcgcagcccttgagaaagaagttgcggctctggagaagacgcgtgataaaactcatacctgtccgccatgcccggcaatccccgaggacacattcttcccaagccccgagagcagctgcgacgtgaagctggtggaaaagagcttcgagacagacaccaacctgaacttccagaacctgagcgtgatcggcttcagaatcctgctgctgaaagtggccggctttaacctgctgatgaccctgcggctgtggtccagccgcgccaagagaagcggatctggcgtgaagcagaccctgaatttcgacctgctgaagctggctggcgacgtggaatccaacccaggcccttctagaggccatatgaccgagtacaagcccacggtgcgcctcgccacccgcgacgacgtccccagggccgtacgcaccctcgccgccgcgttcgccgactaccccgccacgcgccacaccgtcgatccggaccgccacatcgagcgggtcaccgagctgcaagaactcttcctcacgcgcgtcgggctcgacatcggcaaggtgtgggtcgcggacgacggcgccgcggtggcggtctggaccacgccggagagcgtcgaagcgggggcggtgttcgccgagatcggcccgcgcatggccgagttgagcggttcccggctggccgcgcagcaacagatggaaggcctcctggcgccgcaccggcccaaggagcccgcgtggttcctggccaccgtcggcgtctcgcccgaccaccagggcaagggtctgggcagcgccgtcgtgctccccggagtggaggcggccgagcgcgccggggtgcccgccttcctggagacctccgcgccccgcaacctccccttctacgagcggctcggcttcaccgtcaccgccgacgtcgaggtgcccgaaggaccgcgcacctggtgcatgacccgcaagcccggtgcctga

SEQ ID NO: 4573 - DNA, 1089 bp, Artificial Sequence
  Synthetic Polynucloetide
atggccttaccagtgaccgccttgctcctgccgctggccttgctgctccacgccgccaggccgcagctccagctgcaagagtctggacctggcctggtcaagcctagcgagacactgagcctgacctgtaccgtgtccggcgatagcatcagcagcggcgattactactggggctggatcagacagcctcctggcaaaggactggaatggatcggccacatctactggggcggccccaccaactacgccgactccgtcaaggaccgcttcaccatctccggcgactccgccaagcacaccatgtacctccagatgaactccctcaagcccgaggacaccgccgtctactactgcggctacaaccccggcggctgggccgtcccctcccagtacgagtacgactcctggggccagggcacccaggtcaccgtctcctccctcgaggacaaaactcacacatgcccaccgtgcccagcaggcagagccgattgcggctttaccagcgagagctaccagcagggcgtgctgagcgccaccatcctgtacgagatcctgctgggcaaggccaccctgtacgccgtgctggtgtctgccctggtgctgatggctatggtcaagcggaaggacagccggggaagggccaagcgatctggatctggagcaacaaacttctcactactcaaacaagcaggtgacgtggaggagaatcccgggcctactagtatggactggatttggcgcatccttttccttgtcggcgctgctaccggcgcgcattccgggcccgaagttgctgccctcgagaaggaggtagcagctttggaaaaagaagtcgcagcccttgagaaagaagttgcggctctggagaagacgcgtgataaaactcatacctgtccgccatgcccggcaatccccgaggacacattcttcccaagccccgagagcagctgcgacgtgaagctggtggaaaagagcttcgagacagacaccaacctgaacttccagaacctgagcgtgatcggcttcagaatcctgctgctgaaagtggccggctttaacctgctgatgaccctgcggctgtggtccagc

SEQ ID NO: 4574 - DNA, 1062 bp, Artificial Sequence
  Synthetic Polynucloetide
atggccttaccagtgaccgccttgctcctgccgctggccttgctgctccacgccgccaggccgcagctccagctgcaagagtctggacctggcctggtcaagcctagcgagacactgagcctgacctgtaccgtgtccggcgatagcatcagcagcggcgattactactggggctggatcagacagcctcctggcaaaggactggaatggatcggccacatctactggggcggccccaccaactacgccgactccgtcaaggaccgcttcaccatctccggcgactccgccaagcacaccatgtacctccagatgaactccctcaagcccgaggacaccgccgtctactactgcggctacaaccccggcggctgggccgtcccctcccagtacgagtacgactcctggggccagggcacccaggtcaccgtctcctccctcgagggatctggcagagccgattgcggctttaccagcgagagctaccagcagggcgtgctgagcgccaccatcctgtacgagatcctgctgggcaaggccaccctgtacgccgtgctggtgtctgccctggtgctgatggctatggtcaagcggaaggacagccggggaagggccaagcgatctggatctggagcaacaaacttctcactactcaaacaagcaggtgacgtggaggagaatcccgggcctactagtatggactggatttggcgcatccttttccttgtcggcgctgctaccggcgcgcattccgggcccgaagttgctgccctcgagaaggaggtagcagctttggaaaaagaagtcgcagcccttgagaaagaagttgcggctctggagaagacgcgtgataaaactcatacctgtccgccatgcccggcaatccccgaggacacattcttcccaagccccgagagcagctgcgacgtgaagctggtggaaaagagcttcgagacagacaccaacctgaacttccagaacctgagcgtgatcggcttcagaatcctgctgctgaaagtggccggctttaacctgctgatgaccctgcggctgtggtccagc

SEQ ID NO: 4575 - DNA, 2418 bp, Artificial Sequence
  Synthetic Polynucloetide
atggccttaccagtgaccgccttgctcctgccgctggccttgctgctccacgccgccaggccgcagctccagctgcaagagtctggacctggcctggtcaagcctagcgagacactgagcctgacctgtaccgtgtccggcgatagcatcagcagcggcgattactactggggctggatcagacagcctcctggcaaaggactggaatggatcggccacatctactggggcggccccaccaactacgccgactccgtcaaggaccgcttcaccatctccggcgactccgccaagcacaccatgtacctccagatgaactccctcaagcccgaggacaccgccgtctactactgcggctacaaccccggcggctgggccgtcccctcccagtacgagtacgactcctggggccagggcacccaggtcaccgtctcctccctcgagggacagcctaaggccaatcctaccgtgacactgttccctccaagcagcgaagaactccaggccaacaaggccacacttgtgtgcctgatctccgacttctaccctggggctgtgacagtggcttggaaggccgatggatctcctgtgaaagccggcgtggaaaccaccaagccatccaagcagagcaacaacaaatacgccgccagctcctacctgagcctgacacctgagcagtggaagtcccacagatcctacagctgccaagtgacccacgaaggcagcaccgtggaaaagacagtggcccctacagagtgcagccccatcaagaccgatgtgattacaatggaccccaaggacaactgctccaaggacgccaacgataccctgctgctccagctgaccaacaccagcgcctactacatgtacttgttgctgctgctgaagtccgtggtgtacttcgccatcatcacatgctgcctgctgcggagaaccgccttctgctgcaacggcgagaagtctagggccaagcgatctggatctggagcaacaaacttctcactactcaaacaagcaggtgacgtggaggagaatcccgggcctactagtatggactggatttggcgcatccttttccttgtcggcgctgctaccggcgcgcattccgggcccgaagttgctgccctcgagaaggaggtagcagctttggaaaaagaagtcgcagcccttgagaaagaagttgcggctctggagaagacgcgtgcctctacaaagggaccctccgtgtttcctctggctcccagcagcaagtctacaagcggaggaacagccgctctgggctgcctggtcaaggattactttcccgagcctgtgaccgtgtcctggaatagcggagcactgacaagcggcgtgcacacctttccagccgtgctgcaaagcagcggcctgtactctctgagcagcgtggtcacagtgcctagctctagcctgggcacccagacctacatctgcaatgtgaaccacaagcctagcaacaccaaggtggacaagagagtggaacccaagagctgtgaagtgaaaaccgactccaccgaccacgtgaagcccaaagagacagagaacaccaagcagcccagcaagagctgccacaagcccaaggccatcgtgcacaccgagaaagtgaacatgatgagcctgaccgtgctgggcctgcggatgctgttcgccaaaaccgtggccgtgaacttcctgctgaccgccaagctgttcttcctccgcgccaagagaagcggatctggcgtgaagcagaccctgaatttcgacctgctgaagctggctggcgacgtggaatccaacccaggcccttctagaggccatatgaccgagtacaagcccacggtgcgcctcgccacccgcgacgacgtccccagggccgtacgcaccctcgccgccgcgttcgccgactaccccgccacgcgccacaccgtcgatccggaccgccacatcgagcgggtcaccgagctgcaagaactcttcctcacgcgcgtcgggctcgacatcggcaaggtgtgggtcgcggacgacggcgccgcggtggcggtctggaccacgccggagagcgtcgaagcgggggcggtgttcgccgagatcggcccgcgcatggccgagttgagcggttcccggctggccgcgcagcaacagatggaaggcctcctggcgccgcaccggcccaaggagcccgcgtggttcctggccaccgtcggcgtctcgcccgaccaccagggcaagggtctgggcagcgccgtcgtgctccccggagtggaggcggccgagcgcgccggggtgcccgccttcctggagacctccgcgccccgcaacctccccttctacgagcggctcggcttcaccgtcaccgccgacgtcgaggtgcccgaaggaccgcgcacctggtgcatgacccgcaagcccggtgcctga

SEQ ID NO: 4576 - DNA, 1716 bp, Artificial Sequence
  Synthetic Polynucloetide
atggccttaccagtgaccgccttgctcctgccgctggccttgctgctccacgccgccaggccgcagctccagctgcaagagtctggacctggcctggtcaagcctagcgagacactgagcctgacctgtaccgtgtccggcgatagcatcagcagcggcgattactactggggctggatcagacagcctcctggcaaaggactggaatggatcggccacatctactggggcggccccaccaactacgccgactccgtcaaggaccgcttcaccatctccggcgactccgccaagcacaccatgtacctccagatgaactccctcaagcccgaggacaccgccgtctactactgcggctacaaccccggcggctgggccgtcccctcccagtacgagtacgactcctggggccagggcacccaggtcaccgtctcctccctcgagggacagcctaaggccaatcctaccgtgacactgttccctccaagcagcgaagaactccaggccaacaaggccacacttgtgtgcctgatctccgacttctaccctggggctgtgacagtggcttggaaggccgatggatctcctgtgaaagccggcgtggaaaccaccaagccatccaagcagagcaacaacaaatacgccgccagctcctacctgagcctgacacctgagcagtggaagtcccacagatcctacagctgccaagtgacccacgaaggcagcaccgtggaaaagacagtggcccctacagagtgcagccccatcaagaccgatgtgattacaatggaccccaaggacaactgctccaaggacgccaacgataccctgctgctccagctgaccaacaccagcgcctactacatgtacttgttgctgctgctgaagtccgtggtgtacttcgccatcatcacatgctgcctgctgcggagaaccgccttctgctgcaacggcgagaagtctagggccaagcgatctggatctggagcaacaaacttctcactactcaaacaagcaggtgacgtggaggagaatcccgggcctactagtatggactggatttggcgcatccttttccttgtcggcgctgctaccggcgcgcattccgggcccgaagttgctgccctcgagaaggaggtagcagctttggaaaaagaagtcgcagcccttgagaaagaagttgcggctctggagaagacgcgtgcctctacaaagggaccctccgtgtttcctctggctcccagcagcaagtctacaagcggaggaacagccgctctgggctgcctggtcaaggattactttcccgagcctgtgaccgtgtcctggaatagcggagcactgacaagcggcgtgcacacctttccagccgtgctgcaaagcagcggcctgtactctctgagcagcgtggtcacagtgcctagctctagcctgggcacccagacctacatctgcaatgtgaaccacaagcctagcaacaccaaggtggacaagagagtggaacccaagagctgtgaagtgaaaaccgactccaccgaccacgtgaagcccaaagagacagagaacaccaagcagcccagcaagagctgccacaagcccaaggccatcgtgcacaccgagaaagtgaacatgatgagcctgaccgtgctgggcctgcggatgctgttcgccaaaaccgtggccgtgaacttcctgctgaccgccaagctgttcttcctc

SEQ ID NO: 4577 - DNA, 1803 bp, Artificial Sequence
  Synthetic Polynucloetide
atggccttaccagtgaccgccttgctcctgccgctggccttgctgctccacgccgccaggccgcagctccagctgcaagagtctggacctggcctggtcaagcctagcgagacactgagcctgacctgtaccgtgtccggcgatagcatcagcagcggcgattactactggggctggatcagacagcctcctggcaaaggactggaatggatcggccacatctactggggcggccccaccaactacgccgactccgtcaaggaccgcttcaccatctccggcgactccgccaagcacaccatgtacctccagatgaactccctcaagcccgaggacaccgccgtctactactgcggctacaaccccggcggctgggccgtcccctcccagtacgagtacgactcctggggccagggcacccaggtcaccgtctcctccctcgagggatctcccatcaagaccgatgtgattacaatggaccccaaggacaactgctccaaggacgccaacgataccctgctgctccagctgaccaacaccagcgcctactacatgtacttgttgctgctgctgaagtccgtggtgtacttcgccatcatcacatgctgcctgctgcggagaaccgccttctgctgcaacggcgagaagtctagggccaagcgatctggatctggagcaacaaacttctcactactcaaacaagcaggtgacgtggaggagaatcccgggcctactagtatggactggatttggcgcatccttttccttgtcggcgctgctaccggcgcgcattccgggcccgaagttgctgccctcgagaaggaggtagcagctttggaaaaagaagtcgcagcccttgagaaagaagttgcggctctggagaagacgcgtggcagcgaagtgaaaaccgactccaccgaccacgtgaagcccaaagagacagagaacaccaagcagcccagcaagagctgccacaagcccaaggccatcgtgcacaccgagaaagtgaacatgatgagcctgaccgtgctgggcctgcggatgctgttcgccaaaaccgtggccgtgaacttcctgctgaccgccaagctgttcttcctccgcgccaagagaagcggatctggcgtgaagcagaccctgaatttcgacctgctgaagctggctggcgacgtggaatccaacccaggcccttctagaggccatatgaccgagtacaagcccacggtgcgcctcgccacccgcgacgacgtccccagggccgtacgcaccctcgccgccgcgttcgccgactaccccgccacgcgccacaccgtcgatccggaccgccacatcgagcgggtcaccgagctgcaagaactcttcctcacgcgcgtcgggctcgacatcggcaaggtgtgggtcgcggacgacggcgccgcggtggcggtctggaccacgccggagagcgtcgaagcgggggcggtgttcgccgagatcggcccgcgcatggccgagttgagcggttcccggctggccgcgcagcaacagatggaaggcctcctggcgccgcaccggcccaaggagcccgcgtggttcctggccaccgtcggcgtctcgcccgaccaccagggcaagggtctgggcagcgccgtcgtgctccccggagtggaggcggccgagcgcgccggggtgcccgccttcctggagacctccgcgccccgcaacctccccttctacgagcggctcggcttcaccgtcaccgccgacgtcgaggtgcccgaaggaccgcgcacctggtgcatgacccgcaagcccggtgcctga

SEQ ID NO: 4578 - DNA, 1101 bp, Artificial Sequence
  Synthetic Polynucloetide
atggccttaccagtgaccgccttgctcctgccgctggccttgctgctccacgccgccaggccgcagctccagctgcaagagtctggacctggcctggtcaagcctagcgagacactgagcctgacctgtaccgtgtccggcgatagcatcagcagcggcgattactactggggctggatcagacagcctcctggcaaaggactggaatggatcggccacatctactggggcggccccaccaactacgccgactccgtcaaggaccgcttcaccatctccggcgactccgccaagcacaccatgtacctccagatgaactccctcaagcccgaggacaccgccgtctactactgcggctacaaccccggcggctgggccgtcccctcccagtacgagtacgactcctggggccagggcacccaggtcaccgtctcctccctcgagggatctcccatcaagaccgatgtgattacaatggaccccaaggacaactgctccaaggacgccaacgataccctgctgctccagctgaccaacaccagcgcctactacatgtacttgttgctgctgctgaagtccgtggtgtacttcgccatcatcacatgctgcctgctgcggagaaccgccttctgctgcaacggcgagaagtctagggccaagcgatctggatctggagcaacaaacttctcactactcaaacaagcaggtgacgtggaggagaatcccgggcctactagtatggactggatttggcgcatccttttccttgtcggcgctgctaccggcgcgcattccgggcccgaagttgctgccctcgagaaggaggtagcagctttggaaaaagaagtcgcagcccttgagaaagaagttgcggctctggagaagacgcgtggcagcgaagtgaaaaccgactccaccgaccacgtgaagcccaaagagacagagaacaccaagcagcccagcaagagctgccacaagcccaaggccatcgtgcacaccgagaaagtgaacatgatgagcctgaccgtgctgggcctgcggatgctgttcgccaaaaccgtggccgtgaacttcctgctgaccgccaagctgttcttcctc

SEQ ID NO: 4579 - DNA, 1830 bp, Artificial Sequence
  Synthetic Polynucloetide
atggccttaccagtgaccgccttgctcctgccgctggccttgctgctccacgccgccaggccgcagctccagctgcaagagtctggacctggcctggtcaagcctagcgagacactgagcctgacctgtaccgtgtccggcgatagcatcagcagcggcgattactactggggctggatcagacagcctcctggcaaaggactggaatggatcggccacatctactggggcggccccaccaactacgccgactccgtcaaggaccgcttcaccatctccggcgactccgccaagcacaccatgtacctccagatgaactccctcaagcccgaggacaccgccgtctactactgcggctacaaccccggcggctgggccgtcccctcccagtacgagtacgactcctggggccagggcacccaggtcaccgtctcctccctcgaggacaaaactcacacatgcccaccgtgcccagcacccatcaagaccgatgtgattacaatggaccccaaggacaactgctccaaggacgccaacgataccctgctgctccagctgaccaacaccagcgcctactacatgtacttgttgctgctgctgaagtccgtggtgtacttcgccatcatcacatgctgcctgctgcggagaaccgccttctgctgcaacggcgagaagtctagggccaagcgatctggatctggagcaacaaacttctcactactcaaacaagcaggtgacgtggaggagaatcccgggcctactagtatggactggatttggcgcatccttttccttgtcggcgctgctaccggcgcgcattccgggcccgaagttgctgccctcgagaaggaggtagcagctttggaaaaagaagtcgcagcccttgagaaagaagttgcggctctggagaagacgcgtggcagcgaagtgaaaaccgactccaccgaccacgtgaagcccaaagagacagagaacaccaagcagcccagcaagagctgccacaagcccaaggccatcgtgcacaccgagaaagtgaacatgatgagcctgaccgtgctgggcctgcggatgctgttcgccaaaaccgtggccgtgaacttcctgctgaccgccaagctgttcttcctccgcgccaagagaagcggatctggcgtgaagcagaccctgaatttcgacctgctgaagctggctggcgacgtggaatccaacccaggcccttctagaggccatatgaccgagtacaagcccacggtgcgcctcgccacccgcgacgacgtccccagggccgtacgcaccctcgccgccgcgttcgccgactaccccgccacgcgccacaccgtcgatccggaccgccacatcgagcgggtcaccgagctgcaagaactcttcctcacgcgcgtcgggctcgacatcggcaaggtgtgggtcgcggacgacggcgccgcggtggcggtctggaccacgccggagagcgtcgaagcgggggcggtgttcgccgagatcggcccgcgcatggccgagttgagcggttcccggctggccgcgcagcaacagatggaaggcctcctggcgccgcaccggcccaaggagcccgcgtggttcctggccaccgtcggcgtctcgcccgaccaccagggcaagggtctgggcagcgccgtcgtgctccccggagtggaggcggccgagcgcgccggggtgcccgccttcctggagacctccgcgccccgcaacctccccttctacgagcggctcggcttcaccgtcaccgccgacgtcgaggtgcccgaaggaccgcgcacctggtgcatgacccgcaagcccggtgcctga

SEQ ID NO: 4580 - DNA, 1830 bp, Artificial Sequence
  Synthetic Polynucloetide
atggccttaccagtgaccgccttgctcctgccgctggccttgctgctccacgccgccaggccgcagctccagctgcaagagtctggacctggcctggtcaagcctagcgagacactgagcctgacctgtaccgtgtccggcgatagcatcagcagcggcgattactactggggctggatcagacagcctcctggcaaaggactggaatggatcggccacatctactggggcggccccaccaactacgccgactccgtcaaggaccgcttcaccatctccggcgactccgccaagcacaccatgtacctccagatgaactccctcaagcccgaggacaccgccgtctactactgcggctacaaccccggcggctgggccgtcccctcccagtacgagtacgactcctggggccagggcacccaggtcaccgtctcctccctcgagggatctcccatcaagaccgatgtgattacaatggaccccaaggacaactgctccaaggacgccaacgataccctgctgctccagctgaccaacaccagcgcctactacatgtacttgttgctgctgctgaagtccgtggtgtacttcgccatcatcacatgctgcctgctgcggagaaccgccttctgctgcaacggcgagaagtctagggccaagcgatctggatctggagcaacaaacttctcactactcaaacaagcaggtgacgtggaggagaatcccgggcctactagtatggactggatttggcgcatccttttccttgtcggcgctgctaccggcgcgcattccgggcccgaagttgctgccctcgagaaggaggtagcagctttggaaaaagaagtcgcagcccttgagaaagaagttgcggctctggagaagacgcgtgataaaactcatacctgtccgccatgcccggcagaagtgaaaaccgactccaccgaccacgtgaagcccaaagagacagagaacaccaagcagcccagcaagagctgccacaagcccaaggccatcgtgcacaccgagaaagtgaacatgatgagcctgaccgtgctgggcctgcggatgctgttcgccaaaaccgtggccgtgaacttcctgctgaccgccaagctgttcttcctccgcgccaagagaagcggatctggcgtgaagcagaccctgaatttcgacctgctgaagctggctggcgacgtggaatccaacccaggcccttctagaggccatatgaccgagtacaagcccacggtgcgcctcgccacccgcgacgacgtccccagggccgtacgcaccctcgccgccgcgttcgccgactaccccgccacgcgccacaccgtcgatccggaccgccacatcgagcgggtcaccgagctgcaagaactcttcctcacgcgcgtcgggctcgacatcggcaaggtgtgggtcgcggacgacggcgccgcggtggcggtctggaccacgccggagagcgtcgaagcgggggcggtgttcgccgagatcggcccgcgcatggccgagttgagcggttcccggctggccgcgcagcaacagatggaaggcctcctggcgccgcaccggcccaaggagcccgcgtggttcctggccaccgtcggcgtctcgcccgaccaccagggcaagggtctgggcagcgccgtcgtgctccccggagtggaggcggccgagcgcgccggggtgcccgccttcctggagacctccgcgccccgcaacctccccttctacgagcggctcggcttcaccgtcaccgccgacgtcgaggtgcccgaaggaccgcgcacctggtgcatgacccgcaagcccggtgcctga

SEQ ID NO: 4581 - DNA, 1857 bp, Artificial Sequence
  Synthetic Polynucloetide
atggccttaccagtgaccgccttgctcctgccgctggccttgctgctccacgccgccaggccgcagctccagctgcaagagtctggacctggcctggtcaagcctagcgagacactgagcctgacctgtaccgtgtccggcgatagcatcagcagcggcgattactactggggctggatcagacagcctcctggcaaaggactggaatggatcggccacatctactggggcggccccaccaactacgccgactccgtcaaggaccgcttcaccatctccggcgactccgccaagcacaccatgtacctccagatgaactccctcaagcccgaggacaccgccgtctactactgcggctacaaccccggcggctgggccgtcccctcccagtacgagtacgactcctggggccagggcacccaggtcaccgtctcctccctcgaggacaaaactcacacatgcccaccgtgcccagcacccatcaagaccgatgtgattacaatggaccccaaggacaactgctccaaggacgccaacgataccctgctgctccagctgaccaacaccagcgcctactacatgtacttgttgctgctgctgaagtccgtggtgtacttcgccatcatcacatgctgcctgctgcggagaaccgccttctgctgcaacggcgagaagtctagggccaagcgatctggatctggagcaacaaacttctcactactcaaacaagcaggtgacgtggaggagaatcccgggcctactagtatggactggatttggcgcatccttttccttgtcggcgctgctaccggcgcgcattccgggcccgaagttgctgccctcgagaaggaggtagcagctttggaaaaagaagtcgcagcccttgagaaagaagttgcggctctggagaagacgcgtgataaaactcatacctgtccgccatgcccggcagaagtgaaaaccgactccaccgaccacgtgaagcccaaagagacagagaacaccaagcagcccagcaagagctgccacaagcccaaggccatcgtgcacaccgagaaagtgaacatgatgagcctgaccgtgctgggcctgcggatgctgttcgccaaaaccgtggccgtgaacttcctgctgaccgccaagctgttcttcctccgcgccaagagaagcggatctggcgtgaagcagaccctgaatttcgacctgctgaagctggctggcgacgtggaatccaacccaggcccttctagaggccatatgaccgagtacaagcccacggtgcgcctcgccacccgcgacgacgtccccagggccgtacgcaccctcgccgccgcgttcgccgactaccccgccacgcgccacaccgtcgatccggaccgccacatcgagcgggtcaccgagctgcaagaactcttcctcacgcgcgtcgggctcgacatcggcaaggtgtgggtcgcggacgacggcgccgcggtggcggtctggaccacgccggagagcgtcgaagcgggggcggtgttcgccgagatcggcccgcgcatggccgagttgagcggttcccggctggccgcgcagcaacagatggaaggcctcctggcgccgcaccggcccaaggagcccgcgtggttcctggccaccgtcggcgtctcgcccgaccaccagggcaagggtctgggcagcgccgtcgtgctccccggagtggaggcggccgagcgcgccggggtgcccgccttcctggagacctccgcgccccgcaacctccccttctacgagcggctcggcttcaccgtcaccgccgacgtcgaggtgcccgaaggaccgcgcacctggtgcatgacccgcaagcccggtgcctga

SEQ ID NO: 4582 - DNA, 1155 bp, Artificial Sequence
  Synthetic Polynucloetide
atggccttaccagtgaccgccttgctcctgccgctggccttgctgctccacgccgccaggccgcagctccagctgcaagagtctggacctggcctggtcaagcctagcgagacactgagcctgacctgtaccgtgtccggcgatagcatcagcagcggcgattactactggggctggatcagacagcctcctggcaaaggactggaatggatcggccacatctactggggcggccccaccaactacgccgactccgtcaaggaccgcttcaccatctccggcgactccgccaagcacaccatgtacctccagatgaactccctcaagcccgaggacaccgccgtctactactgcggctacaaccccggcggctgggccgtcccctcccagtacgagtacgactcctggggccagggcacccaggtcaccgtctcctccctcgaggacaaaactcacacatgcccaccgtgcccagcacccatcaagaccgatgtgattacaatggaccccaaggacaactgctccaaggacgccaacgataccctgctgctccagctgaccaacaccagcgcctactacatgtacttgttgctgctgctgaagtccgtggtgtacttcgccatcatcacatgctgcctgctgcggagaaccgccttctgctgcaacggcgagaagtctagggccaagcgatctggatctggagcaacaaacttctcactactcaaacaagcaggtgacgtggaggagaatcccgggcctactagtatggactggatttggcgcatccttttccttgtcggcgctgctaccggcgcgcattccgggcccgaagttgctgccctcgagaaggaggtagcagctttggaaaaagaagtcgcagcccttgagaaagaagttgcggctctggagaagacgcgtgataaaactcatacctgtccgccatgcccggcagaagtgaaaaccgactccaccgaccacgtgaagcccaaagagacagagaacaccaagcagcccagcaagagctgccacaagcccaaggccatcgtgcacaccgagaaagtgaacatgatgagcctgaccgtgctgggcctgcggatgctgttcgccaaaaccgtggccgtgaacttcctgctgaccgccaagctgttcttcctc

SEQ ID NO: 4583 - DNA, 1128 bp, Artificial Sequence
  Synthetic Polynucloetide
atggccttaccagtgaccgccttgctcctgccgctggccttgctgctccacgccgccaggccgcagctccagctgcaagagtctggacctggcctggtcaagcctagcgagacactgagcctgacctgtaccgtgtccggcgatagcatcagcagcggcgattactactggggctggatcagacagcctcctggcaaaggactggaatggatcggccacatctactggggcggccccaccaactacgccgactccgtcaaggaccgcttcaccatctccggcgactccgccaagcacaccatgtacctccagatgaactccctcaagcccgaggacaccgccgtctactactgcggctacaaccccggcggctgggccgtcccctcccagtacgagtacgactcctggggccagggcacccaggtcaccgtctcctccctcgagggatctcccatcaagaccgatgtgattacaatggaccccaaggacaactgctccaaggacgccaacgataccctgctgctccagctgaccaacaccagcgcctactacatgtacttgttgctgctgctgaagtccgtggtgtacttcgccatcatcacatgctgcctgctgcggagaaccgccttctgctgcaacggcgagaagtctagggccaagcgatctggatctggagcaacaaacttctcactactcaaacaagcaggtgacgtggaggagaatcccgggcctactagtatggactggatttggcgcatccttttccttgtcggcgctgctaccggcgcgcattccgggcccgaagttgctgccctcgagaaggaggtagcagctttggaaaaagaagtcgcagcccttgagaaagaagttgcggctctggagaagacgcgtgataaaactcatacctgtccgccatgcccggcagaagtgaaaaccgactccaccgaccacgtgaagcccaaagagacagagaacaccaagcagcccagcaagagctgccacaagcccaaggccatcgtgcacaccgagaaagtgaacatgatgagcctgaccgtgctgggcctgcggatgctgttcgccaaaaccgtggccgtgaacttcctgctgaccgccaagctgttcttcctc

SEQ ID NO: 4584 - DNA, 1779 bp, Artificial Sequence
  Synthetic Polynucloetide
atggccttaccagtgaccgccttgctcctgccgctggccttgctgctccacgccgccaggccgcagctccagctgcaagagtctggacctggcctggtcaagcctagcgagacactgagcctgacctgtaccgtgtccggcgatagcatcagcagcggcgattactactggggctggatcagacagcctcctggcaaaggactggaatggatcggccacatctactggggcggccccaccaactacgccgactccgtcaaggaccgcttcaccatctccggcgactccgccaagcacaccatgtacctccagatgaactccctcaagcccgaggacaccgccgtctactactgcggctacaaccccggcggctgggccgtcccctcccagtacgagtacgactcctggggccagggcacccaggtcaccgtctcctccctcgagggatctatggaccccaaggacaactgctccaaggacgccaacgataccctgctgctccagctgaccaacaccagcgcctactacatgtacttgttgctgctgctgaagtccgtggtgtacttcgccatcatcacatgctgcctgctgcggagaaccgccttctgctgcaacggcgagaagtctagggccaagcgatctggatctggagcaacaaacttctcactactcaaacaagcaggtgacgtggaggagaatcccgggcctactagtatggactggatttggcgcatccttttccttgtcggcgctgctaccggcgcgcattccgggcccgaagttgctgccctcgagaaggaggtagcagctttggaaaaagaagtcgcagcccttgagaaagaagttgcggctctggagaagacgcgtggcagcgaagtgaaaaccgactccaccgaccacgtgaagcccaaagagacagagaacaccaagcagcccagcaagagctgccacaagcccaaggccatcgtgcacaccgagaaagtgaacatgatgagcctgaccgtgctgggcctgcggatgctgttcgccaaaaccgtggccgtgaacttcctgctgaccgccaagctgttcttcctccgcgccaagagaagcggatctggcgtgaagcagaccctgaatttcgacctgctgaagctggctggcgacgtggaatccaacccaggcccttctagaggccatatgaccgagtacaagcccacggtgcgcctcgccacccgcgacgacgtccccagggccgtacgcaccctcgccgccgcgttcgccgactaccccgccacgcgccacaccgtcgatccggaccgccacatcgagcgggtcaccgagctgcaagaactcttcctcacgcgcgtcgggctcgacatcggcaaggtgtgggtcgcggacgacggcgccgcggtggcggtctggaccacgccggagagcgtcgaagcgggggcggtgttcgccgagatcggcccgcgcatggccgagttgagcggttcccggctggccgcgcagcaacagatggaaggcctcctggcgccgcaccggcccaaggagcccgcgtggttcctggccaccgtcggcgtctcgcccgaccaccagggcaagggtctgggcagcgccgtcgtgctccccggagtggaggcggccgagcgcgccggggtgcccgccttcctggagacctccgcgccccgcaacctccccttctacgagcggctcggcttcaccgtcaccgccgacgtcgaggtgcccgaaggaccgcgcacctggtgcatgacccgcaagcccggtgcctga

SEQ ID NO: 4585 - DNA, 1782 bp, Artificial Sequence
  Synthetic Polynucloetide
atggccttaccagtgaccgccttgctcctgccgctggccttgctgctccacgccgccaggccgcagctccagctgcaagagtctggacctggcctggtcaagcctagcgagacactgagcctgacctgtaccgtgtccggcgatagcatcagcagcggcgattactactggggctggatcagacagcctcctggcaaaggactggaatggatcggccacatctactggggcggccccaccaactacgccgactccgtcaaggaccgcttcaccatctccggcgactccgccaagcacaccatgtacctccagatgaactccctcaagcccgaggacaccgccgtctactactgcggctacaaccccggcggctgggccgtcccctcccagtacgagtacgactcctggggccagggcacccaggtcaccgtctcctccctcgagggatctcccatcaagaccgatgtgattacaatggaccccaaggacaactgctccaaggacgccaacgataccctgctgctccagctgaccaacaccagcgcctactacatgtacttgttgctgctgctgaagtccgtggtgtacttcgccatcatcacatgctgcctgctgcggagaaccgccttctgctgcaacggcgagaagtctagggccaagcgatctggatctggagcaacaaacttctcactactcaaacaagcaggtgacgtggaggagaatcccgggcctactagtatggactggatttggcgcatccttttccttgtcggcgctgctaccggcgcgcattccgggcccgaagttgctgccctcgagaaggaggtagcagctttggaaaaagaagtcgcagcccttgagaaagaagttgcggctctggagaagacgcgtggcagcgaccacgtgaagcccaaagagacagagaacaccaagcagcccagcaagagctgccacaagcccaaggccatcgtgcacaccgagaaagtgaacatgatgagcctgaccgtgctgggcctgcggatgctgttcgccaaaaccgtggccgtgaacttcctgctgaccgccaagctgttcttcctccgcgccaagagaagcggatctggcgtgaagcagaccctgaatttcgacctgctgaagctggctggcgacgtggaatccaacccaggcccttctagaggccatatgaccgagtacaagcccacggtgcgcctcgccacccgcgacgacgtccccagggccgtacgcaccctcgccgccgcgttcgccgactaccccgccacgcgccacaccgtcgatccggaccgccacatcgagcgggtcaccgagctgcaagaactcttcctcacgcgcgtcgggctcgacatcggcaaggtgtgggtcgcggacgacggcgccgcggtggcggtctggaccacgccggagagcgtcgaagcgggggcggtgttcgccgagatcggcccgcgcatggccgagttgagcggttcccggctggccgcgcagcaacagatggaaggcctcctggcgccgcaccggcccaaggagcccgcgtggttcctggccaccgtcggcgtctcgcccgaccaccagggcaagggtctgggcagcgccgtcgtgctccccggagtggaggcggccgagcgcgccggggtgcccgccttcctggagacctccgcgccccgcaacctccccttctacgagcggctcggcttcaccgtcaccgccgacgtcgaggtgcccgaaggaccgcgcacctggtgcatgacccgcaagcccggtgcctga

SEQ ID NO: 4586 - DNA, 1758 bp, Artificial Sequence
  Synthetic Polynucloetide
atggccttaccagtgaccgccttgctcctgccgctggccttgctgctccacgccgccaggccgcagctccagctgcaagagtctggacctggcctggtcaagcctagcgagacactgagcctgacctgtaccgtgtccggcgatagcatcagcagcggcgattactactggggctggatcagacagcctcctggcaaaggactggaatggatcggccacatctactggggcggccccaccaactacgccgactccgtcaaggaccgcttcaccatctccggcgactccgccaagcacaccatgtacctccagatgaactccctcaagcccgaggacaccgccgtctactactgcggctacaaccccggcggctgggccgtcccctcccagtacgagtacgactcctggggccagggcacccaggtcaccgtctcctccctcgagggatctatggaccccaaggacaactgctccaaggacgccaacgataccctgctgctccagctgaccaacaccagcgcctactacatgtacttgttgctgctgctgaagtccgtggtgtacttcgccatcatcacatgctgcctgctgcggagaaccgccttctgctgcaacggcgagaagtctagggccaagcgatctggatctggagcaacaaacttctcactactcaaacaagcaggtgacgtggaggagaatcccgggcctactagtatggactggatttggcgcatccttttccttgtcggcgctgctaccggcgcgcattccgggcccgaagttgctgccctcgagaaggaggtagcagctttggaaaaagaagtcgcagcccttgagaaagaagttgcggctctggagaagacgcgtggcagcgaccacgtgaagcccaaagagacagagaacaccaagcagcccagcaagagctgccacaagcccaaggccatcgtgcacaccgagaaagtgaacatgatgagcctgaccgtgctgggcctgcggatgctgttcgccaaaaccgtggccgtgaacttcctgctgaccgccaagctgttcttcctccgcgccaagagaagcggatctggcgtgaagcagaccctgaatttcgacctgctgaagctggctggcgacgtggaatccaacccaggcccttctagaggccatatgaccgagtacaagcccacggtgcgcctcgccacccgcgacgacgtccccagggccgtacgcaccctcgccgccgcgttcgccgactaccccgccacgcgccacaccgtcgatccggaccgccacatcgagcgggtcaccgagctgcaagaactcttcctcacgcgcgtcgggctcgacatcggcaaggtgtgggtcgcggacgacggcgccgcggtggcggtctggaccacgccggagagcgtcgaagcgggggcggtgttcgccgagatcggcccgcgcatggccgagttgagcggttcccggctggccgcgcagcaacagatggaaggcctcctggcgccgcaccggcccaaggagcccgcgtggttcctggccaccgtcggcgtctcgcccgaccaccagggcaagggtctgggcagcgccgtcgtgctccccggagtggaggcggccgagcgcgccggggtgcccgccttcctggagacctccgcgccccgcaacctccccttctacgagcggctcggcttcaccgtcaccgccgacgtcgaggtgcccgaaggaccgcgcacctggtgcatgacccgcaagcccggtgcctga

SEQ ID NO: 4587 - DNA, 1056 bp, Artificial Sequence
  Synthetic Polynucloetide
atggccttaccagtgaccgccttgctcctgccgctggccttgctgctccacgccgccaggccgcagctccagctgcaagagtctggacctggcctggtcaagcctagcgagacactgagcctgacctgtaccgtgtccggcgatagcatcagcagcggcgattactactggggctggatcagacagcctcctggcaaaggactggaatggatcggccacatctactggggcggccccaccaactacgccgactccgtcaaggaccgcttcaccatctccggcgactccgccaagcacaccatgtacctccagatgaactccctcaagcccgaggacaccgccgtctactactgcggctacaaccccggcggctgggccgtcccctcccagtacgagtacgactcctggggccagggcacccaggtcaccgtctcctccctcgagggatctatggaccccaaggacaactgctccaaggacgccaacgataccctgctgctccagctgaccaacaccagcgcctactacatgtacttgttgctgctgctgaagtccgtggtgtacttcgccatcatcacatgctgcctgctgcggagaaccgccttctgctgcaacggcgagaagtctagggccaagcgatctggatctggagcaacaaacttctcactactcaaacaagcaggtgacgtggaggagaatcccgggcctactagtatggactggatttggcgcatccttttccttgtcggcgctgctaccggcgcgcattccgggcccgaagttgctgccctcgagaaggaggtagcagctttggaaaaagaagtcgcagcccttgagaaagaagttgcggctctggagaagacgcgtggcagcgaccacgtgaagcccaaagagacagagaacaccaagcagcccagcaagagctgccacaagcccaaggccatcgtgcacaccgagaaagtgaacatgatgagcctgaccgtgctgggcctgcggatgctgttcgccaaaaccgtggccgtgaacttcctgctgaccgccaagctgttcttcctc

SEQ ID NO: 4588 - DNA, 1785 bp, Artificial Sequence
  Synthetic Polynucloetide
atggccttaccagtgaccgccttgctcctgccgctggccttgctgctccacgccgccaggccgcagctccagctgcaagagtctggacctggcctggtcaagcctagcgagacactgagcctgacctgtaccgtgtccggcgatagcatcagcagcggcgattactactggggctggatcagacagcctcctggcaaaggactggaatggatcggccacatctactggggcggccccaccaactacgccgactccgtcaaggaccgcttcaccatctccggcgactccgccaagcacaccatgtacctccagatgaactccctcaagcccgaggacaccgccgtctactactgcggctacaaccccggcggctgggccgtcccctcccagtacgagtacgactcctggggccagggcacccaggtcaccgtctcctccctcgaggacaaaactcacacatgcccaccgtgcccagcaatggaccccaaggacaactgctccaaggacgccaacgataccctgctgctccagctgaccaacaccagcgcctactacatgtacttgttgctgctgctgaagtccgtggtgtacttcgccatcatcacatgctgcctgctgcggagaaccgccttctgctgcaacggcgagaagtctagggccaagcgatctggatctggagcaacaaacttctcactactcaaacaagcaggtgacgtggaggagaatcccgggcctactagtatggactggatttggcgcatccttttccttgtcggcgctgctaccggcgcgcattccgggcccgaagttgctgccctcgagaaggaggtagcagctttggaaaaagaagtcgcagcccttgagaaagaagttgcggctctggagaagacgcgtggcagcgaccacgtgaagcccaaagagacagagaacaccaagcagcccagcaagagctgccacaagcccaaggccatcgtgcacaccgagaaagtgaacatgatgagcctgaccgtgctgggcctgcggatgctgttcgccaaaaccgtggccgtgaacttcctgctgaccgccaagctgttcttcctccgcgccaagagaagcggatctggcgtgaagcagaccctgaatttcgacctgctgaagctggctggcgacgtggaatccaacccaggcccttctagaggccatatgaccgagtacaagcccacggtgcgcctcgccacccgcgacgacgtccccagggccgtacgcaccctcgccgccgcgttcgccgactaccccgccacgcgccacaccgtcgatccggaccgccacatcgagcgggtcaccgagctgcaagaactcttcctcacgcgcgtcgggctcgacatcggcaaggtgtgggtcgcggacgacggcgccgcggtggcggtctggaccacgccggagagcgtcgaagcgggggcggtgttcgccgagatcggcccgcgcatggccgagttgagcggttcccggctggccgcgcagcaacagatggaaggcctcctggcgccgcaccggcccaaggagcccgcgtggttcctggccaccgtcggcgtctcgcccgaccaccagggcaagggtctgggcagcgccgtcgtgctccccggagtggaggcggccgagcgcgccggggtgcccgccttcctggagacctccgcgccccgcaacctccccttctacgagcggctcggcttcaccgtcaccgccgacgtcgaggtgcccgaaggaccgcgcacctggtgcatgacccgcaagcccggtgcctga

SEQ ID NO: 4589 - DNA, 1812 bp, Artificial Sequence
  Synthetic Polynucloetide
atggccttaccagtgaccgccttgctcctgccgctggccttgctgctccacgccgccaggccgcagctccagctgcaagagtctggacctggcctggtcaagcctagcgagacactgagcctgacctgtaccgtgtccggcgatagcatcagcagcggcgattactactggggctggatcagacagcctcctggcaaaggactggaatggatcggccacatctactggggcggccccaccaactacgccgactccgtcaaggaccgcttcaccatctccggcgactccgccaagcacaccatgtacctccagatgaactccctcaagcccgaggacaccgccgtctactactgcggctacaaccccggcggctgggccgtcccctcccagtacgagtacgactcctggggccagggcacccaggtcaccgtctcctccctcgaggacaaaactcacacatgcccaccgtgcccagcaatggaccccaaggacaactgctccaaggacgccaacgataccctgctgctccagctgaccaacaccagcgcctactacatgtacttgttgctgctgctgaagtccgtggtgtacttcgccatcatcacatgctgcctgctgcggagaaccgccttctgctgcaacggcgagaagtctagggccaagcgatctggatctggagcaacaaacttctcactactcaaacaagcaggtgacgtggaggagaatcccgggcctactagtatggactggatttggcgcatccttttccttgtcggcgctgctaccggcgcgcattccgggcccgaagttgctgccctcgagaaggaggtagcagctttggaaaaagaagtcgcagcccttgagaaagaagttgcggctctggagaagacgcgtgataaaactcatacctgtccgccatgcccggcagaccacgtgaagcccaaagagacagagaacaccaagcagcccagcaagagctgccacaagcccaaggccatcgtgcacaccgagaaagtgaacatgatgagcctgaccgtgctgggcctgcggatgctgttcgccaaaaccgtggccgtgaacttcctgctgaccgccaagctgttcttcctccgcgccaagagaagcggatctggcgtgaagcagaccctgaatttcgacctgctgaagctggctggcgacgtggaatccaacccaggcccttctagaggccatatgaccgagtacaagcccacggtgcgcctcgccacccgcgacgacgtccccagggccgtacgcaccctcgccgccgcgttcgccgactaccccgccacgcgccacaccgtcgatccggaccgccacatcgagcgggtcaccgagctgcaagaactcttcctcacgcgcgtcgggctcgacatcggcaaggtgtgggtcgcggacgacggcgccgcggtggcggtctggaccacgccggagagcgtcgaagcgggggcggtgttcgccgagatcggcccgcgcatggccgagttgagcggttcccggctggccgcgcagcaacagatggaaggcctcctggcgccgcaccggcccaaggagcccgcgtggttcctggccaccgtcggcgtctcgcccgaccaccagggcaagggtctgggcagcgccgtcgtgctccccggagtggaggcggccgagcgcgccggggtgcccgccttcctggagacctccgcgccccgcaacctccccttctacgagcggctcggcttcaccgtcaccgccgacgtcgaggtgcccgaaggaccgcgcacctggtgcatgacccgcaagcccggtgcctga

SEQ ID NO: 4590 - DNA, 1110 bp, Artificial Sequence
  Synthetic Polynucloetide
atggccttaccagtgaccgccttgctcctgccgctggccttgctgctccacgccgccaggccgcagctccagctgcaagagtctggacctggcctggtcaagcctagcgagacactgagcctgacctgtaccgtgtccggcgatagcatcagcagcggcgattactactggggctggatcagacagcctcctggcaaaggactggaatggatcggccacatctactggggcggccccaccaactacgccgactccgtcaaggaccgcttcaccatctccggcgactccgccaagcacaccatgtacctccagatgaactccctcaagcccgaggacaccgccgtctactactgcggctacaaccccggcggctgggccgtcccctcccagtacgagtacgactcctggggccagggcacccaggtcaccgtctcctccctcgaggacaaaactcacacatgcccaccgtgcccagcaatggaccccaaggacaactgctccaaggacgccaacgataccctgctgctccagctgaccaacaccagcgcctactacatgtacttgttgctgctgctgaagtccgtggtgtacttcgccatcatcacatgctgcctgctgcggagaaccgccttctgctgcaacggcgagaagtctagggccaagcgatctggatctggagcaacaaacttctcactactcaaacaagcaggtgacgtggaggagaatcccgggcctactagtatggactggatttggcgcatccttttccttgtcggcgctgctaccggcgcgcattccgggcccgaagttgctgccctcgagaaggaggtagcagctttggaaaaagaagtcgcagcccttgagaaagaagttgcggctctggagaagacgcgtgataaaactcatacctgtccgccatgcccggcagaccacgtgaagcccaaagagacagagaacaccaagcagcccagcaagagctgccacaagcccaaggccatcgtgcacaccgagaaagtgaacatgatgagcctgaccgtgctgggcctgcggatgctgttcgccaaaaccgtggccgtgaacttcctgctgaccgccaagctgttcttcctc

SEQ ID NO: 4591 - DNA, 921 bp, Artificial Sequence
  Synthetic Polynucloetide
atggccttaccagtgaccgccttgctcctgccgctggccttgctgctccacgccgccaggccgcagctccagctgcaagagtctggacctggcctggtcaagcctagcgagacactgagcctgacctgtaccgtgtccggcgatagcatcagcagcggcgattactactggggctggatcagacagcctcctggcaaaggactggaatggatcggccacatctactggggcggccccaccaactacgccgactccgtcaaggaccgcttcaccatctccggcgactccgccaagcacaccatgtacctccagatgaactccctcaagcccgaggacaccgccgtctactactgcggctacaaccccggcggctgggccgtcccctcccagtacgagtacgactcctggggccagggcacccaggtcaccgtctcctccctcgagggacagcctaaggccaatcctaccgtgacactgttccctccaagcagcgaagaactccaggccaacaaggccacacttgtgtgcctgatctccgacttctaccctggggctgtgacagtggcttggaaggccgatggatctcctgtgaaagccggcgtggaaaccaccaagccatccaagcagagcaacaacaaatacgccgccagctcctacctgagcctgacacctgagcagtggaagtcccacagatcctacagctgccaagtgacccacgaaggcagcaccgtggaaaagacagtggcccctacagagtgcagcggcagagccgattgcggctttaccagcgagagctaccagcagggcgtgctgagcgccaccatcctgtacgagatcctgctgggcaaggccaccctgtacgccgtgctggtgtctgccctggtgctgatggctatggtcaagcggaaggacagccgggga

SEQ ID NO: 4592 - DNA, 642 bp, Artificial Sequence
  Synthetic Polynucloetide
atggactggatttggcgcatccttttccttgtcggcgctgctaccggcgcgcattccgggcccgaagttgctgccctcgagaaggaggtagcagctttggaaaaagaagtcgcagcccttgagaaagaagttgcggctctggagaagacgcgtgcctctacaaagggaccctccgtgtttcctctggctcccagcagcaagtctacaagcggaggaacagccgctctgggctgcctggtcaaggattactttcccgagcctgtgaccgtgtcctggaatagcggagcactgacaagcggcgtgcacacctttccagccgtgctgcaaagcagcggcctgtactctctgagcagcgtggtcacagtgcctagctctagcctgggcacccagacctacatctgcaatgtgaaccacaagcctagcaacaccaaggtggacaagagagtggaacccaagagctgtatccccgaggacacattcttcccaagccccgagagcagctgcgacgtgaagctggtggaaaagagcttcgagacagacaccaacctgaacttccagaacctgagcgtgatcggcttcagaatcctgctgctgaaagtggccggctttaacctgctgatgaccctgcggctgtggtccagc

SEQ ID NO: 4593 - DNA, 963 bp, Artificial Sequence
  Synthetic Polynucloetide
atggccttaccagtgaccgccttgctcctgccgctggccttgctgctccacgccgccaggccgcagctccagctgcaagagtctggacctggcctggtcaagcctagcgagacactgagcctgacctgtaccgtgtccggcgatagcatcagcagcggcgattactactggggctggatcagacagcctcctggcaaaggactggaatggatcggccacatctactggggcggccccaccaactacgccgactccgtcaaggaccgcttcaccatctccggcgactccgccaagcacaccatgtacctccagatgaactccctcaagcccgaggacaccgccgtctactactgcggctacaaccccggcggctgggccgtcccctcccagtacgagtacgactcctggggccagggcacccaggtcaccgtctcctccctcgagggacagcctaaggccaatcctaccgtgacactgttccctccaagcagcgaagaactccaggccaacaaggccacacttgtgtgcctgatctccgacttctaccctggggctgtgacagtggcttggaaggccgatggatctcctgtgaaagccggcgtggaaaccaccaagccatccaagcagagcaacaacaaatacgccgccagctcctacctgagcctgacacctgagcagtggaagtcccacagatcctacagctgccaagtgacccacgaaggcagcaccgtggaaaagacagtggcccctacagagtgcagccccatcaagaccgatgtgattacaatggaccccaaggacaactgctccaaggacgccaacgataccctgctgctccagctgaccaacaccagcgcctactacatgtacttgttgctgctgctgaagtccgtggtgtacttcgccatcatcacatgctgcctgctgcggagaaccgccttctgctgcaacggcgagaagtct

SEQ ID NO: 4594 - DNA, 666 bp, Artificial Sequence
  Synthetic Polynucloetide
atggactggatttggcgcatccttttccttgtcggcgctgctaccggcgcgcattccgggcccgaagttgctgccctcgagaaggaggtagcagctttggaaaaagaagtcgcagcccttgagaaagaagttgcggctctggagaagacgcgtgcctctacaaagggaccctccgtgtttcctctggctcccagcagcaagtctacaagcggaggaacagccgctctgggctgcctggtcaaggattactttcccgagcctgtgaccgtgtcctggaatagcggagcactgacaagcggcgtgcacacctttccagccgtgctgcaaagcagcggcctgtactctctgagcagcgtggtcacagtgcctagctctagcctgggcacccagacctacatctgcaatgtgaaccacaagcctagcaacaccaaggtggacaagagagtggaacccaagagctgtgaagtgaaaaccgactccaccgaccacgtgaagcccaaagagacagagaacaccaagcagcccagcaagagctgccacaagcccaaggccatcgtgcacaccgagaaagtgaacatgatgagcctgaccgtgctgggcctgcggatgctgttcgccaaaaccgtggccgtgaacttcctgctgaccgccaagctgttcttcctc

SEQ ID NO: 4595 - DNA, 1653 bp, Artificial Sequence; identical to SEQ ID NO: 4468
  Synthetic Polynucloetide

SEQ ID NO: 4596 - DNA, 2712 bp, Artificial Sequence; identical to SEQ ID NO: 4469
  Synthetic Polynucloetide

SEQ ID NO: 4597 - DNA, 2709 bp, Artificial Sequence; identical to SEQ ID NO: 4470
  Synthetic Polynucloetide

SEQ ID NO: 4598 - DNA, 2709 bp, Artificial Sequence; identical to SEQ ID NO: 4471
  Synthetic Polynucloetide

SEQ ID NO: 4599 - DNA, 2007 bp, Artificial Sequence; identical to SEQ ID NO: 4472
  Synthetic Polynucloetide

SEQ ID NO: 4600 - DNA, 2682 bp, Artificial Sequence; identical to SEQ ID NO: 4473
  Synthetic Polynucloetide

SEQ ID NO: 4601 - DNA, 2019 bp, Artificial Sequence; identical to SEQ ID NO: 4474
  Synthetic Polynucloetide

SEQ ID NO: 4602 - DNA, 2685 bp, Artificial Sequence; identical to SEQ ID NO: 4475
  Synthetic Polynucloetide

SEQ ID NO: 4603 - DNA, 2709 bp, Artificial Sequence; identical to SEQ ID NO: 4476
  Synthetic Polynucloetide

SEQ ID NO: 4604 - DNA, 2955 bp, Artificial Sequence; identical to SEQ ID NO: 4477
  Synthetic Polynucloetide

SEQ ID NO: 4605 - DNA, 2820 bp, Artificial Sequence; identical to SEQ ID NO: 4478
  Synthetic Polynucloetide

SEQ ID NO: 4606 - DNA, 2031 bp, Artificial Sequence; identical to SEQ ID NO: 4479
  Synthetic Polynucloetide

SEQ ID NO: 4607 - DNA, 3240 bp, Artificial Sequence; identical to SEQ ID NO: 4480
  Synthetic Polynucloetide

SEQ ID NO: 4608 - DNA, 2595 bp, Artificial Sequence; identical to SEQ ID NO: 4481
  Synthetic Polynucloetide

SEQ ID NO: 4609 - DNA, 2595 bp, Artificial Sequence; identical to SEQ ID NO: 4482
  Synthetic Polynucloetide

SEQ ID NO: 4610 - DNA, 2808 bp, Artificial Sequence; identical to SEQ ID NO: 4483
  Synthetic Polynucloetide

SEQ ID NO: 4611 - DNA, 2931 bp, Artificial Sequence; identical to SEQ ID NO: 4484
  Synthetic Polynucloetide

SEQ ID NO: 4612 - DNA, 2814 bp, Artificial Sequence; identical to SEQ ID NO: 4485
  Synthetic Polynucloetide

SEQ ID NO: 4613 - DNA, 2940 bp, Artificial Sequence; identical to SEQ ID NO: 4486
  Synthetic Polynucloetide

SEQ ID NO: 4614 - DNA, 2613 bp, Artificial Sequence; identical to SEQ ID NO: 4487
  Synthetic Polynucloetide

SEQ ID NO: 4615 - DNA, 2085 bp, Artificial Sequence; identical to SEQ ID NO: 4488
  Synthetic Polynucloetide

SEQ ID NO: 4616 - DNA, 2019 bp, Artificial Sequence; identical to SEQ ID NO: 4489
  Synthetic Polynucloetide

SEQ ID NO: 4617 - DNA, 2019 bp, Artificial Sequence; identical to SEQ ID NO: 4490
  Synthetic Polynucloetide

SEQ ID NO: 4618 - DNA, 1509 bp, Artificial Sequence; identical to SEQ ID NO: 4491
  Synthetic Polynucloetide

SEQ ID NO: 4619 - DNA, 1404 bp, Artificial Sequence; identical to SEQ ID NO: 4492
  Synthetic Polynucloetide

SEQ ID NO: 4620 - DNA, 1434 bp, Artificial Sequence; identical to SEQ ID NO: 4493
  Synthetic Polynucloetide

SEQ ID NO: 4621 - DNA, 1383 bp, Artificial Sequence; identical to SEQ ID NO: 4494
  Synthetic Polynucloetide

SEQ ID NO: 4622 - DNA, 1494 bp, Artificial Sequence; identical to SEQ ID NO: 4495
  Synthetic Polynucloetide

SEQ ID NO: 4623 - DNA, 993 bp, Artificial Sequence; identical to SEQ ID NO: 4496
  Synthetic Polynucloetide

SEQ ID NO: 4624 - DNA, 1530 bp, Artificial Sequence; identical to SEQ ID NO: 4497
  Synthetic Polynucloetide

SEQ ID NO: 4625 - DNA, 1032 bp, Artificial Sequence; identical to SEQ ID NO: 4498
  Synthetic Polynucloetide

SEQ ID NO: 4626 - DNA, 1902 bp, Artificial Sequence; identical to SEQ ID NO: 4118
  Synthetic Polynucloetide

SEQ ID NO: 4627 - DNA, 1923 bp, Artificial Sequence; identical to SEQ ID NO: 4119
  Synthetic Polynucloetide

SEQ ID NO: 4628 - DNA, 3162 bp, Artificial Sequence; identical to SEQ ID NO: 4120
  Synthetic Polynucloetide

SEQ ID NO: 4629 - DNA, 2982 bp, Artificial Sequence; identical to SEQ ID NO: 4121
  Synthetic Polynucloetide

SEQ ID NO: 4630 - DNA, 2979 bp, Artificial Sequence; identical to SEQ ID NO: 4122
  Synthetic Polynucloetide

SEQ ID NO: 4631 - DNA, 2277 bp, Artificial Sequence; identical to SEQ ID NO: 4123
  Synthetic Polynucloetide

SEQ ID NO: 4632 - DNA, 2952 bp, Artificial Sequence; identical to SEQ ID NO: 4124
  Synthetic Polynucloetide

SEQ ID NO: 4633 - DNA, 2289 bp, Artificial Sequence; identical to SEQ ID NO: 4125
  Synthetic Polynucloetide

SEQ ID NO: 4634 - DNA, 2955 bp, Artificial Sequence; identical to SEQ ID NO: 4126
  Synthetic Polynucloetide

SEQ ID NO: 4635 - DNA, 3114 bp, Artificial Sequence; identical to SEQ ID NO: 4127
  Synthetic Polynucloetide

SEQ ID NO: 4636 - DNA, 3117 bp, Artificial Sequence; identical to SEQ ID NO: 4128
  Synthetic Polynucloetide

SEQ ID NO: 4637 - DNA, 2979 bp, Artificial Sequence; identical to SEQ ID NO: 4129
  Synthetic Polynucloetide

SEQ ID NO: 4638 - DNA, 3225 bp, Artificial Sequence; identical to SEQ ID NO: 4130
  Synthetic Polynucloetide

SEQ ID NO: 4639 - DNA, 3279 bp, Artificial Sequence; identical to SEQ ID NO: 4131
  Synthetic Polynucloetide

SEQ ID NO: 4640 - DNA, 3090 bp, Artificial Sequence; identical to SEQ ID NO: 4132
  Synthetic Polynucloetide

SEQ ID NO: 4641 - DNA, 2301 bp, Artificial Sequence; identical to SEQ ID NO: 4133
  Synthetic Polynucloetide

SEQ ID NO: 4642 - DNA, 3135 bp, Artificial Sequence; identical to SEQ ID NO: 4134
  Synthetic Polynucloetide

SEQ ID NO: 4643 - DNA, 3510 bp, Artificial Sequence; identical to SEQ ID NO: 4135
  Synthetic Polynucloetide

SEQ ID NO: 4644 - DNA, 2865 bp, Artificial Sequence; identical to SEQ ID NO: 4136
  Synthetic Polynucloetide

SEQ ID NO: 4645 - DNA, 2865 bp, Artificial Sequence; identical to SEQ ID NO: 4137
  Synthetic Polynucloetide

SEQ ID NO: 4646 - DNA, 3078 bp, Artificial Sequence; identical to SEQ ID NO: 4138
  Synthetic Polynucloetide

SEQ ID NO: 4647 - DNA, 3201 bp, Artificial Sequence; identical to SEQ ID NO: 4139
  Synthetic Polynucloetide

SEQ ID NO: 4648 - DNA, 3084 bp, Artificial Sequence; identical to SEQ ID NO: 4140
  Synthetic Polynucloetide

SEQ ID NO: 4649 - DNA, 3210 bp, Artificial Sequence; identical to SEQ ID NO: 4141
  Synthetic Polynucloetide

SEQ ID NO: 4650 - DNA, 2883 bp, Artificial Sequence; identical to SEQ ID NO: 4142
  Synthetic Polynucloetide

SEQ ID NO: 4651 - DNA, 2355 bp, Artificial Sequence; identical to SEQ ID NO: 4143
  Synthetic Polynucloetide

SEQ ID NO: 4652 - DNA, 2289 bp, Artificial Sequence; identical to SEQ ID NO: 4144
  Synthetic Polynucloetide

SEQ ID NO: 4653 - DNA, 2289 bp, Artificial Sequence; identical to SEQ ID NO: 4145
  Synthetic Polynucloetide

SEQ ID NO: 4654 - DNA, 1767 bp, Artificial Sequence; identical to SEQ ID NO: 4146
  Synthetic Polynucloetide

SEQ ID NO: 4655 - DNA, 1662 bp, Artificial Sequence; identical to SEQ ID NO: 4147
  Synthetic Polynucloetide

SEQ ID NO: 4656 - DNA, 1692 bp, Artificial Sequence; identical to SEQ ID NO: 4148
  Synthetic Polynucloetide

SEQ ID NO: 4657 - DNA, 1641 bp, Artificial Sequence; identical to SEQ ID NO: 4149
  Synthetic Polynucloetide

SEQ ID NO: 4658 - DNA, 2343 bp, Artificial Sequence; identical to SEQ ID NO: 4150
  Synthetic Polynucloetide

SEQ ID NO: 4659 - DNA, 2439 bp, Artificial Sequence; identical to SEQ ID NO: 4151
  Synthetic Polynucloetide

SEQ ID NO: 4660 - DNA, 2589 bp, Artificial Sequence; identical to SEQ ID NO: 4152
  Synthetic Polynucloetide

SEQ ID NO: 4661 - DNA, 2031 bp, Artificial Sequence; identical to SEQ ID NO: 4153
  Synthetic Polynucloetide

SEQ ID NO: 4662 - DNA, 1338 bp, Artificial Sequence; identical to SEQ ID NO: 4154
  Synthetic Polynucloetide

SEQ ID NO: 4663 - DNA, 1353 bp, Artificial Sequence; identical to SEQ ID NO: 4155
  Synthetic Polynucloetide

SEQ ID NO: 4664 - DNA, 852 bp, Artificial Sequence; identical to SEQ ID NO: 4156
  Synthetic Polynucloetide

SEQ ID NO: 4665 - DNA, 2085 bp, Artificial Sequence; identical to SEQ ID NO: 4157
  Synthetic Polynucloetide

SEQ ID NO: 4666 - DNA, 1395 bp, Artificial Sequence; identical to SEQ ID NO: 4158
  Synthetic Polynucloetide

SEQ ID NO: 4667 - DNA, 1389 bp, Artificial Sequence; identical to SEQ ID NO: 4159
  Synthetic Polynucloetide

SEQ ID NO: 4668 - DNA, 891 bp, Artificial Sequence; identical to SEQ ID NO: 4160
  Synthetic Polynucloetide

SEQ ID NO: 4669 - DNA, 2343 bp, Artificial Sequence; identical to SEQ ID NO: 4161
  Synthetic Polynucloetide

SEQ ID NO: 4670 - DNA, 2439 bp, Artificial Sequence; identical to SEQ ID NO: 4162
  Synthetic Polynucloetide

SEQ ID NO: 4671 - DNA, 3123 bp, Artificial Sequence
  Synthetic Polynucloetide
atggccttaccagtgaccgccttgctcctgccgctggccttgctgctccacgccgccaggccgcagctccagctgcaagagtctggacctggcctggtcaagcctagcgagacactgagcctgacctgtaccgtgtccggcgatagcatcagcagcggcgattactactggggctggatcagacagcctcctggcaaaggactggaatggatcggccacatctactacagcggcgtgacctactacaaccccagcctgaagtccagagtgaccatcagcgtggacaccagccggaaccagttctccctgaagctgtctagcgtgacagccgccgataccgccgtgtactactgcaccagagaggacagcagcaactggcggagtagaggccagggaacactggtcacagttagctctggtaccggcggaggcggatctggcggcggaggtagcggtggcggaggatctgaattcgacatccagatgacacagagccctagcagcctgtctgccagcgtgggagacagagtgaccatcacatgcaaggccagcgaccacatcaacaactggctggcctggtatcagcagaagcctggacaggcccctaagctgctgatctacggcgctaccacactggaaacaggcgtgcccagcagattttctggcagcggctctggcaccgactacaccctgacaatatccagcctccagcctgaggacttcgccacctactactgtcagcagagctggaacaccccttggacattcggccagggcaccaagctggaaatcaagagactcgagatccagaaccctgatcctgccgtgtaccagctgcgggatagcaagagcagcgacaagagcgtgtgtctgttcaccgacttcgacagccagaccaacgtgtcccagagcaaggactccgacgtgtacatcaccgataagtgcgtgctggacatgcggagcatggacttcaagagcaactccgccgtggcctggtccaacaagtccgatttcgcctgcgccaacgccttcaacaacagcattatccccgaggacacattcttcccaagcagcgacgtgccctgcgacgtgaagctggtggaaaagagcttcgagacagacaccaacctgaacttccagaacctgagcgtgatcggcttcagaatcctgctgctgaaagtggccggctttaacctgctgatgaccctgcggctgtggtccagccgcgccaagagaagcggatctggcgtgaagcagaccctgaatttcgacctgctgaagctggctggcgacgtggaatccaacccaggccctactagtatggactggatttggcgcatccttttccttgtcggcgctgctaccggcgcccattccgggcccgaagttgctgccctcgagaaggaggtagcagctttggaaaaagaagtcgcagcccttgagaaagaagttgcggctctggagaagggatccggcggcggaggatctggcggaggcggatctgggggcggaggctctttcgaacaagttcagcttcaacagcctggcgctgagctggtcaaacctggcgcttctgtgaagatgagctgcaaagccagcggctacgccttcagcagctactggatcaactggatgaagcagaaacccggccagggactcgaatggatcggccaaatctatcccggcgacggcgacaccaactacaacggcaagttcaagggcagagccacactgaccgccgatacctctagcagcacagcctacatgcagctgagcagcctgaccagcgaagatagcgccgtgtacttctgtgcccggtccatcacaacagtcgtgggctgcgctatggactattggggccagggaacaagcgtgaccgtgtctagtacgcgtgaggacctgaagaacgtgttcccacctgaggtggccgtgttcgagcctagcaaggccgagatcgcccacacccagaaagccaccctcgtgtgcctggctaccggcttctaccccgaccatgtggaactgtcttggtgggtcaacggcaaagaggtgcacagcggcgtgtgtaccgacccccagccactgaaagaacagcccgccctgaacgacagccggtactgcctgagcagcagactgagagtgtccgccaccttctggcagaacccccggaaccacttcagatgccaggtgcagttctacggcctgagcgagaacgacgagtggacccaggacagagccaagcccgtgacccagatcgtgtctgccgaagcctggggcagagccgattgcggcatcaccagcgccagctaccaccagggcgtgctgagcgccaccatcctgtacgagatcctgctgggcaaggccaccctgtacgccgtgctggtgtctgccctggtgctgatggctatggtcaagcggaaggacagccggggaagggccaagcgatctggatctggagcaacaaacttctcactactcaaacaagcaggtgacgtggaggagaatcccgggccttctagaggccatatgaccgagtacaagcccacggtgcgcctcgccacccgcgacgacgtccccagggccgtacgcaccctcgccgccgcgttcgccgactaccccgccacgcgccacaccgtcgatccggaccgccacatcgagcgggtcaccgagctgcaagaactcttcctcacgcgcgtcgggctcgacatcggcaaggtgtgggtcgcggacgacggcgccgcggtggcggtctggaccacgccggagagcgtcgaagcgggggcggtgttcgccgagatcggcccgcgcatggccgagttgagcggttcccggctggccgcgcagcaacagatggaaggcctcctggcgccgcaccggcccaaggagcccgcgtggttcctggccaccgtcggcgtctcgcccgaccaccagggcaagggtctgggcagcgccgtcgtgctccccggagtggaggcggccgagcgcgccggggtgcccgccttcctggagacctccgcgccccgcaacctccccttctacgagcggctcggcttcaccgtcaccgccgacgtcgaggtgcccgaaggaccgcgcacctggtgcatgacccgcaagcccggtgcctga

SEQ ID NO: 4672 - DNA, 3120 bp, Artificial Sequence
  Synthetic Polynucloetide
atggccttaccagtgaccgccttgctcctgccgctggccttgctgctccacgccgccaggccgcagctccagctgcaagagtctggacctggcctggtcaagcctagcgagacactgagcctgacctgtaccgtgtccggcgatagcatcagcagcggcgattactactggggctggatcagacagcctcctggcaaaggactggaatggatcggccacatctactacagcggcgtgacctactacaaccccagcctgaagtccagagtgaccatcagcgtggacaccagccggaaccagttctccctgaagctgtctagcgtgacagccgccgataccgccgtgtactactgcaccagagaggacagcagcaactggcggagtagaggccagggaacactggtcacagttagctctggtaccggcggaggcggatctggcggcggaggtagcggtggcggaggatctgaattcgacatccagatgacacagagccctagcagcctgtctgccagcgtgggagacagagtgaccatcacatgcaaggccagcgaccacatcaacaactggctggcctggtatcagcagaagcctggacaggcccctaagctgctgatctacggcgctaccacactggaaacaggcgtgcccagcagattttctggcagcggctctggcaccgactacaccctgacaatatccagcctccagcctgaggacttcgccacctactactgtcagcagagctggaacaccccttggacattcggccagggcaccaagctggaaatcaagagactcgaggacctgaagaacgtgttcccacctgaggtggccgtgttcgagcctagcaaggccgagatcgcccacacccagaaagccaccctcgtgtgcctggctaccggcttctaccccgaccatgtggaactgtcttggtgggtcaacggcaaagaggtgcacagcggcgtgtgtaccgacccccagccactgaaagaacagcccgccctgaacgacagccggtactgcctgagcagcagactgagagtgtccgccaccttctggcagaacccccggaaccacttcagatgccaggtgcagttctacggcctgagcgagaacgacgagtggacccaggacagagccaagcccgtgacccagatcgtgtctgccgaagcctggggcagagccgattgcggcatcaccagcgccagctaccaccagggcgtgctgagcgccaccatcctgtacgagatcctgctgggcaaggccaccctgtacgccgtgctggtgtctgccctggtgctgatggctatggtcaagcggaaggacagccggggaagggccaagcgatctggatctggagcaacaaacttctcactactcaaacaagcaggtgacgtggaggagaatcccgggcctactagtatggactggatttggcgcatccttttccttgtcggcgctgctaccggcgcccattccgggcccgaagttgctgccctcgagaaggaggtagcagctttggaaaaagaagtcgcagcccttgagaaagaagttgcggctctggagaagggatccggcggcggaggatctggcggaggcggatctgggggcggaggctctttcgaacaagttcagcttcaacagcctggcgctgagctggtcaaacctggcgcttctgtgaagatgagctgcaaagccagcggctacgccttcagcagctactggatcaactggatgaagcagaaacccggccagggactcgaatggatcggccaaatctatcccggcgacggcgacaccaactacaacggcaagttcaagggcagagccacactgaccgccgatacctctagcagcacagcctacatgcagctgagcagcctgaccagcgaagatagcgccgtgtacttctgtgcccggtccatcacaacagtcgtgggctgcgctatggactattggggccagggaacaagcgtgaccgtgtctagtacgcgtatccagaaccctgatcctgccgtgtaccagctgcgggatagcaagagcagcgacaagagcgtgtgtctgttcaccgacttcgacagccagaccaacgtgtcccagagcaaggactccgacgtgtacatcaccgataagtgcgtgctggacatgcggagcatggacttcaagagcaactccgccgtggcctggtccaacaagtccgatttcgcctgcgccaacgccttcaacaacagcattatccccgaggacacattcttcccaagcagcgacgtgccctgcgacgtgaagctggtggaaaagagcttcgagacagacaccaacctgaacttccagaacctgagcgtgatcggcttcagaatcctgctgctgaaagtggccggctttaacctgctgatgaccctgcggctgtggtccagccgcgccaagagaagcggatctggcgtgaagcagaccctgaatttcgacctgctgaagctggctggcgacgtggaatccaacccaggcccttctagaggccatatgaccgagtacaagcccacggtgcgcctcgccacccgcgacgacgtccccagggccgtacgcaccctcgccgccgcgttcgccgactaccccgccacgcgccacaccgtcgatccggaccgccacatcgagcgggtcaccgagctgcaagaactcttcctcacgcgcgtcgggctcgacatcggcaaggtgtgggtcgcggacgacggcgccgcggtggcggtctggaccacgccggagagcgtcgaagcgggggcggtgttcgccgagatcggcccgcgcatggccgagttgagcggttcccggctggccgcgcagcaacagatggaaggcctcctggcgccgcaccggcccaaggagcccgcgtggttcctggccaccgtcggcgtctcgcccgaccaccagggcaagggtctgggcagcgccgtcgtgctccccggagtggaggcggccgagcgcgccggggtgcccgccttcctggagacctccgcgccccgcaacctccccttctacgagcggctcggcttcaccgtcaccgccgacgtcgaggtgcccgaaggaccgcgcacctggtgcatgacccgcaagcccggtgcctga

SEQ ID NO: 4673 - DNA, 3120 bp, Artificial Sequence
  Synthetic Polynucloetide
atggccttaccagtgaccgccttgctcctgccgctggccttgctgctccacgccgccaggccgcagctccagctgcaagagtctggacctggcctggtcaagcctagcgagacactgagcctgacctgtaccgtgtccggcgatagcatcagcagcggcgattactactggggctggatcagacagcctcctggcaaaggactggaatggatcggccacatctactacagcggcgtgacctactacaaccccagcctgaagtccagagtgaccatcagcgtggacaccagccggaaccagttctccctgaagctgtctagcgtgacagccgccgataccgccgtgtactactgcaccagagaggacagcagcaactggcggagtagaggccagggaacactggtcacagttagctctggtaccggcggaggcggatctggcggcggaggtagcggtggcggaggatctgaattcgacatccagatgacacagagccctagcagcctgtctgccagcgtgggagacagagtgaccatcacatgcaaggccagcgaccacatcaacaactggctggcctggtatcagcagaagcctggacaggcccctaagctgctgatctacggcgctaccacactggaaacaggcgtgcccagcagattttctggcagcggctctggcaccgactacaccctgacaatatccagcctccagcctgaggacttcgccacctactactgtcagcagagctggaacaccccttggacattcggccagggcaccaagctggaaatcaagagactcgaggacctgaagaacgtgttcccacctgaggtggccgtgttcgagcctagcgaggccgagatcagccacacccagaaagccaccctcgtgtgcctggctaccggcttctaccccgaccatgtggaactgtcttggtgggtcaacggcaaagaggtgcacagcggcgtgtgtaccgacccccagccactgaaagaacagcccgccctgaacgacagccggtactgcctgagcagcagactgagagtgtccgccaccttctggcagaacccccggaaccacttcagatgccaggtgcagttctacggcctgagcgagaacgacgagtggacccaggacagagccaagcccgtgacccagatcgtgtctgccgaagcctggggcagagccgattgcggctttaccagcgagagctaccagcagggcgtgctgagcgccaccatcctgtacgagatcctgctgggcaaggccaccctgtacgccgtgctggtgtctgccctggtgctgatggctatggtcaagcggaaggacagccggggaagggccaagcgatctggatctggagcaacaaacttctcactactcaaacaagcaggtgacgtggaggagaatcccgggcctactagtatggactggatttggcgcatccttttccttgtcggcgctgctaccggcgcccattccgggcccgaagttgctgccctcgagaaggaggtagcagctttggaaaaagaagtcgcagcccttgagaaagaagttgcggctctggagaagggatccggcggcggaggatctggcggaggcggatctgggggcggaggctctttcgaacaagttcagcttcaacagcctggcgctgagctggtcaaacctggcgcttctgtgaagatgagctgcaaagccagcggctacgccttcagcagctactggatcaactggatgaagcagaaacccggccagggactcgaatggatcggccaaatctatcccggcgacggcgacaccaactacaacggcaagttcaagggcagagccacactgaccgccgatacctctagcagcacagcctacatgcagctgagcagcctgaccagcgaagatagcgccgtgtacttctgtgcccggtccatcacaacagtcgtgggctgcgctatggactattggggccagggaacaagcgtgaccgtgtctagtacgcgtatccagaaccctgatcctgccgtgtaccagctgcgggatagcaagagcagcgacaagagcgtgtgtctgttcaccgacttcgacagccagaccaacgtgtcccagagcaaggactccgacgtgtacatcaccgataagtgcgtgctggacatgcggagcatggacttcaagagcaactccgccgtggcctggtccaacaagtccgatttcgcctgcgccaacgccttcaacaacagcattatccccgaggacacattcttcccaagccccgagagcagctgcgacgtgaagctggtggaaaagagcttcgagacagacaccaacctgaacttccagaacctgagcgtgatcggcttcagaatcctgctgctgaaagtggccggctttaacctgctgatgaccctgcggctgtggtccagccgcgccaagagaagcggatctggcgtgaagcagaccctgaatttcgacctgctgaagctggctggcgacgtggaatccaacccaggcccttctagaggccatatgaccgagtacaagcccacggtgcgcctcgccacccgcgacgacgtccccagggccgtacgcaccctcgccgccgcgttcgccgactaccccgccacgcgccacaccgtcgatccggaccgccacatcgagcgggtcaccgagctgcaagaactcttcctcacgcgcgtcgggctcgacatcggcaaggtgtgggtcgcggacgacggcgccgcggtggcggtctggaccacgccggagagcgtcgaagcgggggcggtgttcgccgagatcggcccgcgcatggccgagttgagcggttcccggctggccgcgcagcaacagatggaaggcctcctggcgccgcaccggcccaaggagcccgcgtggttcctggccaccgtcggcgtctcgcccgaccaccagggcaagggtctgggcagcgccgtcgtgctccccggagtggaggcggccgagcgcgccggggtgcccgccttcctggagacctccgcgccccgcaacctccccttctacgagcggctcggcttcaccgtcaccgccgacgtcgaggtgcccgaaggaccgcgcacctggtgcatgacccgcaagcccggtgcctga

SEQ ID NO: 4674 - DNA, 2418 bp, Artificial Sequence
  Synthetic Polynucloetide
atggccttaccagtgaccgccttgctcctgccgctggccttgctgctccacgccgccaggccgcagctccagctgcaagagtctggacctggcctggtcaagcctagcgagacactgagcctgacctgtaccgtgtccggcgatagcatcagcagcggcgattactactggggctggatcagacagcctcctggcaaaggactggaatggatcggccacatctactacagcggcgtgacctactacaaccccagcctgaagtccagagtgaccatcagcgtggacaccagccggaaccagttctccctgaagctgtctagcgtgacagccgccgataccgccgtgtactactgcaccagagaggacagcagcaactggcggagtagaggccagggaacactggtcacagttagctctggtaccggcggaggcggatctggcggcggaggtagcggtggcggaggatctgaattcgacatccagatgacacagagccctagcagcctgtctgccagcgtgggagacagagtgaccatcacatgcaaggccagcgaccacatcaacaactggctggcctggtatcagcagaagcctggacaggcccctaagctgctgatctacggcgctaccacactggaaacaggcgtgcccagcagattttctggcagcggctctggcaccgactacaccctgacaatatccagcctccagcctgaggacttcgccacctactactgtcagcagagctggaacaccccttggacattcggccagggcaccaagctggaaatcaagagactcgaggacctgaagaacgtgttcccacctgaggtggccgtgttcgagcctagcgaggccgagatcagccacacccagaaagccaccctcgtgtgcctggctaccggcttctaccccgaccatgtggaactgtcttggtgggtcaacggcaaagaggtgcacagcggcgtgtgtaccgacccccagccactgaaagaacagcccgccctgaacgacagccggtactgcctgagcagcagactgagagtgtccgccaccttctggcagaacccccggaaccacttcagatgccaggtgcagttctacggcctgagcgagaacgacgagtggacccaggacagagccaagcccgtgacccagatcgtgtctgccgaagcctggggcagagccgattgcggctttaccagcgagagctaccagcagggcgtgctgagcgccaccatcctgtacgagatcctgctgggcaaggccaccctgtacgccgtgctggtgtctgccctggtgctgatggctatggtcaagcggaaggacagccggggaagggccaagcgatctggatctggagcaacaaacttctcactactcaaacaagcaggtgacgtggaggagaatcccgggcctactagtatggactggatttggcgcatccttttccttgtcggcgctgctaccggcgcccattccgggcccgaagttgctgccctcgagaaggaggtagcagctttggaaaaagaagtcgcagcccttgagaaagaagttgcggctctggagaagggatccggcggcggaggatctggcggaggcggatctgggggcggaggctctttcgaacaagttcagcttcaacagcctggcgctgagctggtcaaacctggcgcttctgtgaagatgagctgcaaagccagcggctacgccttcagcagctactggatcaactggatgaagcagaaacccggccagggactcgaatggatcggccaaatctatcccggcgacggcgacaccaactacaacggcaagttcaagggcagagccacactgaccgccgatacctctagcagcacagcctacatgcagctgagcagcctgaccagcgaagatagcgccgtgtacttctgtgcccggtccatcacaacagtcgtgggctgcgctatggactattggggccagggaacaagcgtgaccgtgtctagtacgcgtatccagaaccctgatcctgccgtgtaccagctgcgggatagcaagagcagcgacaagagcgtgtgtctgttcaccgacttcgacagccagaccaacgtgtcccagagcaaggactccgacgtgtacatcaccgataagtgcgtgctggacatgcggagcatggacttcaagagcaactccgccgtggcctggtccaacaagtccgatttcgcctgcgccaacgccttcaacaacagcattatccccgaggacacattcttcccaagccccgagagcagctgcgacgtgaagctggtggaaaagagcttcgagacagacaccaacctgaacttccagaacctgagcgtgatcggcttcagaatcctgctgctgaaagtggccggctttaacctgctgatgaccctgcggctgtggtccagc

SEQ ID NO: 4675 - DNA, 3093 bp, Artificial Sequence
  Synthetic Polynucloetide
atggccttaccagtgaccgccttgctcctgccgctggccttgctgctccacgccgccaggccgcagctccagctgcaagagtctggacctggcctggtcaagcctagcgagacactgagcctgacctgtaccgtgtccggcgatagcatcagcagcggcgattactactggggctggatcagacagcctcctggcaaaggactggaatggatcggccacatctactacagcggcgtgacctactacaaccccagcctgaagtccagagtgaccatcagcgtggacaccagccggaaccagttctccctgaagctgtctagcgtgacagccgccgataccgccgtgtactactgcaccagagaggacagcagcaactggcggagtagaggccagggaacactggtcacagttagctctggtaccggcggaggcggatctggcggcggaggtagcggtggcggaggatctgaattcgacatccagatgacacagagccctagcagcctgtctgccagcgtgggagacagagtgaccatcacatgcaaggccagcgaccacatcaacaactggctggcctggtatcagcagaagcctggacaggcccctaagctgctgatctacggcgctaccacactggaaacaggcgtgcccagcagattttctggcagcggctctggcaccgactacaccctgacaatatccagcctccagcctgaggacttcgccacctactactgtcagcagagctggaacaccccttggacattcggccagggcaccaagctggaaatcaagagactcgaggacctgaagaacgtgttcccacctgaggtggccgtgttcgagcctagcgaggccgagatcagccacacccagaaagccaccctcgtgtgcctggctaccggcttctaccccgaccatgtggaactgtcttggtgggtcaacggcaaagaggtgcacagcggcgtgtgtaccgacccccagccactgaaagaacagcccgccctgaacgacagccggtactgcctgagcagcagactgagagtgtccgccaccttctggcagaacccccggaaccacttcagatgccaggtgcagttctacggcctgagcgagaacgacgagtggacccaggacagagccaagcccgtgacccagatcgtgtctgccgaagcctggggcagagccgattgcggctttaccagcgagagctaccagcagggcgtgctgagcgccaccatcctgtacgagatcctgctgggcaaggccaccctgtacgccgtgctggtgtctgccctggtgctgatggctatggtcaagcggaaggacagccggggaagggccaagcgatctggatctggagcaacaaacttctcactactcaaacaagcaggtgacgtggaggagaatcccgggcctactagtatggactggatttggcgcatccttttccttgtcggcgctgctaccggcgcccattccgggcccgaagttgctgccctcgagaaggaggtagcagctttggaaaaagaagtcgcagcccttgagaaagaagttgcggctctggagaagggatccggcggcggaggatctggcggaggcggatctgggggcggaggctctttcgaacaagttcagcttcaacagcctggcgctgagctggtcaaacctggcgcttctgtgaagatgagctgcaaagccagcggctacgccttcagcagctactggatcaactggatgaagcagaaacccggccagggactcgaatggatcggccaaatctatcccggcgacggcgacaccaactacaacggcaagttcaagggcagagccacactgaccgccgatacctctagcagcacagcctacatgcagctgagcagcctgaccagcgaagatagcgccgtgtacttctgtgcccggtccatcacaacagtcgtgggctgcgctatggactattggggccagggaacaagcgtgaccgtgtctagtacgcgtatccagaaccctgatcctgccgtgtaccagctgcgggatagcaagagcagcgacaagagcgtgtgtctgttcaccgacttcgacagccagaccaacgtgtcccagagcaaggactccgacgtgtacatcaccgataagtgcgtgctggacatgcggagcatggacttcaagagcaactccgccgtggcctggtccaacaagtccgatttcgcctgcgccaacgccttcaacaacagcattatccccgaggacacattcttcccaagccccgagagcagctgcgacgtgaagctggtggaaaagagcttcgagacagacaccaacctgaacttccagaacctgagcgtgatcggcttcagaatcctgctgctgaaagtggccggctttaacctgctgatgaccctgcggctgtggtccagccgcgccaagagaagcggatctggcgtgaagcagaccctgaatttcgacctgctgaagctggctggcgacgtggaatccaacccaggcccttctagaggcgggatccacaccatggctacctacgaggtgctgtgcgaggtggcaagaaagctgggcaccgacgacagagaagtggtgctgttcctgctgaacgtgttcatccctcagcctacactggcccagctgatcggtgcactgagagccctgaaagaggaaggccggctgacctttcctctgctggccgaatgcctgttcagagccggaagaagggatctgctgcgggacctgctgcatctggaccccagatttctggaaagacacctggccggcaccatgagctacttcagcccttaccagctgaccgtgctgcacgttgacggcgaactgtgcgccagagatattcggagcctgatcttcctgagcaaggacaccatcggcagccggtctacccctcagacatttctgcactgggtgtactgcatggaaaacctggacctgctcggccccacagatgtggatgccctgatgtccatgctgagaagcctgagcagagtggacctccagagacaggtgcagacactgatgggactgcacctgagcggacctagccacagccagcactacagacacacccct

SEQ ID NO: 4676 - DNA, 2430 bp, Artificial Sequence
  Synthetic Polynucloetide
atggccttaccagtgaccgccttgctcctgccgctggccttgctgctccacgccgccaggccgcagctccagctgcaagagtctggacctggcctggtcaagcctagcgagacactgagcctgacctgtaccgtgtccggcgatagcatcagcagcggcgattactactggggctggatcagacagcctcctggcaaaggactggaatggatcggccacatctactacagcggcgtgacctactacaaccccagcctgaagtccagagtgaccatcagcgtggacaccagccggaaccagttctccctgaagctgtctagcgtgacagccgccgataccgccgtgtactactgcaccagagaggacagcagcaactggcggagtagaggccagggaacactggtcacagttagctctggtaccggcggaggcggatctggcggcggaggtagcggtggcggaggatctgaattcgacatccagatgacacagagccctagcagcctgtctgccagcgtgggagacagagtgaccatcacatgcaaggccagcgaccacatcaacaactggctggcctggtatcagcagaagcctggacaggcccctaagctgctgatctacggcgctaccacactggaaacaggcgtgcccagcagattttctggcagcggctctggcaccgactacaccctgacaatatccagcctccagcctgaggacttcgccacctactactgtcagcagagctggaacaccccttggacattcggccagggcaccaagctggaaatcaagagactcgagatccagaaccctgatcctgccgtgtaccagctgcgggatagcaagagcagcgacaagagcgtgtgtctgttcaccgacttcgacagccagaccaacgtgtcccagagcaaggactccgacgtgtacatcaccgataagtgcgtgctggacatgcggagcatggacttcaagagcaactccgccgtggcctggtccaacaagtccgatttcgcctgcgccaacgccttcaacaacagcattatccccgaggacacattcttcccaagccccgagagcagctgcgacgtgaagctggtggaaaagagcttcgagacagacaccaacctgaacttccagaacctgagcgtgatcggcttcagaatcctgctgctgaaagtggccggctttaacctgctgatgaccctgcggctgtggtccagccgcgccaagagaagcggatctggcgtgaagcagaccctgaatttcgacctgctgaagctggctggcgacgtggaatccaacccaggccctactagtatggactggatttggcgcatccttttccttgtcggcgctgctaccggcgcccattccgggcccgaagttgctgccctcgagaaggaggtagcagctttggaaaaagaagtcgcagcccttgagaaagaagttgcggctctggagaagggatccggcggcggaggatctggcggaggcggatctgggggcggaggctctttcgaacaagttcagcttcaacagcctggcgctgagctggtcaaacctggcgcttctgtgaagatgagctgcaaagccagcggctacgccttcagcagctactggatcaactggatgaagcagaaacccggccagggactcgaatggatcggccaaatctatcccggcgacggcgacaccaactacaacggcaagttcaagggcagagccacactgaccgccgatacctctagcagcacagcctacatgcagctgagcagcctgaccagcgaagatagcgccgtgtacttctgtgcccggtccatcacaacagtcgtgggctgcgctatggactattggggccagggaacaagcgtgaccgtgtctagtacgcgtgaggacctgaagaacgtgttcccacctgaggtggccgtgttcgagcctagcgaggccgagatcagccacacccagaaagccaccctcgtgtgcctggctaccggcttctaccccgaccatgtggaactgtcttggtgggtcaacggcaaagaggtgcacagcggcgtgtgtaccgacccccagccactgaaagaacagcccgccctgaacgacagccggtactgcctgagcagcagactgagagtgtccgccaccttctggcagaacccccggaaccacttcagatgccaggtgcagttctacggcctgagcgagaacgacgagtggacccaggacagagccaagcccgtgacccagatcgtgtctgccgaagcctggggcagagccgattgcggctttaccagcgagagctaccagcagggcgtgctgagcgccaccatcctgtacgagatcctgctgggcaaggccaccctgtacgccgtgctggtgtctgccctggtgctgatggctatggtcaagcggaaggacagccgggga

SEQ ID NO: 4677 - DNA, 3096 bp, Artificial Sequence
  Synthetic Polynucloetide
atggccttaccagtgaccgccttgctcctgccgctggccttgctgctccacgccgccaggccgcagctccagctgcaagagtctggacctggcctggtcaagcctagcgagacactgagcctgacctgtaccgtgtccggcgatagcatcagcagcggcgattactactggggctggatcagacagcctcctggcaaaggactggaatggatcggccacatctactacagcggcgtgacctactacaaccccagcctgaagtccagagtgaccatcagcgtggacaccagccggaaccagttctccctgaagctgtctagcgtgacagccgccgataccgccgtgtactactgcaccagagaggacagcagcaactggcggagtagaggccagggaacactggtcacagttagctctggtaccggcggaggcggatctggcggcggaggtagcggtggcggaggatctgaattcgacatccagatgacacagagccctagcagcctgtctgccagcgtgggagacagagtgaccatcacatgcaaggccagcgaccacatcaacaactggctggcctggtatcagcagaagcctggacaggcccctaagctgctgatctacggcgctaccacactggaaacaggcgtgcccagcagattttctggcagcggctctggcaccgactacaccctgacaatatccagcctccagcctgaggacttcgccacctactactgtcagcagagctggaacaccccttggacattcggccagggcaccaagctggaaatcaagagactcgagatccagaaccctgatcctgccgtgtaccagctgcgggatagcaagagcagcgacaagagcgtgtgtctgttcaccgacttcgacagccagaccaacgtgtcccagagcaaggactccgacgtgtacatcaccgataagtgcgtgctggacatgcggagcatggacttcaagagcaactccgccgtggcctggtccaacaagtccgatttcgcctgcgccaacgccttcaacaacagcattatccccgaggacacattcttcccaagccccgagagcagctgcgacgtgaagctggtggaaaagagcttcgagacagacaccaacctgaacttccagaacctgagcgtgatcggcttcagaatcctgctgctgaaagtggccggctttaacctgctgatgaccctgcggctgtggtccagccgcgccaagagaagcggatctggcgtgaagcagaccctgaatttcgacctgctgaagctggctggcgacgtggaatccaacccaggccctactagtatggactggatttggcgcatccttttccttgtcggcgctgctaccggcgcccattccgggcccgaagttgctgccctcgagaaggaggtagcagctttggaaaaagaagtcgcagcccttgagaaagaagttgcggctctggagaagggatccggcggcggaggatctggcggaggcggatctgggggcggaggctctttcgaacaagttcagcttcaacagcctggcgctgagctggtcaaacctggcgcttctgtgaagatgagctgcaaagccagcggctacgccttcagcagctactggatcaactggatgaagcagaaacccggccagggactcgaatggatcggccaaatctatcccggcgacggcgacaccaactacaacggcaagttcaagggcagagccacactgaccgccgatacctctagcagcacagcctacatgcagctgagcagcctgaccagcgaagatagcgccgtgtacttctgtgcccggtccatcacaacagtcgtgggctgcgctatggactattggggccagggaacaagcgtgaccgtgtctagtacgcgtgaggacctgaagaacgtgttcccacctgaggtggccgtgttcgagcctagcgaggccgagatcagccacacccagaaagccaccctcgtgtgcctggctaccggcttctaccccgaccatgtggaactgtcttggtgggtcaacggcaaagaggtgcacagcggcgtgtgtaccgacccccagccactgaaagaacagcccgccctgaacgacagccggtactgcctgagcagcagactgagagtgtccgccaccttctggcagaacccccggaaccacttcagatgccaggtgcagttctacggcctgagcgagaacgacgagtggacccaggacagagccaagcccgtgacccagatcgtgtctgccgaagcctggggcagagccgattgcggctttaccagcgagagctaccagcagggcgtgctgagcgccaccatcctgtacgagatcctgctgggcaaggccaccctgtacgccgtgctggtgtctgccctggtgctgatggctatggtcaagcggaaggacagccggggaagggccaagcgatctggatctggagcaacaaacttctcactactcaaacaagcaggtgacgtggaggagaatcccgggccttctagaggcgggatccacaccatggctacctacgaggtgctgtgcgaggtggcaagaaagctgggcaccgacgacagagaagtggtgctgttcctgctgaacgtgttcatccctcagcctacactggcccagctgatcggtgcactgagagccctgaaagaggaaggccggctgacctttcctctgctggccgaatgcctgttcagagccggaagaagggatctgctgcgggacctgctgcatctggaccccagatttctggaaagacacctggccggcaccatgagctacttcagcccttaccagctgaccgtgctgcacgttgacggcgaactgtgcgccagagatattcggagcctgatcttcctgagcaaggacaccatcggcagccggtctacccctcagacatttctgcactgggtgtactgcatggaaaacctggacctgctcggccccacagatgtggatgccctgatgtccatgctgagaagcctgagcagagtggacctccagagacaggtgcagacactgatgggactgcacctgagcggacctagccacagccagcactacagacacacccct

SEQ ID NO: 4678 - DNA, 3120 bp, Artificial Sequence
  Synthetic Polynucloetide
atggccttaccagtgaccgccttgctcctgccgctggccttgctgctccacgccgccaggccgcagctccagctgcaagagtctggacctggcctggtcaagcctagcgagacactgagcctgacctgtaccgtgtccggcgatagcatcagcagcggcgattactactggggctggatcagacagcctcctggcaaaggactggaatggatcggccacatctactacagcggcgtgacctactacaaccccagcctgaagtccagagtgaccatcagcgtggacaccagccggaaccagttctccctgaagctgtctagcgtgacagccgccgataccgccgtgtactactgcaccagagaggacagcagcaactggcggagtagaggccagggaacactggtcacagttagctctggtaccggcggaggcggatctggcggcggaggtagcggtggcggaggatctgaattcgacatccagatgacacagagccctagcagcctgtctgccagcgtgggagacagagtgaccatcacatgcaaggccagcgaccacatcaacaactggctggcctggtatcagcagaagcctggacaggcccctaagctgctgatctacggcgctaccacactggaaacaggcgtgcccagcagattttctggcagcggctctggcaccgactacaccctgacaatatccagcctccagcctgaggacttcgccacctactactgtcagcagagctggaacaccccttggacattcggccagggcaccaagctggaaatcaagagactcgaggacctgaagaacgtgttcccacctgaggtggccgtgttcgagcctagcgaggccgagatcagccacacccagaaagccaccctcgtgtgcctggctaccggcttctaccccgaccatgtggaactgtcttggtgggtcaacggcaaagaggtgcacagcggcgtgtctaccgacccccagccactgaaagaacagcccgccctgaacgacagccggtactgcctgagcagcagactgagagtgtccgccaccttctggcagaacccccggaaccacttcagatgccaggtgcagttctacggcctgagcgagaacgacgagtggacccaggacagagccaagcccgtgacccagatcgtgtctgccgaagcctggggcagagccgattgcggctttaccagcgagagctaccagcagggcgtgctgagcgccaccatcctgtacgagatcctgctgggcaaggccaccctgtacgccgtgctggtgtctgccctggtgctgatggctatggtcaagcggaaggacagccggggaagggccaagcgatctggatctggagcaacaaacttctcactactcaaacaagcaggtgacgtggaggagaatcccgggcctactagtatggactggatttggcgcatccttttccttgtcggcgctgctaccggcgcccattccgggcccgaagttgctgccctcgagaaggaggtagcagctttggaaaaagaagtcgcagcccttgagaaagaagttgcggctctggagaagggatccggcggcggaggatctggcggaggcggatctgggggcggaggctctttcgaacaagttcagcttcaacagcctggcgctgagctggtcaaacctggcgcttctgtgaagatgagctgcaaagccagcggctacgccttcagcagctactggatcaactggatgaagcagaaacccggccagggactcgaatggatcggccaaatctatcccggcgacggcgacaccaactacaacggcaagttcaagggcagagccacactgaccgccgatacctctagcagcacagcctacatgcagctgagcagcctgaccagcgaagatagcgccgtgtacttctgtgcccggtccatcacaacagtcgtgggctgcgctatggactattggggccagggaacaagcgtgaccgtgtctagtacgcgtatccagaaccctgatcctgccgtgtaccagctgcgggatagcaagagcagcgacaagagcgtgtgtctgttcaccgacttcgacagccagaccaacgtgtcccagagcaaggactccgacgtgtacatcaccgataagaccgtgctggacatgcggagcatggacttcaagagcaactccgccgtggcctggtccaacaagtccgatttcgcctgcgccaacgccttcaacaacagcattatccccgaggacacattcttcccaagccccgagagcagctgcgacgtgaagctggtggaaaagagcttcgagacagacaccaacctgaacttccagaacctgagcgtgatcggcttcagaatcctgctgctgaaagtggccggctttaacctgctgatgaccctgcggctgtggtccagccgcgccaagagaagcggatctggcgtgaagcagaccctgaatttcgacctgctgaagctggctggcgacgtggaatccaacccaggcccttctagaggccatatgaccgagtacaagcccacggtgcgcctcgccacccgcgacgacgtccccagggccgtacgcaccctcgccgccgcgttcgccgactaccccgccacgcgccacaccgtcgatccggaccgccacatcgagcgggtcaccgagctgcaagaactcttcctcacgcgcgtcgggctcgacatcggcaaggtgtgggtcgcggacgacggcgccgcggtggcggtctggaccacgccggagagcgtcgaagcgggggcggtgttcgccgagatcggcccgcgcatggccgagttgagcggttcccggctggccgcgcagcaacagatggaaggcctcctggcgccgcaccggcccaaggagcccgcgtggttcctggccaccgtcggcgtctcgcccgaccaccagggcaagggtctgggcagcgccgtcgtgctccccggagtggaggcggccgagcgcgccggggtgcccgccttcctggagacctccgcgccccgcaacctccccttctacgagcggctcggcttcaccgtcaccgccgacgtcgaggtgcccgaaggaccgcgcacctggtgcatgacccgcaagcccggtgcctga

SEQ ID NO: 4679 - DNA, 3366 bp, Artificial Sequence
  Synthetic Polynucloetide
atggccttaccagtgaccgccttgctcctgccgctggccttgctgctccacgccgccaggccgcagctccagctgcaagagtctggacctggcctggtcaagcctagcgagacactgagcctgacctgtaccgtgtccggcgatagcatcagcagcggcgattactactggggctggatcagacagcctcctggcaaaggactggaatggatcggccacatctactacagcggcgtgacctactacaaccccagcctgaagtccagagtgaccatcagcgtggacaccagccggaaccagttctccctgaagctgtctagcgtgacagccgccgataccgccgtgtactactgcaccagagaggacagcagcaactggcggagtagaggccagggaacactggtcacagttagctctggtaccggcggaggcggatctggcggcggaggtagcggtggcggaggatctgaattcgacatccagatgacacagagccctagcagcctgtctgccagcgtgggagacagagtgaccatcacatgcaaggccagcgaccacatcaacaactggctggcctggtatcagcagaagcctggacaggcccctaagctgctgatctacggcgctaccacactggaaacaggcgtgcccagcagattttctggcagcggctctggcaccgactacaccctgacaatatccagcctccagcctgaggacttcgccacctactactgtcagcagagctggaacaccccttggacattcggccagggcaccaagctggaaatcaagagactcgaggacctgaagaacgtgttcccacctgaggtggccgtgttcgagcctagcgaggccgagatcagccacacccagaaagccaccctcgtgtgcctggctaccggcttctaccccgaccatgtggaactgtcttggtgggtcaacggcaaagaggtgcacagcggcgtgtctaccgacccccagccactgaaagaacagcccgccctgaacgacagccggtactgcctgagcagcagactgagagtgtccgccaccttctggcagaacccccggaaccacttcagatgccaggtgcagttctacggcctgagcgagaacgacgagtggacccaggacagagccaagcccgtgacccagatcgtgtctgccgaagcctggggcagagccgattgcggctttaccagcgagagctaccagcagggcgtgctgagcgccaccatcctgtacgagatcctgctgggcaaggccaccctgtacgccgtgctggtgtctgccctggtgctgatggctatggtcaagcggaaggacagccggggaagggccaagcgatctggatctggagcaacaaacttctcactactcaaacaagcaggtgacgtggaggagaatcccgggcctactagtatggactggatttggcgcatccttttccttgtcggcgctgctaccggcgcccattccgggcccgaagttgctgccctcgagaaggaggtagcagctttggaaaaagaagtcgcagcccttgagaaagaagttgcggctctggagaagggatccggcggcggaggatctggcggaggcggatctgggggcggaggctctttcgaacaagttcagcttcaacagcctggcgctgagctggtcaaacctggcgcttctgtgaagatgagctgcaaagccagcggctacgccttcagcagctactggatcaactggatgaagcagaaacccggccagggactcgaatggatcggccaaatctatcccggcgacggcgacaccaactacaacggcaagttcaagggcagagccacactgaccgccgatacctctagcagcacagcctacatgcagctgagcagcctgaccagcgaagatagcgccgtgtacttctgtgcccggtccatcacaacagtcgtgggctgcgctatggactattggggccagggaacaagcgtgaccgtgtctagtacgcgtgagcagaaactgatctcggaagaggatgggagcggcaccccattcccttctctggcccctcccatcatgctgctggtggacggcaagcagcagatggtggtcgtgtgcctggtgctggatgtggccccacctggactggacagccccatctggtttagcgccggcaatggctctgccctggacgcctttacctacggcccaagccctgccaccgatggcacctggacaaatctggcccacctgagcctgcccagcgaggaactggcttcttgggagcctctcgtgtgccacacaggacctggcgctgagggacacagcagatccacccagcctatgcacctgtctggcgaggccagcaccgccagaacctgtcctcaggaacctctgagaggcacccctggcggagcactgtggctgggagtgctgagactgctgctgttcaagctgctgctgtttgacctgctgctgacctgctcctgtctgtgcgatcctgccggccctctgccttctcctgccaccaccacaagactgagagccctgggcagccacagactgcaccctgccacagagacaggcggcagagaggccacaagcagccctagaccccagcccagagacagaagatggggcgataccccccctggcagaaagcctggatctccagtccgcgccaagagaagcggatctggcgtgaagcagaccctgaatttcgacctgctgaagctggctggcgacgtggaatccaacccaggcccttctagaggccatatgaccgagtacaagcccacggtgcgcctcgccacccgcgacgacgtccccagggccgtacgcaccctcgccgccgcgttcgccgactaccccgccacgcgccacaccgtcgatccggaccgccacatcgagcgggtcaccgagctgcaagaactcttcctcacgcgcgtcgggctcgacatcggcaaggtgtgggtcgcggacgacggcgccgcggtggcggtctggaccacgccggagagcgtcgaagcgggggcggtgttcgccgagatcggcccgcgcatggccgagttgagcggttcccggctggccgcgcagcaacagatggaaggcctcctggcgccgcaccggcccaaggagcccgcgtggttcctggccaccgtcggcgtctcgcccgaccaccagggcaagggtctgggcagcgccgtcgtgctccccggagtggaggcggccgagcgcgccggggtgcccgccttcctggagacctccgcgccccgcaacctccccttctacgagcggctcggcttcaccgtcaccgccgacgtcgaggtgcccgaaggaccgcgcacctggtgcatgacccgcaagcccggtgcctga

SEQ ID NO: 4680 - DNA, 3231 bp, Artificial Sequence
  Synthetic Polynucloetide
atggccttaccagtgaccgccttgctcctgccgctggccttgctgctccacgccgccaggccgcagctccagctgcaagagtctggacctggcctggtcaagcctagcgagacactgagcctgacctgtaccgtgtccggcgatagcatcagcagcggcgattactactggggctggatcagacagcctcctggcaaaggactggaatggatcggccacatctactacagcggcgtgacctactacaaccccagcctgaagtccagagtgaccatcagcgtggacaccagccggaaccagttctccctgaagctgtctagcgtgacagccgccgataccgccgtgtactactgcaccagagaggacagcagcaactggcggagtagaggccagggaacactggtcacagttagctctggtaccggcggaggcggatctggcggcggaggtagcggtggcggaggatctgaattcgacatccagatgacacagagccctagcagcctgtctgccagcgtgggagacagagtgaccatcacatgcaaggccagcgaccacatcaacaactggctggcctggtatcagcagaagcctggacaggcccctaagctgctgatctacggcgctaccacactggaaacaggcgtgcccagcagattttctggcagcggctctggcaccgactacaccctgacaatatccagcctccagcctgaggacttcgccacctactactgtcagcagagctggaacaccccttggacattcggccagggcaccaagctggaaatcaagagactcgaggggaaaccaattcccaaccctcttctgggactggattcaaccggcagcggcgacaagcagctggacgccgacgtgtcccccaagcctaccatcttcctgccctctatcgccgagacaaagctccagaaggccggcacctacctgtgcctgctggaaaagttcttcccagatgtgattaagatccactggcaggaaaagaagtccaacaccatcctgggcagccaggaaggcaacaccatgaagaccaacgacacctacatgaagttcagctggctgaccgtgcccgagaagtccctggacaaagaacacagatgcatcgtgcggcacgaaaacaacaagaacggcgtggaccaggaaatcatcttcccacccatcaagaccgatgtgattacaatggaccccaaggacaactgctccaaggacgccaacgataccctgctgctccagctgaccaacaccagcgcctactacatgtacttgttgctgctgctgaagtccgtggtgtacttcgccatcatcacatgctgcctgctgcggagaaccgccttctgctgcaacggcgagaagtctagggccaagcgatctggatctggagcaacaaacttctcactactcaaacaagcaggtgacgtggaggagaatcccgggcctactagtatggactggatttggcgcatccttttccttgtcggcgctgctaccggcgcccattccgggcccgaagttgctgccctcgagaaggaggtagcagctttggaaaaagaagtcgcagcccttgagaaagaagttgcggctctggagaagggatccggcggcggaggatctggcggaggcggatctgggggcggaggctctttcgaacaagttcagcttcaacagcctggcgctgagctggtcaaacctggcgcttctgtgaagatgagctgcaaagccagcggctacgccttcagcagctactggatcaactggatgaagcagaaacccggccagggactcgaatggatcggccaaatctatcccggcgacggcgacaccaactacaacggcaagttcaagggcagagccacactgaccgccgatacctctagcagcacagcctacatgcagctgagcagcctgaccagcgaagatagcgccgtgtacttctgtgcccggtccatcacaacagtcgtgggctgcgctatggactattggggccagggaacaagcgtgaccgtgtctagtacgcgtgagcagaaactgatctcggaagaggatgggagcggcagccagcctcacaccaagcccagcgtgttcgtgatgaagaacggcaccaacgtggcctgcctcgtgaaagagttctaccccaaggacatcaggatcaacctggtgtccagcaagaagatcaccgagttcgaccccgccatcgtgatctcccccagcggcaagtacaacgccgtgaagctggggaagtacgaggacagcaacagcgtgacctgctccgtgcagcacgacaacaagaccgtgcacagcaccgactttgaagtgaaaaccgactccaccgaccacgtgaagcccaaagagacagagaacaccaagcagcccagcaagagctgccacaagcccaaggccatcgtgcacaccgagaaagtgaacatgatgagcctgaccgtgctgggcctgcggatgctgttcgccaaaaccgtggccgtgaacttcctgctgaccgccaagctgttcttcctccgcgccaagagaagcggatctggcgtgaagcagaccctgaatttcgacctgctgaagctggctggcgacgtggaatccaacccaggcccttctagaggccatatgaccgagtacaagcccacggtgcgcctcgccacccgcgacgacgtccccagggccgtacgcaccctcgccgccgcgttcgccgactaccccgccacgcgccacaccgtcgatccggaccgccacatcgagcgggtcaccgagctgcaagaactcttcctcacgcgcgtcgggctcgacatcggcaaggtgtgggtcgcggacgacggcgccgcggtggcggtctggaccacgccggagagcgtcgaagcgggggcggtgttcgccgagatcggcccgcgcatggccgagttgagcggttcccggctggccgcgcagcaacagatggaaggcctcctggcgccgcaccggcccaaggagcccgcgtggttcctggccaccgtcggcgtctcgcccgaccaccagggcaagggtctgggcagcgccgtcgtgctccccggagtggaggcggccgagcgcgccggggtgcccgccttcctggagacctccgcgccccgcaacctccccttctacgagcggctcggcttcaccgtcaccgccgacgtcgaggtgcccgaaggaccgcgcacctggtgcatgacccgcaagcccggtgcctga

SEQ ID NO: 4681 - DNA, 2442 bp, Artificial Sequence
  Synthetic Polynucloetide
atggccttaccagtgaccgccttgctcctgccgctggccttgctgctccacgccgccaggccgcagctccagctgcaagagtctggacctggcctggtcaagcctagcgagacactgagcctgacctgtaccgtgtccggcgatagcatcagcagcggcgattactactggggctggatcagacagcctcctggcaaaggactggaatggatcggccacatctactacagcggcgtgacctactacaaccccagcctgaagtccagagtgaccatcagcgtggacaccagccggaaccagttctccctgaagctgtctagcgtgacagccgccgataccgccgtgtactactgcaccagagaggacagcagcaactggcggagtagaggccagggaacactggtcacagttagctctggtaccggcggaggcggatctggcggcggaggtagcggtggcggaggatctgaattcgacatccagatgacacagagccctagcagcctgtctgccagcgtgggagacagagtgaccatcacatgcaaggccagcgaccacatcaacaactggctggcctggtatcagcagaagcctggacaggcccctaagctgctgatctacggcgctaccacactggaaacaggcgtgcccagcagattttctggcagcggctctggcaccgactacaccctgacaatatccagcctccagcctgaggacttcgccacctactactgtcagcagagctggaacaccccttggacattcggccagggcaccaagctggaaatcaagagactcgagagccagcctcacaccaagcccagcgtgttcgtgatgaagaacggcaccaacgtggcctgcctcgtgaaagagttctaccccaaggacatcaggatcaacctggtgtccagcaagaagatcaccgagttcgaccccgccatcgtgatctcccccagcggcaagtacaacgccgtgaagctggggaagtacgaggacagcaacagcgtgacctgctccgtgcagcacgacaacaagaccgtgcacagcaccgactttgaagtgaaaaccgactccaccgaccacgtgaagcccaaagagacagagaacaccaagcagcccagcaagagctgccacaagcccaaggccatcgtgcacaccgagaaagtgaacatgatgagcctgaccgtgctgggcctgcggatgctgttcgccaaaaccgtggccgtgaacttcctgctgaccgccaagctgttcttcctcagggccaagcgatctggatctggagcaacaaacttctcactactcaaacaagcaggtgacgtggaggagaatcccgggcctactagtatggactggatttggcgcatccttttccttgtcggcgctgctaccggcgcccattccgggcccgaagttgctgccctcgagaaggaggtagcagctttggaaaaagaagtcgcagcccttgagaaagaagttgcggctctggagaagggatccggcggcggaggatctggcggaggcggatctgggggcggaggctctttcgaacaagttcagcttcaacagcctggcgctgagctggtcaaacctggcgcttctgtgaagatgagctgcaaagccagcggctacgccttcagcagctactggatcaactggatgaagcagaaacccggccagggactcgaatggatcggccaaatctatcccggcgacggcgacaccaactacaacggcaagttcaagggcagagccacactgaccgccgatacctctagcagcacagcctacatgcagctgagcagcctgaccagcgaagatagcgccgtgtacttctgtgcccggtccatcacaacagtcgtgggctgcgctatggactattggggccagggaacaagcgtgaccgtgtctagtacgcgtgacaagcagctggacgccgacgtgtcccccaagcctaccatcttcctgccctctatcgccgagacaaagctccagaaggccggcacctacctgtgcctgctggaaaagttcttcccagatgtgattaagatccactggcaggaaaagaagtccaacaccatcctgggcagccaggaaggcaacaccatgaagaccaacgacacctacatgaagttcagctggctgaccgtgcccgagaagtccctggacaaagaacacagatgcatcgtgcggcacgaaaacaacaagaacggcgtggaccaggaaatcatcttcccacccatcaagaccgatgtgattacaatggaccccaaggacaactgctccaaggacgccaacgataccctgctgctccagctgaccaacaccagcgcctactacatgtacttgttgctgctgctgaagtccgtggtgtacttcgccatcatcacatgctgcctgctgcggagaaccgccttctgctgcaacggcgagaagtct

SEQ ID NO: 4682 - DNA, 3651 bp, Artificial Sequence
  Synthetic Polynucloetide
atggccttaccagtgaccgccttgctcctgccgctggccttgctgctccacgccgccaggccgcagctccagctgcaagagtctggacctggcctggtcaagcctagcgagacactgagcctgacctgtaccgtgtccggcgatagcatcagcagcggcgattactactggggctggatcagacagcctcctggcaaaggactggaatggatcggccacatctactacagcggcgtgacctactacaaccccagcctgaagtccagagtgaccatcagcgtggacaccagccggaaccagttctccctgaagctgtctagcgtgacagccgccgataccgccgtgtactactgcaccagagaggacagcagcaactggcggagtagaggccagggaacactggtcacagttagctctggtaccggcggaggcggatctggcggcggaggtagcggtggcggaggatctgaattcgacatccagatgacacagagccctagcagcctgtctgccagcgtgggagacagagtgaccatcacatgcaaggccagcgaccacatcaacaactggctggcctggtatcagcagaagcctggacaggcccctaagctgctgatctacggcgctaccacactggaaacaggcgtgcccagcagattttctggcagcggctctggcaccgactacaccctgacaatatccagcctccagcctgaggacttcgccacctactactgtcagcagagctggaacaccccttggacattcggccagggcaccaagctggaaatcaagagaggacagcctaaggccaatcctaccgtgacactgttccctccaagcagcgaagaactccaggccaacaaggccacacttgtgtgcctgatctccgacttctaccctggggctgtgacagtggcttggaaggccgatggatctcctgtgaaagccggcgtggaaaccaccaagccatccaagcagagcaacaacaaatacgccgccagctcctacctgagcctgacacctgagcagtggaagtcccacagatcctacagctgccaagtgacccacgaaggcagcaccgtggaaaagacagtggcccctacagagtgcagcggatcccagagcttcggcctgctggaccccaagctgtgctacctgctggatggcatcctgttcatctacggcgtgatcctgaccgccctgttcctgagagtgaagttcagcagaagcgccgacgcccctgcctaccagcagggacagaaccaactgtacaacgagctgaacctgggcagacgggaagagtacgacgtgctggacaagcggagaggcagggaccctgagatgggcggaaagccccagcggagaaagaacccccaggaaggactgtataacgaactccagaaagacaagatggccgaagcctacagcgagatcggcatgaagggcgagcggagaagaggcaagggccacgatggcctgtaccagggcctgagcaccgccaccaaggacacctatgacgccctgcacatgcaggccctgcctccaagaagggccaagcgatctggatctggagcaacaaacttctcactactcaaacaagcaggtgacgtggaggagaatcccgggcctactagtatggactggatttggcgcatccttttccttgtcggcgctgctaccggcgcccattccgggcccgaagttgctgccctcgagaaggaggtagcagctttggaaaaagaagtcgcagcccttgagaaagaagttgcggctctggagaagggatccggcggcggaggatctggcggaggcggatctgggggcggaggctctttcgaacaagttcagcttcaacagcctggcgctgagctggtcaaacctggcgcttctgtgaagatgagctgcaaagccagcggctacgccttcagcagctactggatcaactggatgaagcagaaacccggccagggactcgaatggatcggccaaatctatcccggcgacggcgacaccaactacaacggcaagttcaagggcagagccacactgaccgccgatacctctagcagcacagcctacatgcagctgagcagcctgaccagcgaagatagcgccgtgtacttctgtgcccggtccatcacaacagtcgtgggctgcgctatggactattggggccagggaacaagcgtgaccgtgtctagtgcctctacaaagggaccctccgtgtttcctctggctcccagcagcaagtctacaagcggaggaacagccgctctgggctgcctggtcaaggattactttcccgagcctgtgaccgtgtcctggaatagcggagcactgacaagcggcgtgcacacctttccagccgtgctgcaaagcagcggcctgtactctctgagcagcgtggtcacagtgcctagctctagcctgggcacccagacctacatctgcaatgtgaaccacaagcctagcaacaccaaggtggacaagagagtggaacccaagagctgtggtacccagagttttgggttgttggaccctaaattgtgctatctgttggacggaatcctgttcatttacggagtgatcctgaccgcattgttcctgcgggttaagttttccagatccgcagacgcacccgcttaccaacaagggcagaaccaactctacaatgaacttaatttggggcggagggaagagtacgacgttctggacaaaaggaggggacgagatcccgagatgggcggaaagcctcagcgaaggaagaatccgcaagaggggctttataacgaactccagaaagataaaatggcagaagcctatagtgagattgggatgaagggagaaaggaggaggggtaaaggtcacgatgggttgtaccaaggattgagcacagccactaaagatacctatgatgcgctccacatgcaggccctgccgccaagacgcgccaagagaagcggatctggcgtgaagcagaccctgaatttcgacctgctgaagctggctggcgacgtggaatccaacccaggcccttctagaggccatatgaccgagtacaagcccacggtgcgcctcgccacccgcgacgacgtccccagggccgtacgcaccctcgccgccgcgttcgccgactaccccgccacgcgccacaccgtcgatccggaccgccacatcgagcgggtcaccgagctgcaagaactcttcctcacgcgcgtcgggctcgacatcggcaaggtgtgggtcgcggacgacggcgccgcggtggcggtctggaccacgccggagagcgtcgaagcgggggcggtgttcgccgagatcggcccgcgcatggccgagttgagcggttcccggctggccgcgcagcaacagatggaaggcctcctggcgccgcaccggcccaaggagcccgcgtggttcctggccaccgtcggcgtctcgcccgaccaccagggcaagggtctgggcagcgccgtcgtgctccccggagtggaggcggccgagcgcgccggggtgcccgccttcctggagacctccgcgccccgcaacctccccttctacgagcggctcggcttcaccgtcaccgccgacgtcgaggtgcccgaaggaccgcgcacctggtgcatgacccgcaagcccggtgcctga

SEQ ID NO: 4683 - DNA, 3006 bp, Artificial Sequence
  Synthetic Polynucloetide
atggccttaccagtgaccgccttgctcctgccgctggccttgctgctccacgccgccaggccgcagctccagctgcaagagtctggacctggcctggtcaagcctagcgagacactgagcctgacctgtaccgtgtccggcgatagcatcagcagcggcgattactactggggctggatcagacagcctcctggcaaaggactggaatggatcggccacatctactacagcggcgtgacctactacaaccccagcctgaagtccagagtgaccatcagcgtggacaccagccggaaccagttctccctgaagctgtctagcgtgacagccgccgataccgccgtgtactactgcaccagagaggacagcagcaactggcggagtagaggccagggaacactggtcacagttagctctggtaccggcggaggcggatctggcggcggaggtagcggtggcggaggatctgaattcgacatccagatgacacagagccctagcagcctgtctgccagcgtgggagacagagtgaccatcacatgcaaggccagcgaccacatcaacaactggctggcctggtatcagcagaagcctggacaggcccctaagctgctgatctacggcgctaccacactggaaacaggcgtgcccagcagattttctggcagcggctctggcaccgactacaccctgacaatatccagcctccagcctgaggacttcgccacctactactgtcagcagagctggaacaccccttggacattcggccagggcaccaagctggaaatcaagagactcgaggacctgaagaacgtgttcccacctgaggtggccgtgttcgagcctagcgaggccgagatcagccacacccagaaagccaccctcgtgtgcctggctaccggcttctaccccgaccatgtggaactgtcttggtgggtcaacggcaaagaggtgcacagcggcgtgtctaccgacccccagccactgaaagaacagcccgccctgaacgacagccggtactgcctgagcagcagactgagagtgtccgccaccttctggcagaacccccggaaccacttcagatgccaggtgcagttctacggcctgagcgagaacgacgagtggacccaggacagagccaagcccgtgacccagatcgtgtctgccgaagcctggggcagagccgattgcggatcccagagcttcggcctgctggaccccaagctgtgctacctgctggatggcatcctgttcatctacggcgtgatcctgaccgccctgttcctgagagtgaagttcagcagaagcgccgacgcccctgcctaccagcagggacagaaccaactgtacaacgagctgaacctgggcagacgggaagagtacgacgtgctggacaagcggagaggcagggaccctgagatgggcggaaagccccagcggagaaagaacccccaggaaggactgtataacgaactccagaaagacaagatggccgaagcctacagcgagatcggcatgaagggcgagcggagaagaggcaagggccacgatggcctgtaccagggcctgagcaccgccaccaaggacacctatgacgccctgcacatgcaggccctgcctccaagaagggccaagcgatctggatctggagcaacaaacttctcactactcaaacaagcaggtgacgtggaggagaatcccgggcctactagtatggactggatttggcgcatccttttccttgtcggcgctgctaccggcgcccattccgggcccgaagttgctgccctcgagaaggaggtagcagctttggaaaaagaagtcgcagcccttgagaaagaagttgcggctctggagaagggatccggcggcggaggatctggcggaggcggatctgggggcggaggctctttcgaacaagttcagcttcaacagcctggcgctgagctggtcaaacctggcgcttctgtgaagatgagctgcaaagccagcggctacgccttcagcagctactggatcaactggatgaagcagaaacccggccagggactcgaatggatcggccaaatctatcccggcgacggcgacaccaactacaacggcaagttcaagggcagagccacactgaccgccgatacctctagcagcacagcctacatgcagctgagcagcctgaccagcgaagatagcgccgtgtacttctgtgcccggtccatcacaacagtcgtgggctgcgctatggactattggggccagggaacaagcgtgaccgtgtctagtacgcgtatccagaaccctgatcctgccgtgtaccagctgcgggatagcaagagcagcgacaagagcgtgtgtctgttcaccgacttcgacagccagaccaacgtgtcccagagcaaggactccgacgtgtacatcaccgataagaccgtgctggacatgcggagcatggacttcaagagcaactccgccgtggcctggtccaacaagtccgatttcgcctgcgccaacgccttcaacaacagcattatccccgaggacacattcttcccaagccccgagagcagctgcggtacccagagttttgggttgttggaccctaaattgtgctatctgttggacggaatcctgttcatttacggagtgatcctgaccgcattgttcctgcgggttaagttttccagatccgcagacgcacccgcttaccaacaagggcagaaccaactctacaatgaacttaatttggggcggagggaagagtacgacgttctggacaaaaggaggggacgagatcccgagatgggcggaaagcctcagcgaaggaagaatccgcaagaggggctttataacgaactccagaaagataaaatggcagaagcctatagtgagattgggatgaagggagaaaggaggaggggtaaaggtcacgatgggttgtaccaaggattgagcacagccactaaagatacctatgatgcgctccacatgcaggccctgccgccaaga

SEQ ID NO: 4684 - DNA, 3006 bp, Artificial Sequence
  Synthetic Polynucloetide
atggccttaccagtgaccgccttgctcctgccgctggccttgctgctccacgccgccaggccgcagctccagctgcaagagtctggacctggcctggtcaagcctagcgagacactgagcctgacctgtaccgtgtccggcgatagcatcagcagcggcgattactactggggctggatcagacagcctcctggcaaaggactggaatggatcggccacatctactacagcggcgtgacctactacaaccccagcctgaagtccagagtgaccatcagcgtggacaccagccggaaccagttctccctgaagctgtctagcgtgacagccgccgataccgccgtgtactactgcaccagagaggacagcagcaactggcggagtagaggccagggaacactggtcacagttagctctggtaccggcggaggcggatctggcggcggaggtagcggtggcggaggatctgaattcgacatccagatgacacagagccctagcagcctgtctgccagcgtgggagacagagtgaccatcacatgcaaggccagcgaccacatcaacaactggctggcctggtatcagcagaagcctggacaggcccctaagctgctgatctacggcgctaccacactggaaacaggcgtgcccagcagattttctggcagcggctctggcaccgactacaccctgacaatatccagcctccagcctgaggacttcgccacctactactgtcagcagagctggaacaccccttggacattcggccagggcaccaagctggaaatcaagagactcgaggacctgaagaacgtgttcccacctgaggtggccgtgttcgagcctagcaaggccgagatcgcccacacccagaaagccaccctcgtgtgcctggctaccggcttctaccccgaccatgtggaactgtcttggtgggtcaacggcaaagaggtgcacagcggcgtgtgtaccgacccccagccactgaaagaacagcccgccctgaacgacagccggtactgcctgagcagcagactgagagtgtccgccaccttctggcagaacccccggaaccacttcagatgccaggtgcagttctacggcctgagcgagaacgacgagtggacccaggacagagccaagcccgtgacccagatcgtgtctgccgaagcctggggcagagccgattgcggatcccagagcttcggcctgctggaccccaagctgtgctacctgctggatggcatcctgttcatctacggcgtgatcctgaccgccctgttcctgagagtgaagttcagcagaagcgccgacgcccctgcctaccagcagggacagaaccaactgtacaacgagctgaacctgggcagacgggaagagtacgacgtgctggacaagcggagaggcagggaccctgagatgggcggaaagccccagcggagaaagaacccccaggaaggactgtataacgaactccagaaagacaagatggccgaagcctacagcgagatcggcatgaagggcgagcggagaagaggcaagggccacgatggcctgtaccagggcctgagcaccgccaccaaggacacctatgacgccctgcacatgcaggccctgcctccaagaagggccaagcgatctggatctggagcaacaaacttctcactactcaaacaagcaggtgacgtggaggagaatcccgggcctactagtatggactggatttggcgcatccttttccttgtcggcgctgctaccggcgcccattccgggcccgaagttgctgccctcgagaaggaggtagcagctttggaaaaagaagtcgcagcccttgagaaagaagttgcggctctggagaagggatccggcggcggaggatctggcggaggcggatctgggggcggaggctctttcgaacaagttcagcttcaacagcctggcgctgagctggtcaaacctggcgcttctgtgaagatgagctgcaaagccagcggctacgccttcagcagctactggatcaactggatgaagcagaaacccggccagggactcgaatggatcggccaaatctatcccggcgacggcgacaccaactacaacggcaagttcaagggcagagccacactgaccgccgatacctctagcagcacagcctacatgcagctgagcagcctgaccagcgaagatagcgccgtgtacttctgtgcccggtccatcacaacagtcgtgggctgcgctatggactattggggccagggaacaagcgtgaccgtgtctagtacgcgtatccagaaccctgatcctgccgtgtaccagctgcgggatagcaagagcagcgacaagagcgtgtgtctgttcaccgacttcgacagccagaccaacgtgtcccagagcaaggactccgacgtgtacatcaccgataagtgcgtgctggacatgcggagcatggacttcaagagcaactccgccgtggcctggtccaacaagtccgatttcgcctgcgccaacgccttcaacaacagcattatccccgaggacacattcttcccaagcagcgacgtgccctgcggtacccagagttttgggttgttggaccctaaattgtgctatctgttggacggaatcctgttcatttacggagtgatcctgaccgcattgttcctgcgggttaagttttccagatccgcagacgcacccgcttaccaacaagggcagaaccaactctacaatgaacttaatttggggcggagggaagagtacgacgttctggacaaaaggaggggacgagatcccgagatgggcggaaagcctcagcgaaggaagaatccgcaagaggggctttataacgaactccagaaagataaaatggcagaagcctatagtgagattgggatgaagggagaaaggaggaggggtaaaggtcacgatgggttgtaccaaggattgagcacagccactaaagatacctatgatgcgctccacatgcaggccctgccgccaaga

SEQ ID NO: 4685 - DNA, 3219 bp, Artificial Sequence
  Synthetic Polynucloetide
atggccttaccagtgaccgccttgctcctgccgctggccttgctgctccacgccgccaggccgcagctccagctgcaagagtctggacctggcctggtcaagcctagcgagacactgagcctgacctgtaccgtgtccggcgatagcatcagcagcggcgattactactggggctggatcagacagcctcctggcaaaggactggaatggatcggccacatctactacagcggcgtgacctactacaaccccagcctgaagtccagagtgaccatcagcgtggacaccagccggaaccagttctccctgaagctgtctagcgtgacagccgccgataccgccgtgtactactgcaccagagaggacagcagcaactggcggagtagaggccagggaacactggtcacagttagctctggtaccggcggaggcggatctggcggcggaggtagcggtggcggaggatctgaattcgacatccagatgacacagagccctagcagcctgtctgccagcgtgggagacagagtgaccatcacatgcaaggccagcgaccacatcaacaactggctggcctggtatcagcagaagcctggacaggcccctaagctgctgatctacggcgctaccacactggaaacaggcgtgcccagcagattttctggcagcggctctggcaccgactacaccctgacaatatccagcctccagcctgaggacttcgccacctactactgtcagcagagctggaacaccccttggacattcggccagggcaccaagctggaaatcaagagactcgaggggaaaccaattcccaaccctcttctgggactggattcaaccggcagcggcgaggacctgaagaacgtgttcccacctgaggtggccgtgttcgagcctagcgaggccgagatcagccacacccagaaagccaccctcgtgtgcctggctaccggcttctaccccgaccatgtggaactgtcttggtgggtcaacggcaaagaggtgcacagcggcgtgtctaccgacccccagccactgaaagaacagcccgccctgaacgacagccggtactgcctgagcagcagactgagagtgtccgccaccttctggcagaacccccggaaccacttcagatgccaggtgcagttctacggcctgagcgagaacgacgagtggacccaggacagagccaagcccgtgacccagatcgtgtctgccgaagcctggggcagagccgattgcggatcccagagcttcggcctgctggaccccaagctgtgctacctgctggatggcatcctgttcatctacggcgtgatcctgaccgccctgttcctgagagtgaagttcagcagaagcgccgacgcccctgcctaccagcagggacagaaccaactgtacaacgagctgaacctgggcagacgggaagagtacgacgtgctggacaagcggagaggcagggaccctgagatgggcggaaagccccagcggagaaagaacccccaggaaggactgtataacgaactccagaaagacaagatggccgaagcctacagcgagatcggcatgaagggcgagcggagaagaggcaagggccacgatggcctgtaccagggcctgagcaccgccaccaaggacacctatgacgccctgcacatgcaggccctgcctccaagaagggccaagcgatctggatctggagcaacaaacttctcactactcaaacaagcaggtgacgtggaggagaatcccgggcctactagtatggactggatttggcgcatccttttccttgtcggcgctgctaccggcgcccattccgggcccgaagttgctgccctcgagaaggaggtagcagctttggaaaaagaagtcgcagcccttgagaaagaagttgcggctctggagaagggatccggcggcggaggatctggcggaggcggatctgggggcggaggctctttcgaacaagttcagcttcaacagcctggcgctgagctggtcaaacctggcgcttctgtgaagatgagctgcaaagccagcggctacgccttcagcagctactggatcaactggatgaagcagaaacccggccagggactcgaatggatcggccaaatctatcccggcgacggcgacaccaactacaacggcaagttcaagggcagagccacactgaccgccgatacctctagcagcacagcctacatgcagctgagcagcctgaccagcgaagatagcgccgtgtacttctgtgcccggtccatcacaacagtcgtgggctgcgctatggactattggggccagggaacaagcgtgaccgtgtctagtacgcgtgagcagaaactgatctcggaagaggatgggagcggcatccagaaccctgatcctgccgtgtaccagctgcgggatagcaagagcagcgacaagagcgtgtgtctgttcaccgacttcgacagccagaccaacgtgtcccagagcaaggactccgacgtgtacatcaccgataagaccgtgctggacatgcggagcatggacttcaagagcaactccgccgtggcctggtccaacaagtccgatttcgcctgcgccaacgccttcaacaacagcattatccccgaggacacattcttcccaagccccgagagcagctgcggtacccagagttttgggttgttggaccctaaattgtgctatctgttggacggaatcctgttcatttacggagtgatcctgaccgcattgttcctgaggagcaagcggtcacggctgctccacagcgattacatgaatatgacaccacgaagaccgggtcctactcgcaaacactaccaaccctacgcacctccccgcgactttgcagcgtaccgatctcgggttaagttttccagatccgcagacgcacccgcttaccaacaagggcagaaccaactctacaatgaacttaatttggggcggagggaagagtacgacgttctggacaaaaggaggggacgagatcccgagatgggcggaaagcctcagcgaaggaagaatccgcaagaggggctttataacgaactccagaaagataaaatggcagaagcctatagtgagattgggatgaagggagaaaggaggaggggtaaaggtcacgatgggttgtaccaaggattgagcacagccactaaagatacctatgatgcgctccacatgcaggccctgccgccaaga

SEQ ID NO: 4686 - DNA, 3342 bp, Artificial Sequence
  Synthetic Polynucloetide
atggccttaccagtgaccgccttgctcctgccgctggccttgctgctccacgccgccaggccgcagctccagctgcaagagtctggacctggcctggtcaagcctagcgagacactgagcctgacctgtaccgtgtccggcgatagcatcagcagcggcgattactactggggctggatcagacagcctcctggcaaaggactggaatggatcggccacatctactacagcggcgtgacctactacaaccccagcctgaagtccagagtgaccatcagcgtggacaccagccggaaccagttctccctgaagctgtctagcgtgacagccgccgataccgccgtgtactactgcaccagagaggacagcagcaactggcggagtagaggccagggaacactggtcacagttagctctggtaccggcggaggcggatctggcggcggaggtagcggtggcggaggatctgaattcgacatccagatgacacagagccctagcagcctgtctgccagcgtgggagacagagtgaccatcacatgcaaggccagcgaccacatcaacaactggctggcctggtatcagcagaagcctggacaggcccctaagctgctgatctacggcgctaccacactggaaacaggcgtgcccagcagattttctggcagcggctctggcaccgactacaccctgacaatatccagcctccagcctgaggacttcgccacctactactgtcagcagagctggaacaccccttggacattcggccagggcaccaagctggaaatcaagagactcgaggggaaaccaattcccaaccctcttctgggactggattcaaccggcagcggcgaggacctgaagaacgtgttcccacctgaggtggccgtgttcgagcctagcgaggccgagatcagccacacccagaaagccaccctcgtgtgcctggctaccggcttctaccccgaccatgtggaactgtcttggtgggtcaacggcaaagaggtgcacagcggcgtgtctaccgacccccagccactgaaagaacagcccgccctgaacgacagccggtactgcctgagcagcagactgagagtgtccgccaccttctggcagaacccccggaaccacttcagatgccaggtgcagttctacggcctgagcgagaacgacgagtggacccaggacagagccaagcccgtgacccagatcgtgtctgccgaagcctggggcagagccgattgcggatcccagagcttcggcctgctggaccccaagctgtgctacctgctggatggcatcctgttcatctacggcgtgatcctgaccgccctgttcctgaggagtaagaggagcaggctcctgcacagtgactacatgaacatgactccacgccgccccggacccacccgcaagcattaccagccctatgccccaccacgcgacttcgcagcctatcgctccagagtgaagttcagcagaagcgccgacgcccctgcctaccagcagggacagaaccaactgtacaacgagctgaacctgggcagacgggaagagtacgacgtgctggacaagcggagaggcagggaccctgagatgggcggaaagccccagcggagaaagaacccccaggaaggactgtataacgaactccagaaagacaagatggccgaagcctacagcgagatcggcatgaagggcgagcggagaagaggcaagggccacgatggcctgtaccagggcctgagcaccgccaccaaggacacctatgacgccctgcacatgcaggccctgcctccaagaagggccaagcgatctggatctggagcaacaaacttctcactactcaaacaagcaggtgacgtggaggagaatcccgggcctactagtatggactggatttggcgcatccttttccttgtcggcgctgctaccggcgcccattccgggcccgaagttgctgccctcgagaaggaggtagcagctttggaaaaagaagtcgcagcccttgagaaagaagttgcggctctggagaagggatccggcggcggaggatctggcggaggcggatctgggggcggaggctctttcgaacaagttcagcttcaacagcctggcgctgagctggtcaaacctggcgcttctgtgaagatgagctgcaaagccagcggctacgccttcagcagctactggatcaactggatgaagcagaaacccggccagggactcgaatggatcggccaaatctatcccggcgacggcgacaccaactacaacggcaagttcaagggcagagccacactgaccgccgatacctctagcagcacagcctacatgcagctgagcagcctgaccagcgaagatagcgccgtgtacttctgtgcccggtccatcacaacagtcgtgggctgcgctatggactattggggccagggaacaagcgtgaccgtgtctagtacgcgtgagcagaaactgatctcggaagaggatgggagcggcatccagaaccctgatcctgccgtgtaccagctgcgggatagcaagagcagcgacaagagcgtgtgtctgttcaccgacttcgacagccagaccaacgtgtcccagagcaaggactccgacgtgtacatcaccgataagaccgtgctggacatgcggagcatggacttcaagagcaactccgccgtggcctggtccaacaagtccgatttcgcctgcgccaacgccttcaacaacagcattatccccgaggacacattcttcccaagccccgagagcagctgcggtacccagagttttgggttgttggaccctaaattgtgctatctgttggacggaatcctgttcatttacggagtgatcctgaccgcattgttcctgaggagcaagcggtcacggctgctccacagcgattacatgaatatgacaccacgaagaccgggtcctactcgcaaacactaccaaccctacgcacctccccgcgactttgcagcgtaccgatctcgggttaagttttccagatccgcagacgcacccgcttaccaacaagggcagaaccaactctacaatgaacttaatttggggcggagggaagagtacgacgttctggacaaaaggaggggacgagatcccgagatgggcggaaagcctcagcgaaggaagaatccgcaagaggggctttataacgaactccagaaagataaaatggcagaagcctatagtgagattgggatgaagggagaaaggaggaggggtaaaggtcacgatgggttgtaccaaggattgagcacagccactaaagatacctatgatgcgctccacatgcaggccctgccgccaaga

SEQ ID NO: 4687 - DNA, 3225 bp, Artificial Sequence
  Synthetic Polynucloetide
atggccttaccagtgaccgccttgctcctgccgctggccttgctgctccacgccgccaggccgcagctccagctgcaagagtctggacctggcctggtcaagcctagcgagacactgagcctgacctgtaccgtgtccggcgatagcatcagcagcggcgattactactggggctggatcagacagcctcctggcaaaggactggaatggatcggccacatctactacagcggcgtgacctactacaaccccagcctgaagtccagagtgaccatcagcgtggacaccagccggaaccagttctccctgaagctgtctagcgtgacagccgccgataccgccgtgtactactgcaccagagaggacagcagcaactggcggagtagaggccagggaacactggtcacagttagctctggtaccggcggaggcggatctggcggcggaggtagcggtggcggaggatctgaattcgacatccagatgacacagagccctagcagcctgtctgccagcgtgggagacagagtgaccatcacatgcaaggccagcgaccacatcaacaactggctggcctggtatcagcagaagcctggacaggcccctaagctgctgatctacggcgctaccacactggaaacaggcgtgcccagcagattttctggcagcggctctggcaccgactacaccctgacaatatccagcctccagcctgaggacttcgccacctactactgtcagcagagctggaacaccccttggacattcggccagggcaccaagctggaaatcaagagactcgaggggaaaccaattcccaaccctcttctgggactggattcaaccggcagcggcgaggacctgaagaacgtgttcccacctgaggtggccgtgttcgagcctagcgaggccgagatcagccacacccagaaagccaccctcgtgtgcctggctaccggcttctaccccgaccatgtggaactgtcttggtgggtcaacggcaaagaggtgcacagcggcgtgtctaccgacccccagccactgaaagaacagcccgccctgaacgacagccggtactgcctgagcagcagactgagagtgtccgccaccttctggcagaacccccggaaccacttcagatgccaggtgcagttctacggcctgagcgagaacgacgagtggacccaggacagagccaagcccgtgacccagatcgtgtctgccgaagcctggggcagagccgattgcggatcccagagcttcggcctgctggaccccaagctgtgctacctgctggatggcatcctgttcatctacggcgtgatcctgaccgccctgttcctgagagtgaagttcagcagaagcgccgacgcccctgcctaccagcagggacagaaccaactgtacaacgagctgaacctgggcagacgggaagagtacgacgtgctggacaagcggagaggcagggaccctgagatgggcggaaagccccagcggagaaagaacccccaggaaggactgtataacgaactccagaaagacaagatggccgaagcctacagcgagatcggcatgaagggcgagcggagaagaggcaagggccacgatggcctgtaccagggcctgagcaccgccaccaaggacacctatgacgccctgcacatgcaggccctgcctccaagaagggccaagcgatctggatctggagcaacaaacttctcactactcaaacaagcaggtgacgtggaggagaatcccgggcctactagtatggactggatttggcgcatccttttccttgtcggcgctgctaccggcgcccattccgggcccgaagttgctgccctcgagaaggaggtagcagctttggaaaaagaagtcgcagcccttgagaaagaagttgcggctctggagaagggatccggcggcggaggatctggcggaggcggatctgggggcggaggctctttcgaacaagttcagcttcaacagcctggcgctgagctggtcaaacctggcgcttctgtgaagatgagctgcaaagccagcggctacgccttcagcagctactggatcaactggatgaagcagaaacccggccagggactcgaatggatcggccaaatctatcccggcgacggcgacaccaactacaacggcaagttcaagggcagagccacactgaccgccgatacctctagcagcacagcctacatgcagctgagcagcctgaccagcgaagatagcgccgtgtacttctgtgcccggtccatcacaacagtcgtgggctgcgctatggactattggggccagggaacaagcgtgaccgtgtctagtacgcgtgagcagaaactgatctcggaagaggatctggggagcggcatccagaaccctgatcctgccgtgtaccagctgcgggatagcaagagcagcgacaagagcgtgtgtctgttcaccgacttcgacagccagaccaacgtgtcccagagcaaggactccgacgtgtacatcaccgataagaccgtgctggacatgcggagcatggacttcaagagcaactccgccgtggcctggtccaacaagtccgatttcgcctgcgccaacgccttcaacaacagcattatccccgaggacacattcttcccaagccccgagagcagctgcggtacccagagttttgggttgttggaccctaaattgtgctatctgttggacggaatcctgttcatttacggagtgatcctgaccgcattgttcctgaagagaggccggaagaagctgctgtacatcttcaagcagcctttcatgcggcccgtgcagaccacccaggaagaggacggctgctcctgccggttccccgaggaagaagaaggcggctgcgagctgcgggttaagttttccagatccgcagacgcacccgcttaccaacaagggcagaaccaactctacaatgaacttaatttggggcggagggaagagtacgacgttctggacaaaaggaggggacgagatcccgagatgggcggaaagcctcagcgaaggaagaatccgcaagaggggctttataacgaactccagaaagataaaatggcagaagcctatagtgagattgggatgaagggagaaaggaggaggggtaaaggtcacgatgggttgtaccaaggattgagcacagccactaaagatacctatgatgcgctccacatgcaggccctgccgccaaga

SEQ ID NO: 4688 - DNA, 3351 bp, Artificial Sequence
  Synthetic Polynucloetide
atggccttaccagtgaccgccttgctcctgccgctggccttgctgctccacgccgccaggccgcagctccagctgcaagagtctggacctggcctggtcaagcctagcgagacactgagcctgacctgtaccgtgtccggcgatagcatcagcagcggcgattactactggggctggatcagacagcctcctggcaaaggactggaatggatcggccacatctactacagcggcgtgacctactacaaccccagcctgaagtccagagtgaccatcagcgtggacaccagccggaaccagttctccctgaagctgtctagcgtgacagccgccgataccgccgtgtactactgcaccagagaggacagcagcaactggcggagtagaggccagggaacactggtcacagttagctctggtaccggcggaggcggatctggcggcggaggtagcggtggcggaggatctgaattcgacatccagatgacacagagccctagcagcctgtctgccagcgtgggagacagagtgaccatcacatgcaaggccagcgaccacatcaacaactggctggcctggtatcagcagaagcctggacaggcccctaagctgctgatctacggcgctaccacactggaaacaggcgtgcccagcagattttctggcagcggctctggcaccgactacaccctgacaatatccagcctccagcctgaggacttcgccacctactactgtcagcagagctggaacaccccttggacattcggccagggcaccaagctggaaatcaagagactcgaggggaaaccaattcccaaccctcttctgggactggattcaaccggcagcggcgaggacctgaagaacgtgttcccacctgaggtggccgtgttcgagcctagcgaggccgagatcagccacacccagaaagccaccctcgtgtgcctggctaccggcttctaccccgaccatgtggaactgtcttggtgggtcaacggcaaagaggtgcacagcggcgtgtctaccgacccccagccactgaaagaacagcccgccctgaacgacagccggtactgcctgagcagcagactgagagtgtccgccaccttctggcagaacccccggaaccacttcagatgccaggtgcagttctacggcctgagcgagaacgacgagtggacccaggacagagccaagcccgtgacccagatcgtgtctgccgaagcctggggcagagccgattgcggatcccagagcttcggcctgctggaccccaagctgtgctacctgctggatggcatcctgttcatctacggcgtgatcctgaccgccctgttcctgaaacggggcagaaagaaactcctgtatatattcaaacaaccatttatgagaccagtacaaactactcaagaggaagatggctgtagctgccgatttccagaagaagaagaaggaggatgtgaactgagagtgaagttcagcagaagcgccgacgcccctgcctaccagcagggacagaaccaactgtacaacgagctgaacctgggcagacgggaagagtacgacgtgctggacaagcggagaggcagggaccctgagatgggcggaaagccccagcggagaaagaacccccaggaaggactgtataacgaactccagaaagacaagatggccgaagcctacagcgagatcggcatgaagggcgagcggagaagaggcaagggccacgatggcctgtaccagggcctgagcaccgccaccaaggacacctatgacgccctgcacatgcaggccctgcctccaagaagggccaagcgatctggatctggagcaacaaacttctcactactcaaacaagcaggtgacgtggaggagaatcccgggcctactagtatggactggatttggcgcatccttttccttgtcggcgctgctaccggcgcccattccgggcccgaagttgctgccctcgagaaggaggtagcagctttggaaaaagaagtcgcagcccttgagaaagaagttgcggctctggagaagggatccggcggcggaggatctggcggaggcggatctgggggcggaggctctttcgaacaagttcagcttcaacagcctggcgctgagctggtcaaacctggcgcttctgtgaagatgagctgcaaagccagcggctacgccttcagcagctactggatcaactggatgaagcagaaacccggccagggactcgaatggatcggccaaatctatcccggcgacggcgacaccaactacaacggcaagttcaagggcagagccacactgaccgccgatacctctagcagcacagcctacatgcagctgagcagcctgaccagcgaagatagcgccgtgtacttctgtgcccggtccatcacaacagtcgtgggctgcgctatggactattggggccagggaacaagcgtgaccgtgtctagtacgcgtgagcagaaactgatctcggaagaggatctggggagcggcatccagaaccctgatcctgccgtgtaccagctgcgggatagcaagagcagcgacaagagcgtgtgtctgttcaccgacttcgacagccagaccaacgtgtcccagagcaaggactccgacgtgtacatcaccgataagaccgtgctggacatgcggagcatggacttcaagagcaactccgccgtggcctggtccaacaagtccgatttcgcctgcgccaacgccttcaacaacagcattatccccgaggacacattcttcccaagccccgagagcagctgcggtacccagagttttgggttgttggaccctaaattgtgctatctgttggacggaatcctgttcatttacggagtgatcctgaccgcattgttcctgaagagaggccggaagaagctgctgtacatcttcaagcagcctttcatgcggcccgtgcagaccacccaggaagaggacggctgctcctgccggttccccgaggaagaagaaggcggctgcgagctgcgggttaagttttccagatccgcagacgcacccgcttaccaacaagggcagaaccaactctacaatgaacttaatttggggcggagggaagagtacgacgttctggacaaaaggaggggacgagatcccgagatgggcggaaagcctcagcgaaggaagaatccgcaagaggggctttataacgaactccagaaagataaaatggcagaagcctatagtgagattgggatgaagggagaaaggaggaggggtaaaggtcacgatgggttgtaccaaggattgagcacagccactaaagatacctatgatgcgctccacatgcaggccctgccgccaaga

SEQ ID NO: 4689 - DNA, 3024 bp, Artificial Sequence
  Synthetic Polynucloetide
atggccttaccagtgaccgccttgctcctgccgctggccttgctgctccacgccgccaggccgcagctccagctgcaagagtctggacctggcctggtcaagcctagcgagacactgagcctgacctgtaccgtgtccggcgatagcatcagcagcggcgattactactggggctggatcagacagcctcctggcaaaggactggaatggatcggccacatctactacagcggcgtgacctactacaaccccagcctgaagtccagagtgaccatcagcgtggacaccagccggaaccagttctccctgaagctgtctagcgtgacagccgccgataccgccgtgtactactgcaccagagaggacagcagcaactggcggagtagaggccagggaacactggtcacagttagctctggtaccggcggaggcggatctggcggcggaggtagcggtggcggaggatctgaattcgacatccagatgacacagagccctagcagcctgtctgccagcgtgggagacagagtgaccatcacatgcaaggccagcgaccacatcaacaactggctggcctggtatcagcagaagcctggacaggcccctaagctgctgatctacggcgctaccacactggaaacaggcgtgcccagcagattttctggcagcggctctggcaccgactacaccctgacaatatccagcctccagcctgaggacttcgccacctactactgtcagcagagctggaacaccccttggacattcggccagggcaccaagctggaaatcaagagactcgagcagagcttcggcctgctggaccccaagctgtgctacctgctggatggcatcctgttcatctacggcgtgatcctgaccgccctgttcctgagagtgaagttcagcagaagcgccgacgcccctgcctaccagcagggacagaaccaactgtacaacgagctgaacctgggcagacgggaagagtacgacgtgctggacaagcggagaggcagggaccctgagatgggcggaaagccccagcggagaaagaacccccaggaaggactgtataacgaactccagaaagacaagatggccgaagcctacagcgagatcggcatgaagggcgagcggagaagaggcaagggccacgatggcctgtaccagggcctgagcaccgccaccaaggacacctatgacgccctgcacatgcaggccctgcctccaagaagggccaagcgatctggatctggagcaacaaacttctcactactcaaacaagcaggtgacgtggaggagaatcccgggcctactagtatggactggatttggcgcatccttttccttgtcggcgctgctaccggcgcccattccgggcccgaagttgctgccctcgagaaggaggtagcagctttggaaaaagaagtcgcagcccttgagaaagaagttgcggctctggagaagggatccggcggcggaggatctggcggaggcggatctgggggcggaggctctttcgaacaagttcagcttcaacagcctggcgctgagctggtcaaacctggcgcttctgtgaagatgagctgcaaagccagcggctacgccttcagcagctactggatcaactggatgaagcagaaacccggccagggactcgaatggatcggccaaatctatcccggcgacggcgacaccaactacaacggcaagttcaagggcagagccacactgaccgccgatacctctagcagcacagcctacatgcagctgagcagcctgaccagcgaagatagcgccgtgtacttctgtgcccggtccatcacaacagtcgtgggctgcgctatggactattggggccagggaacaagcgtgaccgtgtctagtacgcgtcagagttttgggttgttggaccctaaattgtgctatctgttggacggaatcctgttcatttacggagtgatcctgaccgcattgttcctgcgggttaagttttccagatccgcagacgcacccgcttaccaacaagggcagaaccaactctacaatgaacttaatttggggcggagggaagagtacgacgttctggacaaaaggaggggacgagatcccgagatgggcggaaagcctcagcgaaggaagaatccgcaagaggggctttataacgaactccagaaagataaaatggcagaagcctatagtgagattgggatgaagggagaaaggaggaggggtaaaggtcacgatgggttgtaccaaggattgagcacagccactaaagatacctatgatgcgctccacatgcaggccctgccgccaagacgcgccaagagaagcggatctggcgtgaagcagaccctgaatttcgacctgctgaagctggctggcgacgtggaatccaacccaggcccttctagaggccatatgaccgagtacaagcccacggtgcgcctcgccacccgcgacgacgtccccagggccgtacgcaccctcgccgccgcgttcgccgactaccccgccacgcgccacaccgtcgatccggaccgccacatcgagcgggtcaccgagctgcaagaactcttcctcacgcgcgtcgggctcgacatcggcaaggtgtgggtcgcggacgacggcgccgcggtggcggtctggaccacgccggagagcgtcgaagcgggggcggtgttcgccgagatcggcccgcgcatggccgagttgagcggttcccggctggccgcgcagcaacagatggaaggcctcctggcgccgcaccggcccaaggagcccgcgtggttcctggccaccgtcggcgtctcgcccgaccaccagggcaagggtctgggcagcgccgtcgtgctccccggagtggaggcggccgagcgcgccggggtgcccgccttcctggagacctccgcgccccgcaacctccccttctacgagcggctcggcttcaccgtcaccgccgacgtcgaggtgcccgaaggaccgcgcacctggtgcatgacccgcaagcccggtgcctga

SEQ ID NO: 4690 - DNA, 2496 bp, Artificial Sequence
  Synthetic Polynucloetide
atggccttaccagtgaccgccttgctcctgccgctggccttgctgctccacgccgccaggccgcagctccagctgcaagagtctggacctggcctggtcaagcctagcgagacactgagcctgacctgtaccgtgtccggcgatagcatcagcagcggcgattactactggggctggatcagacagcctcctggcaaaggactggaatggatcggccacatctactacagcggcgtgacctactacaaccccagcctgaagtccagagtgaccatcagcgtggacaccagccggaaccagttctccctgaagctgtctagcgtgacagccgccgataccgccgtgtactactgcaccagagaggacagcagcaactggcggagtagaggccagggaacactggtcacagttagctctggtaccggcggaggcggatctggcggcggaggtagcggtggcggaggatctgaattcgacatccagatgacacagagccctagcagcctgtctgccagcgtgggagacagagtgaccatcacatgcaaggccagcgaccacatcaacaactggctggcctggtatcagcagaagcctggacaggcccctaagctgctgatctacggcgctaccacactggaaacaggcgtgcccagcagattttctggcagcggctctggcaccgactacaccctgacaatatccagcctccagcctgaggacttcgccacctactactgtcagcagagctggaacaccccttggacattcggccagggcaccaagctggaaatcaagagactcgagggacagcctaaggccaatcctaccgtgacactgttccctccaagcagcgaagaactccaggccaacaaggccacacttgtgtgcctgatctccgacttctaccctggggctgtgacagtggcttggaaggccgatggatctcctgtgaaagccggcgtggaaaccaccaagccatccaagcagagcaacaacaaatacgccgccagctcctacctgagcctgacacctgagcagtggaagtcccacagatcctacagctgccaagtgacccacgaaggcagcaccgtggaaaagacagtggcccctacagagtgcagccccatcaagaccgatgtgattacaatggaccccaaggacaactgctccaaggacgccaacgataccctgctgctccagctgaccaacaccagcgcctactacatgtacttgttgctgctgctgaagtccgtggtgtacttcgccatcatcacatgctgcctgctgcggagaaccgccttctgctgcaacggcgagaagtctagggccaagcgatctggatctggagcaacaaacttctcactactcaaacaagcaggtgacgtggaggagaatcccgggcctactagtatggactggatttggcgcatccttttccttgtcggcgctgctaccggcgcccattccgggcccgaagttgctgccctcgagaaggaggtagcagctttggaaaaagaagtcgcagcccttgagaaagaagttgcggctctggagaagggatccggcggcggaggatctggcggaggcggatctgggggcggaggctctttcgaacaagttcagcttcaacagcctggcgctgagctggtcaaacctggcgcttctgtgaagatgagctgcaaagccagcggctacgccttcagcagctactggatcaactggatgaagcagaaacccggccagggactcgaatggatcggccaaatctatcccggcgacggcgacaccaactacaacggcaagttcaagggcagagccacactgaccgccgatacctctagcagcacagcctacatgcagctgagcagcctgaccagcgaagatagcgccgtgtacttctgtgcccggtccatcacaacagtcgtgggctgcgctatggactattggggccagggaacaagcgtgaccgtgtctagtacgcgtgcctctacaaagggaccctccgtgtttcctctggctcccagcagcaagtctacaagcggaggaacagccgctctgggctgcctggtcaaggattactttcccgagcctgtgaccgtgtcctggaatagcggagcactgacaagcggcgtgcacacctttccagccgtgctgcaaagcagcggcctgtactctctgagcagcgtggtcacagtgcctagctctagcctgggcacccagacctacatctgcaatgtgaaccacaagcctagcaacaccaaggtggacaagagagtggaacccaagagctgtgaagtgaaaaccgactccaccgaccacgtgaagcccaaagagacagagaacaccaagcagcccagcaagagctgccacaagcccaaggccatcgtgcacaccgagaaagtgaacatgatgagcctgaccgtgctgggcctgcggatgctgttcgccaaaaccgtggccgtgaacttcctgctgaccgccaagctgttcttcctc

SEQ ID NO: 4691 - DNA, 2430 bp, Artificial Sequence
  Synthetic Polynucloetide
atggccttaccagtgaccgccttgctcctgccgctggccttgctgctccacgccgccaggccgcagctccagctgcaagagtctggacctggcctggtcaagcctagcgagacactgagcctgacctgtaccgtgtccggcgatagcatcagcagcggcgattactactggggctggatcagacagcctcctggcaaaggactggaatggatcggccacatctactacagcggcgtgacctactacaaccccagcctgaagtccagagtgaccatcagcgtggacaccagccggaaccagttctccctgaagctgtctagcgtgacagccgccgataccgccgtgtactactgcaccagagaggacagcagcaactggcggagtagaggccagggaacactggtcacagttagctctggtaccggcggaggcggatctggcggcggaggtagcggtggcggaggatctgaattcgacatccagatgacacagagccctagcagcctgtctgccagcgtgggagacagagtgaccatcacatgcaaggccagcgaccacatcaacaactggctggcctggtatcagcagaagcctggacaggcccctaagctgctgatctacggcgctaccacactggaaacaggcgtgcccagcagattttctggcagcggctctggcaccgactacaccctgacaatatccagcctccagcctgaggacttcgccacctactactgtcagcagagctggaacaccccttggacattcggccagggcaccaagctggaaatcaagagactcgagggacagcctaaggccaatcctaccgtgacactgttccctccaagcagcgaagaactccaggccaacaaggccacacttgtgtgcctgatctccgacttctaccctggggctgtgacagtggcttggaaggccgatggatctcctgtgaaagccggcgtggaaaccaccaagccatccaagcagagcaacaacaaatacgccgccagctcctacctgagcctgacacctgagcagtggaagtcccacagatcctacagctgccaagtgacccacgaaggcagcaccgtggaaaagacagtggcccctacagagtgcagcggcagagccgattgcggcatcaccagcgccagctaccaccagggcgtgctgagcgccaccatcctgtacgagatcctgctgggcaaggccaccctgtacgccgtgctggtgtctgccctggtgctgatggctatggtcaagcggaaggacagccggggaagggccaagcgatctggatctggagcaacaaacttctcactactcaaacaagcaggtgacgtggaggagaatcccgggcctactagtatggactggatttggcgcatccttttccttgtcggcgctgctaccggcgcccattccgggcccgaagttgctgccctcgagaaggaggtagcagctttggaaaaagaagtcgcagcccttgagaaagaagttgcggctctggagaagggatccggcggcggaggatctggcggaggcggatctgggggcggaggctctttcgaacaagttcagcttcaacagcctggcgctgagctggtcaaacctggcgcttctgtgaagatgagctgcaaagccagcggctacgccttcagcagctactggatcaactggatgaagcagaaacccggccagggactcgaatggatcggccaaatctatcccggcgacggcgacaccaactacaacggcaagttcaagggcagagccacactgaccgccgatacctctagcagcacagcctacatgcagctgagcagcctgaccagcgaagatagcgccgtgtacttctgtgcccggtccatcacaacagtcgtgggctgcgctatggactattggggccagggaacaagcgtgaccgtgtctagtacgcgtgcctctacaaagggaccctccgtgtttcctctggctcccagcagcaagtctacaagcggaggaacagccgctctgggctgcctggtcaaggattactttcccgagcctgtgaccgtgtcctggaatagcggagcactgacaagcggcgtgcacacctttccagccgtgctgcaaagcagcggcctgtactctctgagcagcgtggtcacagtgcctagctctagcctgggcacccagacctacatctgcaatgtgaaccacaagcctagcaacaccaaggtggacaagagagtggaacccaagagctgtatccccgaggacacattcttcccaagcagcgacgtgccctgcgacgtgaagctggtggaaaagagcttcgagacagacaccaacctgaacttccagaacctgagcgtgatcggcttcagaatcctgctgctgaaagtggccggctttaacctgctgatgaccctgcggctgtggtccagc

SEQ ID NO: 4692 - DNA, 2430 bp, Artificial Sequence
  Synthetic Polynucloetide
atggccttaccagtgaccgccttgctcctgccgctggccttgctgctccacgccgccaggccgcagctccagctgcaagagtctggacctggcctggtcaagcctagcgagacactgagcctgacctgtaccgtgtccggcgatagcatcagcagcggcgattactactggggctggatcagacagcctcctggcaaaggactggaatggatcggccacatctactacagcggcgtgacctactacaaccccagcctgaagtccagagtgaccatcagcgtggacaccagccggaaccagttctccctgaagctgtctagcgtgacagccgccgataccgccgtgtactactgcaccagagaggacagcagcaactggcggagtagaggccagggaacactggtcacagttagctctggtaccggcggaggcggatctggcggcggaggtagcggtggcggaggatctgaattcgacatccagatgacacagagccctagcagcctgtctgccagcgtgggagacagagtgaccatcacatgcaaggccagcgaccacatcaacaactggctggcctggtatcagcagaagcctggacaggcccctaagctgctgatctacggcgctaccacactggaaacaggcgtgcccagcagattttctggcagcggctctggcaccgactacaccctgacaatatccagcctccagcctgaggacttcgccacctactactgtcagcagagctggaacaccccttggacattcggccagggcaccaagctggaaatcaagagactcgagggacagcctaaggccaatcctaccgtgacactgttccctccaagcagcgaagaactccaggccaacaaggccacacttgtgtgcctgatctccgacttctaccctggggctgtgacagtggcttggaaggccgatggatctcctgtgaaagccggcgtggaaaccaccaagccatccaagcagagcaacaacaaatacgccgccagctcctacctgagcctgacacctgagcagtggaagtcccacagatcctacagctgccaagtgacccacgaaggcagcaccgtggaaaagacagtggcccctacagagtgcagcggcagagccgattgcggctttaccagcgagagctaccagcagggcgtgctgagcgccaccatcctgtacgagatcctgctgggcaaggccaccctgtacgccgtgctggtgtctgccctggtgctgatggctatggtcaagcggaaggacagccggggaagggccaagcgatctggatctggagcaacaaacttctcactactcaaacaagcaggtgacgtggaggagaatcccgggcctactagtatggactggatttggcgcatccttttccttgtcggcgctgctaccggcgcccattccgggcccgaagttgctgccctcgagaaggaggtagcagctttggaaaaagaagtcgcagcccttgagaaagaagttgcggctctggagaagggatccggcggcggaggatctggcggaggcggatctgggggcggaggctctttcgaacaagttcagcttcaacagcctggcgctgagctggtcaaacctggcgcttctgtgaagatgagctgcaaagccagcggctacgccttcagcagctactggatcaactggatgaagcagaaacccggccagggactcgaatggatcggccaaatctatcccggcgacggcgacaccaactacaacggcaagttcaagggcagagccacactgaccgccgatacctctagcagcacagcctacatgcagctgagcagcctgaccagcgaagatagcgccgtgtacttctgtgcccggtccatcacaacagtcgtgggctgcgctatggactattggggccagggaacaagcgtgaccgtgtctagtacgcgtgcctctacaaagggaccctccgtgtttcctctggctcccagcagcaagtctacaagcggaggaacagccgctctgggctgcctggtcaaggattactttcccgagcctgtgaccgtgtcctggaatagcggagcactgacaagcggcgtgcacacctttccagccgtgctgcaaagcagcggcctgtactctctgagcagcgtggtcacagtgcctagctctagcctgggcacccagacctacatctgcaatgtgaaccacaagcctagcaacaccaaggtggacaagagagtggaacccaagagctgtatccccgaggacacattcttcccaagccccgagagcagctgcgacgtgaagctggtggaaaagagcttcgagacagacaccaacctgaacttccagaacctgagcgtgatcggcttcagaatcctgctgctgaaagtggccggctttaacctgctgatgaccctgcggctgtggtccagc

SEQ ID NO: 4693 - DNA, 2331 bp, Artificial Sequence
  Synthetic Polynucloetide
atggccttaccagtgaccgccttgctcctgccgctggccttgctgctccacgccgccaggccgcagctccagctgcaagagtctggacctggcctggtcaagcctagcgagacactgagcctgacctgtaccgtgtccggcgatagcatcagcagcggcgattactactggggctggatcagacagcctcctggcaaaggactggaatggatcggccacatctactacagcggcgtgacctactacaaccccagcctgaagtccagagtgaccatcagcgtggacaccagccggaaccagttctccctgaagctgtctagcgtgacagccgccgataccgccgtgtactactgcaccagagaggacagcagcaactggcggagtagaggccagggaacactggtcacagttagctctctcgagggacagcctaaggccaatcctaccgtgacactgttccctccaagcagcgaagaactccaggccaacaaggccacacttgtgtgcctgatctccgacttctaccctggggctgtgacagtggcttggaaggccgatggatctcctgtgaaagccggcgtggaaaccaccaagccatccaagcagagcaacaacaaatacgccgccagctcctacctgagcctgacacctgagcagtggaagtcccacagatcctacagctgccaagtgacccacgaaggcagcaccgtggaaaagacagtggcccctacagagtgcagcggcagagccgattgcggctttaccagcgagagctaccagcagggcgtgctgagcgccaccatcctgtacgagatcctgctgggcaaggccaccctgtacgccgtgctggtgtctgccctggtgctgatggctatggtcaagcggaaggacagccggggaagggccaagcgatctggatctggagcaacaaacttctcactactcaaacaagcaggtgacgtggaggagaatcccgggcctactagtatggactggatttggcgcatccttttccttgtcggcgctgctaccggcgcgcattccgggcccgaagttgctgccctcgagaaggaggtagcagctttggaaaaagaagtcgcagcccttgagaaagaagttgcggctctggagaagacgcgtgcctctacaaagggaccctccgtgtttcctctggctcccagcagcaagtctacaagcggaggaacagccgctctgggctgcctggtcaaggattactttcccgagcctgtgaccgtgtcctggaatagcggagcactgacaagcggcgtgcacacctttccagccgtgctgcaaagcagcggcctgtactctctgagcagcgtggtcacagtgcctagctctagcctgggcacccagacctacatctgcaatgtgaaccacaagcctagcaacaccaaggtggacaagagagtggaacccaagagctgtatccccgaggacacattcttcccaagccccgagagcagctgcgacgtgaagctggtggaaaagagcttcgagacagacaccaacctgaacttccagaacctgagcgtgatcggcttcagaatcctgctgctgaaagtggccggctttaacctgctgatgaccctgcggctgtggtccagccgcgccaagagaagcggatctggcgtgaagcagaccctgaatttcgacctgctgaagctggctggcgacgtggaatccaacccaggcccttctagaggccatatgaccgagtacaagcccacggtgcgcctcgccacccgcgacgacgtccccagggccgtacgcaccctcgccgccgcgttcgccgactaccccgccacgcgccacaccgtcgatccggaccgccacatcgagcgggtcaccgagctgcaagaactcttcctcacgcgcgtcgggctcgacatcggcaaggtgtgggtcgcggacgacggcgccgcggtggcggtctggaccacgccggagagcgtcgaagcgggggcggtgttcgccgagatcggcccgcgcatggccgagttgagcggttcccggctggccgcgcagcaacagatggaaggcctcctggcgccgcaccggcccaaggagcccgcgtggttcctggccaccgtcggcgtctcgcccgaccaccagggcaagggtctgggcagcgccgtcgtgctccccggagtggaggcggccgagcgcgccggggtgcccgccttcctggagacctccgcgccccgcaacctccccttctacgagcggctcggcttcaccgtcaccgccgacgtcgaggtgcccgaaggaccgcgcacctggtgcatgacccgcaagcccggtgcctga

SEQ ID NO: 4694 - DNA, 1629 bp, Artificial Sequence
  Synthetic Polynucloetide
atggccttaccagtgaccgccttgctcctgccgctggccttgctgctccacgccgccaggccgcagctccagctgcaagagtctggacctggcctggtcaagcctagcgagacactgagcctgacctgtaccgtgtccggcgatagcatcagcagcggcgattactactggggctggatcagacagcctcctggcaaaggactggaatggatcggccacatctactacagcggcgtgacctactacaaccccagcctgaagtccagagtgaccatcagcgtggacaccagccggaaccagttctccctgaagctgtctagcgtgacagccgccgataccgccgtgtactactgcaccagagaggacagcagcaactggcggagtagaggccagggaacactggtcacagttagctctctcgagggacagcctaaggccaatcctaccgtgacactgttccctccaagcagcgaagaactccaggccaacaaggccacacttgtgtgcctgatctccgacttctaccctggggctgtgacagtggcttggaaggccgatggatctcctgtgaaagccggcgtggaaaccaccaagccatccaagcagagcaacaacaaatacgccgccagctcctacctgagcctgacacctgagcagtggaagtcccacagatcctacagctgccaagtgacccacgaaggcagcaccgtggaaaagacagtggcccctacagagtgcagcggcagagccgattgcggctttaccagcgagagctaccagcagggcgtgctgagcgccaccatcctgtacgagatcctgctgggcaaggccaccctgtacgccgtgctggtgtctgccctggtgctgatggctatggtcaagcggaaggacagccggggaagggccaagcgatctggatctggagcaacaaacttctcactactcaaacaagcaggtgacgtggaggagaatcccgggcctactagtatggactggatttggcgcatccttttccttgtcggcgctgctaccggcgcgcattccgggcccgaagttgctgccctcgagaaggaggtagcagctttggaaaaagaagtcgcagcccttgagaaagaagttgcggctctggagaagacgcgtgcctctacaaagggaccctccgtgtttcctctggctcccagcagcaagtctacaagcggaggaacagccgctctgggctgcctggtcaaggattactttcccgagcctgtgaccgtgtcctggaatagcggagcactgacaagcggcgtgcacacctttccagccgtgctgcaaagcagcggcctgtactctctgagcagcgtggtcacagtgcctagctctagcctgggcacccagacctacatctgcaatgtgaaccacaagcctagcaacaccaaggtggacaagagagtggaacccaagagctgtatccccgaggacacattcttcccaagccccgagagcagctgcgacgtgaagctggtggaaaagagcttcgagacagacaccaacctgaacttccagaacctgagcgtgatcggcttcagaatcctgctgctgaaagtggccggctttaacctgctgatgaccctgcggctgtggtccagc

SEQ ID NO: 4695 - DNA, 1716 bp, Artificial Sequence
  Synthetic Polynucloetide
atggccttaccagtgaccgccttgctcctgccgctggccttgctgctccacgccgccaggccgcagctccagctgcaagagtctggacctggcctggtcaagcctagcgagacactgagcctgacctgtaccgtgtccggcgatagcatcagcagcggcgattactactggggctggatcagacagcctcctggcaaaggactggaatggatcggccacatctactacagcggcgtgacctactacaaccccagcctgaagtccagagtgaccatcagcgtggacaccagccggaaccagttctccctgaagctgtctagcgtgacagccgccgataccgccgtgtactactgcaccagagaggacagcagcaactggcggagtagaggccagggaacactggtcacagttagctctctcgagggatctggcagagccgattgcggctttaccagcgagagctaccagcagggcgtgctgagcgccaccatcctgtacgagatcctgctgggcaaggccaccctgtacgccgtgctggtgtctgccctggtgctgatggctatggtcaagcggaaggacagccggggaagggccaagcgatctggatctggagcaacaaacttctcactactcaaacaagcaggtgacgtggaggagaatcccgggcctactagtatggactggatttggcgcatccttttccttgtcggcgctgctaccggcgcgcattccgggcccgaagttgctgccctcgagaaggaggtagcagctttggaaaaagaagtcgcagcccttgagaaagaagttgcggctctggagaagacgcgtggcagcatccccgaggacacattcttcccaagccccgagagcagctgcgacgtgaagctggtggaaaagagcttcgagacagacaccaacctgaacttccagaacctgagcgtgatcggcttcagaatcctgctgctgaaagtggccggctttaacctgctgatgaccctgcggctgtggtccagccgcgccaagagaagcggatctggcgtgaagcagaccctgaatttcgacctgctgaagctggctggcgacgtggaatccaacccaggcccttctagaggccatatgaccgagtacaagcccacggtgcgcctcgccacccgcgacgacgtccccagggccgtacgcaccctcgccgccgcgttcgccgactaccccgccacgcgccacaccgtcgatccggaccgccacatcgagcgggtcaccgagctgcaagaactcttcctcacgcgcgtcgggctcgacatcggcaaggtgtgggtcgcggacgacggcgccgcggtggcggtctggaccacgccggagagcgtcgaagcgggggcggtgttcgccgagatcggcccgcgcatggccgagttgagcggttcccggctggccgcgcagcaacagatggaaggcctcctggcgccgcaccggcccaaggagcccgcgtggttcctggccaccgtcggcgtctcgcccgaccaccagggcaagggtctgggcagcgccgtcgtgctccccggagtggaggcggccgagcgcgccggggtgcccgccttcctggagacctccgcgccccgcaacctccccttctacgagcggctcggcttcaccgtcaccgccgacgtcgaggtgcccgaaggaccgcgcacctggtgcatgacccgcaagcccggtgcctga

SEQ ID NO: 4696 - DNA, 1014 bp, Artificial Sequence
  Synthetic Polynucloetide
atggccttaccagtgaccgccttgctcctgccgctggccttgctgctccacgccgccaggccgcagctccagctgcaagagtctggacctggcctggtcaagcctagcgagacactgagcctgacctgtaccgtgtccggcgatagcatcagcagcggcgattactactggggctggatcagacagcctcctggcaaaggactggaatggatcggccacatctactacagcggcgtgacctactacaaccccagcctgaagtccagagtgaccatcagcgtggacaccagccggaaccagttctccctgaagctgtctagcgtgacagccgccgataccgccgtgtactactgcaccagagaggacagcagcaactggcggagtagaggccagggaacactggtcacagttagctctctcgagggatctggcagagccgattgcggctttaccagcgagagctaccagcagggcgtgctgagcgccaccatcctgtacgagatcctgctgggcaaggccaccctgtacgccgtgctggtgtctgccctggtgctgatggctatggtcaagcggaaggacagccggggaagggccaagcgatctggatctggagcaacaaacttctcactactcaaacaagcaggtgacgtggaggagaatcccgggcctactagtatggactggatttggcgcatccttttccttgtcggcgctgctaccggcgcgcattccgggcccgaagttgctgccctcgagaaggaggtagcagctttggaaaaagaagtcgcagcccttgagaaagaagttgcggctctggagaagacgcgtggcagcatccccgaggacacattcttcccaagccccgagagcagctgcgacgtgaagctggtggaaaagagcttcgagacagacaccaacctgaacttccagaacctgagcgtgatcggcttcagaatcctgctgctgaaagtggccggctttaacctgctgatgaccctgcggctgtggtccagc

SEQ ID NO: 4697 - DNA, 1743 bp, Artificial Sequence
  Synthetic Polynucloetide
atggccttaccagtgaccgccttgctcctgccgctggccttgctgctccacgccgccaggccgcagctccagctgcaagagtctggacctggcctggtcaagcctagcgagacactgagcctgacctgtaccgtgtccggcgatagcatcagcagcggcgattactactggggctggatcagacagcctcctggcaaaggactggaatggatcggccacatctactacagcggcgtgacctactacaaccccagcctgaagtccagagtgaccatcagcgtggacaccagccggaaccagttctccctgaagctgtctagcgtgacagccgccgataccgccgtgtactactgcaccagagaggacagcagcaactggcggagtagaggccagggaacactggtcacagttagctctctcgaggacaaaactcacacatgcccaccgtgcccagcaggcagagccgattgcggctttaccagcgagagctaccagcagggcgtgctgagcgccaccatcctgtacgagatcctgctgggcaaggccaccctgtacgccgtgctggtgtctgccctggtgctgatggctatggtcaagcggaaggacagccggggaagggccaagcgatctggatctggagcaacaaacttctcactactcaaacaagcaggtgacgtggaggagaatcccgggcctactagtatggactggatttggcgcatccttttccttgtcggcgctgctaccggcgcgcattccgggcccgaagttgctgccctcgagaaggaggtagcagctttggaaaaagaagtcgcagcccttgagaaagaagttgcggctctggagaagacgcgtggcagcatccccgaggacacattcttcccaagccccgagagcagctgcgacgtgaagctggtggaaaagagcttcgagacagacaccaacctgaacttccagaacctgagcgtgatcggcttcagaatcctgctgctgaaagtggccggctttaacctgctgatgaccctgcggctgtggtccagccgcgccaagagaagcggatctggcgtgaagcagaccctgaatttcgacctgctgaagctggctggcgacgtggaatccaacccaggcccttctagaggccatatgaccgagtacaagcccacggtgcgcctcgccacccgcgacgacgtccccagggccgtacgcaccctcgccgccgcgttcgccgactaccccgccacgcgccacaccgtcgatccggaccgccacatcgagcgggtcaccgagctgcaagaactcttcctcacgcgcgtcgggctcgacatcggcaaggtgtgggtcgcggacgacggcgccgcggtggcggtctggaccacgccggagagcgtcgaagcgggggcggtgttcgccgagatcggcccgcgcatggccgagttgagcggttcccggctggccgcgcagcaacagatggaaggcctcctggcgccgcaccggcccaaggagcccgcgtggttcctggccaccgtcggcgtctcgcccgaccaccagggcaagggtctgggcagcgccgtcgtgctccccggagtggaggcggccgagcgcgccggggtgcccgccttcctggagacctccgcgccccgcaacctccccttctacgagcggctcggcttcaccgtcaccgccgacgtcgaggtgcccgaaggaccgcgcacctggtgcatgacccgcaagcccggtgcctga

SEQ ID NO: 4698 - DNA, 1743 bp, Artificial Sequence
  Synthetic Polynucloetide
atggccttaccagtgaccgccttgctcctgccgctggccttgctgctccacgccgccaggccgcagctccagctgcaagagtctggacctggcctggtcaagcctagcgagacactgagcctgacctgtaccgtgtccggcgatagcatcagcagcggcgattactactggggctggatcagacagcctcctggcaaaggactggaatggatcggccacatctactacagcggcgtgacctactacaaccccagcctgaagtccagagtgaccatcagcgtggacaccagccggaaccagttctccctgaagctgtctagcgtgacagccgccgataccgccgtgtactactgcaccagagaggacagcagcaactggcggagtagaggccagggaacactggtcacagttagctctctcgagggatctggcagagccgattgcggctttaccagcgagagctaccagcagggcgtgctgagcgccaccatcctgtacgagatcctgctgggcaaggccaccctgtacgccgtgctggtgtctgccctggtgctgatggctatggtcaagcggaaggacagccggggaagggccaagcgatctggatctggagcaacaaacttctcactactcaaacaagcaggtgacgtggaggagaatcccgggcctactagtatggactggatttggcgcatccttttccttgtcggcgctgctaccggcgcgcattccgggcccgaagttgctgccctcgagaaggaggtagcagctttggaaaaagaagtcgcagcccttgagaaagaagttgcggctctggagaagacgcgtgataaaactcatacctgtccgccatgcccggcaatccccgaggacacattcttcccaagccccgagagcagctgcgacgtgaagctggtggaaaagagcttcgagacagacaccaacctgaacttccagaacctgagcgtgatcggcttcagaatcctgctgctgaaagtggccggctttaacctgctgatgaccctgcggctgtggtccagccgcgccaagagaagcggatctggcgtgaagcagaccctgaatttcgacctgctgaagctggctggcgacgtggaatccaacccaggcccttctagaggccatatgaccgagtacaagcccacggtgcgcctcgccacccgcgacgacgtccccagggccgtacgcaccctcgccgccgcgttcgccgactaccccgccacgcgccacaccgtcgatccggaccgccacatcgagcgggtcaccgagctgcaagaactcttcctcacgcgcgtcgggctcgacatcggcaaggtgtgggtcgcggacgacggcgccgcggtggcggtctggaccacgccggagagcgtcgaagcgggggcggtgttcgccgagatcggcccgcgcatggccgagttgagcggttcccggctggccgcgcagcaacagatggaaggcctcctggcgccgcaccggcccaaggagcccgcgtggttcctggccaccgtcggcgtctcgcccgaccaccagggcaagggtctgggcagcgccgtcgtgctccccggagtggaggcggccgagcgcgccggggtgcccgccttcctggagacctccgcgccccgcaacctccccttctacgagcggctcggcttcaccgtcaccgccgacgtcgaggtgcccgaaggaccgcgcacctggtgcatgacccgcaagcccggtgcctga

SEQ ID NO: 4699 - DNA, 1770 bp, Artificial Sequence
  Synthetic Polynucloetide
atggccttaccagtgaccgccttgctcctgccgctggccttgctgctccacgccgccaggccgcagctccagctgcaagagtctggacctggcctggtcaagcctagcgagacactgagcctgacctgtaccgtgtccggcgatagcatcagcagcggcgattactactggggctggatcagacagcctcctggcaaaggactggaatggatcggccacatctactacagcggcgtgacctactacaaccccagcctgaagtccagagtgaccatcagcgtggacaccagccggaaccagttctccctgaagctgtctagcgtgacagccgccgataccgccgtgtactactgcaccagagaggacagcagcaactggcggagtagaggccagggaacactggtcacagttagctctctcgaggacaaaactcacacatgcccaccgtgcccagcaggcagagccgattgcggctttaccagcgagagctaccagcagggcgtgctgagcgccaccatcctgtacgagatcctgctgggcaaggccaccctgtacgccgtgctggtgtctgccctggtgctgatggctatggtcaagcggaaggacagccggggaagggccaagcgatctggatctggagcaacaaacttctcactactcaaacaagcaggtgacgtggaggagaatcccgggcctactagtatggactggatttggcgcatccttttccttgtcggcgctgctaccggcgcgcattccgggcccgaagttgctgccctcgagaaggaggtagcagctttggaaaaagaagtcgcagcccttgagaaagaagttgcggctctggagaagacgcgtgataaaactcatacctgtccgccatgcccggcaatccccgaggacacattcttcccaagccccgagagcagctgcgacgtgaagctggtggaaaagagcttcgagacagacaccaacctgaacttccagaacctgagcgtgatcggcttcagaatcctgctgctgaaagtggccggctttaacctgctgatgaccctgcggctgtggtccagccgcgccaagagaagcggatctggcgtgaagcagaccctgaatttcgacctgctgaagctggctggcgacgtggaatccaacccaggcccttctagaggccatatgaccgagtacaagcccacggtgcgcctcgccacccgcgacgacgtccccagggccgtacgcaccctcgccgccgcgttcgccgactaccccgccacgcgccacaccgtcgatccggaccgccacatcgagcgggtcaccgagctgcaagaactcttcctcacgcgcgtcgggctcgacatcggcaaggtgtgggtcgcggacgacggcgccgcggtggcggtctggaccacgccggagagcgtcgaagcgggggcggtgttcgccgagatcggcccgcgcatggccgagttgagcggttcccggctggccgcgcagcaacagatggaaggcctcctggcgccgcaccggcccaaggagcccgcgtggttcctggccaccgtcggcgtctcgcccgaccaccagggcaagggtctgggcagcgccgtcgtgctccccggagtggaggcggccgagcgcgccggggtgcccgccttcctggagacctccgcgccccgcaacctccccttctacgagcggctcggcttcaccgtcaccgccgacgtcgaggtgcccgaaggaccgcgcacctggtgcatgacccgcaagcccggtgcctga

SEQ ID NO: 4700 - DNA, 1068 bp, Artificial Sequence
  Synthetic Polynucloetide
atggccttaccagtgaccgccttgctcctgccgctggccttgctgctccacgccgccaggccgcagctccagctgcaagagtctggacctggcctggtcaagcctagcgagacactgagcctgacctgtaccgtgtccggcgatagcatcagcagcggcgattactactggggctggatcagacagcctcctggcaaaggactggaatggatcggccacatctactacagcggcgtgacctactacaaccccagcctgaagtccagagtgaccatcagcgtggacaccagccggaaccagttctccctgaagctgtctagcgtgacagccgccgataccgccgtgtactactgcaccagagaggacagcagcaactggcggagtagaggccagggaacactggtcacagttagctctctcgaggacaaaactcacacatgcccaccgtgcccagcaggcagagccgattgcggctttaccagcgagagctaccagcagggcgtgctgagcgccaccatcctgtacgagatcctgctgggcaaggccaccctgtacgccgtgctggtgtctgccctggtgctgatggctatggtcaagcggaaggacagccggggaagggccaagcgatctggatctggagcaacaaacttctcactactcaaacaagcaggtgacgtggaggagaatcccgggcctactagtatggactggatttggcgcatccttttccttgtcggcgctgctaccggcgcgcattccgggcccgaagttgctgccctcgagaaggaggtagcagctttggaaaaagaagtcgcagcccttgagaaagaagttgcggctctggagaagacgcgtgataaaactcatacctgtccgccatgcccggcaatccccgaggacacattcttcccaagccccgagagcagctgcgacgtgaagctggtggaaaagagcttcgagacagacaccaacctgaacttccagaacctgagcgtgatcggcttcagaatcctgctgctgaaagtggccggctttaacctgctgatgaccctgcggctgtggtccagc

SEQ ID NO: 4701 - DNA, 1041 bp, Artificial Sequence
  Synthetic Polynucloetide
atggccttaccagtgaccgccttgctcctgccgctggccttgctgctccacgccgccaggccgcagctccagctgcaagagtctggacctggcctggtcaagcctagcgagacactgagcctgacctgtaccgtgtccggcgatagcatcagcagcggcgattactactggggctggatcagacagcctcctggcaaaggactggaatggatcggccacatctactacagcggcgtgacctactacaaccccagcctgaagtccagagtgaccatcagcgtggacaccagccggaaccagttctccctgaagctgtctagcgtgacagccgccgataccgccgtgtactactgcaccagagaggacagcagcaactggcggagtagaggccagggaacactggtcacagttagctctctcgagggatctggcagagccgattgcggctttaccagcgagagctaccagcagggcgtgctgagcgccaccatcctgtacgagatcctgctgggcaaggccaccctgtacgccgtgctggtgtctgccctggtgctgatggctatggtcaagcggaaggacagccggggaagggccaagcgatctggatctggagcaacaaacttctcactactcaaacaagcaggtgacgtggaggagaatcccgggcctactagtatggactggatttggcgcatccttttccttgtcggcgctgctaccggcgcgcattccgggcccgaagttgctgccctcgagaaggaggtagcagctttggaaaaagaagtcgcagcccttgagaaagaagttgcggctctggagaagacgcgtgataaaactcatacctgtccgccatgcccggcaatccccgaggacacattcttcccaagccccgagagcagctgcgacgtgaagctggtggaaaagagcttcgagacagacaccaacctgaacttccagaacctgagcgtgatcggcttcagaatcctgctgctgaaagtggccggctttaacctgctgatgaccctgcggctgtggtccagc

SEQ ID NO: 4702 - DNA, 2397 bp, Artificial Sequence
  Synthetic Polynucloetide
atggccttaccagtgaccgccttgctcctgccgctggccttgctgctccacgccgccaggccgcagctccagctgcaagagtctggacctggcctggtcaagcctagcgagacactgagcctgacctgtaccgtgtccggcgatagcatcagcagcggcgattactactggggctggatcagacagcctcctggcaaaggactggaatggatcggccacatctactacagcggcgtgacctactacaaccccagcctgaagtccagagtgaccatcagcgtggacaccagccggaaccagttctccctgaagctgtctagcgtgacagccgccgataccgccgtgtactactgcaccagagaggacagcagcaactggcggagtagaggccagggaacactggtcacagttagctctctcgagggacagcctaaggccaatcctaccgtgacactgttccctccaagcagcgaagaactccaggccaacaaggccacacttgtgtgcctgatctccgacttctaccctggggctgtgacagtggcttggaaggccgatggatctcctgtgaaagccggcgtggaaaccaccaagccatccaagcagagcaacaacaaatacgccgccagctcctacctgagcctgacacctgagcagtggaagtcccacagatcctacagctgccaagtgacccacgaaggcagcaccgtggaaaagacagtggcccctacagagtgcagccccatcaagaccgatgtgattacaatggaccccaaggacaactgctccaaggacgccaacgataccctgctgctccagctgaccaacaccagcgcctactacatgtacttgttgctgctgctgaagtccgtggtgtacttcgccatcatcacatgctgcctgctgcggagaaccgccttctgctgcaacggcgagaagtctagggccaagcgatctggatctggagcaacaaacttctcactactcaaacaagcaggtgacgtggaggagaatcccgggcctactagtatggactggatttggcgcatccttttccttgtcggcgctgctaccggcgcgcattccgggcccgaagttgctgccctcgagaaggaggtagcagctttggaaaaagaagtcgcagcccttgagaaagaagttgcggctctggagaagacgcgtgcctctacaaagggaccctccgtgtttcctctggctcccagcagcaagtctacaagcggaggaacagccgctctgggctgcctggtcaaggattactttcccgagcctgtgaccgtgtcctggaatagcggagcactgacaagcggcgtgcacacctttccagccgtgctgcaaagcagcggcctgtactctctgagcagcgtggtcacagtgcctagctctagcctgggcacccagacctacatctgcaatgtgaaccacaagcctagcaacaccaaggtggacaagagagtggaacccaagagctgtgaagtgaaaaccgactccaccgaccacgtgaagcccaaagagacagagaacaccaagcagcccagcaagagctgccacaagcccaaggccatcgtgcacaccgagaaagtgaacatgatgagcctgaccgtgctgggcctgcggatgctgttcgccaaaaccgtggccgtgaacttcctgctgaccgccaagctgttcttcctccgcgccaagagaagcggatctggcgtgaagcagaccctgaatttcgacctgctgaagctggctggcgacgtggaatccaacccaggcccttctagaggccatatgaccgagtacaagcccacggtgcgcctcgccacccgcgacgacgtccccagggccgtacgcaccctcgccgccgcgttcgccgactaccccgccacgcgccacaccgtcgatccggaccgccacatcgagcgggtcaccgagctgcaagaactcttcctcacgcgcgtcgggctcgacatcggcaaggtgtgggtcgcggacgacggcgccgcggtggcggtctggaccacgccggagagcgtcgaagcgggggcggtgttcgccgagatcggcccgcgcatggccgagttgagcggttcccggctggccgcgcagcaacagatggaaggcctcctggcgccgcaccggcccaaggagcccgcgtggttcctggccaccgtcggcgtctcgcccgaccaccagggcaagggtctgggcagcgccgtcgtgctccccggagtggaggcggccgagcgcgccggggtgcccgccttcctggagacctccgcgccccgcaacctccccttctacgagcggctcggcttcaccgtcaccgccgacgtcgaggtgcccgaaggaccgcgcacctggtgcatgacccgcaagcccggtgcctga

SEQ ID NO: 4703 - DNA, 1695 bp, Artificial Sequence
  Synthetic Polynucloetide
atggccttaccagtgaccgccttgctcctgccgctggccttgctgctccacgccgccaggccgcagctccagctgcaagagtctggacctggcctggtcaagcctagcgagacactgagcctgacctgtaccgtgtccggcgatagcatcagcagcggcgattactactggggctggatcagacagcctcctggcaaaggactggaatggatcggccacatctactacagcggcgtgacctactacaaccccagcctgaagtccagagtgaccatcagcgtggacaccagccggaaccagttctccctgaagctgtctagcgtgacagccgccgataccgccgtgtactactgcaccagagaggacagcagcaactggcggagtagaggccagggaacactggtcacagttagctctctcgagggacagcctaaggccaatcctaccgtgacactgttccctccaagcagcgaagaactccaggccaacaaggccacacttgtgtgcctgatctccgacttctaccctggggctgtgacagtggcttggaaggccgatggatctcctgtgaaagccggcgtggaaaccaccaagccatccaagcagagcaacaacaaatacgccgccagctcctacctgagcctgacacctgagcagtggaagtcccacagatcctacagctgccaagtgacccacgaaggcagcaccgtggaaaagacagtggcccctacagagtgcagccccatcaagaccgatgtgattacaatggaccccaaggacaactgctccaaggacgccaacgataccctgctgctccagctgaccaacaccagcgcctactacatgtacttgttgctgctgctgaagtccgtggtgtacttcgccatcatcacatgctgcctgctgcggagaaccgccttctgctgcaacggcgagaagtctagggccaagcgatctggatctggagcaacaaacttctcactactcaaacaagcaggtgacgtggaggagaatcccgggcctactagtatggactggatttggcgcatccttttccttgtcggcgctgctaccggcgcgcattccgggcccgaagttgctgccctcgagaaggaggtagcagctttggaaaaagaagtcgcagcccttgagaaagaagttgcggctctggagaagacgcgtgcctctacaaagggaccctccgtgtttcctctggctcccagcagcaagtctacaagcggaggaacagccgctctgggctgcctggtcaaggattactttcccgagcctgtgaccgtgtcctggaatagcggagcactgacaagcggcgtgcacacctttccagccgtgctgcaaagcagcggcctgtactctctgagcagcgtggtcacagtgcctagctctagcctgggcacccagacctacatctgcaatgtgaaccacaagcctagcaacaccaaggtggacaagagagtggaacccaagagctgtgaagtgaaaaccgactccaccgaccacgtgaagcccaaagagacagagaacaccaagcagcccagcaagagctgccacaagcccaaggccatcgtgcacaccgagaaagtgaacatgatgagcctgaccgtgctgggcctgcggatgctgttcgccaaaaccgtggccgtgaacttcctgctgaccgccaagctgttcttcctc

SEQ ID NO: 4704 - DNA, 1782 bp, Artificial Sequence
  Synthetic Polynucloetide
atggccttaccagtgaccgccttgctcctgccgctggccttgctgctccacgccgccaggccgcagctccagctgcaagagtctggacctggcctggtcaagcctagcgagacactgagcctgacctgtaccgtgtccggcgatagcatcagcagcggcgattactactggggctggatcagacagcctcctggcaaaggactggaatggatcggccacatctactacagcggcgtgacctactacaaccccagcctgaagtccagagtgaccatcagcgtggacaccagccggaaccagttctccctgaagctgtctagcgtgacagccgccgataccgccgtgtactactgcaccagagaggacagcagcaactggcggagtagaggccagggaacactggtcacagttagctctctcgagggatctcccatcaagaccgatgtgattacaatggaccccaaggacaactgctccaaggacgccaacgataccctgctgctccagctgaccaacaccagcgcctactacatgtacttgttgctgctgctgaagtccgtggtgtacttcgccatcatcacatgctgcctgctgcggagaaccgccttctgctgcaacggcgagaagtctagggccaagcgatctggatctggagcaacaaacttctcactactcaaacaagcaggtgacgtggaggagaatcccgggcctactagtatggactggatttggcgcatccttttccttgtcggcgctgctaccggcgcgcattccgggcccgaagttgctgccctcgagaaggaggtagcagctttggaaaaagaagtcgcagcccttgagaaagaagttgcggctctggagaagacgcgtggcagcgaagtgaaaaccgactccaccgaccacgtgaagcccaaagagacagagaacaccaagcagcccagcaagagctgccacaagcccaaggccatcgtgcacaccgagaaagtgaacatgatgagcctgaccgtgctgggcctgcggatgctgttcgccaaaaccgtggccgtgaacttcctgctgaccgccaagctgttcttcctccgcgccaagagaagcggatctggcgtgaagcagaccctgaatttcgacctgctgaagctggctggcgacgtggaatccaacccaggcccttctagaggccatatgaccgagtacaagcccacggtgcgcctcgccacccgcgacgacgtccccagggccgtacgcaccctcgccgccgcgttcgccgactaccccgccacgcgccacaccgtcgatccggaccgccacatcgagcgggtcaccgagctgcaagaactcttcctcacgcgcgtcgggctcgacatcggcaaggtgtgggtcgcggacgacggcgccgcggtggcggtctggaccacgccggagagcgtcgaagcgggggcggtgttcgccgagatcggcccgcgcatggccgagttgagcggttcccggctggccgcgcagcaacagatggaaggcctcctggcgccgcaccggcccaaggagcccgcgtggttcctggccaccgtcggcgtctcgcccgaccaccagggcaagggtctgggcagcgccgtcgtgctccccggagtggaggcggccgagcgcgccggggtgcccgccttcctggagacctccgcgccccgcaacctccccttctacgagcggctcggcttcaccgtcaccgccgacgtcgaggtgcccgaaggaccgcgcacctggtgcatgacccgcaagcccggtgcctga

SEQ ID NO: 4705 - DNA, 1080 bp, Artificial Sequence
  Synthetic Polynucloetide
atggccttaccagtgaccgccttgctcctgccgctggccttgctgctccacgccgccaggccgcagctccagctgcaagagtctggacctggcctggtcaagcctagcgagacactgagcctgacctgtaccgtgtccggcgatagcatcagcagcggcgattactactggggctggatcagacagcctcctggcaaaggactggaatggatcggccacatctactacagcggcgtgacctactacaaccccagcctgaagtccagagtgaccatcagcgtggacaccagccggaaccagttctccctgaagctgtctagcgtgacagccgccgataccgccgtgtactactgcaccagagaggacagcagcaactggcggagtagaggccagggaacactggtcacagttagctctctcgagggatctcccatcaagaccgatgtgattacaatggaccccaaggacaactgctccaaggacgccaacgataccctgctgctccagctgaccaacaccagcgcctactacatgtacttgttgctgctgctgaagtccgtggtgtacttcgccatcatcacatgctgcctgctgcggagaaccgccttctgctgcaacggcgagaagtctagggccaagcgatctggatctggagcaacaaacttctcactactcaaacaagcaggtgacgtggaggagaatcccgggcctactagtatggactggatttggcgcatccttttccttgtcggcgctgctaccggcgcgcattccgggcccgaagttgctgccctcgagaaggaggtagcagctttggaaaaagaagtcgcagcccttgagaaagaagttgcggctctggagaagacgcgtggcagcgaagtgaaaaccgactccaccgaccacgtgaagcccaaagagacagagaacaccaagcagcccagcaagagctgccacaagcccaaggccatcgtgcacaccgagaaagtgaacatgatgagcctgaccgtgctgggcctgcggatgctgttcgccaaaaccgtggccgtgaacttcctgctgaccgccaagctgttcttcctc

SEQ ID NO: 4706 - DNA, 1809 bp, Artificial Sequence
  Synthetic Polynucloetide
atggccttaccagtgaccgccttgctcctgccgctggccttgctgctccacgccgccaggccgcagctccagctgcaagagtctggacctggcctggtcaagcctagcgagacactgagcctgacctgtaccgtgtccggcgatagcatcagcagcggcgattactactggggctggatcagacagcctcctggcaaaggactggaatggatcggccacatctactacagcggcgtgacctactacaaccccagcctgaagtccagagtgaccatcagcgtggacaccagccggaaccagttctccctgaagctgtctagcgtgacagccgccgataccgccgtgtactactgcaccagagaggacagcagcaactggcggagtagaggccagggaacactggtcacagttagctctctcgaggacaaaactcacacatgcccaccgtgcccagcacccatcaagaccgatgtgattacaatggaccccaaggacaactgctccaaggacgccaacgataccctgctgctccagctgaccaacaccagcgcctactacatgtacttgttgctgctgctgaagtccgtggtgtacttcgccatcatcacatgctgcctgctgcggagaaccgccttctgctgcaacggcgagaagtctagggccaagcgatctggatctggagcaacaaacttctcactactcaaacaagcaggtgacgtggaggagaatcccgggcctactagtatggactggatttggcgcatccttttccttgtcggcgctgctaccggcgcgcattccgggcccgaagttgctgccctcgagaaggaggtagcagctttggaaaaagaagtcgcagcccttgagaaagaagttgcggctctggagaagacgcgtggcagcgaagtgaaaaccgactccaccgaccacgtgaagcccaaagagacagagaacaccaagcagcccagcaagagctgccacaagcccaaggccatcgtgcacaccgagaaagtgaacatgatgagcctgaccgtgctgggcctgcggatgctgttcgccaaaaccgtggccgtgaacttcctgctgaccgccaagctgttcttcctccgcgccaagagaagcggatctggcgtgaagcagaccctgaatttcgacctgctgaagctggctggcgacgtggaatccaacccaggcccttctagaggccatatgaccgagtacaagcccacggtgcgcctcgccacccgcgacgacgtccccagggccgtacgcaccctcgccgccgcgttcgccgactaccccgccacgcgccacaccgtcgatccggaccgccacatcgagcgggtcaccgagctgcaagaactcttcctcacgcgcgtcgggctcgacatcggcaaggtgtgggtcgcggacgacggcgccgcggtggcggtctggaccacgccggagagcgtcgaagcgggggcggtgttcgccgagatcggcccgcgcatggccgagttgagcggttcccggctggccgcgcagcaacagatggaaggcctcctggcgccgcaccggcccaaggagcccgcgtggttcctggccaccgtcggcgtctcgcccgaccaccagggcaagggtctgggcagcgccgtcgtgctccccggagtggaggcggccgagcgcgccggggtgcccgccttcctggagacctccgcgccccgcaacctccccttctacgagcggctcggcttcaccgtcaccgccgacgtcgaggtgcccgaaggaccgcgcacctggtgcatgacccgcaagcccggtgcctga

SEQ ID NO: 4707 - DNA, 1809 bp, Artificial Sequence
  Synthetic Polynucloetide
atggccttaccagtgaccgccttgctcctgccgctggccttgctgctccacgccgccaggccgcagctccagctgcaagagtctggacctggcctggtcaagcctagcgagacactgagcctgacctgtaccgtgtccggcgatagcatcagcagcggcgattactactggggctggatcagacagcctcctggcaaaggactggaatggatcggccacatctactacagcggcgtgacctactacaaccccagcctgaagtccagagtgaccatcagcgtggacaccagccggaaccagttctccctgaagctgtctagcgtgacagccgccgataccgccgtgtactactgcaccagagaggacagcagcaactggcggagtagaggccagggaacactggtcacagttagctctctcgagggatctcccatcaagaccgatgtgattacaatggaccccaaggacaactgctccaaggacgccaacgataccctgctgctccagctgaccaacaccagcgcctactacatgtacttgttgctgctgctgaagtccgtggtgtacttcgccatcatcacatgctgcctgctgcggagaaccgccttctgctgcaacggcgagaagtctagggccaagcgatctggatctggagcaacaaacttctcactactcaaacaagcaggtgacgtggaggagaatcccgggcctactagtatggactggatttggcgcatccttttccttgtcggcgctgctaccggcgcgcattccgggcccgaagttgctgccctcgagaaggaggtagcagctttggaaaaagaagtcgcagcccttgagaaagaagttgcggctctggagaagacgcgtgataaaactcatacctgtccgccatgcccggcagaagtgaaaaccgactccaccgaccacgtgaagcccaaagagacagagaacaccaagcagcccagcaagagctgccacaagcccaaggccatcgtgcacaccgagaaagtgaacatgatgagcctgaccgtgctgggcctgcggatgctgttcgccaaaaccgtggccgtgaacttcctgctgaccgccaagctgttcttcctccgcgccaagagaagcggatctggcgtgaagcagaccctgaatttcgacctgctgaagctggctggcgacgtggaatccaacccaggcccttctagaggccatatgaccgagtacaagcccacggtgcgcctcgccacccgcgacgacgtccccagggccgtacgcaccctcgccgccgcgttcgccgactaccccgccacgcgccacaccgtcgatccggaccgccacatcgagcgggtcaccgagctgcaagaactcttcctcacgcgcgtcgggctcgacatcggcaaggtgtgggtcgcggacgacggcgccgcggtggcggtctggaccacgccggagagcgtcgaagcgggggcggtgttcgccgagatcggcccgcgcatggccgagttgagcggttcccggctggccgcgcagcaacagatggaaggcctcctggcgccgcaccggcccaaggagcccgcgtggttcctggccaccgtcggcgtctcgcccgaccaccagggcaagggtctgggcagcgccgtcgtgctccccggagtggaggcggccgagcgcgccggggtgcccgccttcctggagacctccgcgccccgcaacctccccttctacgagcggctcggcttcaccgtcaccgccgacgtcgaggtgcccgaaggaccgcgcacctggtgcatgacccgcaagcccggtgcctga

SEQ ID NO: 4708 - DNA, 1836 bp, Artificial Sequence
  Synthetic Polynucloetide
atggccttaccagtgaccgccttgctcctgccgctggccttgctgctccacgccgccaggccgcagctccagctgcaagagtctggacctggcctggtcaagcctagcgagacactgagcctgacctgtaccgtgtccggcgatagcatcagcagcggcgattactactggggctggatcagacagcctcctggcaaaggactggaatggatcggccacatctactacagcggcgtgacctactacaaccccagcctgaagtccagagtgaccatcagcgtggacaccagccggaaccagttctccctgaagctgtctagcgtgacagccgccgataccgccgtgtactactgcaccagagaggacagcagcaactggcggagtagaggccagggaacactggtcacagttagctctctcgaggacaaaactcacacatgcccaccgtgcccagcacccatcaagaccgatgtgattacaatggaccccaaggacaactgctccaaggacgccaacgataccctgctgctccagctgaccaacaccagcgcctactacatgtacttgttgctgctgctgaagtccgtggtgtacttcgccatcatcacatgctgcctgctgcggagaaccgccttctgctgcaacggcgagaagtctagggccaagcgatctggatctggagcaacaaacttctcactactcaaacaagcaggtgacgtggaggagaatcccgggcctactagtatggactggatttggcgcatccttttccttgtcggcgctgctaccggcgcgcattccgggcccgaagttgctgccctcgagaaggaggtagcagctttggaaaaagaagtcgcagcccttgagaaagaagttgcggctctggagaagacgcgtgataaaactcatacctgtccgccatgcccggcagaagtgaaaaccgactccaccgaccacgtgaagcccaaagagacagagaacaccaagcagcccagcaagagctgccacaagcccaaggccatcgtgcacaccgagaaagtgaacatgatgagcctgaccgtgctgggcctgcggatgctgttcgccaaaaccgtggccgtgaacttcctgctgaccgccaagctgttcttcctccgcgccaagagaagcggatctggcgtgaagcagaccctgaatttcgacctgctgaagctggctggcgacgtggaatccaacccaggcccttctagaggccatatgaccgagtacaagcccacggtgcgcctcgccacccgcgacgacgtccccagggccgtacgcaccctcgccgccgcgttcgccgactaccccgccacgcgccacaccgtcgatccggaccgccacatcgagcgggtcaccgagctgcaagaactcttcctcacgcgcgtcgggctcgacatcggcaaggtgtgggtcgcggacgacggcgccgcggtggcggtctggaccacgccggagagcgtcgaagcgggggcggtgttcgccgagatcggcccgcgcatggccgagttgagcggttcccggctggccgcgcagcaacagatggaaggcctcctggcgccgcaccggcccaaggagcccgcgtggttcctggccaccgtcggcgtctcgcccgaccaccagggcaagggtctgggcagcgccgtcgtgctccccggagtggaggcggccgagcgcgccggggtgcccgccttcctggagacctccgcgccccgcaacctccccttctacgagcggctcggcttcaccgtcaccgccgacgtcgaggtgcccgaaggaccgcgcacctggtgcatgacccgcaagcccggtgcctga

SEQ ID NO: 4709 - DNA, 1134 bp, Artificial Sequence
  Synthetic Polynucloetide
atggccttaccagtgaccgccttgctcctgccgctggccttgctgctccacgccgccaggccgcagctccagctgcaagagtctggacctggcctggtcaagcctagcgagacactgagcctgacctgtaccgtgtccggcgatagcatcagcagcggcgattactactggggctggatcagacagcctcctggcaaaggactggaatggatcggccacatctactacagcggcgtgacctactacaaccccagcctgaagtccagagtgaccatcagcgtggacaccagccggaaccagttctccctgaagctgtctagcgtgacagccgccgataccgccgtgtactactgcaccagagaggacagcagcaactggcggagtagaggccagggaacactggtcacagttagctctctcgaggacaaaactcacacatgcccaccgtgcccagcacccatcaagaccgatgtgattacaatggaccccaaggacaactgctccaaggacgccaacgataccctgctgctccagctgaccaacaccagcgcctactacatgtacttgttgctgctgctgaagtccgtggtgtacttcgccatcatcacatgctgcctgctgcggagaaccgccttctgctgcaacggcgagaagtctagggccaagcgatctggatctggagcaacaaacttctcactactcaaacaagcaggtgacgtggaggagaatcccgggcctactagtatggactggatttggcgcatccttttccttgtcggcgctgctaccggcgcgcattccgggcccgaagttgctgccctcgagaaggaggtagcagctttggaaaaagaagtcgcagcccttgagaaagaagttgcggctctggagaagacgcgtgataaaactcatacctgtccgccatgcccggcagaagtgaaaaccgactccaccgaccacgtgaagcccaaagagacagagaacaccaagcagcccagcaagagctgccacaagcccaaggccatcgtgcacaccgagaaagtgaacatgatgagcctgaccgtgctgggcctgcggatgctgttcgccaaaaccgtggccgtgaacttcctgctgaccgccaagctgttcttcctc

SEQ ID NO: 4710 - DNA, 1107 bp, Artificial Sequence
  Synthetic Polynucloetide
atggccttaccagtgaccgccttgctcctgccgctggccttgctgctccacgccgccaggccgcagctccagctgcaagagtctggacctggcctggtcaagcctagcgagacactgagcctgacctgtaccgtgtccggcgatagcatcagcagcggcgattactactggggctggatcagacagcctcctggcaaaggactggaatggatcggccacatctactacagcggcgtgacctactacaaccccagcctgaagtccagagtgaccatcagcgtggacaccagccggaaccagttctccctgaagctgtctagcgtgacagccgccgataccgccgtgtactactgcaccagagaggacagcagcaactggcggagtagaggccagggaacactggtcacagttagctctctcgagggatctcccatcaagaccgatgtgattacaatggaccccaaggacaactgctccaaggacgccaacgataccctgctgctccagctgaccaacaccagcgcctactacatgtacttgttgctgctgctgaagtccgtggtgtacttcgccatcatcacatgctgcctgctgcggagaaccgccttctgctgcaacggcgagaagtctagggccaagcgatctggatctggagcaacaaacttctcactactcaaacaagcaggtgacgtggaggagaatcccgggcctactagtatggactggatttggcgcatccttttccttgtcggcgctgctaccggcgcgcattccgggcccgaagttgctgccctcgagaaggaggtagcagctttggaaaaagaagtcgcagcccttgagaaagaagttgcggctctggagaagacgcgtgataaaactcatacctgtccgccatgcccggcagaagtgaaaaccgactccaccgaccacgtgaagcccaaagagacagagaacaccaagcagcccagcaagagctgccacaagcccaaggccatcgtgcacaccgagaaagtgaacatgatgagcctgaccgtgctgggcctgcggatgctgttcgccaaaaccgtggccgtgaacttcctgctgaccgccaagctgttcttcctc

SEQ ID NO: 4711 - DNA, 1758 bp, Artificial Sequence
  Synthetic Polynucloetide
atggccttaccagtgaccgccttgctcctgccgctggccttgctgctccacgccgccaggccgcagctccagctgcaagagtctggacctggcctggtcaagcctagcgagacactgagcctgacctgtaccgtgtccggcgatagcatcagcagcggcgattactactggggctggatcagacagcctcctggcaaaggactggaatggatcggccacatctactacagcggcgtgacctactacaaccccagcctgaagtccagagtgaccatcagcgtggacaccagccggaaccagttctccctgaagctgtctagcgtgacagccgccgataccgccgtgtactactgcaccagagaggacagcagcaactggcggagtagaggccagggaacactggtcacagttagctctctcgagggatctatggaccccaaggacaactgctccaaggacgccaacgataccctgctgctccagctgaccaacaccagcgcctactacatgtacttgttgctgctgctgaagtccgtggtgtacttcgccatcatcacatgctgcctgctgcggagaaccgccttctgctgcaacggcgagaagtctagggccaagcgatctggatctggagcaacaaacttctcactactcaaacaagcaggtgacgtggaggagaatcccgggcctactagtatggactggatttggcgcatccttttccttgtcggcgctgctaccggcgcgcattccgggcccgaagttgctgccctcgagaaggaggtagcagctttggaaaaagaagtcgcagcccttgagaaagaagttgcggctctggagaagacgcgtggcagcgaagtgaaaaccgactccaccgaccacgtgaagcccaaagagacagagaacaccaagcagcccagcaagagctgccacaagcccaaggccatcgtgcacaccgagaaagtgaacatgatgagcctgaccgtgctgggcctgcggatgctgttcgccaaaaccgtggccgtgaacttcctgctgaccgccaagctgttcttcctccgcgccaagagaagcggatctggcgtgaagcagaccctgaatttcgacctgctgaagctggctggcgacgtggaatccaacccaggcccttctagaggccatatgaccgagtacaagcccacggtgcgcctcgccacccgcgacgacgtccccagggccgtacgcaccctcgccgccgcgttcgccgactaccccgccacgcgccacaccgtcgatccggaccgccacatcgagcgggtcaccgagctgcaagaactcttcctcacgcgcgtcgggctcgacatcggcaaggtgtgggtcgcggacgacggcgccgcggtggcggtctggaccacgccggagagcgtcgaagcgggggcggtgttcgccgagatcggcccgcgcatggccgagttgagcggttcccggctggccgcgcagcaacagatggaaggcctcctggcgccgcaccggcccaaggagcccgcgtggttcctggccaccgtcggcgtctcgcccgaccaccagggcaagggtctgggcagcgccgtcgtgctccccggagtggaggcggccgagcgcgccggggtgcccgccttcctggagacctccgcgccccgcaacctccccttctacgagcggctcggcttcaccgtcaccgccgacgtcgaggtgcccgaaggaccgcgcacctggtgcatgacccgcaagcccggtgcctga

SEQ ID NO: 4712 - DNA, 1761 bp, Artificial Sequence
  Synthetic Polynucloetide
atggccttaccagtgaccgccttgctcctgccgctggccttgctgctccacgccgccaggccgcagctccagctgcaagagtctggacctggcctggtcaagcctagcgagacactgagcctgacctgtaccgtgtccggcgatagcatcagcagcggcgattactactggggctggatcagacagcctcctggcaaaggactggaatggatcggccacatctactacagcggcgtgacctactacaaccccagcctgaagtccagagtgaccatcagcgtggacaccagccggaaccagttctccctgaagctgtctagcgtgacagccgccgataccgccgtgtactactgcaccagagaggacagcagcaactggcggagtagaggccagggaacactggtcacagttagctctctcgagggatctcccatcaagaccgatgtgattacaatggaccccaaggacaactgctccaaggacgccaacgataccctgctgctccagctgaccaacaccagcgcctactacatgtacttgttgctgctgctgaagtccgtggtgtacttcgccatcatcacatgctgcctgctgcggagaaccgccttctgctgcaacggcgagaagtctagggccaagcgatctggatctggagcaacaaacttctcactactcaaacaagcaggtgacgtggaggagaatcccgggcctactagtatggactggatttggcgcatccttttccttgtcggcgctgctaccggcgcgcattccgggcccgaagttgctgccctcgagaaggaggtagcagctttggaaaaagaagtcgcagcccttgagaaagaagttgcggctctggagaagacgcgtggcagcgaccacgtgaagcccaaagagacagagaacaccaagcagcccagcaagagctgccacaagcccaaggccatcgtgcacaccgagaaagtgaacatgatgagcctgaccgtgctgggcctgcggatgctgttcgccaaaaccgtggccgtgaacttcctgctgaccgccaagctgttcttcctccgcgccaagagaagcggatctggcgtgaagcagaccctgaatttcgacctgctgaagctggctggcgacgtggaatccaacccaggcccttctagaggccatatgaccgagtacaagcccacggtgcgcctcgccacccgcgacgacgtccccagggccgtacgcaccctcgccgccgcgttcgccgactaccccgccacgcgccacaccgtcgatccggaccgccacatcgagcgggtcaccgagctgcaagaactcttcctcacgcgcgtcgggctcgacatcggcaaggtgtgggtcgcggacgacggcgccgcggtggcggtctggaccacgccggagagcgtcgaagcgggggcggtgttcgccgagatcggcccgcgcatggccgagttgagcggttcccggctggccgcgcagcaacagatggaaggcctcctggcgccgcaccggcccaaggagcccgcgtggttcctggccaccgtcggcgtctcgcccgaccaccagggcaagggtctgggcagcgccgtcgtgctccccggagtggaggcggccgagcgcgccggggtgcccgccttcctggagacctccgcgccccgcaacctccccttctacgagcggctcggcttcaccgtcaccgccgacgtcgaggtgcccgaaggaccgcgcacctggtgcatgacccgcaagcccggtgcctga

SEQ ID NO: 4713 - DNA, 1737 bp, Artificial Sequence
  Synthetic Polynucloetide
atggccttaccagtgaccgccttgctcctgccgctggccttgctgctccacgccgccaggccgcagctccagctgcaagagtctggacctggcctggtcaagcctagcgagacactgagcctgacctgtaccgtgtccggcgatagcatcagcagcggcgattactactggggctggatcagacagcctcctggcaaaggactggaatggatcggccacatctactacagcggcgtgacctactacaaccccagcctgaagtccagagtgaccatcagcgtggacaccagccggaaccagttctccctgaagctgtctagcgtgacagccgccgataccgccgtgtactactgcaccagagaggacagcagcaactggcggagtagaggccagggaacactggtcacagttagctctctcgagggatctatggaccccaaggacaactgctccaaggacgccaacgataccctgctgctccagctgaccaacaccagcgcctactacatgtacttgttgctgctgctgaagtccgtggtgtacttcgccatcatcacatgctgcctgctgcggagaaccgccttctgctgcaacggcgagaagtctagggccaagcgatctggatctggagcaacaaacttctcactactcaaacaagcaggtgacgtggaggagaatcccgggcctactagtatggactggatttggcgcatccttttccttgtcggcgctgctaccggcgcgcattccgggcccgaagttgctgccctcgagaaggaggtagcagctttggaaaaagaagtcgcagcccttgagaaagaagttgcggctctggagaagacgcgtggcagcgaccacgtgaagcccaaagagacagagaacaccaagcagcccagcaagagctgccacaagcccaaggccatcgtgcacaccgagaaagtgaacatgatgagcctgaccgtgctgggcctgcggatgctgttcgccaaaaccgtggccgtgaacttcctgctgaccgccaagctgttcttcctccgcgccaagagaagcggatctggcgtgaagcagaccctgaatttcgacctgctgaagctggctggcgacgtggaatccaacccaggcccttctagaggccatatgaccgagtacaagcccacggtgcgcctcgccacccgcgacgacgtccccagggccgtacgcaccctcgccgccgcgttcgccgactaccccgccacgcgccacaccgtcgatccggaccgccacatcgagcgggtcaccgagctgcaagaactcttcctcacgcgcgtcgggctcgacatcggcaaggtgtgggtcgcggacgacggcgccgcggtggcggtctggaccacgccggagagcgtcgaagcgggggcggtgttcgccgagatcggcccgcgcatggccgagttgagcggttcccggctggccgcgcagcaacagatggaaggcctcctggcgccgcaccggcccaaggagcccgcgtggttcctggccaccgtcggcgtctcgcccgaccaccagggcaagggtctgggcagcgccgtcgtgctccccggagtggaggcggccgagcgcgccggggtgcccgccttcctggagacctccgcgccccgcaacctccccttctacgagcggctcggcttcaccgtcaccgccgacgtcgaggtgcccgaaggaccgcgcacctggtgcatgacccgcaagcccggtgcctga

SEQ ID NO: 4714 - DNA, 1035 bp, Artificial Sequence
  Synthetic Polynucloetide
atggccttaccagtgaccgccttgctcctgccgctggccttgctgctccacgccgccaggccgcagctccagctgcaagagtctggacctggcctggtcaagcctagcgagacactgagcctgacctgtaccgtgtccggcgatagcatcagcagcggcgattactactggggctggatcagacagcctcctggcaaaggactggaatggatcggccacatctactacagcggcgtgacctactacaaccccagcctgaagtccagagtgaccatcagcgtggacaccagccggaaccagttctccctgaagctgtctagcgtgacagccgccgataccgccgtgtactactgcaccagagaggacagcagcaactggcggagtagaggccagggaacactggtcacagttagctctctcgagggatctatggaccccaaggacaactgctccaaggacgccaacgataccctgctgctccagctgaccaacaccagcgcctactacatgtacttgttgctgctgctgaagtccgtggtgtacttcgccatcatcacatgctgcctgctgcggagaaccgccttctgctgcaacggcgagaagtctagggccaagcgatctggatctggagcaacaaacttctcactactcaaacaagcaggtgacgtggaggagaatcccgggcctactagtatggactggatttggcgcatccttttccttgtcggcgctgctaccggcgcgcattccgggcccgaagttgctgccctcgagaaggaggtagcagctttggaaaaagaagtcgcagcccttgagaaagaagttgcggctctggagaagacgcgtggcagcgaccacgtgaagcccaaagagacagagaacaccaagcagcccagcaagagctgccacaagcccaaggccatcgtgcacaccgagaaagtgaacatgatgagcctgaccgtgctgggcctgcggatgctgttcgccaaaaccgtggccgtgaacttcctgctgaccgccaagctgttcttcctc

SEQ ID NO: 4715 - DNA, 1764 bp, Artificial Sequence
  Synthetic Polynucloetide
atggccttaccagtgaccgccttgctcctgccgctggccttgctgctccacgccgccaggccgcagctccagctgcaagagtctggacctggcctggtcaagcctagcgagacactgagcctgacctgtaccgtgtccggcgatagcatcagcagcggcgattactactggggctggatcagacagcctcctggcaaaggactggaatggatcggccacatctactacagcggcgtgacctactacaaccccagcctgaagtccagagtgaccatcagcgtggacaccagccggaaccagttctccctgaagctgtctagcgtgacagccgccgataccgccgtgtactactgcaccagagaggacagcagcaactggcggagtagaggccagggaacactggtcacagttagctctctcgaggacaaaactcacacatgcccaccgtgcccagcaatggaccccaaggacaactgctccaaggacgccaacgataccctgctgctccagctgaccaacaccagcgcctactacatgtacttgttgctgctgctgaagtccgtggtgtacttcgccatcatcacatgctgcctgctgcggagaaccgccttctgctgcaacggcgagaagtctagggccaagcgatctggatctggagcaacaaacttctcactactcaaacaagcaggtgacgtggaggagaatcccgggcctactagtatggactggatttggcgcatccttttccttgtcggcgctgctaccggcgcgcattccgggcccgaagttgctgccctcgagaaggaggtagcagctttggaaaaagaagtcgcagcccttgagaaagaagttgcggctctggagaagacgcgtggcagcgaccacgtgaagcccaaagagacagagaacaccaagcagcccagcaagagctgccacaagcccaaggccatcgtgcacaccgagaaagtgaacatgatgagcctgaccgtgctgggcctgcggatgctgttcgccaaaaccgtggccgtgaacttcctgctgaccgccaagctgttcttcctccgcgccaagagaagcggatctggcgtgaagcagaccctgaatttcgacctgctgaagctggctggcgacgtggaatccaacccaggcccttctagaggccatatgaccgagtacaagcccacggtgcgcctcgccacccgcgacgacgtccccagggccgtacgcaccctcgccgccgcgttcgccgactaccccgccacgcgccacaccgtcgatccggaccgccacatcgagcgggtcaccgagctgcaagaactcttcctcacgcgcgtcgggctcgacatcggcaaggtgtgggtcgcggacgacggcgccgcggtggcggtctggaccacgccggagagcgtcgaagcgggggcggtgttcgccgagatcggcccgcgcatggccgagttgagcggttcccggctggccgcgcagcaacagatggaaggcctcctggcgccgcaccggcccaaggagcccgcgtggttcctggccaccgtcggcgtctcgcccgaccaccagggcaagggtctgggcagcgccgtcgtgctccccggagtggaggcggccgagcgcgccggggtgcccgccttcctggagacctccgcgccccgcaacctccccttctacgagcggctcggcttcaccgtcaccgccgacgtcgaggtgcccgaaggaccgcgcacctggtgcatgacccgcaagcccggtgcctga

SEQ ID NO: 4716 - DNA, 1791 bp, Artificial Sequence
  Synthetic Polynucloetide
atggccttaccagtgaccgccttgctcctgccgctggccttgctgctccacgccgccaggccgcagctccagctgcaagagtctggacctggcctggtcaagcctagcgagacactgagcctgacctgtaccgtgtccggcgatagcatcagcagcggcgattactactggggctggatcagacagcctcctggcaaaggactggaatggatcggccacatctactacagcggcgtgacctactacaaccccagcctgaagtccagagtgaccatcagcgtggacaccagccggaaccagttctccctgaagctgtctagcgtgacagccgccgataccgccgtgtactactgcaccagagaggacagcagcaactggcggagtagaggccagggaacactggtcacagttagctctctcgaggacaaaactcacacatgcccaccgtgcccagcaatggaccccaaggacaactgctccaaggacgccaacgataccctgctgctccagctgaccaacaccagcgcctactacatgtacttgttgctgctgctgaagtccgtggtgtacttcgccatcatcacatgctgcctgctgcggagaaccgccttctgctgcaacggcgagaagtctagggccaagcgatctggatctggagcaacaaacttctcactactcaaacaagcaggtgacgtggaggagaatcccgggcctactagtatggactggatttggcgcatccttttccttgtcggcgctgctaccggcgcgcattccgggcccgaagttgctgccctcgagaaggaggtagcagctttggaaaaagaagtcgcagcccttgagaaagaagttgcggctctggagaagacgcgtgataaaactcatacctgtccgccatgcccggcagaccacgtgaagcccaaagagacagagaacaccaagcagcccagcaagagctgccacaagcccaaggccatcgtgcacaccgagaaagtgaacatgatgagcctgaccgtgctgggcctgcggatgctgttcgccaaaaccgtggccgtgaacttcctgctgaccgccaagctgttcttcctccgcgccaagagaagcggatctggcgtgaagcagaccctgaatttcgacctgctgaagctggctggcgacgtggaatccaacccaggcccttctagaggccatatgaccgagtacaagcccacggtgcgcctcgccacccgcgacgacgtccccagggccgtacgcaccctcgccgccgcgttcgccgactaccccgccacgcgccacaccgtcgatccggaccgccacatcgagcgggtcaccgagctgcaagaactcttcctcacgcgcgtcgggctcgacatcggcaaggtgtgggtcgcggacgacggcgccgcggtggcggtctggaccacgccggagagcgtcgaagcgggggcggtgttcgccgagatcggcccgcgcatggccgagttgagcggttcccggctggccgcgcagcaacagatggaaggcctcctggcgccgcaccggcccaaggagcccgcgtggttcctggccaccgtcggcgtctcgcccgaccaccagggcaagggtctgggcagcgccgtcgtgctccccggagtggaggcggccgagcgcgccggggtgcccgccttcctggagacctccgcgccccgcaacctccccttctacgagcggctcggcttcaccgtcaccgccgacgtcgaggtgcccgaaggaccgcgcacctggtgcatgacccgcaagcccggtgcctga

SEQ ID NO: 4717 - DNA, 1089 bp, Artificial Sequence
  Synthetic Polynucloetide
atggccttaccagtgaccgccttgctcctgccgctggccttgctgctccacgccgccaggccgcagctccagctgcaagagtctggacctggcctggtcaagcctagcgagacactgagcctgacctgtaccgtgtccggcgatagcatcagcagcggcgattactactggggctggatcagacagcctcctggcaaaggactggaatggatcggccacatctactacagcggcgtgacctactacaaccccagcctgaagtccagagtgaccatcagcgtggacaccagccggaaccagttctccctgaagctgtctagcgtgacagccgccgataccgccgtgtactactgcaccagagaggacagcagcaactggcggagtagaggccagggaacactggtcacagttagctctctcgaggacaaaactcacacatgcccaccgtgcccagcaatggaccccaaggacaactgctccaaggacgccaacgataccctgctgctccagctgaccaacaccagcgcctactacatgtacttgttgctgctgctgaagtccgtggtgtacttcgccatcatcacatgctgcctgctgcggagaaccgccttctgctgcaacggcgagaagtctagggccaagcgatctggatctggagcaacaaacttctcactactcaaacaagcaggtgacgtggaggagaatcccgggcctactagtatggactggatttggcgcatccttttccttgtcggcgctgctaccggcgcgcattccgggcccgaagttgctgccctcgagaaggaggtagcagctttggaaaaagaagtcgcagcccttgagaaagaagttgcggctctggagaagacgcgtgataaaactcatacctgtccgccatgcccggcagaccacgtgaagcccaaagagacagagaacaccaagcagcccagcaagagctgccacaagcccaaggccatcgtgcacaccgagaaagtgaacatgatgagcctgaccgtgctgggcctgcggatgctgttcgccaaaaccgtggccgtgaacttcctgctgaccgccaagctgttcttcctc

SEQ ID NO: 4718 - DNA, 900 bp, Artificial Sequence; identical to SEQ ID NO: 4210
  Synthetic Polynucloetide

SEQ ID NO: 4719 - DNA, 642 bp, Artificial Sequence; identical to SEQ ID NO: 4592
  Synthetic Polynucloetide

SEQ ID NO: 4720 - DNA, 942 bp, Artificial Sequence; identical to SEQ ID NO: 4212
  Synthetic Polynucloetide

SEQ ID NO: 4721 - DNA, 666 bp, Artificial Sequence; identical to SEQ ID NO: 4594
  Synthetic Polynucloetide

SEQ ID NO: 4722 - DNA, 1923 bp, Artificial Sequence; identical to SEQ ID NO: 4087
  Synthetic Polynucloetide

SEQ ID NO: 4723 - DNA, 2982 bp, Artificial Sequence; identical to SEQ ID NO: 4088
  Synthetic Polynucloetide

SEQ ID NO: 4724 - DNA, 2979 bp, Artificial Sequence; identical to SEQ ID NO: 4089
  Synthetic Polynucloetide

SEQ ID NO: 4725 - DNA, 2979 bp, Artificial Sequence; identical to SEQ ID NO: 4090
  Synthetic Polynucloetide

SEQ ID NO: 4726 - DNA, 2277 bp, Artificial Sequence; identical to SEQ ID NO: 4091
  Synthetic Polynucloetide

SEQ ID NO: 4727 - DNA, 2952 bp, Artificial Sequence; identical to SEQ ID NO: 4092
  Synthetic Polynucloetide

SEQ ID NO: 4728 - DNA, 2289 bp, Artificial Sequence; identical to SEQ ID NO: 4093
  Synthetic Polynucloetide

SEQ ID NO: 4729 - DNA, 2955 bp, Artificial Sequence; identical to SEQ ID NO: 4094
  Synthetic Polynucloetide

SEQ ID NO: 4730 - DNA, 2979 bp, Artificial Sequence; identical to SEQ ID NO: 4095
  Synthetic Polynucloetide

SEQ ID NO: 4731 - DNA, 3225 bp, Artificial Sequence; identical to SEQ ID NO: 4096
  Synthetic Polynucloetide

SEQ ID NO: 4732 - DNA, 3090 bp, Artificial Sequence; identical to SEQ ID NO: 4097
  Synthetic Polynucloetide

SEQ ID NO: 4733 - DNA, 2301 bp, Artificial Sequence; identical to SEQ ID NO: 4098
  Synthetic Polynucloetide

SEQ ID NO: 4734 - DNA, 3510 bp, Artificial Sequence; identical to SEQ ID NO: 4099
  Synthetic Polynucloetide

SEQ ID NO: 4735 - DNA, 2865 bp, Artificial Sequence; identical to SEQ ID NO: 4100
  Synthetic Polynucloetide

SEQ ID NO: 4736 - DNA, 2865 bp, Artificial Sequence; identical to SEQ ID NO: 4101
  Synthetic Polynucloetide

SEQ ID NO: 4737 - DNA, 3078 bp, Artificial Sequence; identical to SEQ ID NO: 4102
  Synthetic Polynucloetide

SEQ ID NO: 4738 - DNA, 3201 bp, Artificial Sequence; identical to SEQ ID NO: 4103
  Synthetic Polynucloetide

SEQ ID NO: 4739 - DNA, 3084 bp, Artificial Sequence; identical to SEQ ID NO: 4104
  Synthetic Polynucloetide

SEQ ID NO: 4740 - DNA, 3210 bp, Artificial Sequence; identical to SEQ ID NO: 4105
  Synthetic Polynucloetide

SEQ ID NO: 4741 - DNA, 2883 bp, Artificial Sequence; identical to SEQ ID NO: 4106
  Synthetic Polynucloetide

SEQ ID NO: 4742 - DNA, 2355 bp, Artificial Sequence; identical to SEQ ID NO: 4107
  Synthetic Polynucloetide

SEQ ID NO: 4743 - DNA, 2289 bp, Artificial Sequence; identical to SEQ ID NO: 4108
  Synthetic Polynucloetide

SEQ ID NO: 4744 - DNA, 2289 bp, Artificial Sequence; identical to SEQ ID NO: 4109
  Synthetic Polynucloetide

SEQ ID NO: 4745 - DNA, 1779 bp, Artificial Sequence; identical to SEQ ID NO: 4110
  Synthetic Polynucloetide

SEQ ID NO: 4746 - DNA, 1674 bp, Artificial Sequence; identical to SEQ ID NO: 4111
  Synthetic Polynucloetide

SEQ ID NO: 4747 - DNA, 1704 bp, Artificial Sequence; identical to SEQ ID NO: 4112
  Synthetic Polynucloetide

SEQ ID NO: 4748 - DNA, 1653 bp, Artificial Sequence; identical to SEQ ID NO: 4113
  Synthetic Polynucloetide

SEQ ID NO: 4749 - DNA, 1764 bp, Artificial Sequence; identical to SEQ ID NO: 4114
  Synthetic Polynucloetide

SEQ ID NO: 4750 - DNA, 1263 bp, Artificial Sequence; identical to SEQ ID NO: 4115
  Synthetic Polynucloetide

SEQ ID NO: 4751 - DNA, 1800 bp, Artificial Sequence; identical to SEQ ID NO: 4116
  Synthetic Polynucloetide

SEQ ID NO: 4752 - DNA, 1302 bp, Artificial Sequence; identical to SEQ ID NO: 4117
  Synthetic Polynucloetide

SEQ ID NO: 4753 - DNA, 2124 bp, Artificial Sequence
  Synthetic Polynucloetide
atggccttaccagtgaccgccttgctcctgccgctggccttgctgctccacgccgccaggccgggcatgcggactgaagacctcccaaaggctgtggtgttcctggagcctcaatggtacagggtgctggagaaggacagtgtgactctgaagtgccagggagcctactcccctgaggacaattccacacagtggtttcacaatgagagcctcatctcaagccaggcctccagctacttcattgacgctgccacagtggacgacagtggagagtacaggtgccagacaaacctctccaccctcagtgacccggtgcagctagaagtccatatcggctggctgttgctccaggcccctcggtgggtgttcaaggaggaagaccctattcacctgaggtgtcacagctggaagaacactgctctgcataaggtcacatatttacagaatggcaaaggcaggaagtattttcatcataattctgacttctacattccaaaagccacactcaaagacagcggctcctacttctgcagggggcttgttgggagtaaaaatgtgtcttcagagactgtgaacatcaccatcactcaaggtttggcagtgtcaaccatctcatcattctttccacctggctaccaaggtaccggcggaggcggatctggcggcggaggtagcggtggcggaggatctgaattcgacatccagatgacacagagccctagcagcctgtctgccagcgtgggagacagagtgaccatcacatgcaaggccagcgaccacatcaacaactggctggcctggtatcagcagaagcctggacaggcccctaagctgctgatctacggcgctaccacactggaaacaggcgtgcccagcagattttctggcagcggctctggcaccgactacaccctgacaatatccagcctccagcctgaggacttcgccacctactactgtcagcagagctggaacaccccttggacattcggccagggcaccaagctggaaatcaagagaggcggaggcggaagtggaggcggaggatctggcggcggaggctctcaagttcagcttcaacagcctggcgctgagctggtcaaacctggcgcttctgtgaagatgagctgcaaagccagcggctacgccttcagcagctactggatcaactggatgaagcagaaacccggccagggactcgaatggatcggccaaatctatcccggcgacggcgacaccaactacaacggcaagttcaagggcagagccacactgaccgccgatacctctagcagcacagcctacatgcagctgagcagcctgaccagcgaagatagcgccgtgtacttctgtgcccggtccatcacaacagtcgtgggctgcgctatggactattggggccagggaacaagcgtgaccgtgtctagtacgcgtgagcagaaactgatctcggaagaggatctgaaaattgaagttatgtatcctcctccttacctagacaatgagaagagcaatggaaccattatccatgtgaaagggaaacacctttgtccaagtcccctatttcccggaccttctaagcccttttgggtgctggtggtggttgggggagtcctggcttgctatagcttgctagtaacagtggcctttattattttctgggtgaggagtaagaggagcaggctcctgcacagtgactacatgaacatgactccacgccgccccggacccacccgcaagcattaccagccctatgccccaccacgcgacttcgcagcctatcgctccagagtgaagttcagcaggagcgcagacgcccccgcgtaccagcagggccagaaccagctctataacgagctcaatctaggacgaagagaggagtacgatgttttggacaagagacgtggccgggaccctgagatggggggaaagccgagaaggaagaaccctcaggaaggcctgtacaatgaactgcagaaagataagatggcggaggcctacagtgagattgggatgaaaggcgagcgccggaggggcaaggggcacgatggcctttaccagggtctcagtacagccaccaaggacacctacgacgcccttcacatgcaggccctgccccctcgc

SEQ ID NO: 4754 - DNA, 2145 bp, Artificial Sequence
  Synthetic Polynucloetide
atggccttaccagtgaccgccttgctcctgccgctggccttgctgctccacgccgccaggccgggcatgcggactgaagacctcccaaaggctgtggtgttcctggagcctcaatggtacagggtgctggagaaggacagtgtgactctgaagtgccagggagcctactcccctgaggacaattccacacagtggtttcacaatgagagcctcatctcaagccaggcctccagctacttcattgacgctgccacagtggacgacagtggagagtacaggtgccagacaaacctctccaccctcagtgacccggtgcagctagaagtccatatcggctggctgttgctccaggcccctcggtgggtgttcaaggaggaagaccctattcacctgaggtgtcacagctggaagaacactgctctgcataaggtcacatatttacagaatggcaaaggcaggaagtattttcatcataattctgacttctacattccaaaagccacactcaaagacagcggctcctacttctgcagggggcttgttgggagtaaaaatgtgtcttcagagactgtgaacatcaccatcactcaaggtttggcagtgtcaaccatctcatcattctttccacctggctaccaaggtaccggcggaggcggatctggcggcggaggtagcggtggcggaggatctgaattcgacatccagatgacacagagccctagcagcctgtctgccagcgtgggagacagagtgaccatcacatgcaaggccagcgaccacatcaacaactggctggcctggtatcagcagaagcctggacaggcccctaagctgctgatctacggcgctaccacactggaaacaggcgtgcccagcagattttctggcagcggctctggcaccgactacaccctgacaatatccagcctccagcctgaggacttcgccacctactactgtcagcagagctggaacaccccttggacattcggccagggcaccaagctggaaatcaagagaggcggaggcggaagtggaggcggaggatctggcggcggaggctctcaagttcagcttcaacagcctggcgctgagctggtcaaacctggcgcttctgtgaagatgagctgcaaagccagcggctacgccttcagcagctactggatcaactggatgaagcagaaacccggccagggactcgaatggatcggccaaatctatcccggcgacggcgacaccaactacaacggcaagttcaagggcagagccacactgaccgccgatacctctagcagcacagcctacatgcagctgagcagcctgaccagcgaagatagcgccgtgtacttctgtgcccggtccatcacaacagtcgtgggctgcgctatggactattggggccagggaacaagcgtgaccgtgtctagtacgcgtgagcagaaactgatctcggaagaggatctggcgaagcccaccacgacgccagcgccgcgaccaccaacaccggcgcccaccatcgcgtcgcagcccctgtccctgcgcccagaggcgtgccggccagcggcggggggcgcagtgcacacgagggggctggacttcgcctgtgacatctacatctgggcgcccttggccgggacttgtggggtccttctcctgtcactggttatcaccctttactgcaaacggggcagaaagaaactcctgtatatattcaaacaaccatttatgagaccagtacaaactactcaagaggaagatggctgtagctgccgatttccagaagaagaagaaggaggatgtgaactgagagtgaagttcagcaggagcgcagacgcccccgcgtaccagcagggccagaaccagctctataacgagctgaatctaggacgaagagaggagtacgatgttttggacaagagacgtggccgggaccctgagatggggggaaagccgagaaggaagaaccctcaggaaggcctgtacaatgaactgcagaaagataagatggcggaggcctacagtgagattgggatgaaaggcgagcgccggaggggcaaggggcacgatggcctttaccagggtctcagtacagccaccaaggacacctacgacgcccttcacatgcaggccctgccccctcgctga

SEQ ID NO: 4755 - DNA, 3384 bp, Artificial Sequence
  Synthetic Polynucloetide
atggccttaccagtgaccgccttgctcctgccgctggccttgctgctccacgccgccaggccgggcatgcggactgaagacctcccaaaggctgtggtgttcctggagcctcaatggtacagggtgctggagaaggacagtgtgactctgaagtgccagggagcctactcccctgaggacaattccacacagtggtttcacaatgagagcctcatctcaagccaggcctccagctacttcattgacgctgccacagtggacgacagtggagagtacaggtgccagacaaacctctccaccctcagtgacccggtgcagctagaagtccatatcggctggctgttgctccaggcccctcggtgggtgttcaaggaggaagaccctattcacctgaggtgtcacagctggaagaacactgctctgcataaggtcacatatttacagaatggcaaaggcaggaagtattttcatcataattctgacttctacattccaaaagccacactcaaagacagcggctcctacttctgcagggggcttgttgggagtaaaaatgtgtcttcagagactgtgaacatcaccatcactcaaggtttggcagtgtcaaccatctcatcattctttccacctggctaccaaggtaccggcggaggcggatctggcggcggaggtagcggtggcggaggatctgaattcgacatccagatgacacagagccctagcagcctgtctgccagcgtgggagacagagtgaccatcacatgcaaggccagcgaccacatcaacaactggctggcctggtatcagcagaagcctggacaggcccctaagctgctgatctacggcgctaccacactggaaacaggcgtgcccagcagattttctggcagcggctctggcaccgactacaccctgacaatatccagcctccagcctgaggacttcgccacctactactgtcagcagagctggaacaccccttggacattcggccagggcaccaagctggaaatcaagagaggcggaggcggaagtggaggcggaggatctggcggcggaggctctcaagttcagcttcaacagcctggcgctgagctggtcaaacctggcgcttctgtgaagatgagctgcaaagccagcggctacgccttcagcagctactggatcaactggatgaagcagaaacccggccagggactcgaatggatcggccaaatctatcccggcgacggcgacaccaactacaacggcaagttcaagggcagagccacactgaccgccgatacctctagcagcacagcctacatgcagctgagcagcctgaccagcgaagatagcgccgtgtacttctgtgcccggtccatcacaacagtcgtgggctgcgctatggactattggggccagggaacaagcgtgaccgtgtctagtacgcgtgagcagaaactgatctcggaagaggatctggcgaagcccaccacgacgccagcgccgcgaccaccaacaccggcgcccaccatcgcgtcgcagcccctgtccctgcgcccagaggcgtgccggccagcggcggggggcgcagtgcacacgagggggctggacttcgcctgtgacatctacatctgggcgcccttggccgggacttgtggggtccttctcctgtcactggttatcaccctttactgcgggcgcgccagagtgaagttcagcaggagcgcagacgcccccgcgtaccagcagggccagaaccagctctataacgagctgaatctaggacgaagagaggagtacgatgttttggacaagagacgtggccgggaccctgagatggggggaaagccgagaaggaagaaccctcaggaaggcctgtacaatgaactgcagaaagataagatggcggaggcctacagtgagattgggatgaaaggcgagcgccggaggggcaaggggcacgatggcctttaccagggtctcagtacagccaccaaggacacctacgacgcccttcacatgcaggccctgccccctcgctctagaggatctggagcaacaaacttctcactactcaaacaagcaggtgacgtggaggagaatcccgggcctgggatccacatggccacttacgaggttctctgtgaggtggcgcggaaactgggcacggatgacagggaagtggtattgttcctcctaaacgtgttcatacctcaacccacactggcccaattaattggagctcttagagctttaaaggaggagggcaggttaacgtttcccctgttagcggaatgtctgtttcgtgcaggtcgcagagacctcttgcgcgacctgcttcacttagacccgcgttttttagagcgccacctagcgggcacaatgagttatttcagcccttatcagctcactgttctccacgtagacggggagctgtgtgcgagggatattaggtctttgatatttttaagcaaggacactatagggtctcgcagcacaccacagacattcttacactgggtgtactgtatggaaaacttagacctactgggtcccactgacgtggatgccctaatgtcaatgcttagatctttgtcaagagtagacctacagcgccaagtgcaaaccctaatgggccttcacctttccggcccatcacactcccaacactatcgccatacaccactcgagaccgatttctacgactacaaggacgacgatgacaagactagtggctccggcgagggcagaggaagtctactaacctgcggagatgtggaagaaaatcctggcccacatatgaccgagtacaagcccacggtgcgcctcgccacccgcgacgacgtccccagggccgtacgcaccctcgccgccgcgttcgccgactaccccgccacgcgccacaccgtcgatccggaccgccacatcgagcgggtcaccgagctgcaagaactcttcctcacgcgcgtcgggctcgacatcggcaaggtgtgggtcgcggacgacggcgccgcggtggcggtctggaccacgccggagagcgtcgaagcgggggcggtgttcgccgagatcggcccgcgcatggccgagttgagcggttcccggctggccgcgcagcaacagatggaaggcctcctggcgccgcaccggcccaaggagcccgcgtggttcctggccaccgtcggcgtctcgcccgaccaccagggcaagggtctgggcagcgccgtcgtgctccccggagtggaggcggccgagcgcgccggggtgcccgccttcctggagacctccgcgccccgcaacctccccttctacgagcggctcggcttcaccgtcaccgccgacgtcgaggtgcccgaaggaccgcgcacctggtgcatgacccgcaagcccggtgcctga

SEQ ID NO: 4756 - DNA, 3204 bp, Artificial Sequence
  Synthetic Polynucloetide
atggccttaccagtgaccgccttgctcctgccgctggccttgctgctccacgccgccaggccgggcatgcggactgaagacctcccaaaggctgtggtgttcctggagcctcaatggtacagggtgctggagaaggacagtgtgactctgaagtgccagggagcctactcccctgaggacaattccacacagtggtttcacaatgagagcctcatctcaagccaggcctccagctacttcattgacgctgccacagtggacgacagtggagagtacaggtgccagacaaacctctccaccctcagtgacccggtgcagctagaagtccatatcggctggctgttgctccaggcccctcggtgggtgttcaaggaggaagaccctattcacctgaggtgtcacagctggaagaacactgctctgcataaggtcacatatttacagaatggcaaaggcaggaagtattttcatcataattctgacttctacattccaaaagccacactcaaagacagcggctcctacttctgcagggggcttgttgggagtaaaaatgtgtcttcagagactgtgaacatcaccatcactcaaggtttggcagtgtcaaccatctcatcattctttccacctggctaccaaggtaccggcggaggcggatctggcggcggaggtagcggtggcggaggatctgaattcgacatccagatgacacagagccctagcagcctgtctgccagcgtgggagacagagtgaccatcacatgcaaggccagcgaccacatcaacaactggctggcctggtatcagcagaagcctggacaggcccctaagctgctgatctacggcgctaccacactggaaacaggcgtgcccagcagattttctggcagcggctctggcaccgactacaccctgacaatatccagcctccagcctgaggacttcgccacctactactgtcagcagagctggaacaccccttggacattcggccagggcaccaagctggaaatcaagagactcgagatccagaaccctgatcctgccgtgtaccagctgcgggatagcaagagcagcgacaagagcgtgtgtctgttcaccgacttcgacagccagaccaacgtgtcccagagcaaggactccgacgtgtacatcaccgataagtgcgtgctggacatgcggagcatggacttcaagagcaactccgccgtggcctggtccaacaagtccgatttcgcctgcgccaacgccttcaacaacagcattatccccgaggacacattcttcccaagcagcgacgtgccctgcgacgtgaagctggtggaaaagagcttcgagacagacaccaacctgaacttccagaacctgagcgtgatcggcttcagaatcctgctgctgaaagtggccggctttaacctgctgatgaccctgcggctgtggtccagccgcgccaagagaagcggatctggcgtgaagcagaccctgaatttcgacctgctgaagctggctggcgacgtggaatccaacccaggccctactagtatggactggatttggcgcatccttttccttgtcggcgctgctaccggcgcgcattccttcgaacaagttcagcttcaacagcctggcgctgagctggtcaaacctggcgcttctgtgaagatgagctgcaaagccagcggctacgccttcagcagctactggatcaactggatgaagcagaaacccggccagggactcgaatggatcggccaaatctatcccggcgacggcgacaccaactacaacggcaagttcaagggcagagccacactgaccgccgatacctctagcagcacagcctacatgcagctgagcagcctgaccagcgaagatagcgccgtgtacttctgtgcccggtccatcacaacagtcgtgggctgcgctatggactattggggccagggaacaagcgtgaccgtgtctagtacgcgtgaggacctgaagaacgtgttcccacctgaggtggccgtgttcgagcctagcaaggccgagatcgcccacacccagaaagccaccctcgtgtgcctggctaccggcttctaccccgaccatgtggaactgtcttggtgggtcaacggcaaagaggtgcacagcggcgtgtgtaccgacccccagccactgaaagaacagcccgccctgaacgacagccggtactgcctgagcagcagactgagagtgtccgccaccttctggcagaacccccggaaccacttcagatgccaggtgcagttctacggcctgagcgagaacgacgagtggacccaggacagagccaagcccgtgacccagatcgtgtctgccgaagcctggggcagagccgattgcggcatcaccagcgccagctaccaccagggcgtgctgagcgccaccatcctgtacgagatcctgctgggcaaggccaccctgtacgccgtgctggtgtctgccctggtgctgatggctatggtcaagcggaaggacagccggggaagggccaagcgatctggatctggagcaacaaacttctcactactcaaacaagcaggtgacgtggaggagaatcccgggccttctagaggccatatgaccgagtacaagcccacggtgcgcctcgccacccgcgacgacgtccccagggccgtacgcaccctcgccgccgcgttcgccgactaccccgccacgcgccacaccgtcgatccggaccgccacatcgagcgggtcaccgagctgcaagaactcttcctcacgcgcgtcgggctcgacatcggcaaggtgtgggtcgcggacgacggcgccgcggtggcggtctggaccacgccggagagcgtcgaagcgggggcggtgttcgccgagatcggcccgcgcatggccgagttgagcggttcccggctggccgcgcagcaacagatggaaggcctcctggcgccgcaccggcccaaggagcccgcgtggttcctggccaccgtcggcgtctcgcccgaccaccagggcaagggtctgggcagcgccgtcgtgctccccggagtggaggcggccgagcgcgccggggtgcccgccttcctggagacctccgcgccccgcaacctccccttctacgagcggctcggcttcaccgtcaccgccgacgtcgaggtgcccgaaggaccgcgcacctggtgcatgacccgcaagcccggtgcctga

SEQ ID NO: 4757 - DNA, 3201 bp, Artificial Sequence
  Synthetic Polynucloetide
atggccttaccagtgaccgccttgctcctgccgctggccttgctgctccacgccgccaggccgggcatgcggactgaagacctcccaaaggctgtggtgttcctggagcctcaatggtacagggtgctggagaaggacagtgtgactctgaagtgccagggagcctactcccctgaggacaattccacacagtggtttcacaatgagagcctcatctcaagccaggcctccagctacttcattgacgctgccacagtggacgacagtggagagtacaggtgccagacaaacctctccaccctcagtgacccggtgcagctagaagtccatatcggctggctgttgctccaggcccctcggtgggtgttcaaggaggaagaccctattcacctgaggtgtcacagctggaagaacactgctctgcataaggtcacatatttacagaatggcaaaggcaggaagtattttcatcataattctgacttctacattccaaaagccacactcaaagacagcggctcctacttctgcagggggcttgttgggagtaaaaatgtgtcttcagagactgtgaacatcaccatcactcaaggtttggcagtgtcaaccatctcatcattctttccacctggctaccaaggtaccggcggaggcggatctggcggcggaggtagcggtggcggaggatctgaattcgacatccagatgacacagagccctagcagcctgtctgccagcgtgggagacagagtgaccatcacatgcaaggccagcgaccacatcaacaactggctggcctggtatcagcagaagcctggacaggcccctaagctgctgatctacggcgctaccacactggaaacaggcgtgcccagcagattttctggcagcggctctggcaccgactacaccctgacaatatccagcctccagcctgaggacttcgccacctactactgtcagcagagctggaacaccccttggacattcggccagggcaccaagctggaaatcaagagactcgaggacctgaagaacgtgttcccacctgaggtggccgtgttcgagcctagcaaggccgagatcgcccacacccagaaagccaccctcgtgtgcctggctaccggcttctaccccgaccatgtggaactgtcttggtgggtcaacggcaaagaggtgcacagcggcgtgtgtaccgacccccagccactgaaagaacagcccgccctgaacgacagccggtactgcctgagcagcagactgagagtgtccgccaccttctggcagaacccccggaaccacttcagatgccaggtgcagttctacggcctgagcgagaacgacgagtggacccaggacagagccaagcccgtgacccagatcgtgtctgccgaagcctggggcagagccgattgcggcatcaccagcgccagctaccaccagggcgtgctgagcgccaccatcctgtacgagatcctgctgggcaaggccaccctgtacgccgtgctggtgtctgccctggtgctgatggctatggtcaagcggaaggacagccggggaagggccaagcgatctggatctggagcaacaaacttctcactactcaaacaagcaggtgacgtggaggagaatcccgggcctactagtatggactggatttggcgcatccttttccttgtcggcgctgctaccggcgcgcattccttcgaacaagttcagcttcaacagcctggcgctgagctggtcaaacctggcgcttctgtgaagatgagctgcaaagccagcggctacgccttcagcagctactggatcaactggatgaagcagaaacccggccagggactcgaatggatcggccaaatctatcccggcgacggcgacaccaactacaacggcaagttcaagggcagagccacactgaccgccgatacctctagcagcacagcctacatgcagctgagcagcctgaccagcgaagatagcgccgtgtacttctgtgcccggtccatcacaacagtcgtgggctgcgctatggactattggggccagggaacaagcgtgaccgtgtctagtacgcgtatccagaaccctgatcctgccgtgtaccagctgcgggatagcaagagcagcgacaagagcgtgtgtctgttcaccgacttcgacagccagaccaacgtgtcccagagcaaggactccgacgtgtacatcaccgataagtgcgtgctggacatgcggagcatggacttcaagagcaactccgccgtggcctggtccaacaagtccgatttcgcctgcgccaacgccttcaacaacagcattatccccgaggacacattcttcccaagcagcgacgtgccctgcgacgtgaagctggtggaaaagagcttcgagacagacaccaacctgaacttccagaacctgagcgtgatcggcttcagaatcctgctgctgaaagtggccggctttaacctgctgatgaccctgcggctgtggtccagccgcgccaagagaagcggatctggcgtgaagcagaccctgaatttcgacctgctgaagctggctggcgacgtggaatccaacccaggcccttctagaggccatatgaccgagtacaagcccacggtgcgcctcgccacccgcgacgacgtccccagggccgtacgcaccctcgccgccgcgttcgccgactaccccgccacgcgccacaccgtcgatccggaccgccacatcgagcgggtcaccgagctgcaagaactcttcctcacgcgcgtcgggctcgacatcggcaaggtgtgggtcgcggacgacggcgccgcggtggcggtctggaccacgccggagagcgtcgaagcgggggcggtgttcgccgagatcggcccgcgcatggccgagttgagcggttcccggctggccgcgcagcaacagatggaaggcctcctggcgccgcaccggcccaaggagcccgcgtggttcctggccaccgtcggcgtctcgcccgaccaccagggcaagggtctgggcagcgccgtcgtgctccccggagtggaggcggccgagcgcgccggggtgcccgccttcctggagacctccgcgccccgcaacctccccttctacgagcggctcggcttcaccgtcaccgccgacgtcgaggtgcccgaaggaccgcgcacctggtgcatgacccgcaagcccggtgcctga

SEQ ID NO: 4758 - DNA, 2499 bp, Artificial Sequence
  Synthetic Polynucloetide
atggccttaccagtgaccgccttgctcctgccgctggccttgctgctccacgccgccaggccgggcatgcggactgaagacctcccaaaggctgtggtgttcctggagcctcaatggtacagggtgctggagaaggacagtgtgactctgaagtgccagggagcctactcccctgaggacaattccacacagtggtttcacaatgagagcctcatctcaagccaggcctccagctacttcattgacgctgccacagtggacgacagtggagagtacaggtgccagacaaacctctccaccctcagtgacccggtgcagctagaagtccatatcggctggctgttgctccaggcccctcggtgggtgttcaaggaggaagaccctattcacctgaggtgtcacagctggaagaacactgctctgcataaggtcacatatttacagaatggcaaaggcaggaagtattttcatcataattctgacttctacattccaaaagccacactcaaagacagcggctcctacttctgcagggggcttgttgggagtaaaaatgtgtcttcagagactgtgaacatcaccatcactcaaggtttggcagtgtcaaccatctcatcattctttccacctggctaccaaggtaccggcggaggcggatctggcggcggaggtagcggtggcggaggatctgaattcgacatccagatgacacagagccctagcagcctgtctgccagcgtgggagacagagtgaccatcacatgcaaggccagcgaccacatcaacaactggctggcctggtatcagcagaagcctggacaggcccctaagctgctgatctacggcgctaccacactggaaacaggcgtgcccagcagattttctggcagcggctctggcaccgactacaccctgacaatatccagcctccagcctgaggacttcgccacctactactgtcagcagagctggaacaccccttggacattcggccagggcaccaagctggaaatcaagagactcgaggacctgaagaacgtgttcccacctgaggtggccgtgttcgagcctagcgaggccgagatcagccacacccagaaagccaccctcgtgtgcctggctaccggcttctaccccgaccatgtggaactgtcttggtgggtcaacggcaaagaggtgcacagcggcgtgtgtaccgacccccagccactgaaagaacagcccgccctgaacgacagccggtactgcctgagcagcagactgagagtgtccgccaccttctggcagaacccccggaaccacttcagatgccaggtgcagttctacggcctgagcgagaacgacgagtggacccaggacagagccaagcccgtgacccagatcgtgtctgccgaagcctggggcagagccgattgcggctttaccagcgagagctaccagcagggcgtgctgagcgccaccatcctgtacgagatcctgctgggcaaggccaccctgtacgccgtgctggtgtctgccctggtgctgatggctatggtcaagcggaaggacagccggggaagggccaagcgatctggatctggagcaacaaacttctcactactcaaacaagcaggtgacgtggaggagaatcccgggcctactagtatggactggatttggcgcatccttttccttgtcggcgctgctaccggcgcgcattccttcgaacaagttcagcttcaacagcctggcgctgagctggtcaaacctggcgcttctgtgaagatgagctgcaaagccagcggctacgccttcagcagctactggatcaactggatgaagcagaaacccggccagggactcgaatggatcggccaaatctatcccggcgacggcgacaccaactacaacggcaagttcaagggcagagccacactgaccgccgatacctctagcagcacagcctacatgcagctgagcagcctgaccagcgaagatagcgccgtgtacttctgtgcccggtccatcacaacagtcgtgggctgcgctatggactattggggccagggaacaagcgtgaccgtgtctagtacgcgtatccagaaccctgatcctgccgtgtaccagctgcgggatagcaagagcagcgacaagagcgtgtgtctgttcaccgacttcgacagccagaccaacgtgtcccagagcaaggactccgacgtgtacatcaccgataagtgcgtgctggacatgcggagcatggacttcaagagcaactccgccgtggcctggtccaacaagtccgatttcgcctgcgccaacgccttcaacaacagcattatccccgaggacacattcttcccaagccccgagagcagctgcgacgtgaagctggtggaaaagagcttcgagacagacaccaacctgaacttccagaacctgagcgtgatcggcttcagaatcctgctgctgaaagtggccggctttaacctgctgatgaccctgcggctgtggtccagc

SEQ ID NO: 4759 - DNA, 3174 bp, Artificial Sequence
  Synthetic Polynucloetide
atggccttaccagtgaccgccttgctcctgccgctggccttgctgctccacgccgccaggccgggcatgcggactgaagacctcccaaaggctgtggtgttcctggagcctcaatggtacagggtgctggagaaggacagtgtgactctgaagtgccagggagcctactcccctgaggacaattccacacagtggtttcacaatgagagcctcatctcaagccaggcctccagctacttcattgacgctgccacagtggacgacagtggagagtacaggtgccagacaaacctctccaccctcagtgacccggtgcagctagaagtccatatcggctggctgttgctccaggcccctcggtgggtgttcaaggaggaagaccctattcacctgaggtgtcacagctggaagaacactgctctgcataaggtcacatatttacagaatggcaaaggcaggaagtattttcatcataattctgacttctacattccaaaagccacactcaaagacagcggctcctacttctgcagggggcttgttgggagtaaaaatgtgtcttcagagactgtgaacatcaccatcactcaaggtttggcagtgtcaaccatctcatcattctttccacctggctaccaaggtaccggcggaggcggatctggcggcggaggtagcggtggcggaggatctgaattcgacatccagatgacacagagccctagcagcctgtctgccagcgtgggagacagagtgaccatcacatgcaaggccagcgaccacatcaacaactggctggcctggtatcagcagaagcctggacaggcccctaagctgctgatctacggcgctaccacactggaaacaggcgtgcccagcagattttctggcagcggctctggcaccgactacaccctgacaatatccagcctccagcctgaggacttcgccacctactactgtcagcagagctggaacaccccttggacattcggccagggcaccaagctggaaatcaagagactcgaggacctgaagaacgtgttcccacctgaggtggccgtgttcgagcctagcgaggccgagatcagccacacccagaaagccaccctcgtgtgcctggctaccggcttctaccccgaccatgtggaactgtcttggtgggtcaacggcaaagaggtgcacagcggcgtgtgtaccgacccccagccactgaaagaacagcccgccctgaacgacagccggtactgcctgagcagcagactgagagtgtccgccaccttctggcagaacccccggaaccacttcagatgccaggtgcagttctacggcctgagcgagaacgacgagtggacccaggacagagccaagcccgtgacccagatcgtgtctgccgaagcctggggcagagccgattgcggctttaccagcgagagctaccagcagggcgtgctgagcgccaccatcctgtacgagatcctgctgggcaaggccaccctgtacgccgtgctggtgtctgccctggtgctgatggctatggtcaagcggaaggacagccggggaagggccaagcgatctggatctggagcaacaaacttctcactactcaaacaagcaggtgacgtggaggagaatcccgggcctactagtatggactggatttggcgcatccttttccttgtcggcgctgctaccggcgcgcattccttcgaacaagttcagcttcaacagcctggcgctgagctggtcaaacctggcgcttctgtgaagatgagctgcaaagccagcggctacgccttcagcagctactggatcaactggatgaagcagaaacccggccagggactcgaatggatcggccaaatctatcccggcgacggcgacaccaactacaacggcaagttcaagggcagagccacactgaccgccgatacctctagcagcacagcctacatgcagctgagcagcctgaccagcgaagatagcgccgtgtacttctgtgcccggtccatcacaacagtcgtgggctgcgctatggactattggggccagggaacaagcgtgaccgtgtctagtacgcgtatccagaaccctgatcctgccgtgtaccagctgcgggatagcaagagcagcgacaagagcgtgtgtctgttcaccgacttcgacagccagaccaacgtgtcccagagcaaggactccgacgtgtacatcaccgataagtgcgtgctggacatgcggagcatggacttcaagagcaactccgccgtggcctggtccaacaagtccgatttcgcctgcgccaacgccttcaacaacagcattatccccgaggacacattcttcccaagccccgagagcagctgcgacgtgaagctggtggaaaagagcttcgagacagacaccaacctgaacttccagaacctgagcgtgatcggcttcagaatcctgctgctgaaagtggccggctttaacctgctgatgaccctgcggctgtggtccagccgcgccaagagaagcggatctggcgtgaagcagaccctgaatttcgacctgctgaagctggctggcgacgtggaatccaacccaggcccttctagaggcgggatccacaccatggctacctacgaggtgctgtgcgaggtggcaagaaagctgggcaccgacgacagagaagtggtgctgttcctgctgaacgtgttcatccctcagcctacactggcccagctgatcggtgcactgagagccctgaaagaggaaggccggctgacctttcctctgctggccgaatgcctgttcagagccggaagaagggatctgctgcgggacctgctgcatctggaccccagatttctggaaagacacctggccggcaccatgagctacttcagcccttaccagctgaccgtgctgcacgttgacggcgaactgtgcgccagagatattcggagcctgatcttcctgagcaaggacaccatcggcagccggtctacccctcagacatttctgcactgggtgtactgcatggaaaacctggacctgctcggccccacagatgtggatgccctgatgtccatgctgagaagcctgagcagagtggacctccagagacaggtgcagacactgatgggactgcacctgagcggacctagccacagccagcactacagacacacccct

SEQ ID NO: 4760 - DNA, 2511 bp, Artificial Sequence
  Synthetic Polynucloetide
atggccttaccagtgaccgccttgctcctgccgctggccttgctgctccacgccgccaggccgggcatgcggactgaagacctcccaaaggctgtggtgttcctggagcctcaatggtacagggtgctggagaaggacagtgtgactctgaagtgccagggagcctactcccctgaggacaattccacacagtggtttcacaatgagagcctcatctcaagccaggcctccagctacttcattgacgctgccacagtggacgacagtggagagtacaggtgccagacaaacctctccaccctcagtgacccggtgcagctagaagtccatatcggctggctgttgctccaggcccctcggtgggtgttcaaggaggaagaccctattcacctgaggtgtcacagctggaagaacactgctctgcataaggtcacatatttacagaatggcaaaggcaggaagtattttcatcataattctgacttctacattccaaaagccacactcaaagacagcggctcctacttctgcagggggcttgttgggagtaaaaatgtgtcttcagagactgtgaacatcaccatcactcaaggtttggcagtgtcaaccatctcatcattctttccacctggctaccaaggtaccggcggaggcggatctggcggcggaggtagcggtggcggaggatctgaattcgacatccagatgacacagagccctagcagcctgtctgccagcgtgggagacagagtgaccatcacatgcaaggccagcgaccacatcaacaactggctggcctggtatcagcagaagcctggacaggcccctaagctgctgatctacggcgctaccacactggaaacaggcgtgcccagcagattttctggcagcggctctggcaccgactacaccctgacaatatccagcctccagcctgaggacttcgccacctactactgtcagcagagctggaacaccccttggacattcggccagggcaccaagctggaaatcaagagactcgagatccagaaccctgatcctgccgtgtaccagctgcgggatagcaagagcagcgacaagagcgtgtgtctgttcaccgacttcgacagccagaccaacgtgtcccagagcaaggactccgacgtgtacatcaccgataagtgcgtgctggacatgcggagcatggacttcaagagcaactccgccgtggcctggtccaacaagtccgatttcgcctgcgccaacgccttcaacaacagcattatccccgaggacacattcttcccaagccccgagagcagctgcgacgtgaagctggtggaaaagagcttcgagacagacaccaacctgaacttccagaacctgagcgtgatcggcttcagaatcctgctgctgaaagtggccggctttaacctgctgatgaccctgcggctgtggtccagccgcgccaagagaagcggatctggcgtgaagcagaccctgaatttcgacctgctgaagctggctggcgacgtggaatccaacccaggccctactagtatggactggatttggcgcatccttttccttgtcggcgctgctaccggcgcgcattccttcgaacaagttcagcttcaacagcctggcgctgagctggtcaaacctggcgcttctgtgaagatgagctgcaaagccagcggctacgccttcagcagctactggatcaactggatgaagcagaaacccggccagggactcgaatggatcggccaaatctatcccggcgacggcgacaccaactacaacggcaagttcaagggcagagccacactgaccgccgatacctctagcagcacagcctacatgcagctgagcagcctgaccagcgaagatagcgccgtgtacttctgtgcccggtccatcacaacagtcgtgggctgcgctatggactattggggccagggaacaagcgtgaccgtgtctagtacgcgtgaggacctgaagaacgtgttcccacctgaggtggccgtgttcgagcctagcgaggccgagatcagccacacccagaaagccaccctcgtgtgcctggctaccggcttctaccccgaccatgtggaactgtcttggtgggtcaacggcaaagaggtgcacagcggcgtgtgtaccgacccccagccactgaaagaacagcccgccctgaacgacagccggtactgcctgagcagcagactgagagtgtccgccaccttctggcagaacccccggaaccacttcagatgccaggtgcagttctacggcctgagcgagaacgacgagtggacccaggacagagccaagcccgtgacccagatcgtgtctgccgaagcctggggcagagccgattgcggctttaccagcgagagctaccagcagggcgtgctgagcgccaccatcctgtacgagatcctgctgggcaaggccaccctgtacgccgtgctggtgtctgccctggtgctgatggctatggtcaagcggaaggacagccgggga

SEQ ID NO: 4761 - DNA, 3177 bp, Artificial Sequence
  Synthetic Polynucloetide
atggccttaccagtgaccgccttgctcctgccgctggccttgctgctccacgccgccaggccgggcatgcggactgaagacctcccaaaggctgtggtgttcctggagcctcaatggtacagggtgctggagaaggacagtgtgactctgaagtgccagggagcctactcccctgaggacaattccacacagtggtttcacaatgagagcctcatctcaagccaggcctccagctacttcattgacgctgccacagtggacgacagtggagagtacaggtgccagacaaacctctccaccctcagtgacccggtgcagctagaagtccatatcggctggctgttgctccaggcccctcggtgggtgttcaaggaggaagaccctattcacctgaggtgtcacagctggaagaacactgctctgcataaggtcacatatttacagaatggcaaaggcaggaagtattttcatcataattctgacttctacattccaaaagccacactcaaagacagcggctcctacttctgcagggggcttgttgggagtaaaaatgtgtcttcagagactgtgaacatcaccatcactcaaggtttggcagtgtcaaccatctcatcattctttccacctggctaccaaggtaccggcggaggcggatctggcggcggaggtagcggtggcggaggatctgaattcgacatccagatgacacagagccctagcagcctgtctgccagcgtgggagacagagtgaccatcacatgcaaggccagcgaccacatcaacaactggctggcctggtatcagcagaagcctggacaggcccctaagctgctgatctacggcgctaccacactggaaacaggcgtgcccagcagattttctggcagcggctctggcaccgactacaccctgacaatatccagcctccagcctgaggacttcgccacctactactgtcagcagagctggaacaccccttggacattcggccagggcaccaagctggaaatcaagagactcgagatccagaaccctgatcctgccgtgtaccagctgcgggatagcaagagcagcgacaagagcgtgtgtctgttcaccgacttcgacagccagaccaacgtgtcccagagcaaggactccgacgtgtacatcaccgataagtgcgtgctggacatgcggagcatggacttcaagagcaactccgccgtggcctggtccaacaagtccgatttcgcctgcgccaacgccttcaacaacagcattatccccgaggacacattcttcccaagccccgagagcagctgcgacgtgaagctggtggaaaagagcttcgagacagacaccaacctgaacttccagaacctgagcgtgatcggcttcagaatcctgctgctgaaagtggccggctttaacctgctgatgaccctgcggctgtggtccagccgcgccaagagaagcggatctggcgtgaagcagaccctgaatttcgacctgctgaagctggctggcgacgtggaatccaacccaggccctactagtatggactggatttggcgcatccttttccttgtcggcgctgctaccggcgcgcattccttcgaacaagttcagcttcaacagcctggcgctgagctggtcaaacctggcgcttctgtgaagatgagctgcaaagccagcggctacgccttcagcagctactggatcaactggatgaagcagaaacccggccagggactcgaatggatcggccaaatctatcccggcgacggcgacaccaactacaacggcaagttcaagggcagagccacactgaccgccgatacctctagcagcacagcctacatgcagctgagcagcctgaccagcgaagatagcgccgtgtacttctgtgcccggtccatcacaacagtcgtgggctgcgctatggactattggggccagggaacaagcgtgaccgtgtctagtacgcgtgaggacctgaagaacgtgttcccacctgaggtggccgtgttcgagcctagcgaggccgagatcagccacacccagaaagccaccctcgtgtgcctggctaccggcttctaccccgaccatgtggaactgtcttggtgggtcaacggcaaagaggtgcacagcggcgtgtgtaccgacccccagccactgaaagaacagcccgccctgaacgacagccggtactgcctgagcagcagactgagagtgtccgccaccttctggcagaacccccggaaccacttcagatgccaggtgcagttctacggcctgagcgagaacgacgagtggacccaggacagagccaagcccgtgacccagatcgtgtctgccgaagcctggggcagagccgattgcggctttaccagcgagagctaccagcagggcgtgctgagcgccaccatcctgtacgagatcctgctgggcaaggccaccctgtacgccgtgctggtgtctgccctggtgctgatggctatggtcaagcggaaggacagccggggaagggccaagcgatctggatctggagcaacaaacttctcactactcaaacaagcaggtgacgtggaggagaatcccgggccttctagaggcgggatccacaccatggctacctacgaggtgctgtgcgaggtggcaagaaagctgggcaccgacgacagagaagtggtgctgttcctgctgaacgtgttcatccctcagcctacactggcccagctgatcggtgcactgagagccctgaaagaggaaggccggctgacctttcctctgctggccgaatgcctgttcagagccggaagaagggatctgctgcgggacctgctgcatctggaccccagatttctggaaagacacctggccggcaccatgagctacttcagcccttaccagctgaccgtgctgcacgttgacggcgaactgtgcgccagagatattcggagcctgatcttcctgagcaaggacaccatcggcagccggtctacccctcagacatttctgcactgggtgtactgcatggaaaacctggacctgctcggccccacagatgtggatgccctgatgtccatgctgagaagcctgagcagagtggacctccagagacaggtgcagacactgatgggactgcacctgagcggacctagccacagccagcactacagacacacccct

SEQ ID NO: 4762 - DNA, 3336 bp, Artificial Sequence
  Synthetic Polynucloetide
atggccttaccagtgaccgccttgctcctgccgctggccttgctgctccacgccgccaggccgctcgaggggaaaccaattcccaaccctcttctgggactggattcaaccggcagcggcgaggacctgaagaacgtgttcccacctgaggtggccgtgttcgagcctagcaaggccgagatcgcccacacccagaaagccaccctcgtgtgcctggctaccggcttctaccccgaccatgtggaactgtcttggtgggtcaacggcaaagaggtgcacagcggcgtgtgtaccgacccccagccactgaaagaacagcccgccctgaacgacagccggtactgcctgagcagcagactgagagtgtccgccaccttctggcagaacccccggaaccacttcagatgccaggtgcagttctacggcctgagcgagaacgacgagtggacccaggacagagccaagcccgtgacccagatcgtgtctgccgaagcctggggcagagccgattgcggcatcaccagcgccagctaccaccagggcgtgctgagcgccaccatcctgtacgagatcctgctgggcaaggccaccctgtacgccgtgctggtgtctgccctggtgctgatggctatggtcaagcggaaggacagccggggaagggccaagcgatctggatctggagcaacaaacttctcactactcaaacaagcaggtgacgtggaggagaatcccgggcctactagcatggccttaccagtgaccgccttgctcctgccgctggccttgctgctccacgccgccaggccgggcatgcggactgaagacctcccaaaggctgtggtgttcctggagcctcaatggtacagggtgctggagaaggacagtgtgactctgaagtgccagggagcctactcccctgaggacaattccacacagtggtttcacaatgagagcctcatctcaagccaggcctccagctacttcattgacgctgccacagtggacgacagtggagagtacaggtgccagacaaacctctccaccctcagtgacccggtgcagctagaagtccatatcggctggctgttgctccaggcccctcggtgggtgttcaaggaggaagaccctattcacctgaggtgtcacagctggaagaacactgctctgcataaggtcacatatttacagaatggcaaaggcaggaagtattttcatcataattctgacttctacattccaaaagccacactcaaagacagcggctcctacttctgcagggggcttgttgggagtaaaaatgtgtcttcagagactgtgaacatcaccatcactcaaggtttggcagtgtcaaccatctcatcattctttccacctggctaccaaggtaccggcggaggcggatctggcggcggaggtagcggtggcggaggatctgaattcgacatccagatgacacagagccctagcagcctgtctgccagcgtgggagacagagtgaccatcacatgcaaggccagcgaccacatcaacaactggctggcctggtatcagcagaagcctggacaggcccctaagctgctgatctacggcgctaccacactggaaacaggcgtgcccagcagattttctggcagcggctctggcaccgactacaccctgacaatatccagcctccagcctgaggacttcgccacctactactgtcagcagagctggaacaccccttggacattcggccagggcaccaagctggaaatcaagagaggcggaggcggaagtggaggcggaggatctggcggcggaggctctcaagttcagcttcaacagcctggcgctgagctggtcaaacctggcgcttctgtgaagatgagctgcaaagccagcggctacgccttcagcagctactggatcaactggatgaagcagaaacccggccagggactcgaatggatcggccaaatctatcccggcgacggcgacaccaactacaacggcaagttcaagggcagagccacactgaccgccgatacctctagcagcacagcctacatgcagctgagcagcctgaccagcgaagatagcgccgtgtacttctgtgcccggtccatcacaacagtcgtgggctgcgctatggactattggggccagggaacaagcgtgaccgtgtctagtacgcgtgagcagaaactgatctcggaagaggatgggagcggcatccagaaccctgatcctgccgtgtaccagctgcgggatagcaagagcagcgacaagagcgtgtgtctgttcaccgacttcgacagccagaccaacgtgtcccagagcaaggactccgacgtgtacatcaccgataagtgcgtgctggacatgcggagcatggacttcaagagcaactccgccgtggcctggtccaacaagtccgatttcgcctgcgccaacgccttcaacaacagcattatccccgaggacacattcttcccaagcagcgacgtgccctgcgacgtgaagctggtggaaaagagcttcgagacagacaccaacctgaacttccagaacctgagcgtgatcggcttcagaatcctgctgctgaaagtggccggctttaacctgctgatgaccctgcggctgtggtccagccgcgccaagagaagcggatctggcgtgaagcagaccctgaatttcgacctgctgaagctggctggcgacgtggaatccaacccaggcccttctagaggccatatgaccgagtacaagcccacggtgcgcctcgccacccgcgacgacgtccccagggccgtacgcaccctcgccgccgcgttcgccgactaccccgccacgcgccacaccgtcgatccggaccgccacatcgagcgggtcaccgagctgcaagaactcttcctcacgcgcgtcgggctcgacatcggcaaggtgtgggtcgcggacgacggcgccgcggtggcggtctggaccacgccggagagcgtcgaagcgggggcggtgttcgccgagatcggcccgcgcatggccgagttgagcggttcccggctggccgcgcagcaacagatggaaggcctcctggcgccgcaccggcccaaggagcccgcgtggttcctggccaccgtcggcgtctcgcccgaccaccagggcaagggtctgggcagcgccgtcgtgctccccggagtggaggcggccgagcgcgccggggtgcccgccttcctggagacctccgcgccccgcaacctccccttctacgagcggctcggcttcaccgtcaccgccgacgtcgaggtgcccgaaggaccgcgcacctggtgcatgacccgcaagcccggtgcctga

SEQ ID NO: 4763 - DNA, 3339 bp, Artificial Sequence
  Synthetic Polynucloetide
atggccttaccagtgaccgccttgctcctgccgctggccttgctgctccacgccgccaggccgctcgagcagaaactgatctcggaagaggatctgggctccggcgatcgccctgatcctgccgtgtaccagctgcgggatagcaagagcagcgacaagagcgtgtgtctgttcaccgacttcgacagccagaccaacgtgtcccagagcaaggactccgacgtgtacatcaccgataagtgcgtgctggacatgcggagcatggacttcaagagcaactccgccgtggcctggtccaacaagtccgatttcgcctgcgccaacgccttcaacaacagcattatccccgaggacacattcttcccaagccccgagagcagctgcgacgtgaagctggtggaaaagagcttcgagacagacaccaacctgaacttccagaacctgagcgtgatcggcttcagaatcctgctgctgaaagtggccggctttaacctgctgatgaccctgcggctgtggtccagctctagtcgcgccaagagaagcggatctggcgtgaagcagaccctgaatttcgacctgctgaagctggctggcgacgtggaatccaacccaggccccactagcatggccttaccagtgaccgccttgctcctgccgctggccttgctgctccacgccgccaggccgggcatgcggactgaagacctcccaaaggctgtggtgttcctggagcctcaatggtacagggtgctggagaaggacagtgtgactctgaagtgccagggagcctactcccctgaggacaattccacacagtggtttcacaatgagagcctcatctcaagccaggcctccagctacttcattgacgctgccacagtggacgacagtggagagtacaggtgccagacaaacctctccaccctcagtgacccggtgcagctagaagtccatatcggctggctgttgctccaggcccctcggtgggtgttcaaggaggaagaccctattcacctgaggtgtcacagctggaagaacactgctctgcataaggtcacatatttacagaatggcaaaggcaggaagtattttcatcataattctgacttctacattccaaaagccacactcaaagacagcggctcctacttctgcagggggcttgttgggagtaaaaatgtgtcttcagagactgtgaacatcaccatcactcaaggtttggcagtgtcaaccatctcatcattctttccacctggctaccaaggtaccggcggaggcggatctggcggcggaggtagcggtggcggaggatctgaattcgacatccagatgacacagagccctagcagcctgtctgccagcgtgggagacagagtgaccatcacatgcaaggccagcgaccacatcaacaactggctggcctggtatcagcagaagcctggacaggcccctaagctgctgatctacggcgctaccacactggaaacaggcgtgcccagcagattttctggcagcggctctggcaccgactacaccctgacaatatccagcctccagcctgaggacttcgccacctactactgtcagcagagctggaacaccccttggacattcggccagggcaccaagctggaaatcaagagaggcggaggcggaagtggaggcggaggatctggcggcggaggctctcaagttcagcttcaacagcctggcgctgagctggtcaaacctggcgcttctgtgaagatgagctgcaaagccagcggctacgccttcagcagctactggatcaactggatgaagcagaaacccggccagggactcgaatggatcggccaaatctatcccggcgacggcgacaccaactacaacggcaagttcaagggcagagccacactgaccgccgatacctctagcagcacagcctacatgcagctgagcagcctgaccagcgaagatagcgccgtgtacttctgtgcccggtccatcacaacagtcgtgggctgcgctatggactattggggccagggaacaagcgtgaccgtgtctagtacgcgtgggaaaccaattcccaaccctcttctgggactggattcaaccggcagcggcgaggacctgaagaacgtgttcccacctgaggtggccgtgttcgagcctagcgaggccgagatcagccacacccagaaagccaccctcgtgtgcctggctaccggcttctaccccgaccatgtggaactgtcttggtgggtcaacggcaaagaggtgcacagcggcgtgtgtaccgacccccagccactgaaagaacagcccgccctgaacgacagccggtactgcctgagcagcagactgagagtgtccgccaccttctggcagaacccccggaaccacttcagatgccaggtgcagttctacggcctgagcgagaacgacgagtggacccaggacagagccaagcccgtgacccagatcgtgtctgccgaagcctggggcagagccgattgcggctttaccagcgagagctaccagcagggcgtgctgagcgccaccatcctgtacgagatcctgctgggcaaggccaccctgtacgccgtgctggtgtctgccctggtgctgatggctatggtcaagcggaaggacagccggggaagggccaagcgatctggatctggagcaacaaacttctcactactcaaacaagcaggtgacgtggaggagaatcccgggccttctagaggccatatgaccgagtacaagcccacggtgcgcctcgccacccgcgacgacgtccccagggccgtacgcaccctcgccgccgcgttcgccgactaccccgccacgcgccacaccgtcgatccggaccgccacatcgagcgggtcaccgagctgcaagaactcttcctcacgcgcgtcgggctcgacatcggcaaggtgtgggtcgcggacgacggcgccgcggtggcggtctggaccacgccggagagcgtcgaagcgggggcggtgttcgccgagatcggcccgcgcatggccgagttgagcggttcccggctggccgcgcagcaacagatggaaggcctcctggcgccgcaccggcccaaggagcccgcgtggttcctggccaccgtcggcgtctcgcccgaccaccagggcaagggtctgggcagcgccgtcgtgctccccggagtggaggcggccgagcgcgccggggtgcccgccttcctggagacctccgcgccccgcaacctccccttctacgagcggctcggcttcaccgtcaccgccgacgtcgaggtgcccgaaggaccgcgcacctggtgcatgacccgcaagcccggtgcctga

SEQ ID NO: 4764 - DNA, 3201 bp, Artificial Sequence
  Synthetic Polynucloetide
atggccttaccagtgaccgccttgctcctgccgctggccttgctgctccacgccgccaggccgggcatgcggactgaagacctcccaaaggctgtggtgttcctggagcctcaatggtacagggtgctggagaaggacagtgtgactctgaagtgccagggagcctactcccctgaggacaattccacacagtggtttcacaatgagagcctcatctcaagccaggcctccagctacttcattgacgctgccacagtggacgacagtggagagtacaggtgccagacaaacctctccaccctcagtgacccggtgcagctagaagtccatatcggctggctgttgctccaggcccctcggtgggtgttcaaggaggaagaccctattcacctgaggtgtcacagctggaagaacactgctctgcataaggtcacatatttacagaatggcaaaggcaggaagtattttcatcataattctgacttctacattccaaaagccacactcaaagacagcggctcctacttctgcagggggcttgttgggagtaaaaatgtgtcttcagagactgtgaacatcaccatcactcaaggtttggcagtgtcaaccatctcatcattctttccacctggctaccaaggtaccggcggaggcggatctggcggcggaggtagcggtggcggaggatctgaattcgacatccagatgacacagagccctagcagcctgtctgccagcgtgggagacagagtgaccatcacatgcaaggccagcgaccacatcaacaactggctggcctggtatcagcagaagcctggacaggcccctaagctgctgatctacggcgctaccacactggaaacaggcgtgcccagcagattttctggcagcggctctggcaccgactacaccctgacaatatccagcctccagcctgaggacttcgccacctactactgtcagcagagctggaacaccccttggacattcggccagggcaccaagctggaaatcaagagactcgaggacctgaagaacgtgttcccacctgaggtggccgtgttcgagcctagcgaggccgagatcagccacacccagaaagccaccctcgtgtgcctggctaccggcttctaccccgaccatgtggaactgtcttggtgggtcaacggcaaagaggtgcacagcggcgtgtctaccgacccccagccactgaaagaacagcccgccctgaacgacagccggtactgcctgagcagcagactgagagtgtccgccaccttctggcagaacccccggaaccacttcagatgccaggtgcagttctacggcctgagcgagaacgacgagtggacccaggacagagccaagcccgtgacccagatcgtgtctgccgaagcctggggcagagccgattgcggctttaccagcgagagctaccagcagggcgtgctgagcgccaccatcctgtacgagatcctgctgggcaaggccaccctgtacgccgtgctggtgtctgccctggtgctgatggctatggtcaagcggaaggacagccggggaagggccaagcgatctggatctggagcaacaaacttctcactactcaaacaagcaggtgacgtggaggagaatcccgggcctactagtatggactggatttggcgcatccttttccttgtcggcgctgctaccggcgcgcattccttcgaacaagttcagcttcaacagcctggcgctgagctggtcaaacctggcgcttctgtgaagatgagctgcaaagccagcggctacgccttcagcagctactggatcaactggatgaagcagaaacccggccagggactcgaatggatcggccaaatctatcccggcgacggcgacaccaactacaacggcaagttcaagggcagagccacactgaccgccgatacctctagcagcacagcctacatgcagctgagcagcctgaccagcgaagatagcgccgtgtacttctgtgcccggtccatcacaacagtcgtgggctgcgctatggactattggggccagggaacaagcgtgaccgtgtctagtacgcgtatccagaaccctgatcctgccgtgtaccagctgcgggatagcaagagcagcgacaagagcgtgtgtctgttcaccgacttcgacagccagaccaacgtgtcccagagcaaggactccgacgtgtacatcaccgataagaccgtgctggacatgcggagcatggacttcaagagcaactccgccgtggcctggtccaacaagtccgatttcgcctgcgccaacgccttcaacaacagcattatccccgaggacacattcttcccaagccccgagagcagctgcgacgtgaagctggtggaaaagagcttcgagacagacaccaacctgaacttccagaacctgagcgtgatcggcttcagaatcctgctgctgaaagtggccggctttaacctgctgatgaccctgcggctgtggtccagccgcgccaagagaagcggatctggcgtgaagcagaccctgaatttcgacctgctgaagctggctggcgacgtggaatccaacccaggcccttctagaggccatatgaccgagtacaagcccacggtgcgcctcgccacccgcgacgacgtccccagggccgtacgcaccctcgccgccgcgttcgccgactaccccgccacgcgccacaccgtcgatccggaccgccacatcgagcgggtcaccgagctgcaagaactcttcctcacgcgcgtcgggctcgacatcggcaaggtgtgggtcgcggacgacggcgccgcggtggcggtctggaccacgccggagagcgtcgaagcgggggcggtgttcgccgagatcggcccgcgcatggccgagttgagcggttcccggctggccgcgcagcaacagatggaaggcctcctggcgccgcaccggcccaaggagcccgcgtggttcctggccaccgtcggcgtctcgcccgaccaccagggcaagggtctgggcagcgccgtcgtgctccccggagtggaggcggccgagcgcgccggggtgcccgccttcctggagacctccgcgccccgcaacctccccttctacgagcggctcggcttcaccgtcaccgccgacgtcgaggtgcccgaaggaccgcgcacctggtgcatgacccgcaagcccggtgcctga

SEQ ID NO: 4765 - DNA, 3447 bp, Artificial Sequence
  Synthetic Polynucloetide
atggccttaccagtgaccgccttgctcctgccgctggccttgctgctccacgccgccaggccgggcatgcggactgaagacctcccaaaggctgtggtgttcctggagcctcaatggtacagggtgctggagaaggacagtgtgactctgaagtgccagggagcctactcccctgaggacaattccacacagtggtttcacaatgagagcctcatctcaagccaggcctccagctacttcattgacgctgccacagtggacgacagtggagagtacaggtgccagacaaacctctccaccctcagtgacccggtgcagctagaagtccatatcggctggctgttgctccaggcccctcggtgggtgttcaaggaggaagaccctattcacctgaggtgtcacagctggaagaacactgctctgcataaggtcacatatttacagaatggcaaaggcaggaagtattttcatcataattctgacttctacattccaaaagccacactcaaagacagcggctcctacttctgcagggggcttgttgggagtaaaaatgtgtcttcagagactgtgaacatcaccatcactcaaggtttggcagtgtcaaccatctcatcattctttccacctggctaccaaggtaccggcggaggcggatctggcggcggaggtagcggtggcggaggatctgaattcgacatccagatgacacagagccctagcagcctgtctgccagcgtgggagacagagtgaccatcacatgcaaggccagcgaccacatcaacaactggctggcctggtatcagcagaagcctggacaggcccctaagctgctgatctacggcgctaccacactggaaacaggcgtgcccagcagattttctggcagcggctctggcaccgactacaccctgacaatatccagcctccagcctgaggacttcgccacctactactgtcagcagagctggaacaccccttggacattcggccagggcaccaagctggaaatcaagagactcgaggacctgaagaacgtgttcccacctgaggtggccgtgttcgagcctagcgaggccgagatcagccacacccagaaagccaccctcgtgtgcctggctaccggcttctaccccgaccatgtggaactgtcttggtgggtcaacggcaaagaggtgcacagcggcgtgtctaccgacccccagccactgaaagaacagcccgccctgaacgacagccggtactgcctgagcagcagactgagagtgtccgccaccttctggcagaacccccggaaccacttcagatgccaggtgcagttctacggcctgagcgagaacgacgagtggacccaggacagagccaagcccgtgacccagatcgtgtctgccgaagcctggggcagagccgattgcggctttaccagcgagagctaccagcagggcgtgctgagcgccaccatcctgtacgagatcctgctgggcaaggccaccctgtacgccgtgctggtgtctgccctggtgctgatggctatggtcaagcggaaggacagccggggaagggccaagcgatctggatctggagcaacaaacttctcactactcaaacaagcaggtgacgtggaggagaatcccgggcctactagtatggactggatttggcgcatccttttccttgtcggcgctgctaccggcgcgcattccttcgaacaagttcagcttcaacagcctggcgctgagctggtcaaacctggcgcttctgtgaagatgagctgcaaagccagcggctacgccttcagcagctactggatcaactggatgaagcagaaacccggccagggactcgaatggatcggccaaatctatcccggcgacggcgacaccaactacaacggcaagttcaagggcagagccacactgaccgccgatacctctagcagcacagcctacatgcagctgagcagcctgaccagcgaagatagcgccgtgtacttctgtgcccggtccatcacaacagtcgtgggctgcgctatggactattggggccagggaacaagcgtgaccgtgtctagtacgcgtgagcagaaactgatctcggaagaggatgggagcggcaccccattcccttctctggcccctcccatcatgctgctggtggacggcaagcagcagatggtggtcgtgtgcctggtgctggatgtggccccacctggactggacagccccatctggtttagcgccggcaatggctctgccctggacgcctttacctacggcccaagccctgccaccgatggcacctggacaaatctggcccacctgagcctgcccagcgaggaactggcttcttgggagcctctcgtgtgccacacaggacctggcgctgagggacacagcagatccacccagcctatgcacctgtctggcgaggccagcaccgccagaacctgtcctcaggaacctctgagaggcacccctggcggagcactgtggctgggagtgctgagactgctgctgttcaagctgctgctgtttgacctgctgctgacctgctcctgtctgtgcgatcctgccggccctctgccttctcctgccaccaccacaagactgagagccctgggcagccacagactgcaccctgccacagagacaggcggcagagaggccacaagcagccctagaccccagcccagagacagaagatggggcgataccccccctggcagaaagcctggatctccagtccgcgccaagagaagcggatctggcgtgaagcagaccctgaatttcgacctgctgaagctggctggcgacgtggaatccaacccaggcccttctagaggccatatgaccgagtacaagcccacggtgcgcctcgccacccgcgacgacgtccccagggccgtacgcaccctcgccgccgcgttcgccgactaccccgccacgcgccacaccgtcgatccggaccgccacatcgagcgggtcaccgagctgcaagaactcttcctcacgcgcgtcgggctcgacatcggcaaggtgtgggtcgcggacgacggcgccgcggtggcggtctggaccacgccggagagcgtcgaagcgggggcggtgttcgccgagatcggcccgcgcatggccgagttgagcggttcccggctggccgcgcagcaacagatggaaggcctcctggcgccgcaccggcccaaggagcccgcgtggttcctggccaccgtcggcgtctcgcccgaccaccagggcaagggtctgggcagcgccgtcgtgctccccggagtggaggcggccgagcgcgccggggtgcccgccttcctggagacctccgcgccccgcaacctccccttctacgagcggctcggcttcaccgtcaccgccgacgtcgaggtgcccgaaggaccgcgcacctggtgcatgacccgcaagcccggtgcctga

SEQ ID NO: 4766 - DNA, 3501 bp, Artificial Sequence
  Synthetic Polynucloetide
atggccttaccagtgaccgccttgctcctgccgctggccttgctgctccacgccgccaggccgctcgaggacctgaagaacgtgttcccacctgaggtggccgtgttcgagcctagcgaggccgagatcagccacacccagaaagccaccctcgtgtgcctggctaccggcttctaccccgaccatgtggaactgtcttggtgggtcaacggcaaagaggtgcacagcggcgtgtctaccgacccccagccactgaaagaacagcccgccctgaacgacagccggtactgcctgagcagcagactgagagtgtccgccaccttctggcagaacccccggaaccacttcagatgccaggtgcagttctacggcctgagcgagaacgacgagtggacccaggacagagccaagcccgtgacccagatcgtgtctgccgaagcctggggcagagccgattgcggctttaccagcgagagctaccagcagggcgtgctgagcgccaccatcctgtacgagatcctgctgggcaaggccaccctgtacgccgtgctggtgtctgccctggtgctgatggctatggtcaagcggaaggacagccggggaagggccaagcgatctggatctggagcaacaaacttctcactactcaaacaagcaggtgacgtggaggagaatcccgggcctactagcatggccttaccagtgaccgccttgctcctgccgctggccttgctgctccacgccgccaggccgggcatgcggactgaagacctcccaaaggctgtggtgttcctggagcctcaatggtacagggtgctggagaaggacagtgtgactctgaagtgccagggagcctactcccctgaggacaattccacacagtggtttcacaatgagagcctcatctcaagccaggcctccagctacttcattgacgctgccacagtggacgacagtggagagtacaggtgccagacaaacctctccaccctcagtgacccggtgcagctagaagtccatatcggctggctgttgctccaggcccctcggtgggtgttcaaggaggaagaccctattcacctgaggtgtcacagctggaagaacactgctctgcataaggtcacatatttacagaatggcaaaggcaggaagtattttcatcataattctgacttctacattccaaaagccacactcaaagacagcggctcctacttctgcagggggcttgttgggagtaaaaatgtgtcttcagagactgtgaacatcaccatcactcaaggtttggcagtgtcaaccatctcatcattctttccacctggctaccaaggtaccggcggaggcggatctggcggcggaggtagcggtggcggaggatctgaattcgacatccagatgacacagagccctagcagcctgtctgccagcgtgggagacagagtgaccatcacatgcaaggccagcgaccacatcaacaactggctggcctggtatcagcagaagcctggacaggcccctaagctgctgatctacggcgctaccacactggaaacaggcgtgcccagcagattttctggcagcggctctggcaccgactacaccctgacaatatccagcctccagcctgaggacttcgccacctactactgtcagcagagctggaacaccccttggacattcggccagggcaccaagctggaaatcaagagaggcggaggcggaagtggaggcggaggatctggcggcggaggctctcaagttcagcttcaacagcctggcgctgagctggtcaaacctggcgcttctgtgaagatgagctgcaaagccagcggctacgccttcagcagctactggatcaactggatgaagcagaaacccggccagggactcgaatggatcggccaaatctatcccggcgacggcgacaccaactacaacggcaagttcaagggcagagccacactgaccgccgatacctctagcagcacagcctacatgcagctgagcagcctgaccagcgaagatagcgccgtgtacttctgtgcccggtccatcacaacagtcgtgggctgcgctatggactattggggccagggaacaagcgtgaccgtgtctagtacgcgtgagcagaaactgatctcggaagaggatctggggagcggcaccccattcccttctctggcccctcccatcatgctgctggtggacggcaagcagcagatggtggtcgtgtgcctggtgctggatgtggccccacctggactggacagccccatctggtttagcgccggcaatggctctgccctggacgcctttacctacggcccaagccctgccaccgatggcacctggacaaatctggcccacctgagcctgcccagcgaggaactggcttcttgggagcctctcgtgtgccacacaggacctggcgctgagggacacagcagatccacccagcctatgcacctgtctggcgaggccagcaccgccagaacctgtcctcaggaacctctgagaggcacccctggcggagcactgtggctgggagtgctgagactgctgctgttcaagctgctgctgtttgacctgctgctgacctgctcctgtctgtgcgatcctgccggccctctgccttctcctgccaccaccacaagactgagagccctgggcagccacagactgcaccctgccacagagacaggcggcagagaggccacaagcagccctagaccccagcccagagacagaagatggggcgataccccccctggcagaaagcctggatctccagtccgcgccaagagaagcggatctggcgtgaagcagaccctgaatttcgacctgctgaagctggctggcgacgtggaatccaacccaggcccttctagatctagaggccatatgaccgagtacaagcccacggtgcgcctcgccacccgcgacgacgtccccagggccgtacgcaccctcgccgccgcgttcgccgactaccccgccacgcgccacaccgtcgatccggaccgccacatcgagcgggtcaccgagctgcaagaactcttcctcacgcgcgtcgggctcgacatcggcaaggtgtgggtcgcggacgacggcgccgcggtggcggtctggaccacgccggagagcgtcgaagcgggggcggtgttcgccgagatcggcccgcgcatggccgagttgagcggttcccggctggccgcgcagcaacagatggaaggcctcctggcgccgcaccggcccaaggagcccgcgtggttcctggccaccgtcggcgtctcgcccgaccaccagggcaagggtctgggcagcgccgtcgtgctccccggagtggaggcggccgagcgcgccggggtgcccgccttcctggagacctccgcgccccgcaacctccccttctacgagcggctcggcttcaccgtcaccgccgacgtcgaggtgcccgaaggaccgcgcacctggtgcatgacccgcaagcccggtgcctga

SEQ ID NO: 4767 - DNA, 3312 bp, Artificial Sequence
  Synthetic Polynucloetide
atggccttaccagtgaccgccttgctcctgccgctggccttgctgctccacgccgccaggccgggcatgcggactgaagacctcccaaaggctgtggtgttcctggagcctcaatggtacagggtgctggagaaggacagtgtgactctgaagtgccagggagcctactcccctgaggacaattccacacagtggtttcacaatgagagcctcatctcaagccaggcctccagctacttcattgacgctgccacagtggacgacagtggagagtacaggtgccagacaaacctctccaccctcagtgacccggtgcagctagaagtccatatcggctggctgttgctccaggcccctcggtgggtgttcaaggaggaagaccctattcacctgaggtgtcacagctggaagaacactgctctgcataaggtcacatatttacagaatggcaaaggcaggaagtattttcatcataattctgacttctacattccaaaagccacactcaaagacagcggctcctacttctgcagggggcttgttgggagtaaaaatgtgtcttcagagactgtgaacatcaccatcactcaaggtttggcagtgtcaaccatctcatcattctttccacctggctaccaaggtaccggcggaggcggatctggcggcggaggtagcggtggcggaggatctgaattcgacatccagatgacacagagccctagcagcctgtctgccagcgtgggagacagagtgaccatcacatgcaaggccagcgaccacatcaacaactggctggcctggtatcagcagaagcctggacaggcccctaagctgctgatctacggcgctaccacactggaaacaggcgtgcccagcagattttctggcagcggctctggcaccgactacaccctgacaatatccagcctccagcctgaggacttcgccacctactactgtcagcagagctggaacaccccttggacattcggccagggcaccaagctggaaatcaagagactcgaggggaaaccaattcccaaccctcttctgggactggattcaaccggcagcggcgacaagcagctggacgccgacgtgtcccccaagcctaccatcttcctgccctctatcgccgagacaaagctccagaaggccggcacctacctgtgcctgctggaaaagttcttcccagatgtgattaagatccactggcaggaaaagaagtccaacaccatcctgggcagccaggaaggcaacaccatgaagaccaacgacacctacatgaagttcagctggctgaccgtgcccgagaagtccctggacaaagaacacagatgcatcgtgcggcacgaaaacaacaagaacggcgtggaccaggaaatcatcttcccacccatcaagaccgatgtgattacaatggaccccaaggacaactgctccaaggacgccaacgataccctgctgctccagctgaccaacaccagcgcctactacatgtacttgttgctgctgctgaagtccgtggtgtacttcgccatcatcacatgctgcctgctgcggagaaccgccttctgctgcaacggcgagaagtctagggccaagcgatctggatctggagcaacaaacttctcactactcaaacaagcaggtgacgtggaggagaatcccgggcctactagtatggactggatttggcgcatccttttccttgtcggcgctgctaccggcgcgcattccttcgaacaagttcagcttcaacagcctggcgctgagctggtcaaacctggcgcttctgtgaagatgagctgcaaagccagcggctacgccttcagcagctactggatcaactggatgaagcagaaacccggccagggactcgaatggatcggccaaatctatcccggcgacggcgacaccaactacaacggcaagttcaagggcagagccacactgaccgccgatacctctagcagcacagcctacatgcagctgagcagcctgaccagcgaagatagcgccgtgtacttctgtgcccggtccatcacaacagtcgtgggctgcgctatggactattggggccagggaacaagcgtgaccgtgtctagtacgcgtgagcagaaactgatctcggaagaggatgggagcggcagccagcctcacaccaagcccagcgtgttcgtgatgaagaacggcaccaacgtggcctgcctcgtgaaagagttctaccccaaggacatcaggatcaacctggtgtccagcaagaagatcaccgagttcgaccccgccatcgtgatctcccccagcggcaagtacaacgccgtgaagctggggaagtacgaggacagcaacagcgtgacctgctccgtgcagcacgacaacaagaccgtgcacagcaccgactttgaagtgaaaaccgactccaccgaccacgtgaagcccaaagagacagagaacaccaagcagcccagcaagagctgccacaagcccaaggccatcgtgcacaccgagaaagtgaacatgatgagcctgaccgtgctgggcctgcggatgctgttcgccaaaaccgtggccgtgaacttcctgctgaccgccaagctgttcttcctccgcgccaagagaagcggatctggcgtgaagcagaccctgaatttcgacctgctgaagctggctggcgacgtggaatccaacccaggcccttctagaggccatatgaccgagtacaagcccacggtgcgcctcgccacccgcgacgacgtccccagggccgtacgcaccctcgccgccgcgttcgccgactaccccgccacgcgccacaccgtcgatccggaccgccacatcgagcgggtcaccgagctgcaagaactcttcctcacgcgcgtcgggctcgacatcggcaaggtgtgggtcgcggacgacggcgccgcggtggcggtctggaccacgccggagagcgtcgaagcgggggcggtgttcgccgagatcggcccgcgcatggccgagttgagcggttcccggctggccgcgcagcaacagatggaaggcctcctggcgccgcaccggcccaaggagcccgcgtggttcctggccaccgtcggcgtctcgcccgaccaccagggcaagggtctgggcagcgccgtcgtgctccccggagtggaggcggccgagcgcgccggggtgcccgccttcctggagacctccgcgccccgcaacctccccttctacgagcggctcggcttcaccgtcaccgccgacgtcgaggtgcccgaaggaccgcgcacctggtgcatgacccgcaagcccggtgcctga

SEQ ID NO: 4768 - DNA, 2523 bp, Artificial Sequence
  Synthetic Polynucloetide
atggccttaccagtgaccgccttgctcctgccgctggccttgctgctccacgccgccaggccgggcatgcggactgaagacctcccaaaggctgtggtgttcctggagcctcaatggtacagggtgctggagaaggacagtgtgactctgaagtgccagggagcctactcccctgaggacaattccacacagtggtttcacaatgagagcctcatctcaagccaggcctccagctacttcattgacgctgccacagtggacgacagtggagagtacaggtgccagacaaacctctccaccctcagtgacccggtgcagctagaagtccatatcggctggctgttgctccaggcccctcggtgggtgttcaaggaggaagaccctattcacctgaggtgtcacagctggaagaacactgctctgcataaggtcacatatttacagaatggcaaaggcaggaagtattttcatcataattctgacttctacattccaaaagccacactcaaagacagcggctcctacttctgcagggggcttgttgggagtaaaaatgtgtcttcagagactgtgaacatcaccatcactcaaggtttggcagtgtcaaccatctcatcattctttccacctggctaccaaggtaccggcggaggcggatctggcggcggaggtagcggtggcggaggatctgaattcgacatccagatgacacagagccctagcagcctgtctgccagcgtgggagacagagtgaccatcacatgcaaggccagcgaccacatcaacaactggctggcctggtatcagcagaagcctggacaggcccctaagctgctgatctacggcgctaccacactggaaacaggcgtgcccagcagattttctggcagcggctctggcaccgactacaccctgacaatatccagcctccagcctgaggacttcgccacctactactgtcagcagagctggaacaccccttggacattcggccagggcaccaagctggaaatcaagagactcgagagccagcctcacaccaagcccagcgtgttcgtgatgaagaacggcaccaacgtggcctgcctcgtgaaagagttctaccccaaggacatcaggatcaacctggtgtccagcaagaagatcaccgagttcgaccccgccatcgtgatctcccccagcggcaagtacaacgccgtgaagctggggaagtacgaggacagcaacagcgtgacctgctccgtgcagcacgacaacaagaccgtgcacagcaccgactttgaagtgaaaaccgactccaccgaccacgtgaagcccaaagagacagagaacaccaagcagcccagcaagagctgccacaagcccaaggccatcgtgcacaccgagaaagtgaacatgatgagcctgaccgtgctgggcctgcggatgctgttcgccaaaaccgtggccgtgaacttcctgctgaccgccaagctgttcttcctcagggccaagcgatctggatctggagcaacaaacttctcactactcaaacaagcaggtgacgtggaggagaatcccgggcctactagtatggactggatttggcgcatccttttccttgtcggcgctgctaccggcgcgcattccttcgaacaagttcagcttcaacagcctggcgctgagctggtcaaacctggcgcttctgtgaagatgagctgcaaagccagcggctacgccttcagcagctactggatcaactggatgaagcagaaacccggccagggactcgaatggatcggccaaatctatcccggcgacggcgacaccaactacaacggcaagttcaagggcagagccacactgaccgccgatacctctagcagcacagcctacatgcagctgagcagcctgaccagcgaagatagcgccgtgtacttctgtgcccggtccatcacaacagtcgtgggctgcgctatggactattggggccagggaacaagcgtgaccgtgtctagtacgcgtgacaagcagctggacgccgacgtgtcccccaagcctaccatcttcctgccctctatcgccgagacaaagctccagaaggccggcacctacctgtgcctgctggaaaagttcttcccagatgtgattaagatccactggcaggaaaagaagtccaacaccatcctgggcagccaggaaggcaacaccatgaagaccaacgacacctacatgaagttcagctggctgaccgtgcccgagaagtccctggacaaagaacacagatgcatcgtgcggcacgaaaacaacaagaacggcgtggaccaggaaatcatcttcccacccatcaagaccgatgtgattacaatggaccccaaggacaactgctccaaggacgccaacgataccctgctgctccagctgaccaacaccagcgcctactacatgtacttgttgctgctgctgaagtccgtggtgtacttcgccatcatcacatgctgcctgctgcggagaaccgccttctgctgcaacggcgagaagtct

SEQ ID NO: 4769 - DNA, 3357 bp, Artificial Sequence
  Synthetic Polynucloetide
atggccttaccagtgaccgccttgctcctgccgctggccttgctgctccacgccgccaggccgctcgaggggaaaccaattcccaaccctcttctgggactggattcaaccggcagcggcgacaagcagctggacgccgacgtgtcccccaagcctaccatcttcctgccctctatcgccgagacaaagctccagaaggccggcacctacctgtgcctgctggaaaagttcttcccagatgtgattaagatccactggcaggaaaagaagtccaacaccatcctgggcagccaggaaggcaacaccatgaagaccaacgacacctacatgaagttcagctggctgaccgtgcccgagaagtccctggacaaagaacacagatgcatcgtgcggcacgaaaacaacaagaacggcgtggaccaggaaatcatcttcccacccatcaagaccgatgtgattacaatggaccccaaggacaactgctccaaggacgccaacgataccctgctgctccagctgaccaacaccagcgcctactacatgtacttgttgctgctgctgaagtccgtggtgtacttcgccatcatcacatgctgcctgctgcggagaaccgccttctgctgcaacggcgagaagtctagggccaagcgatctggatctggagcaacaaacttctcactactcaaacaagcaggtgacgtggaggagaatcccgggcctactagcatggccttaccagtgaccgccttgctcctgccgctggccttgctgctccacgccgccaggccgggcatgcggactgaagacctcccaaaggctgtggtgttcctggagcctcaatggtacagggtgctggagaaggacagtgtgactctgaagtgccagggagcctactcccctgaggacaattccacacagtggtttcacaatgagagcctcatctcaagccaggcctccagctacttcattgacgctgccacagtggacgacagtggagagtacaggtgccagacaaacctctccaccctcagtgacccggtgcagctagaagtccatatcggctggctgttgctccaggcccctcggtgggtgttcaaggaggaagaccctattcacctgaggtgtcacagctggaagaacactgctctgcataaggtcacatatttacagaatggcaaaggcaggaagtattttcatcataattctgacttctacattccaaaagccacactcaaagacagcggctcctacttctgcagggggcttgttgggagtaaaaatgtgtcttcagagactgtgaacatcaccatcactcaaggtttggcagtgtcaaccatctcatcattctttccacctggctaccaaggtaccggcggaggcggatctggcggcggaggtagcggtggcggaggatctgaattcgacatccagatgacacagagccctagcagcctgtctgccagcgtgggagacagagtgaccatcacatgcaaggccagcgaccacatcaacaactggctggcctggtatcagcagaagcctggacaggcccctaagctgctgatctacggcgctaccacactggaaacaggcgtgcccagcagattttctggcagcggctctggcaccgactacaccctgacaatatccagcctccagcctgaggacttcgccacctactactgtcagcagagctggaacaccccttggacattcggccagggcaccaagctggaaatcaagagaggcggaggcggaagtggaggcggaggatctggcggcggaggctctcaagttcagcttcaacagcctggcgctgagctggtcaaacctggcgcttctgtgaagatgagctgcaaagccagcggctacgccttcagcagctactggatcaactggatgaagcagaaacccggccagggactcgaatggatcggccaaatctatcccggcgacggcgacaccaactacaacggcaagttcaagggcagagccacactgaccgccgatacctctagcagcacagcctacatgcagctgagcagcctgaccagcgaagatagcgccgtgtacttctgtgcccggtccatcacaacagtcgtgggctgcgctatggactattggggccagggaacaagcgtgaccgtgtctagtacgcgtgagcagaaactgatctcggaagaggatgggagcggcagccagcctcacaccaagcccagcgtgttcgtgatgaagaacggcaccaacgtggcctgcctcgtgaaagagttctaccccaaggacatcaggatcaacctggtgtccagcaagaagatcaccgagttcgaccccgccatcgtgatctcccccagcggcaagtacaacgccgtgaagctggggaagtacgaggacagcaacagcgtgacctgctccgtgcagcacgacaacaagaccgtgcacagcaccgactttgaagtgaaaaccgactccaccgaccacgtgaagcccaaagagacagagaacaccaagcagcccagcaagagctgccacaagcccaaggccatcgtgcacaccgagaaagtgaacatgatgagcctgaccgtgctgggcctgcggatgctgttcgccaaaaccgtggccgtgaacttcctgctgaccgccaagctgttcttcctccgcgccaagagaagcggatctggcgtgaagcagaccctgaatttcgacctgctgaagctggctggcgacgtggaatccaacccaggcccttctagaggccatatgaccgagtacaagcccacggtgcgcctcgccacccgcgacgacgtccccagggccgtacgcaccctcgccgccgcgttcgccgactaccccgccacgcgccacaccgtcgatccggaccgccacatcgagcgggtcaccgagctgcaagaactcttcctcacgcgcgtcgggctcgacatcggcaaggtgtgggtcgcggacgacggcgccgcggtggcggtctggaccacgccggagagcgtcgaagcgggggcggtgttcgccgagatcggcccgcgcatggccgagttgagcggttcccggctggccgcgcagcaacagatggaaggcctcctggcgccgcaccggcccaaggagcccgcgtggttcctggccaccgtcggcgtctcgcccgaccaccagggcaagggtctgggcagcgccgtcgtgctccccggagtggaggcggccgagcgcgccggggtgcccgccttcctggagacctccgcgccccgcaacctccccttctacgagcggctcggcttcaccgtcaccgccgacgtcgaggtgcccgaaggaccgcgcacctggtgcatgacccgcaagcccggtgcctga

SEQ ID NO: 4770 - DNA, 3732 bp, Artificial Sequence
  Synthetic Polynucloetide
atggccttaccagtgaccgccttgctcctgccgctggccttgctgctccacgccgccaggccgggcatgcggactgaagacctcccaaaggctgtggtgttcctggagcctcaatggtacagggtgctggagaaggacagtgtgactctgaagtgccagggagcctactcccctgaggacaattccacacagtggtttcacaatgagagcctcatctcaagccaggcctccagctacttcattgacgctgccacagtggacgacagtggagagtacaggtgccagacaaacctctccaccctcagtgacccggtgcagctagaagtccatatcggctggctgttgctccaggcccctcggtgggtgttcaaggaggaagaccctattcacctgaggtgtcacagctggaagaacactgctctgcataaggtcacatatttacagaatggcaaaggcaggaagtattttcatcataattctgacttctacattccaaaagccacactcaaagacagcggctcctacttctgcagggggcttgttgggagtaaaaatgtgtcttcagagactgtgaacatcaccatcactcaaggtttggcagtgtcaaccatctcatcattctttccacctggctaccaaggtaccggcggaggcggatctggcggcggaggtagcggtggcggaggatctgaattcgacatccagatgacacagagccctagcagcctgtctgccagcgtgggagacagagtgaccatcacatgcaaggccagcgaccacatcaacaactggctggcctggtatcagcagaagcctggacaggcccctaagctgctgatctacggcgctaccacactggaaacaggcgtgcccagcagattttctggcagcggctctggcaccgactacaccctgacaatatccagcctccagcctgaggacttcgccacctactactgtcagcagagctggaacaccccttggacattcggccagggcaccaagctggaaatcaagagaggacagcctaaggccaatcctaccgtgacactgttccctccaagcagcgaagaactccaggccaacaaggccacacttgtgtgcctgatctccgacttctaccctggggctgtgacagtggcttggaaggccgatggatctcctgtgaaagccggcgtggaaaccaccaagccatccaagcagagcaacaacaaatacgccgccagctcctacctgagcctgacacctgagcagtggaagtcccacagatcctacagctgccaagtgacccacgaaggcagcaccgtggaaaagacagtggcccctacagagtgcagcggatcccagagcttcggcctgctggaccccaagctgtgctacctgctggatggcatcctgttcatctacggcgtgatcctgaccgccctgttcctgagagtgaagttcagcagaagcgccgacgcccctgcctaccagcagggacagaaccaactgtacaacgagctgaacctgggcagacgggaagagtacgacgtgctggacaagcggagaggcagggaccctgagatgggcggaaagccccagcggagaaagaacccccaggaaggactgtataacgaactccagaaagacaagatggccgaagcctacagcgagatcggcatgaagggcgagcggagaagaggcaagggccacgatggcctgtaccagggcctgagcaccgccaccaaggacacctatgacgccctgcacatgcaggccctgcctccaagaagggccaagcgatctggatctggagcaacaaacttctcactactcaaacaagcaggtgacgtggaggagaatcccgggcctactagtatggactggatttggcgcatccttttccttgtcggcgctgctaccggcgcgcattccttcgaacaagttcagcttcaacagcctggcgctgagctggtcaaacctggcgcttctgtgaagatgagctgcaaagccagcggctacgccttcagcagctactggatcaactggatgaagcagaaacccggccagggactcgaatggatcggccaaatctatcccggcgacggcgacaccaactacaacggcaagttcaagggcagagccacactgaccgccgatacctctagcagcacagcctacatgcagctgagcagcctgaccagcgaagatagcgccgtgtacttctgtgcccggtccatcacaacagtcgtgggctgcgctatggactattggggccagggaacaagcgtgaccgtgtctagtgcctctacaaagggaccctccgtgtttcctctggctcccagcagcaagtctacaagcggaggaacagccgctctgggctgcctggtcaaggattactttcccgagcctgtgaccgtgtcctggaatagcggagcactgacaagcggcgtgcacacctttccagccgtgctgcaaagcagcggcctgtactctctgagcagcgtggtcacagtgcctagctctagcctgggcacccagacctacatctgcaatgtgaaccacaagcctagcaacaccaaggtggacaagagagtggaacccaagagctgtggtacccagagttttgggttgttggaccctaaattgtgctatctgttggacggaatcctgttcatttacggagtgatcctgaccgcattgttcctgcgggttaagttttccagatccgcagacgcacccgcttaccaacaagggcagaaccaactctacaatgaacttaatttggggcggagggaagagtacgacgttctggacaaaaggaggggacgagatcccgagatgggcggaaagcctcagcgaaggaagaatccgcaagaggggctttataacgaactccagaaagataaaatggcagaagcctatagtgagattgggatgaagggagaaaggaggaggggtaaaggtcacgatgggttgtaccaaggattgagcacagccactaaagatacctatgatgcgctccacatgcaggccctgccgccaagacgcgccaagagaagcggatctggcgtgaagcagaccctgaatttcgacctgctgaagctggctggcgacgtggaatccaacccaggcccttctagaggccatatgaccgagtacaagcccacggtgcgcctcgccacccgcgacgacgtccccagggccgtacgcaccctcgccgccgcgttcgccgactaccccgccacgcgccacaccgtcgatccggaccgccacatcgagcgggtcaccgagctgcaagaactcttcctcacgcgcgtcgggctcgacatcggcaaggtgtgggtcgcggacgacggcgccgcggtggcggtctggaccacgccggagagcgtcgaagcgggggcggtgttcgccgagatcggcccgcgcatggccgagttgagcggttcccggctggccgcgcagcaacagatggaaggcctcctggcgccgcaccggcccaaggagcccgcgtggttcctggccaccgtcggcgtctcgcccgaccaccagggcaagggtctgggcagcgccgtcgtgctccccggagtggaggcggccgagcgcgccggggtgcccgccttcctggagacctccgcgccccgcaacctccccttctacgagcggctcggcttcaccgtcaccgccgacgtcgaggtgcccgaaggaccgcgcacctggtgcatgacccgcaagcccggtgcctga

SEQ ID NO: 4771 - DNA, 3087 bp, Artificial Sequence
  Synthetic Polynucloetide
atggccttaccagtgaccgccttgctcctgccgctggccttgctgctccacgccgccaggccgggcatgcggactgaagacctcccaaaggctgtggtgttcctggagcctcaatggtacagggtgctggagaaggacagtgtgactctgaagtgccagggagcctactcccctgaggacaattccacacagtggtttcacaatgagagcctcatctcaagccaggcctccagctacttcattgacgctgccacagtggacgacagtggagagtacaggtgccagacaaacctctccaccctcagtgacccggtgcagctagaagtccatatcggctggctgttgctccaggcccctcggtgggtgttcaaggaggaagaccctattcacctgaggtgtcacagctggaagaacactgctctgcataaggtcacatatttacagaatggcaaaggcaggaagtattttcatcataattctgacttctacattccaaaagccacactcaaagacagcggctcctacttctgcagggggcttgttgggagtaaaaatgtgtcttcagagactgtgaacatcaccatcactcaaggtttggcagtgtcaaccatctcatcattctttccacctggctaccaaggtaccggcggaggcggatctggcggcggaggtagcggtggcggaggatctgaattcgacatccagatgacacagagccctagcagcctgtctgccagcgtgggagacagagtgaccatcacatgcaaggccagcgaccacatcaacaactggctggcctggtatcagcagaagcctggacaggcccctaagctgctgatctacggcgctaccacactggaaacaggcgtgcccagcagattttctggcagcggctctggcaccgactacaccctgacaatatccagcctccagcctgaggacttcgccacctactactgtcagcagagctggaacaccccttggacattcggccagggcaccaagctggaaatcaagagactcgaggacctgaagaacgtgttcccacctgaggtggccgtgttcgagcctagcgaggccgagatcagccacacccagaaagccaccctcgtgtgcctggctaccggcttctaccccgaccatgtggaactgtcttggtgggtcaacggcaaagaggtgcacagcggcgtgtctaccgacccccagccactgaaagaacagcccgccctgaacgacagccggtactgcctgagcagcagactgagagtgtccgccaccttctggcagaacccccggaaccacttcagatgccaggtgcagttctacggcctgagcgagaacgacgagtggacccaggacagagccaagcccgtgacccagatcgtgtctgccgaagcctggggcagagccgattgcggatcccagagcttcggcctgctggaccccaagctgtgctacctgctggatggcatcctgttcatctacggcgtgatcctgaccgccctgttcctgagagtgaagttcagcagaagcgccgacgcccctgcctaccagcagggacagaaccaactgtacaacgagctgaacctgggcagacgggaagagtacgacgtgctggacaagcggagaggcagggaccctgagatgggcggaaagccccagcggagaaagaacccccaggaaggactgtataacgaactccagaaagacaagatggccgaagcctacagcgagatcggcatgaagggcgagcggagaagaggcaagggccacgatggcctgtaccagggcctgagcaccgccaccaaggacacctatgacgccctgcacatgcaggccctgcctccaagaagggccaagcgatctggatctggagcaacaaacttctcactactcaaacaagcaggtgacgtggaggagaatcccgggcctactagtatggactggatttggcgcatccttttccttgtcggcgctgctaccggcgcgcattccttcgaacaagttcagcttcaacagcctggcgctgagctggtcaaacctggcgcttctgtgaagatgagctgcaaagccagcggctacgccttcagcagctactggatcaactggatgaagcagaaacccggccagggactcgaatggatcggccaaatctatcccggcgacggcgacaccaactacaacggcaagttcaagggcagagccacactgaccgccgatacctctagcagcacagcctacatgcagctgagcagcctgaccagcgaagatagcgccgtgtacttctgtgcccggtccatcacaacagtcgtgggctgcgctatggactattggggccagggaacaagcgtgaccgtgtctagtacgcgtatccagaaccctgatcctgccgtgtaccagctgcgggatagcaagagcagcgacaagagcgtgtgtctgttcaccgacttcgacagccagaccaacgtgtcccagagcaaggactccgacgtgtacatcaccgataagaccgtgctggacatgcggagcatggacttcaagagcaactccgccgtggcctggtccaacaagtccgatttcgcctgcgccaacgccttcaacaacagcattatccccgaggacacattcttcccaagccccgagagcagctgcggtacccagagttttgggttgttggaccctaaattgtgctatctgttggacggaatcctgttcatttacggagtgatcctgaccgcattgttcctgcgggttaagttttccagatccgcagacgcacccgcttaccaacaagggcagaaccaactctacaatgaacttaatttggggcggagggaagagtacgacgttctggacaaaaggaggggacgagatcccgagatgggcggaaagcctcagcgaaggaagaatccgcaagaggggctttataacgaactccagaaagataaaatggcagaagcctatagtgagattgggatgaagggagaaaggaggaggggtaaaggtcacgatgggttgtaccaaggattgagcacagccactaaagatacctatgatgcgctccacatgcaggccctgccgccaaga

SEQ ID NO: 4772 - DNA, 3087 bp, Artificial Sequence
  Synthetic Polynucloetide
atggccttaccagtgaccgccttgctcctgccgctggccttgctgctccacgccgccaggccgggcatgcggactgaagacctcccaaaggctgtggtgttcctggagcctcaatggtacagggtgctggagaaggacagtgtgactctgaagtgccagggagcctactcccctgaggacaattccacacagtggtttcacaatgagagcctcatctcaagccaggcctccagctacttcattgacgctgccacagtggacgacagtggagagtacaggtgccagacaaacctctccaccctcagtgacccggtgcagctagaagtccatatcggctggctgttgctccaggcccctcggtgggtgttcaaggaggaagaccctattcacctgaggtgtcacagctggaagaacactgctctgcataaggtcacatatttacagaatggcaaaggcaggaagtattttcatcataattctgacttctacattccaaaagccacactcaaagacagcggctcctacttctgcagggggcttgttgggagtaaaaatgtgtcttcagagactgtgaacatcaccatcactcaaggtttggcagtgtcaaccatctcatcattctttccacctggctaccaaggtaccggcggaggcggatctggcggcggaggtagcggtggcggaggatctgaattcgacatccagatgacacagagccctagcagcctgtctgccagcgtgggagacagagtgaccatcacatgcaaggccagcgaccacatcaacaactggctggcctggtatcagcagaagcctggacaggcccctaagctgctgatctacggcgctaccacactggaaacaggcgtgcccagcagattttctggcagcggctctggcaccgactacaccctgacaatatccagcctccagcctgaggacttcgccacctactactgtcagcagagctggaacaccccttggacattcggccagggcaccaagctggaaatcaagagactcgaggacctgaagaacgtgttcccacctgaggtggccgtgttcgagcctagcaaggccgagatcgcccacacccagaaagccaccctcgtgtgcctggctaccggcttctaccccgaccatgtggaactgtcttggtgggtcaacggcaaagaggtgcacagcggcgtgtgtaccgacccccagccactgaaagaacagcccgccctgaacgacagccggtactgcctgagcagcagactgagagtgtccgccaccttctggcagaacccccggaaccacttcagatgccaggtgcagttctacggcctgagcgagaacgacgagtggacccaggacagagccaagcccgtgacccagatcgtgtctgccgaagcctggggcagagccgattgcggatcccagagcttcggcctgctggaccccaagctgtgctacctgctggatggcatcctgttcatctacggcgtgatcctgaccgccctgttcctgagagtgaagttcagcagaagcgccgacgcccctgcctaccagcagggacagaaccaactgtacaacgagctgaacctgggcagacgggaagagtacgacgtgctggacaagcggagaggcagggaccctgagatgggcggaaagccccagcggagaaagaacccccaggaaggactgtataacgaactccagaaagacaagatggccgaagcctacagcgagatcggcatgaagggcgagcggagaagaggcaagggccacgatggcctgtaccagggcctgagcaccgccaccaaggacacctatgacgccctgcacatgcaggccctgcctccaagaagggccaagcgatctggatctggagcaacaaacttctcactactcaaacaagcaggtgacgtggaggagaatcccgggcctactagtatggactggatttggcgcatccttttccttgtcggcgctgctaccggcgcgcattccttcgaacaagttcagcttcaacagcctggcgctgagctggtcaaacctggcgcttctgtgaagatgagctgcaaagccagcggctacgccttcagcagctactggatcaactggatgaagcagaaacccggccagggactcgaatggatcggccaaatctatcccggcgacggcgacaccaactacaacggcaagttcaagggcagagccacactgaccgccgatacctctagcagcacagcctacatgcagctgagcagcctgaccagcgaagatagcgccgtgtacttctgtgcccggtccatcacaacagtcgtgggctgcgctatggactattggggccagggaacaagcgtgaccgtgtctagtacgcgtatccagaaccctgatcctgccgtgtaccagctgcgggatagcaagagcagcgacaagagcgtgtgtctgttcaccgacttcgacagccagaccaacgtgtcccagagcaaggactccgacgtgtacatcaccgataagtgcgtgctggacatgcggagcatggacttcaagagcaactccgccgtggcctggtccaacaagtccgatttcgcctgcgccaacgccttcaacaacagcattatccccgaggacacattcttcccaagcagcgacgtgccctgcggtacccagagttttgggttgttggaccctaaattgtgctatctgttggacggaatcctgttcatttacggagtgatcctgaccgcattgttcctgcgggttaagttttccagatccgcagacgcacccgcttaccaacaagggcagaaccaactctacaatgaacttaatttggggcggagggaagagtacgacgttctggacaaaaggaggggacgagatcccgagatgggcggaaagcctcagcgaaggaagaatccgcaagaggggctttataacgaactccagaaagataaaatggcagaagcctatagtgagattgggatgaagggagaaaggaggaggggtaaaggtcacgatgggttgtaccaaggattgagcacagccactaaagatacctatgatgcgctccacatgcaggccctgccgccaaga

SEQ ID NO: 4773 - DNA, 3300 bp, Artificial Sequence
  Synthetic Polynucloetide
atggccttaccagtgaccgccttgctcctgccgctggccttgctgctccacgccgccaggccgggcatgcggactgaagacctcccaaaggctgtggtgttcctggagcctcaatggtacagggtgctggagaaggacagtgtgactctgaagtgccagggagcctactcccctgaggacaattccacacagtggtttcacaatgagagcctcatctcaagccaggcctccagctacttcattgacgctgccacagtggacgacagtggagagtacaggtgccagacaaacctctccaccctcagtgacccggtgcagctagaagtccatatcggctggctgttgctccaggcccctcggtgggtgttcaaggaggaagaccctattcacctgaggtgtcacagctggaagaacactgctctgcataaggtcacatatttacagaatggcaaaggcaggaagtattttcatcataattctgacttctacattccaaaagccacactcaaagacagcggctcctacttctgcagggggcttgttgggagtaaaaatgtgtcttcagagactgtgaacatcaccatcactcaaggtttggcagtgtcaaccatctcatcattctttccacctggctaccaaggtaccggcggaggcggatctggcggcggaggtagcggtggcggaggatctgaattcgacatccagatgacacagagccctagcagcctgtctgccagcgtgggagacagagtgaccatcacatgcaaggccagcgaccacatcaacaactggctggcctggtatcagcagaagcctggacaggcccctaagctgctgatctacggcgctaccacactggaaacaggcgtgcccagcagattttctggcagcggctctggcaccgactacaccctgacaatatccagcctccagcctgaggacttcgccacctactactgtcagcagagctggaacaccccttggacattcggccagggcaccaagctggaaatcaagagactcgaggggaaaccaattcccaaccctcttctgggactggattcaaccggcagcggcgaggacctgaagaacgtgttcccacctgaggtggccgtgttcgagcctagcgaggccgagatcagccacacccagaaagccaccctcgtgtgcctggctaccggcttctaccccgaccatgtggaactgtcttggtgggtcaacggcaaagaggtgcacagcggcgtgtctaccgacccccagccactgaaagaacagcccgccctgaacgacagccggtactgcctgagcagcagactgagagtgtccgccaccttctggcagaacccccggaaccacttcagatgccaggtgcagttctacggcctgagcgagaacgacgagtggacccaggacagagccaagcccgtgacccagatcgtgtctgccgaagcctggggcagagccgattgcggatcccagagcttcggcctgctggaccccaagctgtgctacctgctggatggcatcctgttcatctacggcgtgatcctgaccgccctgttcctgagagtgaagttcagcagaagcgccgacgcccctgcctaccagcagggacagaaccaactgtacaacgagctgaacctgggcagacgggaagagtacgacgtgctggacaagcggagaggcagggaccctgagatgggcggaaagccccagcggagaaagaacccccaggaaggactgtataacgaactccagaaagacaagatggccgaagcctacagcgagatcggcatgaagggcgagcggagaagaggcaagggccacgatggcctgtaccagggcctgagcaccgccaccaaggacacctatgacgccctgcacatgcaggccctgcctccaagaagggccaagcgatctggatctggagcaacaaacttctcactactcaaacaagcaggtgacgtggaggagaatcccgggcctactagtatggactggatttggcgcatccttttccttgtcggcgctgctaccggcgcgcattccttcgaacaagttcagcttcaacagcctggcgctgagctggtcaaacctggcgcttctgtgaagatgagctgcaaagccagcggctacgccttcagcagctactggatcaactggatgaagcagaaacccggccagggactcgaatggatcggccaaatctatcccggcgacggcgacaccaactacaacggcaagttcaagggcagagccacactgaccgccgatacctctagcagcacagcctacatgcagctgagcagcctgaccagcgaagatagcgccgtgtacttctgtgcccggtccatcacaacagtcgtgggctgcgctatggactattggggccagggaacaagcgtgaccgtgtctagtacgcgtgagcagaaactgatctcggaagaggatgggagcggcatccagaaccctgatcctgccgtgtaccagctgcgggatagcaagagcagcgacaagagcgtgtgtctgttcaccgacttcgacagccagaccaacgtgtcccagagcaaggactccgacgtgtacatcaccgataagaccgtgctggacatgcggagcatggacttcaagagcaactccgccgtggcctggtccaacaagtccgatttcgcctgcgccaacgccttcaacaacagcattatccccgaggacacattcttcccaagccccgagagcagctgcggtacccagagttttgggttgttggaccctaaattgtgctatctgttggacggaatcctgttcatttacggagtgatcctgaccgcattgttcctgaggagcaagcggtcacggctgctccacagcgattacatgaatatgacaccacgaagaccgggtcctactcgcaaacactaccaaccctacgcacctccccgcgactttgcagcgtaccgatctcgggttaagttttccagatccgcagacgcacccgcttaccaacaagggcagaaccaactctacaatgaacttaatttggggcggagggaagagtacgacgttctggacaaaaggaggggacgagatcccgagatgggcggaaagcctcagcgaaggaagaatccgcaagaggggctttataacgaactccagaaagataaaatggcagaagcctatagtgagattgggatgaagggagaaaggaggaggggtaaaggtcacgatgggttgtaccaaggattgagcacagccactaaagatacctatgatgcgctccacatgcaggccctgccgccaaga

SEQ ID NO: 4774 - DNA, 3423 bp, Artificial Sequence
  Synthetic Polynucloetide
atggccttaccagtgaccgccttgctcctgccgctggccttgctgctccacgccgccaggccgggcatgcggactgaagacctcccaaaggctgtggtgttcctggagcctcaatggtacagggtgctggagaaggacagtgtgactctgaagtgccagggagcctactcccctgaggacaattccacacagtggtttcacaatgagagcctcatctcaagccaggcctccagctacttcattgacgctgccacagtggacgacagtggagagtacaggtgccagacaaacctctccaccctcagtgacccggtgcagctagaagtccatatcggctggctgttgctccaggcccctcggtgggtgttcaaggaggaagaccctattcacctgaggtgtcacagctggaagaacactgctctgcataaggtcacatatttacagaatggcaaaggcaggaagtattttcatcataattctgacttctacattccaaaagccacactcaaagacagcggctcctacttctgcagggggcttgttgggagtaaaaatgtgtcttcagagactgtgaacatcaccatcactcaaggtttggcagtgtcaaccatctcatcattctttccacctggctaccaaggtaccggcggaggcggatctggcggcggaggtagcggtggcggaggatctgaattcgacatccagatgacacagagccctagcagcctgtctgccagcgtgggagacagagtgaccatcacatgcaaggccagcgaccacatcaacaactggctggcctggtatcagcagaagcctggacaggcccctaagctgctgatctacggcgctaccacactggaaacaggcgtgcccagcagattttctggcagcggctctggcaccgactacaccctgacaatatccagcctccagcctgaggacttcgccacctactactgtcagcagagctggaacaccccttggacattcggccagggcaccaagctggaaatcaagagactcgaggggaaaccaattcccaaccctcttctgggactggattcaaccggcagcggcgaggacctgaagaacgtgttcccacctgaggtggccgtgttcgagcctagcgaggccgagatcagccacacccagaaagccaccctcgtgtgcctggctaccggcttctaccccgaccatgtggaactgtcttggtgggtcaacggcaaagaggtgcacagcggcgtgtctaccgacccccagccactgaaagaacagcccgccctgaacgacagccggtactgcctgagcagcagactgagagtgtccgccaccttctggcagaacccccggaaccacttcagatgccaggtgcagttctacggcctgagcgagaacgacgagtggacccaggacagagccaagcccgtgacccagatcgtgtctgccgaagcctggggcagagccgattgcggatcccagagcttcggcctgctggaccccaagctgtgctacctgctggatggcatcctgttcatctacggcgtgatcctgaccgccctgttcctgaggagtaagaggagcaggctcctgcacagtgactacatgaacatgactccacgccgccccggacccacccgcaagcattaccagccctatgccccaccacgcgacttcgcagcctatcgctccagagtgaagttcagcagaagcgccgacgcccctgcctaccagcagggacagaaccaactgtacaacgagctgaacctgggcagacgggaagagtacgacgtgctggacaagcggagaggcagggaccctgagatgggcggaaagccccagcggagaaagaacccccaggaaggactgtataacgaactccagaaagacaagatggccgaagcctacagcgagatcggcatgaagggcgagcggagaagaggcaagggccacgatggcctgtaccagggcctgagcaccgccaccaaggacacctatgacgccctgcacatgcaggccctgcctccaagaagggccaagcgatctggatctggagcaacaaacttctcactactcaaacaagcaggtgacgtggaggagaatcccgggcctactagtatggactggatttggcgcatccttttccttgtcggcgctgctaccggcgcgcattccttcgaacaagttcagcttcaacagcctggcgctgagctggtcaaacctggcgcttctgtgaagatgagctgcaaagccagcggctacgccttcagcagctactggatcaactggatgaagcagaaacccggccagggactcgaatggatcggccaaatctatcccggcgacggcgacaccaactacaacggcaagttcaagggcagagccacactgaccgccgatacctctagcagcacagcctacatgcagctgagcagcctgaccagcgaagatagcgccgtgtacttctgtgcccggtccatcacaacagtcgtgggctgcgctatggactattggggccagggaacaagcgtgaccgtgtctagtacgcgtgagcagaaactgatctcggaagaggatgggagcggcatccagaaccctgatcctgccgtgtaccagctgcgggatagcaagagcagcgacaagagcgtgtgtctgttcaccgacttcgacagccagaccaacgtgtcccagagcaaggactccgacgtgtacatcaccgataagaccgtgctggacatgcggagcatggacttcaagagcaactccgccgtggcctggtccaacaagtccgatttcgcctgcgccaacgccttcaacaacagcattatccccgaggacacattcttcccaagccccgagagcagctgcggtacccagagttttgggttgttggaccctaaattgtgctatctgttggacggaatcctgttcatttacggagtgatcctgaccgcattgttcctgaggagcaagcggtcacggctgctccacagcgattacatgaatatgacaccacgaagaccgggtcctactcgcaaacactaccaaccctacgcacctccccgcgactttgcagcgtaccgatctcgggttaagttttccagatccgcagacgcacccgcttaccaacaagggcagaaccaactctacaatgaacttaatttggggcggagggaagagtacgacgttctggacaaaaggaggggacgagatcccgagatgggcggaaagcctcagcgaaggaagaatccgcaagaggggctttataacgaactccagaaagataaaatggcagaagcctatagtgagattgggatgaagggagaaaggaggaggggtaaaggtcacgatgggttgtaccaaggattgagcacagccactaaagatacctatgatgcgctccacatgcaggccctgccgccaaga

SEQ ID NO: 4775 - DNA, 3306 bp, Artificial Sequence
  Synthetic Polynucloetide
atggccttaccagtgaccgccttgctcctgccgctggccttgctgctccacgccgccaggccgggcatgcggactgaagacctcccaaaggctgtggtgttcctggagcctcaatggtacagggtgctggagaaggacagtgtgactctgaagtgccagggagcctactcccctgaggacaattccacacagtggtttcacaatgagagcctcatctcaagccaggcctccagctacttcattgacgctgccacagtggacgacagtggagagtacaggtgccagacaaacctctccaccctcagtgacccggtgcagctagaagtccatatcggctggctgttgctccaggcccctcggtgggtgttcaaggaggaagaccctattcacctgaggtgtcacagctggaagaacactgctctgcataaggtcacatatttacagaatggcaaaggcaggaagtattttcatcataattctgacttctacattccaaaagccacactcaaagacagcggctcctacttctgcagggggcttgttgggagtaaaaatgtgtcttcagagactgtgaacatcaccatcactcaaggtttggcagtgtcaaccatctcatcattctttccacctggctaccaaggtaccggcggaggcggatctggcggcggaggtagcggtggcggaggatctgaattcgacatccagatgacacagagccctagcagcctgtctgccagcgtgggagacagagtgaccatcacatgcaaggccagcgaccacatcaacaactggctggcctggtatcagcagaagcctggacaggcccctaagctgctgatctacggcgctaccacactggaaacaggcgtgcccagcagattttctggcagcggctctggcaccgactacaccctgacaatatccagcctccagcctgaggacttcgccacctactactgtcagcagagctggaacaccccttggacattcggccagggcaccaagctggaaatcaagagactcgaggggaaaccaattcccaaccctcttctgggactggattcaaccggcagcggcgaggacctgaagaacgtgttcccacctgaggtggccgtgttcgagcctagcgaggccgagatcagccacacccagaaagccaccctcgtgtgcctggctaccggcttctaccccgaccatgtggaactgtcttggtgggtcaacggcaaagaggtgcacagcggcgtgtctaccgacccccagccactgaaagaacagcccgccctgaacgacagccggtactgcctgagcagcagactgagagtgtccgccaccttctggcagaacccccggaaccacttcagatgccaggtgcagttctacggcctgagcgagaacgacgagtggacccaggacagagccaagcccgtgacccagatcgtgtctgccgaagcctggggcagagccgattgcggatcccagagcttcggcctgctggaccccaagctgtgctacctgctggatggcatcctgttcatctacggcgtgatcctgaccgccctgttcctgagagtgaagttcagcagaagcgccgacgcccctgcctaccagcagggacagaaccaactgtacaacgagctgaacctgggcagacgggaagagtacgacgtgctggacaagcggagaggcagggaccctgagatgggcggaaagccccagcggagaaagaacccccaggaaggactgtataacgaactccagaaagacaagatggccgaagcctacagcgagatcggcatgaagggcgagcggagaagaggcaagggccacgatggcctgtaccagggcctgagcaccgccaccaaggacacctatgacgccctgcacatgcaggccctgcctccaagaagggccaagcgatctggatctggagcaacaaacttctcactactcaaacaagcaggtgacgtggaggagaatcccgggcctactagtatggactggatttggcgcatccttttccttgtcggcgctgctaccggcgcgcattccttcgaacaagttcagcttcaacagcctggcgctgagctggtcaaacctggcgcttctgtgaagatgagctgcaaagccagcggctacgccttcagcagctactggatcaactggatgaagcagaaacccggccagggactcgaatggatcggccaaatctatcccggcgacggcgacaccaactacaacggcaagttcaagggcagagccacactgaccgccgatacctctagcagcacagcctacatgcagctgagcagcctgaccagcgaagatagcgccgtgtacttctgtgcccggtccatcacaacagtcgtgggctgcgctatggactattggggccagggaacaagcgtgaccgtgtctagtacgcgtgagcagaaactgatctcggaagaggatctggggagcggcatccagaaccctgatcctgccgtgtaccagctgcgggatagcaagagcagcgacaagagcgtgtgtctgttcaccgacttcgacagccagaccaacgtgtcccagagcaaggactccgacgtgtacatcaccgataagaccgtgctggacatgcggagcatggacttcaagagcaactccgccgtggcctggtccaacaagtccgatttcgcctgcgccaacgccttcaacaacagcattatccccgaggacacattcttcccaagccccgagagcagctgcggtacccagagttttgggttgttggaccctaaattgtgctatctgttggacggaatcctgttcatttacggagtgatcctgaccgcattgttcctgaagagaggccggaagaagctgctgtacatcttcaagcagcctttcatgcggcccgtgcagaccacccaggaagaggacggctgctcctgccggttccccgaggaagaagaaggcggctgcgagctgcgggttaagttttccagatccgcagacgcacccgcttaccaacaagggcagaaccaactctacaatgaacttaatttggggcggagggaagagtacgacgttctggacaaaaggaggggacgagatcccgagatgggcggaaagcctcagcgaaggaagaatccgcaagaggggctttataacgaactccagaaagataaaatggcagaagcctatagtgagattgggatgaagggagaaaggaggaggggtaaaggtcacgatgggttgtaccaaggattgagcacagccactaaagatacctatgatgcgctccacatgcaggccctgccgccaaga

SEQ ID NO: 4776 - DNA, 3432 bp, Artificial Sequence
  Synthetic Polynucloetide
atggccttaccagtgaccgccttgctcctgccgctggccttgctgctccacgccgccaggccgggcatgcggactgaagacctcccaaaggctgtggtgttcctggagcctcaatggtacagggtgctggagaaggacagtgtgactctgaagtgccagggagcctactcccctgaggacaattccacacagtggtttcacaatgagagcctcatctcaagccaggcctccagctacttcattgacgctgccacagtggacgacagtggagagtacaggtgccagacaaacctctccaccctcagtgacccggtgcagctagaagtccatatcggctggctgttgctccaggcccctcggtgggtgttcaaggaggaagaccctattcacctgaggtgtcacagctggaagaacactgctctgcataaggtcacatatttacagaatggcaaaggcaggaagtattttcatcataattctgacttctacattccaaaagccacactcaaagacagcggctcctacttctgcagggggcttgttgggagtaaaaatgtgtcttcagagactgtgaacatcaccatcactcaaggtttggcagtgtcaaccatctcatcattctttccacctggctaccaaggtaccggcggaggcggatctggcggcggaggtagcggtggcggaggatctgaattcgacatccagatgacacagagccctagcagcctgtctgccagcgtgggagacagagtgaccatcacatgcaaggccagcgaccacatcaacaactggctggcctggtatcagcagaagcctggacaggcccctaagctgctgatctacggcgctaccacactggaaacaggcgtgcccagcagattttctggcagcggctctggcaccgactacaccctgacaatatccagcctccagcctgaggacttcgccacctactactgtcagcagagctggaacaccccttggacattcggccagggcaccaagctggaaatcaagagactcgaggggaaaccaattcccaaccctcttctgggactggattcaaccggcagcggcgaggacctgaagaacgtgttcccacctgaggtggccgtgttcgagcctagcgaggccgagatcagccacacccagaaagccaccctcgtgtgcctggctaccggcttctaccccgaccatgtggaactgtcttggtgggtcaacggcaaagaggtgcacagcggcgtgtctaccgacccccagccactgaaagaacagcccgccctgaacgacagccggtactgcctgagcagcagactgagagtgtccgccaccttctggcagaacccccggaaccacttcagatgccaggtgcagttctacggcctgagcgagaacgacgagtggacccaggacagagccaagcccgtgacccagatcgtgtctgccgaagcctggggcagagccgattgcggatcccagagcttcggcctgctggaccccaagctgtgctacctgctggatggcatcctgttcatctacggcgtgatcctgaccgccctgttcctgaaacggggcagaaagaaactcctgtatatattcaaacaaccatttatgagaccagtacaaactactcaagaggaagatggctgtagctgccgatttccagaagaagaagaaggaggatgtgaactgagagtgaagttcagcagaagcgccgacgcccctgcctaccagcagggacagaaccaactgtacaacgagctgaacctgggcagacgggaagagtacgacgtgctggacaagcggagaggcagggaccctgagatgggcggaaagccccagcggagaaagaacccccaggaaggactgtataacgaactccagaaagacaagatggccgaagcctacagcgagatcggcatgaagggcgagcggagaagaggcaagggccacgatggcctgtaccagggcctgagcaccgccaccaaggacacctatgacgccctgcacatgcaggccctgcctccaagaagggccaagcgatctggatctggagcaacaaacttctcactactcaaacaagcaggtgacgtggaggagaatcccgggcctactagtatggactggatttggcgcatccttttccttgtcggcgctgctaccggcgcgcattccttcgaacaagttcagcttcaacagcctggcgctgagctggtcaaacctggcgcttctgtgaagatgagctgcaaagccagcggctacgccttcagcagctactggatcaactggatgaagcagaaacccggccagggactcgaatggatcggccaaatctatcccggcgacggcgacaccaactacaacggcaagttcaagggcagagccacactgaccgccgatacctctagcagcacagcctacatgcagctgagcagcctgaccagcgaagatagcgccgtgtacttctgtgcccggtccatcacaacagtcgtgggctgcgctatggactattggggccagggaacaagcgtgaccgtgtctagtacgcgtgagcagaaactgatctcggaagaggatctggggagcggcatccagaaccctgatcctgccgtgtaccagctgcgggatagcaagagcagcgacaagagcgtgtgtctgttcaccgacttcgacagccagaccaacgtgtcccagagcaaggactccgacgtgtacatcaccgataagaccgtgctggacatgcggagcatggacttcaagagcaactccgccgtggcctggtccaacaagtccgatttcgcctgcgccaacgccttcaacaacagcattatccccgaggacacattcttcccaagccccgagagcagctgcggtacccagagttttgggttgttggaccctaaattgtgctatctgttggacggaatcctgttcatttacggagtgatcctgaccgcattgttcctgaagagaggccggaagaagctgctgtacatcttcaagcagcctttcatgcggcccgtgcagaccacccaggaagaggacggctgctcctgccggttccccgaggaagaagaaggcggctgcgagctgcgggttaagttttccagatccgcagacgcacccgcttaccaacaagggcagaaccaactctacaatgaacttaatttggggcggagggaagagtacgacgttctggacaaaaggaggggacgagatcccgagatgggcggaaagcctcagcgaaggaagaatccgcaagaggggctttataacgaactccagaaagataaaatggcagaagcctatagtgagattgggatgaagggagaaaggaggaggggtaaaggtcacgatgggttgtaccaaggattgagcacagccactaaagatacctatgatgcgctccacatgcaggccctgccgccaaga

SEQ ID NO: 4777 - DNA, 3105 bp, Artificial Sequence
  Synthetic Polynucloetide
atggccttaccagtgaccgccttgctcctgccgctggccttgctgctccacgccgccaggccgggcatgcggactgaagacctcccaaaggctgtggtgttcctggagcctcaatggtacagggtgctggagaaggacagtgtgactctgaagtgccagggagcctactcccctgaggacaattccacacagtggtttcacaatgagagcctcatctcaagccaggcctccagctacttcattgacgctgccacagtggacgacagtggagagtacaggtgccagacaaacctctccaccctcagtgacccggtgcagctagaagtccatatcggctggctgttgctccaggcccctcggtgggtgttcaaggaggaagaccctattcacctgaggtgtcacagctggaagaacactgctctgcataaggtcacatatttacagaatggcaaaggcaggaagtattttcatcataattctgacttctacattccaaaagccacactcaaagacagcggctcctacttctgcagggggcttgttgggagtaaaaatgtgtcttcagagactgtgaacatcaccatcactcaaggtttggcagtgtcaaccatctcatcattctttccacctggctaccaaggtaccggcggaggcggatctggcggcggaggtagcggtggcggaggatctgaattcgacatccagatgacacagagccctagcagcctgtctgccagcgtgggagacagagtgaccatcacatgcaaggccagcgaccacatcaacaactggctggcctggtatcagcagaagcctggacaggcccctaagctgctgatctacggcgctaccacactggaaacaggcgtgcccagcagattttctggcagcggctctggcaccgactacaccctgacaatatccagcctccagcctgaggacttcgccacctactactgtcagcagagctggaacaccccttggacattcggccagggcaccaagctggaaatcaagagactcgagcagagcttcggcctgctggaccccaagctgtgctacctgctggatggcatcctgttcatctacggcgtgatcctgaccgccctgttcctgagagtgaagttcagcagaagcgccgacgcccctgcctaccagcagggacagaaccaactgtacaacgagctgaacctgggcagacgggaagagtacgacgtgctggacaagcggagaggcagggaccctgagatgggcggaaagccccagcggagaaagaacccccaggaaggactgtataacgaactccagaaagacaagatggccgaagcctacagcgagatcggcatgaagggcgagcggagaagaggcaagggccacgatggcctgtaccagggcctgagcaccgccaccaaggacacctatgacgccctgcacatgcaggccctgcctccaagaagggccaagcgatctggatctggagcaacaaacttctcactactcaaacaagcaggtgacgtggaggagaatcccgggcctactagtatggactggatttggcgcatccttttccttgtcggcgctgctaccggcgcgcattccttcgaacaagttcagcttcaacagcctggcgctgagctggtcaaacctggcgcttctgtgaagatgagctgcaaagccagcggctacgccttcagcagctactggatcaactggatgaagcagaaacccggccagggactcgaatggatcggccaaatctatcccggcgacggcgacaccaactacaacggcaagttcaagggcagagccacactgaccgccgatacctctagcagcacagcctacatgcagctgagcagcctgaccagcgaagatagcgccgtgtacttctgtgcccggtccatcacaacagtcgtgggctgcgctatggactattggggccagggaacaagcgtgaccgtgtctagtacgcgtcagagttttgggttgttggaccctaaattgtgctatctgttggacggaatcctgttcatttacggagtgatcctgaccgcattgttcctgcgggttaagttttccagatccgcagacgcacccgcttaccaacaagggcagaaccaactctacaatgaacttaatttggggcggagggaagagtacgacgttctggacaaaaggaggggacgagatcccgagatgggcggaaagcctcagcgaaggaagaatccgcaagaggggctttataacgaactccagaaagataaaatggcagaagcctatagtgagattgggatgaagggagaaaggaggaggggtaaaggtcacgatgggttgtaccaaggattgagcacagccactaaagatacctatgatgcgctccacatgcaggccctgccgccaagacgcgccaagagaagcggatctggcgtgaagcagaccctgaatttcgacctgctgaagctggctggcgacgtggaatccaacccaggcccttctagaggccatatgaccgagtacaagcccacggtgcgcctcgccacccgcgacgacgtccccagggccgtacgcaccctcgccgccgcgttcgccgactaccccgccacgcgccacaccgtcgatccggaccgccacatcgagcgggtcaccgagctgcaagaactcttcctcacgcgcgtcgggctcgacatcggcaaggtgtgggtcgcggacgacggcgccgcggtggcggtctggaccacgccggagagcgtcgaagcgggggcggtgttcgccgagatcggcccgcgcatggccgagttgagcggttcccggctggccgcgcagcaacagatggaaggcctcctggcgccgcaccggcccaaggagcccgcgtggttcctggccaccgtcggcgtctcgcccgaccaccagggcaagggtctgggcagcgccgtcgtgctccccggagtggaggcggccgagcgcgccggggtgcccgccttcctggagacctccgcgccccgcaacctccccttctacgagcggctcggcttcaccgtcaccgccgacgtcgaggtgcccgaaggaccgcgcacctggtgcatgacccgcaagcccggtgcctga

SEQ ID NO: 4778 - DNA, 2577 bp, Artificial Sequence
  Synthetic Polynucloetide
atggccttaccagtgaccgccttgctcctgccgctggccttgctgctccacgccgccaggccgggcatgcggactgaagacctcccaaaggctgtggtgttcctggagcctcaatggtacagggtgctggagaaggacagtgtgactctgaagtgccagggagcctactcccctgaggacaattccacacagtggtttcacaatgagagcctcatctcaagccaggcctccagctacttcattgacgctgccacagtggacgacagtggagagtacaggtgccagacaaacctctccaccctcagtgacccggtgcagctagaagtccatatcggctggctgttgctccaggcccctcggtgggtgttcaaggaggaagaccctattcacctgaggtgtcacagctggaagaacactgctctgcataaggtcacatatttacagaatggcaaaggcaggaagtattttcatcataattctgacttctacattccaaaagccacactcaaagacagcggctcctacttctgcagggggcttgttgggagtaaaaatgtgtcttcagagactgtgaacatcaccatcactcaaggtttggcagtgtcaaccatctcatcattctttccacctggctaccaaggtaccggcggaggcggatctggcggcggaggtagcggtggcggaggatctgaattcgacatccagatgacacagagccctagcagcctgtctgccagcgtgggagacagagtgaccatcacatgcaaggccagcgaccacatcaacaactggctggcctggtatcagcagaagcctggacaggcccctaagctgctgatctacggcgctaccacactggaaacaggcgtgcccagcagattttctggcagcggctctggcaccgactacaccctgacaatatccagcctccagcctgaggacttcgccacctactactgtcagcagagctggaacaccccttggacattcggccagggcaccaagctggaaatcaagagactcgagggacagcctaaggccaatcctaccgtgacactgttccctccaagcagcgaagaactccaggccaacaaggccacacttgtgtgcctgatctccgacttctaccctggggctgtgacagtggcttggaaggccgatggatctcctgtgaaagccggcgtggaaaccaccaagccatccaagcagagcaacaacaaatacgccgccagctcctacctgagcctgacacctgagcagtggaagtcccacagatcctacagctgccaagtgacccacgaaggcagcaccgtggaaaagacagtggcccctacagagtgcagccccatcaagaccgatgtgattacaatggaccccaaggacaactgctccaaggacgccaacgataccctgctgctccagctgaccaacaccagcgcctactacatgtacttgttgctgctgctgaagtccgtggtgtacttcgccatcatcacatgctgcctgctgcggagaaccgccttctgctgcaacggcgagaagtctagggccaagcgatctggatctggagcaacaaacttctcactactcaaacaagcaggtgacgtggaggagaatcccgggcctactagtatggactggatttggcgcatccttttccttgtcggcgctgctaccggcgcgcattccttcgaacaagttcagcttcaacagcctggcgctgagctggtcaaacctggcgcttctgtgaagatgagctgcaaagccagcggctacgccttcagcagctactggatcaactggatgaagcagaaacccggccagggactcgaatggatcggccaaatctatcccggcgacggcgacaccaactacaacggcaagttcaagggcagagccacactgaccgccgatacctctagcagcacagcctacatgcagctgagcagcctgaccagcgaagatagcgccgtgtacttctgtgcccggtccatcacaacagtcgtgggctgcgctatggactattggggccagggaacaagcgtgaccgtgtctagtacgcgtgcctctacaaagggaccctccgtgtttcctctggctcccagcagcaagtctacaagcggaggaacagccgctctgggctgcctggtcaaggattactttcccgagcctgtgaccgtgtcctggaatagcggagcactgacaagcggcgtgcacacctttccagccgtgctgcaaagcagcggcctgtactctctgagcagcgtggtcacagtgcctagctctagcctgggcacccagacctacatctgcaatgtgaaccacaagcctagcaacaccaaggtggacaagagagtggaacccaagagctgtgaagtgaaaaccgactccaccgaccacgtgaagcccaaagagacagagaacaccaagcagcccagcaagagctgccacaagcccaaggccatcgtgcacaccgagaaagtgaacatgatgagcctgaccgtgctgggcctgcggatgctgttcgccaaaaccgtggccgtgaacttcctgctgaccgccaagctgttcttcctc

SEQ ID NO: 4779 - DNA, 2511 bp, Artificial Sequence
  Synthetic Polynucloetide
atggccttaccagtgaccgccttgctcctgccgctggccttgctgctccacgccgccaggccgggcatgcggactgaagacctcccaaaggctgtggtgttcctggagcctcaatggtacagggtgctggagaaggacagtgtgactctgaagtgccagggagcctactcccctgaggacaattccacacagtggtttcacaatgagagcctcatctcaagccaggcctccagctacttcattgacgctgccacagtggacgacagtggagagtacaggtgccagacaaacctctccaccctcagtgacccggtgcagctagaagtccatatcggctggctgttgctccaggcccctcggtgggtgttcaaggaggaagaccctattcacctgaggtgtcacagctggaagaacactgctctgcataaggtcacatatttacagaatggcaaaggcaggaagtattttcatcataattctgacttctacattccaaaagccacactcaaagacagcggctcctacttctgcagggggcttgttgggagtaaaaatgtgtcttcagagactgtgaacatcaccatcactcaaggtttggcagtgtcaaccatctcatcattctttccacctggctaccaaggtaccggcggaggcggatctggcggcggaggtagcggtggcggaggatctgaattcgacatccagatgacacagagccctagcagcctgtctgccagcgtgggagacagagtgaccatcacatgcaaggccagcgaccacatcaacaactggctggcctggtatcagcagaagcctggacaggcccctaagctgctgatctacggcgctaccacactggaaacaggcgtgcccagcagattttctggcagcggctctggcaccgactacaccctgacaatatccagcctccagcctgaggacttcgccacctactactgtcagcagagctggaacaccccttggacattcggccagggcaccaagctggaaatcaagagactcgagggacagcctaaggccaatcctaccgtgacactgttccctccaagcagcgaagaactccaggccaacaaggccacacttgtgtgcctgatctccgacttctaccctggggctgtgacagtggcttggaaggccgatggatctcctgtgaaagccggcgtggaaaccaccaagccatccaagcagagcaacaacaaatacgccgccagctcctacctgagcctgacacctgagcagtggaagtcccacagatcctacagctgccaagtgacccacgaaggcagcaccgtggaaaagacagtggcccctacagagtgcagcggcagagccgattgcggcatcaccagcgccagctaccaccagggcgtgctgagcgccaccatcctgtacgagatcctgctgggcaaggccaccctgtacgccgtgctggtgtctgccctggtgctgatggctatggtcaagcggaaggacagccggggaagggccaagcgatctggatctggagcaacaaacttctcactactcaaacaagcaggtgacgtggaggagaatcccgggcctactagtatggactggatttggcgcatccttttccttgtcggcgctgctaccggcgcgcattccttcgaacaagttcagcttcaacagcctggcgctgagctggtcaaacctggcgcttctgtgaagatgagctgcaaagccagcggctacgccttcagcagctactggatcaactggatgaagcagaaacccggccagggactcgaatggatcggccaaatctatcccggcgacggcgacaccaactacaacggcaagttcaagggcagagccacactgaccgccgatacctctagcagcacagcctacatgcagctgagcagcctgaccagcgaagatagcgccgtgtacttctgtgcccggtccatcacaacagtcgtgggctgcgctatggactattggggccagggaacaagcgtgaccgtgtctagtacgcgtgcctctacaaagggaccctccgtgtttcctctggctcccagcagcaagtctacaagcggaggaacagccgctctgggctgcctggtcaaggattactttcccgagcctgtgaccgtgtcctggaatagcggagcactgacaagcggcgtgcacacctttccagccgtgctgcaaagcagcggcctgtactctctgagcagcgtggtcacagtgcctagctctagcctgggcacccagacctacatctgcaatgtgaaccacaagcctagcaacaccaaggtggacaagagagtggaacccaagagctgtatccccgaggacacattcttcccaagcagcgacgtgccctgcgacgtgaagctggtggaaaagagcttcgagacagacaccaacctgaacttccagaacctgagcgtgatcggcttcagaatcctgctgctgaaagtggccggctttaacctgctgatgaccctgcggctgtggtccagc

SEQ ID NO: 4780 - DNA, 2511 bp, Artificial Sequence
  Synthetic Polynucloetide
atggccttaccagtgaccgccttgctcctgccgctggccttgctgctccacgccgccaggccgggcatgcggactgaagacctcccaaaggctgtggtgttcctggagcctcaatggtacagggtgctggagaaggacagtgtgactctgaagtgccagggagcctactcccctgaggacaattccacacagtggtttcacaatgagagcctcatctcaagccaggcctccagctacttcattgacgctgccacagtggacgacagtggagagtacaggtgccagacaaacctctccaccctcagtgacccggtgcagctagaagtccatatcggctggctgttgctccaggcccctcggtgggtgttcaaggaggaagaccctattcacctgaggtgtcacagctggaagaacactgctctgcataaggtcacatatttacagaatggcaaaggcaggaagtattttcatcataattctgacttctacattccaaaagccacactcaaagacagcggctcctacttctgcagggggcttgttgggagtaaaaatgtgtcttcagagactgtgaacatcaccatcactcaaggtttggcagtgtcaaccatctcatcattctttccacctggctaccaaggtaccggcggaggcggatctggcggcggaggtagcggtggcggaggatctgaattcgacatccagatgacacagagccctagcagcctgtctgccagcgtgggagacagagtgaccatcacatgcaaggccagcgaccacatcaacaactggctggcctggtatcagcagaagcctggacaggcccctaagctgctgatctacggcgctaccacactggaaacaggcgtgcccagcagattttctggcagcggctctggcaccgactacaccctgacaatatccagcctccagcctgaggacttcgccacctactactgtcagcagagctggaacaccccttggacattcggccagggcaccaagctggaaatcaagagactcgagggacagcctaaggccaatcctaccgtgacactgttccctccaagcagcgaagaactccaggccaacaaggccacacttgtgtgcctgatctccgacttctaccctggggctgtgacagtggcttggaaggccgatggatctcctgtgaaagccggcgtggaaaccaccaagccatccaagcagagcaacaacaaatacgccgccagctcctacctgagcctgacacctgagcagtggaagtcccacagatcctacagctgccaagtgacccacgaaggcagcaccgtggaaaagacagtggcccctacagagtgcagcggcagagccgattgcggctttaccagcgagagctaccagcagggcgtgctgagcgccaccatcctgtacgagatcctgctgggcaaggccaccctgtacgccgtgctggtgtctgccctggtgctgatggctatggtcaagcggaaggacagccggggaagggccaagcgatctggatctggagcaacaaacttctcactactcaaacaagcaggtgacgtggaggagaatcccgggcctactagtatggactggatttggcgcatccttttccttgtcggcgctgctaccggcgcgcattccttcgaacaagttcagcttcaacagcctggcgctgagctggtcaaacctggcgcttctgtgaagatgagctgcaaagccagcggctacgccttcagcagctactggatcaactggatgaagcagaaacccggccagggactcgaatggatcggccaaatctatcccggcgacggcgacaccaactacaacggcaagttcaagggcagagccacactgaccgccgatacctctagcagcacagcctacatgcagctgagcagcctgaccagcgaagatagcgccgtgtacttctgtgcccggtccatcacaacagtcgtgggctgcgctatggactattggggccagggaacaagcgtgaccgtgtctagtacgcgtgcctctacaaagggaccctccgtgtttcctctggctcccagcagcaagtctacaagcggaggaacagccgctctgggctgcctggtcaaggattactttcccgagcctgtgaccgtgtcctggaatagcggagcactgacaagcggcgtgcacacctttccagccgtgctgcaaagcagcggcctgtactctctgagcagcgtggtcacagtgcctagctctagcctgggcacccagacctacatctgcaatgtgaaccacaagcctagcaacaccaaggtggacaagagagtggaacccaagagctgtatccccgaggacacattcttcccaagccccgagagcagctgcgacgtgaagctggtggaaaagagcttcgagacagacaccaacctgaacttccagaacctgagcgtgatcggcttcagaatcctgctgctgaaagtggccggctttaacctgctgatgaccctgcggctgtggtccagc

SEQ ID NO: 4781 - DNA, 1989 bp, Artificial Sequence
  Synthetic Polynucloetide
atggccttaccagtgaccgccttgctcctgccgctggccttgctgctccacgccgccaggccgggcatgcggactgaagacctcccaaaggctgtggtgttcctggagcctcaatggtacagggtgctggagaaggacagtgtgactctgaagtgccagggagcctactcccctgaggacaattccacacagtggtttcacaatgagagcctcatctcaagccaggcctccagctacttcattgacgctgccacagtggacgacagtggagagtacaggtgccagacaaacctctccaccctcagtgacccggtgcagctagaagtccatatcggctggctgttgctccaggcccctcggtgggtgttcaaggaggaagaccctattcacctgaggtgtcacagctggaagaacactgctctgcataaggtcacatatttacagaatggcaaaggcaggaagtattttcatcataattctgacttctacattccaaaagccacactcaaagacagcggctcctacttctgcagggggcttgttgggagtaaaaatgtgtcttcagagactgtgaacatcaccatcactcaaggtttggcagtgtcaaccatctcatcattctttccacctggctaccaaggtaccggcggaggcggatctggcggcggaggtagcggtggcggaggatctgaattcgacatccagatgacacagagccctagcagcctgtctgccagcgtgggagacagagtgaccatcacatgcaaggccagcgaccacatcaacaactggctggcctggtatcagcagaagcctggacaggcccctaagctgctgatctacggcgctaccacactggaaacaggcgtgcccagcagattttctggcagcggctctggcaccgactacaccctgacaatatccagcctccagcctgaggacttcgccacctactactgtcagcagagctggaacaccccttggacattcggccagggcaccaagctggaaatcaagagaggcggaggcggaagtggaggcggaggatctggcggcggaggctctcaagttcagcttcaacagcctggcgctgagctggtcaaacctggcgcttctgtgaagatgagctgcaaagccagcggctacgccttcagcagctactggatcaactggatgaagcagaaacccggccagggactcgaatggatcggccaaatctatcccggcgacggcgacaccaactacaacggcaagttcaagggcagagccacactgaccgccgatacctctagcagcacagcctacatgcagctgagcagcctgaccagcgaagatagcgccgtgtacttctgtgcccggtccatcacaacagtcgtgggctgcgctatggactattggggccagggaacaagcgtgaccgtgtctagtacgcgtgacggtaacgaggagatgggaggaatcactcaaaccccttacaaagtctcaatttcaggaacaactgttatccttacatgtccccagtatcctggcagcgagatcctttggcagcataacgacaagaatatagggggagatgaagacgataagaatatcggatctgacgaggatcacttgagcctgaaagagttctccgagcttgaacaaagcggatattatgtgtgctatccgcgcgggtcaaagccggaagacgctaacttttacctttatctccgagccagagtgtgcgaaaattgcatggaaatggacgttatgtccgttgctacaatagttatcgtagatatatgcatcacgggtggactgcttctgctggtttattattggtccaagaatagaaaggccaaagctaaacccgtgaccagaggcgctggcgcaggcggaaggcaaaggggacaaaacaaagaacggccaccaccagtgccaaatccagattatgagcctattcggaaaggacagagggacctgtactctggcctgaatcagagaagaatc

SEQ ID NO: 4782 - DNA, 1884 bp, Artificial Sequence
  Synthetic Polynucloetide
atggccttaccagtgaccgccttgctcctgccgctggccttgctgctccacgccgccaggccgggcatgcggactgaagacctcccaaaggctgtggtgttcctggagcctcaatggtacagggtgctggagaaggacagtgtgactctgaagtgccagggagcctactcccctgaggacaattccacacagtggtttcacaatgagagcctcatctcaagccaggcctccagctacttcattgacgctgccacagtggacgacagtggagagtacaggtgccagacaaacctctccaccctcagtgacccggtgcagctagaagtccatatcggctggctgttgctccaggcccctcggtgggtgttcaaggaggaagaccctattcacctgaggtgtcacagctggaagaacactgctctgcataaggtcacatatttacagaatggcaaaggcaggaagtattttcatcataattctgacttctacattccaaaagccacactcaaagacagcggctcctacttctgcagggggcttgttgggagtaaaaatgtgtcttcagagactgtgaacatcaccatcactcaaggtttggcagtgtcaaccatctcatcattctttccacctggctaccaaggtaccggcggaggcggatctggcggcggaggtagcggtggcggaggatctgaattcgacatccagatgacacagagccctagcagcctgtctgccagcgtgggagacagagtgaccatcacatgcaaggccagcgaccacatcaacaactggctggcctggtatcagcagaagcctggacaggcccctaagctgctgatctacggcgctaccacactggaaacaggcgtgcccagcagattttctggcagcggctctggcaccgactacaccctgacaatatccagcctccagcctgaggacttcgccacctactactgtcagcagagctggaacaccccttggacattcggccagggcaccaagctggaaatcaagagaggcggaggcggaagtggaggcggaggatctggcggcggaggctctcaagttcagcttcaacagcctggcgctgagctggtcaaacctggcgcttctgtgaagatgagctgcaaagccagcggctacgccttcagcagctactggatcaactggatgaagcagaaacccggccagggactcgaatggatcggccaaatctatcccggcgacggcgacaccaactacaacggcaagttcaagggcagagccacactgaccgccgatacctctagcagcacagcctacatgcagctgagcagcctgaccagcgaagatagcgccgtgtacttctgtgcccggtccatcacaacagtcgtgggctgcgctatggactattggggccagggaacaagcgtgaccgtgtctagtacgcgtttcaagatccccatcgaggaactggaagatcgggtgttcgtgaactgcaacacctctatcacctgggtggaaggcaccgtgggaacactgctgagcgacatcaccagactggacctcggcaagcggattctggaccctcggggcatctacagatgcaacggcaccgacatctacaaggacaaagaaagcaccgtgcaggtccactacagaatgtgccagtcctgcgtggaactggaccctgctacagtggccggcatcatcgtgaccgatgtgatcgctactctgctgctggctctgggagtgttctgcttcgccggacacgaaacaggcagactgtctggcgctgccgatacacaggccctgctgagaaacgaccaagtgtatcagcccctgcgcgacagagatgatgcccagtattctcacctcggcggcaactgggctagaaacaag
